United States Patent Application Publication US 2004/0123343 A1 - sequence listing, part 16

SEQ ID NO: 43376 - DNA, 993 bp, Oryza sativa
  Clone ID: PAT_MRT4530_46539C.1
gcacgagggactaacaccgacacagttcgcgccaggttataactgacgcaaagcaacgagagatccgaatgaagcagccgcattcacgcgcccctcctgcctaacccaccaccgctttgctcctcctccacgcttcgtccgccgccgccgccgccgtcgccgtcgccggcgaagatgatgtctggcggtggctactccgccctcgacgaccccaaggcctccggatccgtcccggcggcgacggggccagatccgccgaccatcaagttcgccgactccaacctccagatcttcccgccgtccgaggccaagggcaagatctccggcggcggcggggacgagcaggacggtgctggtgacgggaggggccgggtacatcgggagccacaccgtgctgcagctgctcgccgcggggttccgcgtcgtcgtcgccgacagcctcgggaactcctccgagctcgccgtccgccgcgtcgccgcgctcgccggggacaaggcgcggaacctctccttacacaaggttgatattcgtgataagggtggactggaaaaggttttttcttcgaccagatttgatgctgtcgttcattttgctggtctgaaagctgtgggtgaaagtgtgcagaagccattgctttattatgaccataatgttgctgggacaataattcttctagaagttatggcagcccatggatgtaaaaagttggtgttttcatcgtcagctgcagtttatggatcacctaaaaactcaccctgcacagaagagtttcctctcactccacacaatccatatggcagaaccaagctcatagcagaggagatttgccgtgatatataccattcagattctgaatggagcataattttacttaggtacttcaatcctgttggagctcatcccagtggataccttggtgaagacccatgtggaattcctaacaacctcatgcccttcgtccagcaagttgctgtcgggaggagaccgtcact

SEQ ID NO: 43377 - DNA, 276 bp, Oryza sativa
  Clone ID: PAT_MRT4530_46540C.1
ggctgggtattccatatgcactggtgttaaaatgggggcgggaaaacaagactcttgctttttcggatggaaagactgagctttccatggagcatcagcagaacaacacaattgaaccggtaggtagtctgtgtaagtcgaacgtgaaacataccgtactataacgccgggattaaagagctggacaagagcttaggtgacagttcccttttttaaacattattgaaggaacgacctaggtcgaaatgaccggattgtgctataccacatgggaag

SEQ ID NO: 43378 - DNA, 785 bp, Oryza sativa
  unsure (1)..(785): unsure at all n locations
  Clone ID: PAT_MRT4530_46541C.1
atggcctgcggcgcccgcgcgggggccgccttcccctccccccgccccgcccgcgccccgtggcctcccgggcgcttccgggcccttgtccctgctccgcccgcgctgcggctagggctcctccgccttccccctcccatggcctccaccatcgactcacccgggagctcctccgacttcgccaagcgcatggagcgcgcgtggctcatctcccagcaaccaagacctaacccatgttcatcttgtcaatctgctgggcacgtggagtgcaagtggtgtaccggcacaggtttctttatcctcggcaacaacatgttgtgtgaagtaccctcaaaaaacacgaaatgtgtgatatgctctggaaagggcttcgcaacttgtgctgattgcaaaggaactgggtttcgtgccaagtggcttgaggatcctcctgtcgacaaatgaagcagaggaagtttaccataccgtaaaacttttctagttaaaattaatctttgctaattgtatgtacatctgttcatattcctctgtacgtacaagtgggactatgatatttttgcactgcctcagctatttccctatgctgataagtcttgaattttccttcacatcctttgtgtaacatacaaaattacaaagaggtaactcccctntcatatgtgtagacttttgattcaaccgtntgcagacgtgcagaaaaaaacaggattgtaattcccttttntcagcataagataataacaattatgtatgtaagaaggtaaaaaaaaaaaaaaaaaaaaaaa

SEQ ID NO: 43379 - DNA, 971 bp, Oryza sativa
  Clone ID: PAT_MRT4530_46542C.1
ggcgtacgcccacgccttcccccctctctctcctctcctctccgcgactccctccacccccgcgcgcgcgcgttttttttttttcgtaagggtttttggagggcggcgcggggatggcggacgcggggcacgacgagagcgggagcccgccgaggagcggcggggtgagggagcaggacaggttcctgcccatcgccaacatcagccgcatcatgaagaaggccgtcccggcgaacggcaagatcgccaaggacgccaaggagaccctgcaggagtgcgtctcggagttcatctccttcgtcaccagcgaggcgagcgacaaatgtcagaaggagaagcgcaagaccatcaacggggaagatctcctctttgcgatgggtacgcttggctttgaggagtacgttgatccgttgaagatctatttacacaagtacagagagatggagggtgatagtaagctgtcctcaaaggctggtgatggttcagtaaagaaggatacaattggtccgcacagtggcgctagtagctcaagtgcgcaagggatggttggggcttacacccaagggatgggttatatgcaacctcagagcaattttcacatattggtagttctgcaatcttttgcattcccatacatgtatcaggtggcacaaatctattgcaacaaatatgaagtgtcaagggagcaaatatgggatacccctcagataatggaactctccccatggataccgtacaccataaaccgtatttggaaagagactcatggtagccaggatattcgtattcagggaaggccgcgcgaggctgcaaatagcgctttggactggcaatggccatcaaagcactcatcgctggctagcaacttctatggtacacgagtggtgggaggccatcatgagtaccagagaagcaccaaaaaggacactacgcacgttaactttgctagtggcctgggagatctaggatga

SEQ ID NO: 43380 - DNA, 581 bp, Oryza sativa
  Clone ID: PAT_MRT4530_46543C.1
gatctcctctttgcgatgggtacgcttggctttgaggagtacgttgatccgttgaagatctatttacacaagtacagagagatggagggtgatagtaagctgtcctcaaaggctggtgatggttcagtaaagaaggatacaattggtccgcacagtggcgctagtagctcaagtgcgcaagggatggttggggcttacacccaagggatgggttatatgcaacctcagtatcataatggggacacctaaagatgaggacagtgaaaattttcagtaactggtgtcctctgtgagttattatccatctgttaaggaagaacccacattagggccatatttattagtagaagactaaagcacttgaagggtgttggtttagaaagggtgttaacagttggctgtggcgattgcttcacagatgtaaattgcttcataagtggtttaatgcttgtttttgcctgtatattcagagcaattttcacatattggtagttctgcaatcttttgcattcccatacatgtatcaggtggcacaaatctattgcaagtaccctagcattgaataatgctggttaacatat

SEQ ID NO: 43381 - DNA, 348 bp, Oryza sativa
  Clone ID: PAT_MRT4530_46544C.1
accgggaaaaggtgaaaacaaacccccaaatagcggaagcccatgggccggagatgggttacaaccattcaaagggcacacatttttttacataaacgggtcaacaaaaaaacagggggcgccatgtccgtaccccggcagggagtcccatccgatccggccattccatgcacaaatggggcctgccccgttttttaaggtttttttacagagccccacttgcagattccggggtggtttttttttaccggggccctccaggacgggaagaacttcctttggggctccaggacgcttttttgggggaccaccccattgtcgcccgattggtgtttcgcgagggggctg

SEQ ID NO: 43382 - DNA, 153 bp, Oryza sativa
  Clone ID: PAT_MRT4530_46545C.1
atgcccccggttggacacaaggtcctcaacatgaggccggaggccagagatatccagcacacgctcaaggaacatgtcatgcagacacatgagtggcaacaaaatgttgatgcacagctctccaacttcaacaacacgatgcagcaacaatag

SEQ ID NO: 43383 - DNA, 223 bp, Oryza sativa
  Clone ID: PAT_MRT4530_46546C.1
ggcagaggagaggagaggagaggagaggactcatccatcatcatcaatcaacgccatgacgagctcctcatctccttcccgagggcgctgagcaagatcgcttgcaatccgctgcaaaaagagctcgccgagtggcaagtcaaccctccctccggttcagtccgggtctcgatacctcaaaggggtatcaggcaccgagcgcgcaccttacccgggcatacac

SEQ ID NO: 43384 - DNA, 334 bp, Oryza sativa
  Clone ID: PAT_MRT4530_46547C.1
ttttggtcgtcttcagagcccaacaaactggcttgttggtgataggacacatgttccaatggccgaaaaattgtgatattactcttctaaaatgcggtgtcagaaacaaggctgaccgagttgaacagcaaattttaaggtatatatgggactaacgctccacatagctgaattaacatcgttgattggaatgggattatccagactgatacgacaggctatgtttgcttgaacaagatggcatgtgcatttactcataaagaggtttaattgctgctgaccttgttataaaactgattggagtacactgtgtgagcatggaatctcagcacga

SEQ ID NO: 43385 - DNA, 351 bp, Oryza sativa
  Clone ID: PAT_MRT4530_46548C.1
atggggatggcggcggcggcgagggaggcggcgcgagcggcgagcgagatgctggaagacggtgagcggcaaaagagcgcggcaggcgggtggcgcggagcaggcgggcagatgcgggcgcggcagccgggatggagcgggcgcggtagcacgtggggagcacgggagcgacggcgggtgagcgtgggagcggaacagcggcggttgagcgcgacggcggcgggtggagcgacggtgggcgagcgtgggagtggagtggcggcggtcgagcgcggcgacaggcgccgggagcgcgggagcagagcggcggcgtcaggcgagagcggcagtggtcggcgggtgccgggatga

SEQ ID NO: 43386 - DNA, 641 bp, Oryza sativa
  Clone ID: PAT_MRT4530_46549C.1
atggccggcgtcgaggtttctgtttccgtctcccctaccaagaagagaaaaggggagtgttccgccctggacggaggagaggacgatgctcttgctcctccagcaaagaagaagaagatgtggctgctgccgcaggaggaggtggactggatcctcgcccagtcgaacgagcccgtccccaccgagttccgggagctgaagcgcgccaacccttcgctggaggaggaggccaagttcgccaagttccaggcttgggttcgcggcgagtacgctcggaaaggattcgtggaggtggactacgactacttcggcgagagggcggaggtgttcaggctgaacgacgaggcacgggaggaggtgatgggacactgggatcatccttccgacaccgacgatgatgacgacgaagactggaagcttttcattagcgcaattaggaggaccttcgtctgaatcgaatatcaaacccatcatcatcactgtttctcttatcttattatttatcttgtaagaacaatttgatttacggatgcaacagtttacctatgtatgatatctattcacagaaatttaagtgtgttgtgttgatcgacatcattttttattgttaaaaaaaaaaaaaaaaaaaaaaaaaaaaaaaa

SEQ ID NO: 43387 - DNA, 2649 bp, Oryza sativa
  Clone ID: PAT_MRT4530_4654C.1
atgtcggctcctgtgggtgatcggtcccgcccgccacactggcgtgggcgacggctctcgccgtcccctccgtgcaaccgcggccggcagctcgtcgtgcaacaggttgtcaaggaagggggctctgtcacctaccccacgctcactcgttccaattactctgattgggcggtgttgatgcgggtgaacctacaggctcagggcctatgggaagccgtcgataccggcgacgtgccctttcacgaagatcgtcaggcactttcggctattcttcgagccgtgccggctgagatgctccggccgcttgcggagaaggacaatgccaaggatgcctgggatgcgctcaagtatcgtcagatggccttgtcaattgaaacattgattgatctcacgactttatccatcgaggacctgactggccggctcctcgccgttgacgaccatccggattccaacggggaagacgtgggccaggctctgctcggggaaaaggaggcacctgctcgcaacaccaagcagaccgggcagtcgtctcgtgacactgaaccacagcaggcttgtggcgatgaggagcccacgttgctgatggcacaggtctgcgagctcgcttccgtcgacgaacctgagctgaccaatggtgaagtgcagctgaacgaggaacgcgcgctcgtttctctccgcgacgagggggagccggtcgaccccgactggatccttgacacgggcgcctccaaccacatgactggggcgcgggacgccttctccaacctcgacaccaccgtgcgcggcacggtcaagttcggcgacgcctcgcgcgtgcggatcgagggacgtggcaccgtgctgttcgcctgcaagaacggcgaccactgcgcgctcaccggtgtctactacatccccaagctccccaacaacatggtcagtcttggccaactcgacgaggtcgggtgcaagacggtgattgaggacggaatcctcaccctgcgcgaccaacggcggcgtccgctgtgtcgcgttcgtcgcggaacggggcgcctatatgtgctccaggtcaacatcgcccagccggtctccctcgcggcgaaaagcgtggaagacgcttggatctggcatgccaggttcgggcacctcaatttcgacgctctgcacacgctcgccaaccacgggatggcgcgtggcctccccgaaatggaacgcgttcgacagagcaaggctcccgcgacaatcaagcgcttcaaggtaggagttgaggttgagactggcgccaagctccgtgttctccgcacggaccgcggcggggaattcacctccattgagttcgggctgtactgcgcgaacgagggcgtcgcgtgccagctcatagctccctactctccgcagcaaaatggcgtcgtggaacaccgcaaccaaactgtcgtggccatggcaaggtgcatgatgaaggcgaagtccatgcccggagaattctggggtgaggcgacgttcggctgcgtcgcttacgtcaaagaggtaaggccacacctcaagaaactggatgaccgcagcaaagccatggtgtttcttggctatgaaccaggcacaaaggggtgcagggtgttcgatccagcggacaagcgtgtcgtcgtcacgcgcgatgtcgtgtttgatgaaacgacatcatggccatggacggacaccgaagaagccagaagggtgtcaccgagcgacatgttcactgtccactatgaggtggccagcagctccatcccggtgggcccgctcgtcgtcaacgacgtcacgccaccggcatctgctgtgcctacaccgccttccccacgaacgccggcgtcgcctccaccctcaccaagctcaccagtggtcgagttcgtctcgctgccggatgccacaccggatggcgatgatgatgacggcgcaccgcgtcgctaccgtacggtggccaacatcctcggcacaacggcgccggtcgagctcgactccgacgagctgtacctggtggccgctgaggagcccagcaacttctccgaagctgagcacgacgatctctggcgtcaagcgatgcttgaggagctcaactcgattgaggagaacaacacctggatgctcacggatctcccggtcagcaagcgccccatcgggttgaagtgggtcttcaagctgaaaaaggacgagacgggcgctgtcgttaaacacaaggcacggctcgtcgctaagggctatgtccagcgccaggggattgatttcgacgaagtctttgcccctgttgctcggatggaatcggtgagattgcttctcgctgtcgcggctcacttcgggtgggcggtgcatcatatggacgtcaaatcggcattcttgaacggtgaactggaggaggaggtgtatgtctcgcagccgccgggttttgtcgatgacacgcacccccgcaaggtcatgcgcctgaatcgggcgctctacggtcttcgtcaggctccgcgggcatggaacgcgaagctggatgccagccttcagcaactaggtttcaagcggagcaataccgagcatgctgtgtacacgcgtggcgaagatagctcgcgcctcatcgtcggcgtctacgtcgacgatctcgtcatcaccggcgcacgctctgaagaaattaataacttcaagggataa

SEQ ID NO: 43388 - DNA, 384 bp, Oryza sativa
  Clone ID: PAT_MRT4530_46550C.1
cgacccacgcgttcgtaagaaccccgactaatacgacccccaccgctactcaccacgcaaggaggaggacacggcagctggcgccttgtagtacatgtcctttggaggcggcaggcacagatctctcagagagccacttgcctacctacagatcaaggccatatggactcaccctgttaagcactttgaggttgagctgttctacgccttccacgggaccaactgggaagccattgtcggtcgcaataacgactaggtgcattgtctactttcaacgggcgaaggctcacggcttcaaccaagatgacgacgtcaaacttaataaggccttcttttgctcggcataacgcttttcttcactactctacctttgtgacaactttt

SEQ ID NO: 43389 - DNA, 746 bp, Oryza sativa
  Clone ID: PAT_MRT4530_46551C.1
acactcctaagggcgattggtactctcgaggccggccgggatcacttcagcttcttgctcatccaatcctacacgagaacctgtgtctgatctagcggcggccatggctagagttggcatcctgctcgctgcagctctgctcctgggcctcgtctcggcgtcgcaggccatcgaagggaccgccaccttctacaccgtttacaccccgtcggcgtgctacgggttccaggaccaggggacgatgatcgcggcggcgagcgacgggctgtgggacggcgggcgggcgtgcgggaggatgtacacggtgcgttgcgtcaggggcaccaacgccgtgcccaacccctgcaacggcggcacggtcaccgtcaagatcgtcgaccgctgcccgtcgccgggttgcacctccaccctcgacctctccagggaggccttcgccgccatcggcaacctcgacgccggcaggatcgtcatcgactacaaccaggtctgaatggttcacgcttcacaggttcaggaatgcgtcgatctgtataaataagctcgtcacatttgcagcgagtacaagtgtcgagaataaagcgtgatgctgtcttgtacgtaaaaaccagagcattatatttgcagagtgcgagctcatcccgcactctgtatagtgatagtctaaagatcttcttgtctttacccccaggggcttgtattttccccttccatattcatgaaaagactactgcggctgtttttttgtc

SEQ ID NO: 43390 - DNA, 429 bp, Oryza sativa
  Clone ID: PAT_MRT4530_46552C.1
atggctagagttggcatcctgctcgctgcagctctgctcctgggcctcgtctcggcgtcgcaggccatcgaagggaccgccaccttctacaccgtttacacccgtacatctccaaactgctccttaattctgaatgatgtgtttgcgtcggcgtgctacgggttccaggaccaggggacgatgatcgcggcggcgagcgacgggctgtgggacggcgggcgggcgtgcgggaggatgtacacggtgcgttgcgtcaggggcaccaacgccgtgcccaacccctgcaacggcggcacggtcaccgtcaagatcgtcgaccgctgcccgtcgccgggttgcacctccaccctcgacctctccagggaggccttcgccgccatcggcaacctcgacgccggcaggatcgtcatcgactacaaccaggtctga

SEQ ID NO: 43391 - DNA, 508 bp, Oryza sativa
  Clone ID: PAT_MRT4530_46553C.1
tattggaatgttgaatccctctgtgtgtttctattcataatgacagaactcccagagtgcgaaatgttctataaccaaatgctggttccctcgttataaattgagaggtagaatattgtcatgagcaacaattgctttgtggtttgctcagaaatctacccgaagagcatatacaatgttcattaactcccatggcttatgaacttatctctatccttgaatataacatacctgtttgtcaccttcgttatgcctgtgattcttgctgatcttgtctggacactaatttcttcttagagaaaattctctttcttttaggttacataactgtaggtgcaacaagcaactatttataactggctacaatgtaaggacttactattatccgtggttgtcttacctatcagttacaacttgtttcagatcagttttaccagctgaaagtaccttggctcctctgtacgacgactcgtgacgaactatctacatgataaaaaaaaaaaaaaaa

SEQ ID NO: 43392 - DNA, 1326 bp, Oryza sativa
  Clone ID: PAT_MRT4530_46554C.1
atgaggatgagagttcatggaacaggtgccactgatttaggagccgagagagagggagagaaaagggcgagcggggcgccgggcttccagtggccaaagtgcggcgacgtcggcggcatattgtgttcccggtcgacgcgcactcggggaggccgcggaggtcggtttccaaagtcggtttggaggggagaagggagacatggctatggcgacggcgacgtgagaaagagaacgacggcgccggcttcgttctcccattggtcggcgacggcggcgcgtgcacgtggcggccgcagaggagttaggcggcgaggaaagaggtgcacggcacggcgtcggcttggcgtggtcggcaaggcggcagcggcggtggcatgattgtgggcggcggtgataaagccgcttacggcagttgcggcggcgtcgggcgcgcgcccacaaaggacgaaggggcggctcccccgtggaccaagtccacggaggcacgggctagcgcaccacgtggcgcacacgtggcgccgacggagcaccgacgtggcggccacgtatgcggacacacgggtagcccggatggagaccgaggccgatccgatggcccagatcgaccgcggctgggaccaatgggaggcggcagtcggctgtccgatacagccggcagtagcgcgggcgcggagcgcggctacggcggcctggccggacggccaccggcggcggcagcgcacggccaccggctcacctcgcatggtgaatgggactccgacgatgatctgcggaggaggagtggcgaccgaggatctcctcgtccttgcggagccgagggaggcgatggcatgggtcggcgtggacgggagcggcggcgaaaggcggtcggaggcggtaggcattgatgtagctcgggtcggcggtggcggtgggatttcagcgacggttaggggaagaaaggtgagggccggggtgcggtgtggagcggtgacgccagtggtggcgatggcgagagcggtggctagaggcggccggagcttgccggcgacggcggagagagggagcgatgcggggaaatggtttctatgtgcggggagcacggggaaaggggaaaaagggatgagggaagttgaacccatggcaattaaggaccggttctcgggaatccctagaagacttaccgcgcttaccataagcaagaatgggcacaataacatgccattgggttgtgccttgtgtgtacagttgtgcacctttggccagagtaaaactattcgaatagtcatgcccgcggttatgggcgatcaactagccatcgtgattagactcaattctattaattaa

SEQ ID NO: 43393 - DNA, 474 bp, Oryza sativa
  Clone ID: PAT_MRT4530_46555C.1
atgtcggcgctcgtgctcctcgtcgccacccacagtgccgtcgcggtgtacaacctagtgcaacgagctcggtgcgcagcggcagtgttcatgccagcggcgttgcggaggggcagcggcgttgcggaggggcagcggcgcggcagtgctcctccagctcatctttctcgtcgtcctcgactcccactctcctactcacatgcggcggcgttgaggaggggcggcggcgtggcggtgctcctccggctcttcttcctcgccaacctccactcccgccggcggtggcggcgccgagctagctgtggcatgctgtacaccccggcggcgctgtgggtggcgatgaggagcacgagagccgatgtcgatggggtgcaggagatgcgtcgacagggctggagagatgaagaggagggagagactgacgagtggtccccatgccatttttcaccttgggttgccactttgggcatatga

SEQ ID NO: 43394 - DNA, 618 bp, Oryza sativa
  Clone ID: PAT_MRT4530_46556C.1
gtccagcggtcaacgtcgccgtccgacgcaaatgggaccgcgctcgagaggaacgcgcaccgcgtcttctccgcggggcgcggggaggcggaaagaaacaacgaggccaccacgcccacgcgacgcgcccacccacttctctttcgtgtcgtgcctcgtgcgttcaacgagccggtcgttcccccgcggtggtgtgcctccctccgcacggtcgtaggcccagaccaaacggcggaacgggagattccactgccgatgctgacggtggctggactctcaaggtccagggtcaacgtcatggcgacgatatgcgaaggagtactgaaggaccgcgcttttgataggaacgtgcaccgcgtcttctccgcggggaaggtggtggaaacgacgagaccacccaccactgcgctgcacggtctgcacccccacgcgcacacgttgcgtgttctggacttcccgtcgttctctgcgatgggaaaggccggaaagtgaacggcgcatcacggtgacgggcctccactccgcacggtgtgccgggaccaacccgagcgcctcgcagcgaggcccggtccaaccaaccggtggcttgagtcgttcgtgcatcgtgcattggaataa

SEQ ID NO: 43395 - DNA, 445 bp, Oryza sativa
  Clone ID: PAT_MRT4530_46557C.1
ccgcctcgcgccgtcgttttggccgtcgccgctgcctcctctcgccgccgtcgggtgcgcgtggaagaggggaagctcggccgccccctccccgccgtcgccggtcaccggagagtcgccgccgccgacgaccgagtcgccaccgccgcacaagctcgccgccggccgtcatccgtcgtcgttcgtcgcgttgggtgccagactgagaagcggcgagaagtccgtgggggtcgctggggagtccatgcctctggttatatttatagagggggtgattatgatccaggaatggtgcactgtggtgagttgtgttgtgcgaagggtattgtcacgatttccccctttgcaatgccgtggtggtatttcggggcatggcaacatgtgtggaatcgtgtcttgtgggtacagtggtacatctctggccagagtaaaactatttgaatag

SEQ ID NO: 43396 - DNA, 243 bp, Oryza sativa
  Clone ID: PAT_MRT4530_46558C.1
atgacttcaagccgctccgacaacttcatctacatcggccccaatgcaggagatccaacctcaattccgatgatgtggactcaagtcggatccatcatctttccggtctactctgtgataccgatctcgtctggcccaatctctgttaggaacgagaacgtcgcagctacgactttacggaaaaggcaaatttatgtcatcagtgcctccctccgactgtacggaaaaggcaaatttatgtaa

SEQ ID NO: 43397 - DNA, 525 bp, Oryza sativa
  unsure (1)..(525): unsure at all n locations
  Clone ID: PAT_MRT4530_46559C.1
ctctgcttacaggcacggaggccatgtttgctgacctcggccatttcaacatcagggcaattcagctcagcttcacttgcgtcctcttcccctcggtcgcgctgtgctacatgggccaggcagcctacctgcgcaaattcccggagaatgtcggcgacaccttctacagatccatcccagcgccgctgttctggccggtgttcgtggtggcgatcatgggggcgatcatcgcgagccaggcgatgctgtcgggggcgttcgccatcctgtccaaggcgctgtcgctgggttgcttcccgcgggttgaggtggtgcacacgtcgaacaagtacgaggggcaggtgtacatcccggaggtgaacttcctcatcggcgccgccagcgtcgccgtcacgctggcgttccagaccacggcgaacatcggcaacgcctacggcatctgcgtcgtcacggtgttctccatcaccacccacctnatgacggtggtgatgctgctcatctggaaggtgaagctaccgttcatcg

SEQ ID NO: 43398 - DNA, 298 bp, Oryza sativa
  Clone ID: PAT_MRT4530_4655C.1
gaaataattcacacgattgataaatttatttttgaaatttgataacaatgttacaaatgtggcgtgcatgcgatcaatgggtgggaagcaagtatcacaattaattaattgaaatacaaaagtatgcacgatttaatcgacggtggtgggtatccaaaaaaaatttagcgtaaggcctatatttaagaaagaaatgaggaattgtatgtatgaagttgaatgaaaaaatgatttataatgtaaaattgagagttgggaatttttgaaatcgaaaattgagaaaaacaatgtttccaaa

SEQ ID NO: 43399 - DNA, 588 bp, Oryza sativa
  Clone ID: PAT_MRT4530_46560C.1
ggaaaaggaatcgcccttggaaatttaacaacaaaagggaaaggaaaaaaggggccataacccacaacgggtttgtaaacccgggctaactaaaaaggctcaaaaaagtttttcatcaaaggaaaaagctttaagcaacttaaactaatcacattggggcccaagggcagattaactttttgagcctcctaacagggggggctacaaaaagggcccacccgatcgaaagcattttcctttagttatgggccggggaaaaaaatattaaaagggggctgaacgtttcgagtttatccccagtttttaacacccaaaatgataattggtaaaaaaattaacaccagcgggggaggggggggtagtttaaaacaaaagcctttttgcaggggttttccacccactccagggggacccttttgggtttttcgagggggaaaccaaaagcacgggcccaaaagagcggggatcctatgcctatgcccctcaaaactccgaaaaggacggggtaatacccaccttcaaataatccaaaggggttcaacaaaacctccctgggagcataaacattaggccatgggtttttgacct

SEQ ID NO: 43400 - DNA, 702 bp, Oryza sativa
  Clone ID: PAT_MRT4530_46561C.1
atggcaggaggaggaaggaggcgagcataccttaccggcgcgccaccacggcgaggcgagctcgccggcgggggggagatccgacaggcggagggaaagccggaggggaatctggaggcggtggtggtggtgatggtgcgggcaaaaggagaggaggagctcgcggaaagtgggggaatcggaaaggggaggggggagaggagggtagcaacggaaaaaggcccaggccgacgaggtgaggagaggaggaggcggttttgttcgaggagagtggtgttggcttgtgctgctcgctcggagaggagaaaggagggggaggcgacggtggaggtggaggtggaggtgggatcgggtgcggcacgggattccctgtggccggtctcccgccgtccgctaggacgatgtggtggggcgcagaagatcccgctggcgctttggggatttattctcctgtcgcctttaaaatttgtttttcgaaagctttttgcggatttatttcggcgcatcggggtagcaacggttctttttttccccctgtgttctgtgttcccaggcgtgctaccgcagtaccgagtacgcttcgagcctcgatatggaggggatgtatataaggcgccgttgctacggactacggtagcttcatcgagacggtccgtttctggatctaatggttccttgacctcgtctattttgatcgtatag

SEQ ID NO: 43401 - DNA, 365 bp, Oryza sativa
  Clone ID: PAT_MRT4530_46562C.1
tgtttttgtgggtgctggtggttcttgggaaggcagggcaactaatgatgagagagcggataaacattctaaagacgaaattgaggaaagtagagatactatggacactgatgcgacagctgatgatgacatagatcatgtaaatgaagacaatgatagtgatgtgccaaaatgcatacctatgcataatatgagagtgaagactatcttgaattgtcaggatctatctaaggcatactatcttaccgatttgcctattaacacagaatctgaagctagaagaactatatccaggcacaagcaagctcgtgaaaacaatggaacttggaaatgcacacttcaacttctgggcaaaattcatcact

SEQ ID NO: 43402 - DNA, 1401 bp, Oryza sativa
  Clone ID: PAT_MRT4530_46563C.1
cagcaacaatcccccacctgcgcgtgtgcgtgtctgtttcggtgcttcctcctcctcctcgccatggcgctcctcctcctccgacgcggcggcggcttcgctgcggccacggtcctcgcggtcgtcgtcgtcgcgctcgtcctctcctgcggtggtggcgcggaggcggccgtgagggacctcagggtcgggtactacgccgagacgtgccccgacgccgaggccgtcgtccgcgacaccatggcccgggcacgcgcgcacgaggcccgcagcgtcgcgtccgtcatgcgcctccagttccacgactgcttcgtcaacgggtgcgacgggtcggtgctgatggacgcaacgccgacgatggcgggggagaaggaggcgctctccaacatcaactcgctccgctccttcgacgtcgtcgacgagatcaaggaggcgctggaggagcgctgccctggcgtcgtctcctgcgccgacatcatcgtcatggccgcccgcgacgccgtcgccctgacaggtgggcccttctgggacgtgaggcttgggcgcgaggacagcctgacggcgagccaggaggactcggacaacatcatgccgagcccacgcgccaacgccaccaccctcatcaagctcttcgccggctacaacctcaccgtcaccgacctcgtcgcgctctccggctcgcactccatcggcgaggcccgctgcttctccatcgtcttccgcctctacaaccagtccggctccggcaggcccgaccccaacatggaccccgcctaccgcgcggggctcgactcgctctgcccccgcggcggcgacgagaacgtcaccggaggcatggacgccaccccgctcgtcttcgacaaccagtacttcaaggacctcgtccgcctccgcggcttcctcaactccgaccagacgctcttctccgacaacgccgggacccggctcgccgtgaggaaattcggcgaggaccagggcgccttcttcagggccttcgtcgaagggatgatcaagatgggggagctgcagaaccccaggaagggagagatacgacgcaactgccgtgtcgccaatgccccggcgccgccgcctgtggaggcggaggtggcggcgacgtccaaggcggtggtcctggtggacttctgacgaacgagctgctagtcccctgactccccagctgttggtgttcgagaggagctgctcagatatgagagtgttgtggctattcatatatgagtttttggtccgatggcaggtttgcacctacctgtaagcttgtgatttcagggttacccgcttattgccgattattgaatggtgataaataactgagaaatcgagctaatgatcattgcctgatgtggtttggaatctcaaaaaaaaaaaaaaaaaaaaaaaaaa

SEQ ID NO: 43403 - DNA, 485 bp, Oryza sativa
  Clone ID: PAT_MRT4530_46564C.1
acccgctccccctcccactgacaatgtgggcaaaaaagaaaaggaaaagggttccaaggagagaagggattacctatgggccaatagatgaaagggataggaaaagatttgattatcttaatgacaagatttggaaaaatgatatcatctgtgtgaatatgctttggcttaaacgagcaccttattttcgtttttgtagactttttagggatcgtggcttgcttgtggatactatatatatgtctgttgaagagcaagttgctatgttcttacatacaatcgggcacaatgttagaaacaaggtagttggcactaattttgataggtccggtgaaactgttagccgatatttccacgtagtccttcgtgctattggtgacatgagaaaggaattaataaggtcaccatcaacaacgactccatcaaaaattctagggaacccaaggtgggatccttattttaagaattgttgatctgaactatcg

SEQ ID NO: 43404 - DNA, 1091 bp, Oryza sativa
  Clone ID: PAT_MRT4530_46565C.1
ctcttgttccgtccgcccccaacctcccccacccaattcgatcgcctcccccacccagatctcgccgcccgcccgcccgcccgccatgccgtcggcgaccgaccccccggcggcgctcccgctaaccctcgacctcgacgacttcaagggggacttctcgttcgacgcgctgttcgggaccctggtggacgagctgctgccggagttccgcggggacgacgcgcccggggcgcccccgcccccgccgcccgtgctcggggccgcgccccccgtcttccccgccgtcgacgagcttctggggctcttcaagcactcatgcaaggagctcgtcgatctccgccgccagattgacaagaggctccagaatctcaagaaggaggtggccacgcaggacgccaagcatcgcaagacgctcggggagcttgagaaaggtgtggatggtttatttgatagctttgctaggttggattcccgtatttctagtgttggccaaacagctgccaaaattggtgatcatttacagagtgcagaatcccagagggaaactgctagtcagacaatagatctcatcaagtatctgatggagttcaacagcacaccaggggatcttatggaactttctcctttattttctgatgacagtcgtgttgctgaggcagcttcaattgcacttattttgcgttcatttgccgaggaggatgttggtagacatggtgtaccatcagctgttggttctgctaatgcaagtcgtggtttggaggttgctgttgcaaatcttcaagagtattgtaatgaattggagaatagattgttagctcggtttgatactgcatcacagaggcgggagatgtctacgatggcagaatgtgctaaaattttgtcacagttgtgccgcggaaccagtgctatgcaacattatgttgcaacacggccaatgtttattgatgtggatattatgagcattgatattcaagttgttcttggtgaggaggggccacaagctgaccacatttgtattgcagatggcctctctgtattgtacaaggaaattgcagatactgtgaggagagaagcaactacaataatgggct

SEQ ID NO: 43405 - DNA, 399 bp, Oryza sativa
  Clone ID: PAT_MRT4530_46566C.1
atgccgtcggcgaccgaccccccggcggcgctcccgctaaccctcgacctcgacgacttcaaggtgagaacaactcgcccccgtccttccctcctgcgatttggtgcggcggcggcggcgtctgagggggacttctcgttcgacgcgctgttcgggaccctggtggacgagctgctgccggagttccgcggggacgacgcgcccggggcgcccccgcccccgccgcccgtgctcggggccgcgccccccgtcttccccgccgtcgacgagcttctggggctcttcaagcactcatgcaaggagctcgtcgatctccgccgccagattgacaagaggctccagaatctcaagaaggaggtggccacgcaggacgccaagcatcgcaagacgctcggggag

SEQ ID NO: 43406 - DNA, 174 bp, Oryza sativa
  Clone ID: PAT_MRT4530_46567C.1
atgggtcaatcactgcctgccatcatggtggacggccggcgccggcgacggcgacccgataaagctgaagtagtcgagtgggctgttggcctagggccaatgggcatctggtcaggccaccagaagatgggaattgggccgatcctgaaacataatgggcctaggaggccataa

SEQ ID NO: 43407 - DNA, 3238 bp, Oryza sativa
  Clone ID: PAT_MRT4530_46568C.1
gtggatccccgggctgaggaattcggcacgaggatgcaggtagcgacgggcggtcgagcggcgatcgcaggtcggcggcgcgcggccgccggcttggtcttcctcagcgcgtcgggcgcaggcggcggggtccctccagcttcctccgatggcgggcgacagtgactgcctgttttagcggcgtgcgtcgggctcggcggggccatccactacccggatccggcggcggcggccgtccctcgcccggccccgcacagatccactaggggctgcgggaggagagcccaagggcagactcggcgatggctggcggacgactgtcgtgcaccgggtggagtccggtggtgggcggcgggcggcgcagccgctcacttctttctgcctgctgccgtcatcgtggttgtcctccaccagctcgccgtgtggctgccgccttctccccacaccgccgccgatggacgtcgactccgactcggccgccgggggcaagcccacccagatggacctcgaggactaggtttgacagctggtttcatattttaagataccactcagtcaaattcttgtggtaaatattgtcaatttgtcattgctcccatcatctactactgctactactacatcattagcttcttgtatctgaaattgaaacacatttttcaccttccacattgggatatctagaaaccaataggattttttattcataataatgtgttcttgaggggtgcatatctagagatgcaagtgaggactggagttccttagttttgagatgcatgaatattttctcgagaagtacagtaattttgcttttgcatttgtattttcttcatcattgagttctcccaggagctttttctacttgagatttagctcttgttctgaaactttgggatcaacagagcattttaagtggaattgttctcgtgattttgatgccagtctattattgtagacattttgtgtctggcgatggacaaagctctgagcatgagtttataaacagaccactcaaagtggaataagtaatttaagaagaaaagatagggaaaagataagaaatagacttgaaacaaacacatatattcatgtcttctcgattctaatcgaggatgaccaagcgagcacgacatctgtaacgccctttcgcacgagctttaggaccgtatagacagcctgcagcacgccgaacgcgatggcgatgatggcaagcacagaagcgacggcgacgcaggggttgcggcagtgctcgcgcagcatccacgctgtccattgggatggccgactccggtagcgttggtccagcgccacacactctttctgcaggtagttgcggctagggtcgtccaggttgaagttgaccccgtcgcagagagcggcgaattttgtggcacaatcttcgtcgttgcgcataaggtgatcggtgacgcgtctccgggccagcagctcgacgtcttccttggtgcacgccagctgggacatgagcacgcagtacgccgtgacacgctgcgggatcatgtcagggttgctctgctccagcccgattaggttgcctagcatgcaccatgtctcgccatcgacgtacaggctgggaaattcgagtcgtattccgccacaccgcccgatcagcttcacatccaggattgagagagcaccgcatgcctcgccgccggggccctcggcgatggaaatcaggtcgacgcctgtgagatcgacgcgggccttttcatattgcttggcccggcgccaacgaaggaaacggcgcacccccttcttctctggtggcttctcattcctgtgctcggtcgccgaggcgcccgtgatgacgtcgatcgctgtttcgtcctgctgggggtggttccccgatgacgcctcgccgtgggaatgggcggcgcgcgtccctgctgctgtctgctcgtgctgggtagtcgaggcatccgtgatgactggcaccatctcgatcgctgtttcgttctgccgggtgatgttcgccgatgacgcctcgatgcgggaacgagcagcgtgcggctccgtcggaactgctgcgccggtagccacctggtgtgtgtgtgtcagcgcccgcggcttctggcatcctatcaggagtatgtgcagcaggtgcaggagatgaatgggttccggtgtcacgttccaccgctgtccgatggcgtacccgtaccagttgagcacctctcgttcgatgtacgagcagaacacctctaccagaggtttaccagtcacgctccaacctattattccgttgatcttgtctaggatgaagaacggtatctgattctcagcgaggtagatgatgtcgcgttgtacgttaacgtcgatgtcttccctgtatcgtccgctacctcctcctcctcctaccgctgctgtcctatcctgtcgaactacgaacttgtgaaggatgtagcagccgtcctcgagcagcatgctcaagaaatcctccgttgtcatatgcttttcgtttttatttaaagagttgaagtcgtagtagcactcgggtgaattatccacgtatctactcagctcgttcatccattcgctcttaatttccgatgaagatagatcgccgctgcgcctctgcgcctccttgcgcaggatgtcgttgaggcattctttcttctccacgttcccccggagaggcatattcctgtggtagggcccgatggagacgcattgcggtttatattggcgtgggacgacgattcttccgatgaagtaggtgattccaccacttcctcgggggacatctctagtacggctgctgctaccttcctgatgtccgtacaggtctctgctgcggccagacaggacctcgagttcgagccgaatgaagaggtggacgatgatgacaacggcgacgacgcaggtcagcgacgggcggtcgagcggcgatcgcaggtcggcggcgcgcggccgccggcttgggcttcctggcacgtcgggcggcagccggcggggtccctccagcttcctccgacggcgggcgacagtgacggccacgccgagcatgtcgtctggaggccttgtcgctgacccgagtccggaaggtcctattgctggcctctttggtgattccagctctgcatatcgcctgacggtcaggtcggcggaggcaggtgccttccacctggtgcacgttcgtgggaaccacctgagaacatcgtcaacagtcttccttttgcatgtcgacattgttctatcgccagagtcaattgtttaa

SEQ ID NO: 43408 - DNA, 186 bp, Oryza sativa
  Clone ID: PAT_MRT4530_46569C.1
atggggaaggtgcgcgctagcggcgcatacgcgccagctaggcgccccccaatgttacggcgcgtctccgccgactactgggcctcctctgccgccagccgggcacatcgcacactagttagtgtctcctcacctcctaactacccgcgcacctccaccacaaccaccgctaccaagaccaaatga

SEQ ID NO: 43409 - DNA, 144 bp, Oryza sativa
  Clone ID: PAT_MRT4530_4656C.1
atgaggacccacctgtcaaccaccctgctgaagctggaggcctgctgggccggcccaggttcggctgaaccatggcggtgccctgtcagcgccggttatacggtcatgataggttttcgtaaggaactcgacaacccggggtga

SEQ ID NO: 43410 - DNA, 687 bp, Oryza sativa
  Clone ID: PAT_MRT4530_46570C.1
atggggccgaggacgtgcggcgtgcccgactggcgcgcgatggtcaagaatgaccagtctgtgaccggcctgacaccggtcacgtctgactggacagacaaccgtgctcccatgtcgcatctgcctccggcggagtggagggctgtcccccgtgtcaggcgagggacggcgctggccccgctcaaggaaaagctgtggtttagcttcgaggcgaaggcacgggtcgagttccggtcaagattttggaccattggatccataccaagattcgtgcatcggcttctctcctccaactccggcgggctccccttcttctccggcgccggtgacaccccaactccagcggagggatggccatgggcggcggaggaccggcggtgggcggtggactccggcgggcggcgaggcggcggcgccggtggtggcggatccggtggcggggagccgccggagacggggaagacggcggggcgggggcacctcaccgtcgccacctcaaggagaggaggggagggggagagggggagggggctcgccggcgccgttgaccccttccggccagccggcgaggcgggcggcggcgcggtggggcggtggcggcgatggtggcgggggatcatgcgagtggtggcggcgtgcgatctgaatcgggggaggaggagaggagttagggttaaaatggattag

SEQ ID NO: 43411 - DNA, 973 bp, Oryza sativa
  Clone ID: PAT_MRT4530_46571C.1
ggcaggcagacaggcaggccagagcggcgtgagtgagctatacaggaaggcagttagcccgtggccagcctaagaaggtgatagcatgggacttaatgggaaatggaggaaggccatgccatacatggcgatggtcttcctacagttcggcttcgccgggctgttcctcatctccgtcgcgtcgctacggcaaggcatgagccactacgtgctcgtcgtataccggaatgccgtcgccgccgtcgtcatggcaccattcgcgctctggttcgagaggaaaacaaggcccaaaatgacgctttctgtgtttttcaagattatggctctgggactactcgagcctgtgcttgaccaaaacttcttctatatgggagccaagaacacgtcggcgagcttctcatcagcactcaccaacatattacctgctgtaacgtttgtaaatgccatcatactgaggtgaatcgtcagatttgtattatcacactagtatttgtggcccatacaccacactagtcaccatgcatgtctagttagccctgatacataatgcttcaataaattcatctacatgtcttttgcatgaagtccaggcaaaattttaagcagggtggtgtttatgcatctgggactaccgtgtggaagggctaggcaacagtgtgctttacaatctaatcctctcctaacgatttttctggtgacctcattgattttagcacatgtagctagcccgagtaaaacacaattaccactatgcaaacagtccagatcatggaagtagagagataggctagcatatatgtacttgtgacaccacgggttaagatcacaggcaaaataacctggagagatgagttataccccgttttgagaattgagataggtgtttcatccaattttagcatcgacgaacgaaatttgaggagtagattgtttttcttgaaagcatagtaaccacgggccaactttttatata

SEQ ID NO: 43412 - DNA, 331 bp, Oryza sativa
  Clone ID: PAT_MRT4530_46572C.1
ggctataaagtataatcatgttaattaattcatagtcggtctccaatgacaaatgaaatggcagaaaggggaggagaccaaaaacctatttcttgtcttaaggcgcaggagcttctctttaatctacacactgcaaactgcgagccttactcggtcctgggttccccgaactccaacttacagcggctgcaagtcttattcaccgtggatccctatctaatcgttattattgcataatatagcgcccatcttgatgagcttcgtcttggtgcatctctttgggagctactaacccacatgggtgcgagcattttatattcagagaaatcaa

SEQ ID NO: 43413 - DNA, 155 bp, Oryza sativa
  unsure (1)..(155): unsure at all n locations
  Clone ID: PAT_MRT4530_46573C.1
ataattaattcacaacaccatcgtgttcattgatnncaggttcagaaccttgctacagaaataccacacttaccggtaccagatctctaccctctactccaatactacgaacatgccataccacgcggagccacacgaatactgttctttttata

SEQ ID NO: 43414 - DNA, 267 bp, Oryza sativa
  Clone ID: PAT_MRT4530_46574C.1
atggagtcggatcaactaaagggaatttatccagaagagtccgagttcaaggaggatgcggcgaaagtttctttcttgtccgacaaggacttgtatcaacccatgggtacaaatatgtacacccggggtctatgtaatctatcaatctcgatcaatacaattcggcgcatcaccaccttttaccttttcaactttattttatcgtccggcgggacttggcacccgacgtggggctgcatcggtgttcaatctccggcgaaggggtaa

SEQ ID NO: 43415 - DNA, 271 bp, Oryza sativa
  Clone ID: PAT_MRT4530_46575C.1
tttgggttttattcaaggggggtgtatttccaaagcagatcagagggcaaaccactcggatgcagctggcagcagacgatctagccgcgacacatgaggcacaagagatccagatgcgcagaccaccaggtaaaactggagctgacagcacaaacatgggctgggtatccagacctctgacgaaaaatcggtgatgactggtcctccttggactcgatggccgtgaccgcggcagaccactggattatctcgaccgggatgctgcagaaaa

SEQ ID NO: 43416 - DNA, 1702 bp, Oryza sativa
  Clone ID: PAT_MRT4530_46576C.1
atggagggtgtcagggttacagataaggcataccctctatcctacgacttatggaatataccgataagggtcaaggtatcccacggtataaaagggacccctagggaggggcaaaaggcatcgcacctcatcgccaacacacccaccaaagtttacgaagccggagtccacggagccaactcgccgggagatcttgtcgagtccctcgactacgatctcatcgactactccatcccgctcgccggcgtgcaccagcgatcgggagagcaggtctccggaacctctgcctttgacgtcctgcaccgggagaaggcggcaataagcggggctcccgaccaccacgggcgacgacagccgagaagcctccccatcaagctcctcaagccgctcctcctctttgtcgttcttgtcattggcttcctcgccgctgccgccctgctcctcctcggcggcgctggcgcctcctacggtcagggagtgggggacgcggccaccgggggcgagcgcttggcacaacatgagcgacgaggagctgctctaggtggcgtcgatggagccacgggttcggcggtttggagcgaggcacgacgacgagcgacggaatggcacaagcaaaactgtaccggagctgagcaccgttggatccaaatcaaccgtgggcagatgtactgctttacaacgggtggcactggtaaagccccacaggataacacacccgatgcgcgccaagctcgccgtgccggtcccctcgccggcgccgccgcggccgccctccgtcacgttccgctgcctccgccccagaacaccacccacccgtgcgcccgccacacccgcgcgcgcccttgggaacggcggcggcggcggcggtggcggtagccccctgggacgcgcatggccgggcgtcgccgccgcgctcttcggcgccgggttcgtcctcggcccgctcctcgacggcatccactcccgcgtcggcctccagctctaccacaacggcgccgtcgatgtcggccccctccacacgcacatcctgttgctgaaccgtggtcgccgtgccggcgcaggtgccgccgctgctcggagcgttctactccaccgtcgggatgctccagctgttcttggacgagagggtgtcgccgccggcggcggcggcgggcggatcgaaggccaccgggagcccgcagaagacggcggcgtcgctagtgttcgtccatgtccatgctgtgtgcacatcttcgccaccactgatgattcgtttctctggttcctggcggtgttcatcgaggcgagcgcggagatgtacagggcgggggtgcccagcaacgtggaggcgtacgtgctgttcgccggcgccgagctcgcgtggctgctcctcgacggcacctggctgggcttcgccgtcgcgtgcctcgtcggcaccgcctgccccctcgccgagatcccactgatcaagttgttcgactgctggagctaccccaacgccgacgtccagcttcttggcgaggtaaagaacacccgcatcttctcactccctgaagcggccgccattggggatcgtgagctggacgacgacgtgctacttcgtgtacacgccgttcttggcgaacctggcgagatgggtcaaggcggagctggcggtggacgacgcagctcggtgacggtgaaagcgagcaagatcacaccaccagccatggtgtccaactga

SEQ ID NO: 43417 - DNA, 271 bp, Oryza sativa
  unsure (1)..(271): unsure at all n locations
  Clone ID: PAT_MRT4530_46577C.1
tgctcaacccacggcnnagggntggccgggaccaggcgctcgtggcgctcaagggcggctcgtcctcctcggcnccgccgtgaaaacatacaacatcaccggctacntccgctcggcggcgcctcgaccccatcgcgttcccggcgttgggtggtttcttggcgattgtatgataaaaattattgacactacnttcctacntcctaataccatnattagtggtttcattgatgtttgcatnataaatcattncttgaacaattatttccct

SEQ ID NO: 43418 - DNA, 213 bp, Oryza sativa
  Clone ID: PAT_MRT4530_46578C.1
atgcctggtgaggtgtcaaccccagctgcagccaacagagttctagtaggaattaccaaaacattagcaatagcagtcaccaccagcagttggctggggatccagctcaagtcagagagaaataatcgtagcacacactttcgccagagacgtgccatcgcccccaaagcctccgattgggatcaggaagaactcccagccggcaacaccatg

SEQ ID NO: 43419 - DNA, 320 bp, Oryza sativa
  Clone ID: PAT_MRT4530_46579C.1
gatctagagggggggtaccaaggtcccagagacgagtgatgggtgtaggattgcgaggaaaggctacagtgagtgtgaaataagcatagaaccggggattcccgaatcggttaatcttatgaactggctgctggattcgtgagcaggtaagagacaacctggcgaactgtaacatattagttgccagaggaagagaaagtagaagctaatcccgtagtatcggccagcgaaatgggagcaggctaaaccgtgaaaacagggttgtgggagagtaatacaagtgatgagatgctaggctaagcgcttgaacggcgcaccct

SEQ ID NO: 43420 - DNA, 855 bp, Oryza sativa
  Clone ID: PAT_MRT4530_4657C.1
atggcaatatatggtttggcagtagaaaaaggtgacagcgatcgtgccgacgagccagatcacctggcgctctgcgtcggtctcacgaacgagtatgaagagaaaggctacatcgaggctggtgaagactaccacacatacatggctgaggttcaagaatgctccgactctgcctcaacggtcaatcacaatgcagctcgaccagagaccacctcacacacaggaacccaactgcagcaaacctacgacgtggccgacgaacagcgagatagaacaccggaaaccaactccacacgccacccctaccacaccaaggagctccccggcaacgactggaagcagcctagcctaagaagggaggagcacctaagaagaggggagcgggcatcgcaccgccagagagcacttggaagaagaacaactggagaagaggagaaccggatctggagggaaaggacggatggagatggaggcgccgtccccgccgccgacaaaccgcagcaggtcggcagccccggccaggtccgcggcagctggcgccggagcagccgtcgacgccgacgaggccgcgccggagaagcccgtcgtcgccgccgcccggcctcgacgtcgggtcgggaccgagggccgctgcccgccgccatttcgctagcccctcatcggctcgccgccgccggtggaagtaccagattcggccaagggagggccggatccgagcacaccacacgctggcctgggctcgtcgccgtcgccgccgcccagcctggtcgtcacatagcacgcgccatcgccgccgcccggcctcgtcgtcgcgcagcttgcgccgacaccgccaccatcccgccagccccttga

SEQ ID NO: 43421 - DNA, 1318 bp, Oryza sativa
  unsure (1)..(1318): unsure at all n locations
  Clone ID: PAT_MRT4530_46580C.1
agaagaacaagacgaacacgctctcttccaaagctgaaagcatgggttcgactcgcctcctcgtactgctcgccgccgcttccctcctcctcgccaccgccgtcccggcagccagagcacaggaagaaactgatcacgaggaggagttcacgtacatcagcggggacgagaaggggccggagcactggggcaagctgaagccggagtgggcgcagtgcggcgccggcgagatgcagtcgccgatcgacctctcccacgagcgggtcaagctggtgcgcgacctcggctacctcgacgactcctaccgcgccgccgaggcctccatcgtcaaccgcggccacgacatcatggtcaggttcgacggcgacgccggcagcgtcgtcatcaacggcaccgcctactacctccgccagctccactggcactcccccaccgagcacagcgtcgacggccgcaggtacgacatggagctgcacatggtccacgagagcgccgagaagaaggccgccgtgatcggcctcctctacgaggtcggccgccccgaccgcttcctccaaaagatggagccatatctcaagatgattgcggacaaggaggacagggaggagaaggtgggcatgattgatccgaggggtgcaaggggtagggccagcgtgtactaccgctacatggggtcgctcaccacgccgccttgcacgcagggggtggtctggacgattgtcaagagggttcgcaccgtgtcgaggtatcagctcgaccttctcagggaagctgtgcatgatgaaatggagaacaacgcgaggccccttcaggcggtgaacaacagagacatctccattttccggccttaccctcataaacgctattaattagcggcggatttgtcgtctgatgtggattggtagcctaaaataaatatacacatgcagataggatcacacgtagggctcattttgccgttcgttcgatccttctatcacccctccttttcttttgagaggactgatctctcacatttcgatatatagctgagatttttgtaattctttccattactgttcctggttgattggattggaataaaacactgttcattaatttaaaaaaaaaaaaaaaaaaaaaaaaaaaaaaaagaaaaaaaaaaaaaaaaaaaaaaaaataaaaaaaaaaaaaaaaaaaaaaaaaaaaaaaaaaaaataaaaaaaaaaaaaaaaaaaaaaaaagaaaaaaaaaaaaaaaaannnnggggtggnacaanaaaaaagtaacaaaantaaanccccgngcagcaaaaacaaanttttttttatggggaacc

SEQ ID NO: 43422 - DNA, 955 bp, Oryza sativa
  Clone ID: PAT_MRT4530_46581C.1
gctcgtcgccaccctctgtctttcagaaatgggtcaagcgaactcggcgcagggggacagactgggcatcagctacagctactgcgccggccagacgccggcgaactcggcgcaggtggagacacttgccggcatcagctacccggccggccagacgccggcgaacgcggcgcaggtggaggcactgggcgtcagctacccggccggccagacgccggaggagaacctcgcgaaggccctggcgaggtggagggagaagctgcgggcgcccggccgagctggcttgccgccggccgactacagctacatcaagatcggggacgtctgcgacgagagcgccgccgtgctgtcgcgcctgcgggagctcggcgcgtcggagccggcgtgcgtctactacggcgacgtcacgaatgcccaggccgacctctcgctcggccgcctctccctctccggcggcgccgccgcccgccacatcgcggagagcttcaccgacgacgagctggacggggtgctcgacgacggctacgacggcgacgacgggctggaggtgccggtgttcgacgaggaggggcggcgctacgacttcaggtgcggatacaacgacgacgggttcaccggccagtaccagctcgtcggcgccggcggcgactaccagcgcctcatggcgaacaataacgtggtgcgcgacgtcgccgagctagggaaaggggtgtccttcctggtgttcacgttccgatcggcggcgctgctgaccaagcacaaatgggaggaggaccatgaggctagcggcgcattatgcatggtgatactgttctttgttagcctctgataacggcatgcatggtcgatcgttgtactgtttagttcagtagttatccccaagtatttttcaggctatttttaatagaattagggagttagtctgtgcagacatgtatcgtatattgtgcatgag

SEQ ID NO: 43423 - DNA, 3140 bp, Oryza sativa
  Clone ID: PAT_MRT4530_46582C.1
gaccactgctcatcaccccgttgctctcgcgccgccctccccgccgagccaaaaagccttcctcctcgaaatagcacacctctcgccgccgctggtgcgtgcgtgcgtcgacgcgcgcgatcgatcgatgcctgtgtccctccggcgcgtccacccacgccagccggcgagcctcgtcggcgagtttcgggggcgctgattagatttgcccggtctcgatcgattgatcggtctcgccttcccgccgcgcgatggatccgcgggggaagggcagcatcacgtcgcatgcgtcggacaagtcgtcgcggtcgggctcgttcgacttcgagcacgaccaggacccggaccgcgaccgccgccacgacgacgcccaccgccgcgaggtcgtcgtcaagatcgagcccgaggcccacgtgccggtggacctccacgccggcggcagccacgccgccaacgcgccgggcgctggcggcgtggcggtggggggcgtggtcccggggtccgggtcggtgtcgagcgcgtcgtcctcgccaggcggtgggggcaacggcgagtcgttcagcttcaagaaccggccgccgcagtcgcccgcgtctccggcgatgagcgtcggcggggagggcagcgacgacccgcccacgcgtctcattggcagcttcttgcgcaagcaggcggcggccggcggcgagctggcgctcgaccctgacctggagatggaggagatgaggaggccgccgcgcgcgcccacgtccatgaacgcctccagggagctccgcgtctcgttccaagacccgcacaagcggttctccccgtcgacgtcgtcggcctccacctcctcctacgccggcgacagcaggaaccaggcttgcagcacagcggaggcggccgaggtgatccgctgcacgtcgatgtccaccggaaacaacctgttggcgcggagcaagacgcgttcccggctaatggatcccccgccgccgacgatcagtcaccccaccgaggcggagcgcaacgaccgcaagtcgttcgtcggcaaggggccgcccaagtcagggcagctccggtcgggcctcatcggcaagtcggggctcatcggcttgtcaggccccatcgggaagcccggcgccttcgacgacgacgacgacgacccgttcgtggacgagggcctcgccgccgacctcaagcgcgacacggtcgactgcctcctcatcctggaatgggtcggcctcatcgtcatcatgggcgcgctcgtctgcagcctcagcattcgcagcctcgccaacaagaagctctcgggtctccacctctggaagtgggagctcctggtgttcgtcctcatctgcggccgcctcgtctccggctgggtgatccgcatctgcgtcttcttcgtggagcgcaacttcctgctgcggaagaaggtgctctacttcgtctacggcgtgcgccgcgccgtgcgcaacgtgctctggctcggcctcgcgctcatctcgtggcacctcctcttcgataaggacgccaagcgtgattcccacacgctggtgctcccttacgtcaccaaggtgctctgctgcctcctcgtcgccaccgtgatccgcctcgtcaagacgctgctgctcaaggtgctcgcctcctccttccacgtctccacctacttcgaccggatccaggacgcactcttcaaccagtacgtcatcgagacgctctccggcccgccgctggtcgacgagagccgcatgctcgccgaggtgcagaggctgcagagcgccgggatcaacatccccagcgagctcgaagcaacggccatgccgagcaagccgcccatgccggccaagagcgggcgcctcacggtgaacccgtcgaagcgaggaggagcaggaggtggggccaacaagcagctgcagaagcagaaatccgaccgccattgcgacgacgggatcacgatcgaccagcttcacaggcttagccagaagaacatctcagcttggagcatgaagaggttgatgaagattgttcgttacggggcgctgaccaccatggacgagcagatcaagcatgcaaccggagaggacgagctggccacgcagatacacagcgagtacgaggccaaggttgctgccaagaggattttccacaatgtcgccaagcctcactccaagcacatatacttgtcggatttgatgcgtttcatgaggcaggaggaagctctgaaagcaatggatctttttgaaggcgcacaggagcacaacagggtcagcaagaggtcactcaagaactgggtggtaagcgcgttcagagagcgcaaagctcttgctctaacgctcaacgacacaaaaactgcagtgaacaagctccaccagatggccaatgttgttgttgtggttattgtgattgcactatggctttccattctagggatcgcgacgtcacgcttcttcgtcttcatcagctcgcagcttcttgttgcggttttcatgtttggcaacactctgaagaccatctttgaggcgattgtgttcttgtttgtgatgcatccttttgatgttggcgatcgttgtgaagttgatgggatgcaggttacaattcttttcattgttctatctgcattgtatgattgcttcacactgtctgacttggttctaaactgttgcgaaattcaggtagtcgtcgaggaaatgaacatcatgacgacaatcttcctccgatacgacaacctgaaggtctattatccgaacagccagctcgccatccaaccaatcatgaattactacaggagtcctgatatgggagatgcagtcgatttctctgttcatgtcgctacgcctgtggagaaactggccctgatgaaggaaagactaatgcattaccttgacaacaagaaagaacattggtaccctggatccatggttgttctccgtgacgtggatgacacaaacaagctaaaggtatccatatggtgccgtcacacgatcaacttccaagacatggggatgagattcgagaggagggagctattgctccaagaaatgatcaagatcttgaaagatctagacatcgaataccggatgttgccactcgacatcaacgttcggaatgcgccaatgatccagtctttgaggatgccatcaacatggataacgtattaa

SEQ ID NO: 43424 - DNA, 360 bp, Oryza sativa
  Clone ID: PAT_MRT4530_46583C.1
ctggtacgcctggcgggaccgtaccggaccggacatgggccggaccaacccacgcgttcgtgatagccctgacctcaagccaggacgagagggggaagaatgccgctggggcgggacgtcaggatgggatggccgagaagctcttggaggacatggtgactgtcaccaggctccaacctgatggtaagaaggatgacagagtttctggtatcgaagctcgcagagaccagctcgatatgcacatgcagtaagatgtagccacagatgtatattctatgcatccaggtgacagatccaccatggacttggctcctacttgggactaagaagggaccccatatcgcgccttgttgacacagg

SEQ ID NO: 43425 - DNA, 2457 bp, Oryza sativa
  Clone ID: PAT_MRT4530_46584C.1
atgacgcagatcatcaacgtgccgcgttcaactctcagatcattttggtcttctggcttatttggaaacaacgttaatgcaaaaatcttccaatctgaatccaatacgcctctggagtctggagttgtactgttctggccaggttcttttgccgtcccgggaaagagctcctgccttgcttgtccaaaaaagaagaacaagggccagatgaatatggcctacctcccagttctcatctacttgctgctcatctctttctgcaaatgcgatgatcagctgacacaggtaaatcgattgatctcccccagcggcaagctcgtctccaagagcggcgtctttgcactcggtttcttctccccagccacttccaaccagagcttattcctcggcatatggtataacaacatcccagagcgaacatacgtttgggttgctaaccgtgacaacccaatcaccacaccttcatcagcgatgctcgccatcagcaatagttctgaccttgtattgtcagattccaaaggtcgcaccgtctggacgacaatggcaaatgtcaccggaggtgacggagcttatgcagtgctgctcgactcaggaaacttggttctccggctgtcaaacaatgcaaccatatggcaaagtttcgatcacccaactgacaccattctgtcgaacatgaagattctgctgaggtacaaggagcaagtaggcatgcggcttgtagcttggaagggccttgatgatccaacaacgggggacttctcatgcagcggagaccccagctcagaccttcaggtcttcgtctggcacgggaccaagccatattaccgctccattgtgcttgacagtgtgtgggtgtccggcaaagcatatggcagcagcacctccttcatgtaccaaacatatgtaaacacacaggatgagttctatgttatctacaccacctctgatggctcaccatacatgcgcatcatgcttgactacacgggcaccttcaggctcctgagttggaacgtcaactcgtcatcatgggcaatctattctcaacgcccagcagccattggcgattgtgatccctacggctcgtgtggcccattcggttactgtgacttcacgtcggtcatcccaagatgccagtgcccggatggatttgagcctaacggctccaactcttcaagtggatgccggagaaagcaacaattaagatgtggagaagggaaccatttcatgaccatgcctggaatgaagctccctgacaagttcttttatgtccaggacagaagctttgaggagtgcgcggctgagtgtagccgaaactgctcatgcacggcctatgcttacaccaacttgaccataaccggctctcccggtaccacagccagccagtcaaggtgcttgctttgggttggtgagcttgttgacatggcgaggaacaatcttggtgacaacttgtacctccggttggccgactctccaggtcataaaaagagcaggtatgtagtcaaggttgtagtccccattatagcatgcgtgctaatgctcacgtgcatataccttgtctggaaatggatatcgaaaggtgaaaagagaaataatgaaaatcagaatagagcgatgctaggaaactttagagcttctcatgaagtatatgagcaaaatcaggaattcccatgtattaattttgaagatgttgtcactgcaacaaacaattttagtgattcaaatatgcttggagaaggaggtttcggcaaggtttataagggcaagttgggaggtggcaaagaagttgcggttaaaagactcagtacaggttccacacagggattagagcattttacaaatgaagtggtccttattgccaaattgcagcacaaaaatcttgttaggcttcttggttgctgcattcatggagatgacaagctccttatttatgaatacttaccaaacaaaagcttggatcacttcctttttgatccagcaagtaaatttattcttgattggccaacaaggttcaagataatcaaaggagtagctagaggacttctttatctccaccaagattcaaggttaactataattcatagagatctcaaaacaagcaacatcttgttggatgcggatatgagtcctaagatatcggattttggtatggcaagaatctttggcggaaaccagcaagaagcaaatactaaccgagttgttggaacatacggttacatgtctcctgaatacgcaatggatggggtcttttcagtcaagtctgacatatatagctttggtgttatactcttggagattgtaagcggtttgaagattagcttacctcagctgatggattttcccaacttgttggcctatgcatggagattatggaaggatgataagaccatggatttggtggactcatccattgctgagagttgctcaaaaaacgaggtattacaaaataacagtagataa

SEQ ID NO: 43426 - DNA, 227 bp, Oryza sativa
  Clone ID: PAT_MRT4530_46585C.1
ggatcaaagctaacaattcggtgaccctcacttcgtcaccgatgcaagaaaacatccttttcctcgccaatgaatcatggcagaagaagagcaccacatttccaaagtactttttccaacagacatacatatacatgatgcaaatctaaagttctaaactagactcttaaaagagaatgttggattcaagccaagagctgtacattcatgtctttcggacgcgtggg

SEQ ID NO: 43427 - DNA, 2499 bp, Oryza sativa
  Clone ID: PAT_MRT4530_46586C.1
atgacgcagatcatcaacgtgccgcgttcaactctcagatcattttggtcttctggcttatttggaaacaacgttaatgcaaaaatcttccaatctgaatccaatacgcctctggagtctggaggatctattgtacttgttggcagccttgttttattagttacagttgtactgttctggccaggttcttttgccgtcccgggaaagagctcctgccttgcttgtccaaaaaagaagaacaagggccagatgaatatggcctacctcccagttctcatctacttgctgctcatctctttctgcaaatgcgatgatcagctgacacaggtaaatcgattgatctcccccagcggcaagctcgtctccaagagcggcgtctttgcactcggtttcttctccccagccacttccaaccagagcttattcctcggcatatggtataacaacatcccagagcgaacatacgtttgggttgctaaccgtgacaacccaatcaccacaccttcatcagcgatgctcgccatcagcaatagttctgaccttgtattgtcagattccaaaggtcgcaccgtctggacgacaatggcaaatgtcaccggaggtgacggagcttatgcagtgctgctcgactcaggaaacttggttctccggctgtcaaacaatgtaaccatatggcaaagtttcgatcacccaactgacaccattctgtcgaacatgaagattctgctgaggtacaaggagcaagtaggcatgcggcttgtagcttggaagggccttgatgatccaacaacgggggacttctcatgcagcggagaccccagctcagaccttcaggtcttcgtctggcacgggaccaagccatattaccgctccattgtgcttgacagtgtgtgggtgtccggcaaagcatatggcagcagcacctccttcatgtaccaaacatatgtaaacacacaggatgagttctatgttatctacaccacctctgatggctcaccatacatgcgcatcatgcttgactacacgggcaccttcaggctcctgagttggaacgtcaactcgtcatcatgggcaatctattctcaacgcccagcagccattggcgattgtgatccctacggctcgtgtggcccattcggttactgtgacttcacgtcggtcatcccaagatgccagtgcccggatggatttgagcctaacggctccaactcttcaagtggatgccggagaaagcaacaattaagatgtggagaagggaaccatttcatgaccatgcctggaatgaagctccctgacaagttcttttatgtccaggacagaagctttgaggagtgcgcggctgagtgtagccgaaactgctcatgcacggcctatgcttacaccaacttgaccataaccggctctcccggtaccacagccagccagtcaaggtgcttgctttgggttggtgagcttgttgacatggcgaggaacaatcttggtgacaacttgtacctccggttggccgactctccaggtcataaaaagagcaggtatgtagtcaaggttgtagtccccattatagcatgcgtgctaatgctcacgtgcatataccttgtctggaaatggatatcaaaaggtgaaaagagaaataatgaaaatcagaatagagcgatgctaggaaactttagagcttctcatgaagtatatgagcaaaatcaggaattcccatgtattaattttgaagatgttgtcactgcaacaaacaattttagtgattcaaatatgcttggagaaggaggtttcggcaaggtttataagggcaagttgggaggtggcaaagaaattgcggttaaaagactcagtacaggttccacacagggattagagcattttacaaatgaagtggtccttattgccaaattgcagcacaaaaatcttgttaggcttcttggttgctgcattcatggagatgaaaagctccttatttatgaatacttaccaaacaaaagcttggatcacttcctttttgatccagcaagtaaatttattcttgattggccaacaaggttcaagataatcaaaggagtagctagaggacttctttatctccaccaagattcaaggttaactataattcatagagatctcaaaacaagcaacatcttgttggatgcggatatgagtcctaagatatcggattttggtatggcaagaatctttggcggaaaccagcaagaagcaaatactaaccgagttgttggaacatacggttacatgtctcctgaatacgcaatggatggggtcttttcagtcaagtctgacatatatagctttggtgttatactcttggagattgtaagcggtttgaagattagcttacctcagctgatggattttcccaacttgttggcctatgcatggagattatggaaggatgataagaccatggatttggtggactcatccattgctgagagttgctcaaaaaacgaggtattacaaaataacagtagataa

SEQ ID NO: 43428 - DNA, 2733 bp, Oryza sativa
  Clone ID: PAT_MRT4530_46587C.1
atgaggcaatcgggcggtggtggcggcctcccttccgccaaattcgggaggggaggcggccgggcggcagcggcggaggccagcgcggagggcggcggcacatcgtgcgtggaggccgccccggcggcgatggctagccgcaagatggatagaagttgggtgcacagcacactattttctactcaatatgtcaatggtgtcaatgaatttatggatttcattaaagaaaaatatgctgaggatgatgagattctatgcccatgtactagatgccttaatcagaagtacctgcatcagcccactgtgaagaaacacattttgatgaatggtatggactgtacatatactcggtgggtacatcatggagaggacattagtgtacatgttaatgaagtccctgcttctgtttctgtttttgacactgatgagggttccattggtatggctcagactgacaacaatgttggtgatcggttagatagtttgcttagtgaccttcaaactgcaagaggacatggtagtcatgactctgaacctgaaaatgggaacaatgatggaaacagtcaaacctcttttcttaaacttctggtgaaggaggctaagcgtcagctttatcctgggtgtgccaaattttcaaagttctcctttgtggattattctgatcttgataattgcccagtttgtggtttgtcaagatggaaagacccacagaggaagaagattccgcagaaagtattgcggcattttccattggtgcctaggctacagaggctatttgtaaccaaggagggttcagaacaagcacaatggcacaagttaaagaggcagcctagtgagaaggaaatgagtcatccagttgatggtgaggcttggcaagattttgacagggaatatccagattttgctaaagaagctagaaacctcagacttgggctagctactgatggattcaatccctttggcaattttaacacgaagtacagcatgtggcctgtatttgttgtgccatacaaccttccaccttgggcatgcatggatcaatccaatctaatgatggctctgttgattccaggtccatgttcacctgggaaagactttgatttatttctacagcctcttgttgaagaattgattgagctttggaagggtgtgcatacttatgatgccattattgacaaagagttcaaacttcgtgcagcagtgttatggtgcattcatgattacccagctctggctactttgtctgggcgtaccacaaaaggctattttgcttgtattcactgtgacaaaaatcctctgtcttatgcactaaggaataaaattgcatatattggacactaccgtttcctgccaaggggacatcgtttgaggaggaacaatgaatacagtggccttcatggaaccaatgatccaccaggtaaatttacaaaagcagagctactagcagaattagagaaggttagacatgtcaaacctgggatcaagcaaaaggagagcaggaaaaggaagcgttctgccttggatagtgacaaaactgcaaatgtgaaaatttggagtaggagagtttgtctgtgggatttggagtactggaaaaaattaaagaagaacatatgtgagagcttggttggcactattctcgatatacatgggaagacaaagaacacagttaatgctaggcttgacctgagtgacttaagaattaaagaaaacttgcagttcagagatgaaggagatacttctgagatgcctcgagctagatacactttgtctaaagaacaaaaggttgccttttgtaattttttacgggaggtcaagtttccagatggctacgcttcgaacatatcaagatgtcttaatgctgatggaagcaaggtacaaggcctgaaaacacatgattgtcatattcttttgcaaacaatcttacctgctgctttacgaggctttgttgacaaggatatatatgaagcagtagctgagttgggaaacttttttaagcgattgtgtagcaaaactctgaacaaggatgtgttagttcaaatgaatgaagaaattattgtattattgtgcaagcttgagaaaatttttcccccggctctttttgatgtgatgatgcaccttcctgtacatttggttgaggaggcgctgctccgaggtcctgtgcagtatgggtggatgtaccctattgaaaggcggctgtacactttaaagcgttatgtgaggaatggggcaagaccgagaagaatgttcagggatgaattagaaagggcagaggtgtctaacattgtgaaaaacaattcgacaaggaatgctccgaaagatgatgggttctataaaagcatcaatgtgggaagtctatggtacaaagatgattctttaattctagctactcaggctagaaaagtgttttatttgccagatacaagattcgtgaaaacttctgtaccatttaatggtcctgcatatcaagaggaatattgctgtgatgatcaagaggagggtattatccgaacagtagttgatgaaccaacaactgagatgcctttaaatagagatgatgaaccaggacaaatgtttgaagcttctgagatttctcgtttgaggaaagaaaggccaacccttgtatgtcaaagtgaatgtgaagatggagatgaagttttcgatgacacattggaagagtactgcagcgaggaagatggagatgctctacttgaagttgacagcgatgatgagtag

SEQ ID NO: 43429 - DNA, 253 bp, Oryza sativa
  Clone ID: PAT_MRT4530_46588C.1
tctaactgattaaagacaaccaacacaaacggggtgggaaccttaagcaggcgccggctttccccgagagttggagacaggttctcgtcgatcttcgacctctgcagtttactgtgatcctcctgtgcacccttaaactgaggcctactggggaaatgttttcccaattggagtcaggagaggatcttaccagggtaagagtgtcgcataaacactgatttttgatgcatgacaggtttcatggaattgccat

SEQ ID NO: 43430 - DNA, 3219 bp, Oryza sativa
  Clone ID: PAT_MRT4530_46589C.1
atgcatgttcagatggatagaagttgggtgcacagcacactattttctactcaatatgtcaatggtgtcaatgaatttatggatttcattaaagaaaaatatgctgaggatgatgagattctatgcccatgtactagatgccttaatcagaagtacctgcatcagcccactgtgaagaaacacattttgatgaatggtatggactgtacatatactcggtgggtacatcatggagaggacattagtgtacatgttaatgaagtccctgcttctgtttctgtttttgacactgatgagggttccattggtatggctcagactgacaacaatgttggtgatcggttagatagtttgcttagtgaccttcaaactgcaagaggacatggtagtcatgactctgaacctgaaaatgggaacaatgatggaaacagtcaaacctcttttcttaaacttctggtgaaggaggctaagcgtcagctttatcctgggtgtgccaaattttcaaagttctcctttgtggattattctgatcttgataattgcccagtttgtggtttgtcaagatggaaagacccacagaggaagaagattccgcagaaagtattgcggcattttccattggtgcctaggctacagaggctatttgtaaccaaggagggttcagaacaagcacaatggcacaagttaaagaggcagcctagtgagaaggaaatgagtcatccagttgatggtgaggcttggcaagattttgacagggaatatccagattttgctaaagaagctagaaacctcagacttgggctagctactgatggattcaatccctttggcaattttaacacgaagtacagcatgtggcctgtatttgttgtgccatacaaccttccaccttgggcatgcatggatcaatccaatctaatgatggctctgttgattccaggtccatgttcacctgggaaagactttgatttatttctacagcctcttgttgaagaattgattgagctttggaagggtgtgcatacttatgatgccattattgacaaagagttcaaacttcgtgcagcagtgttatggtgcattcatgattacccagctctggctactttgtctgggcgtaccacaaaaggctattttgcttgtattcactgtgacaaaaatcctctgtcttatgcactaaggaataaaattgcatatattggacactaccgtttcctgccaaggggacatcgtttgaggaggaacaatgaatacagtggccttcatggaaccaatgatccaccaggtaaatttacaaaagcagagctactagcagaattagagaaggttagacatgtcaaacctgggatcaagcaaaaggagagcaggaaaaggaagcgttctgccttggataggcacaaaactgcaaatgtgaaaatttggagtaggagagtttgtctgtgggatttggagtactggaaaaatttaaaggttagacataatcttgatgtcatgcacattgagaagaacatatgtgagagcttggttggcactattctcgatatacatgggaagacaaaggacacagttaatgctaggcttgacctgagtgacttaagaattaaagaaaacttgcagttcagagatgaaggagatacttctgagatgcctcgagctagatacactttgtctaaagaacaaaaggttgccttttgtaattttttacgggaggtcaagtttccagatggctacgcttcgaacatatcaagatgtcttaatgctgatggaagcaaggtacaaggcctgaaaacacatgattgtcatattcttttgcaaacaatcttacctgctgctttacgaggctttgttgacaaggatatatatgaagcagtagctgagttgggaaacttttttaagcgattgtgtagcaaaactctgaacaaggatgtgttagttcaaatgaatgaagaaattattgtattattgtgcaagcttgagaaaatttttcccccggctctttttgatgtgatgatgcaccttcctgtacatttggttgaggaggcgctgctccgaggtcctgtgcagtatgggtggatgtaccctattgaaaggcggctgtacactttaaagcgttatgtgaggaatggggcaagaccagaaggttccattgcagaggcatatattgcagatgaatgcctaacattttgctccaagtacatggacgatgttgaaacaagatttaatagagaagcgagaaatgttgggttttctaatgaagaagcctatggtgcagatgtgttcgggcatggagtgagatttacttcagcagcagaattagtatatgatgatggtggattagatcaaatggtgtggtatgtgctgaacaactgtagtcaagttgaggaatatatcaaaatgttcagggatgaattagaaagggaagaggtgtctaacattgaaaaaacaattcgacaaggattccagacatggtttaggaacctgatgctgagaaagaatacagatgaggaaatggtagatgatgacatcttttccttggcatgtggtcctgatttaagaatcaagaaatacaagtcatgtatagttaatggggtgcggtttaacactttggaccgtgataagaataagaagactcagaatagtggagtaatttcactaggcacacataactccgagctcattgagttttatggaaacataaaagagatcatccagatagattataatggtgatgataggtcagttgtgttgttcaaatgtgattggtataaactggatgggaggaatgctctgaaagatgatgggttctataaaagcatcaatgtgggaagtctatggtacaaagatgattctttaattctagctactcaggctagaaaagtgttttatttgccagatacaagattcggtaacaattggcaagttgtccaaacatttgaccatagacatctatacaatgaatattgctgtgatgatcaagaggagggtattatccgaacagtagttgatgaaccaacaactgagatgcctttaaatagagatgatgaaccaggacaaatgtttgaagcttctgagatttctcgtttgaggaaagaaaggccaacccttgtatgtcaaagtgaatgtgaagatggagatgaagttttcgatgacacattggaagagtactgcagcgaggaagatggagatgctctacttgaagttgacagcgatgatgagtag

SEQ ID NO: 43431 - DNA, 1251 bp, Oryza sativa
  Clone ID: PAT_MRT4530_4658C.1
gcatctcaaaatcaaatataccaactcgatcacactcgatcgtatcaagaaggaacaggaaagagaaaaacttgaagcatgcgcacaattttcgtctctatgtatgtactctgctcagacggaattttctgtgctgtatctgaaagcaaaagcaacagcctcatttaactatctaacgaagtagtaggtgctccgctccttggcggcggcggcggcggcgcgctgctgctgctgcatgcgcagctgctcgtggaaccacatgatgaactcgtcggcgcggcggtccaccacgccgagcctcccctcttcgtcgtcgtcgccgtccgcctcccacgccgggaacggcgagtccgtgatccgcacctgccgcggcgccggcaccaccaccgcgggccacgcgaccacgtcgccgtcttcgtcgtcgatatccgtcgtcatcgcctcggcggcggcctcctccttcacgtccatcagctcgaacagcctcgacaccgtggcggccgagccgtacggatccgcggcggacgaacggtcgtgccactgcccgtgctgctgcaggcgcagctggctgcggcgctgcgcgcggcggcgcctgtgcagcggcgtgctgctgcagctgaactcgacctcacggggccggtactggtactgcgacacggcggcggagggatccatggaccggcacgacatcgaggagagcccggaaacgcctcccgacgcgctgctgatgccgccgccgctgcgacggcggccagcgccgtgcgcgccgcggccccgcgggtacgggtgcaccgccgcggccgggtccatggacctgcacgacatcgtcgacgacaggtacgtcagcaacgccgggtgctcccgcaaatcgtcgaggccgtggtcgtggccaccgccgccatgccgcctcgaggacatcatctggtgcaggtggacgccgagcgcggcgagcttgggctggtgcttgccgagccccttgacgaggacgaggtacacggcgcgcaccacgcgacacagcttcttggcgctctcgcccgcggtggccgcctgcctctcctgatgatgctggcaaccacccgactccatgaggagattggtacatgggccgtagatgaattctgggctggaggccgcagcttgccattttattcccctcccccttctcttgctcgcctcctccaccgccgctcccacctccccaccctcaccaataccagaagacgccaacagtagtaaagccccactagccat

SEQ ID NO: 43432 - DNA, 464 bp, Oryza sativa
  Clone ID: PAT_MRT4530_46590C.1
gcacgagggcattatctgaatgttgcctttttatgtgtgatgtttctcgcaggaactgaatgtgaatccattatcgcggaattatgtcagtcccattttacaaagcttagatttaatatgatccagactgaaactcgattcacctcagttgcaaattattatgagttttattgtatacatccaaaggaaaaattagtctcttcgttccagtttgctgtcctgcaatacacggcgcacatttggactaacaactcttttcatatttgtgcagtttgaggtggtgatcttttctcctgaagatgaaaattaagttttttacgtaaaacgagttggtattaacatatgattgattgagtttaaattattacaaacttgaaaaatagattaatatgatattttagagcaactttcatatagaaagtttccgcacgaaacgcaccgtttagcagtttaaaaagcgtgcc

SEQ ID NO: 43433 - DNA, 1608 bp, Oryza sativa
  Clone ID: PAT_MRT4530_46591C.1
atggccatcttgaatcactccgacgccgccttccctgtagctgctactacgccactactcggccgccgcccgctggacgccggcgagttccggcgccagggacggcaggtcgtcgacttcatcgcggactactacgccggcatcaacgactaccccgtgcgccccgccgtcgctccaggcttcctcgccgggaagctcccggcgacggcgccgtcgacgccggagcccgacgcgctcaccgccgggctgcgcgacgtccgcgagctcatgctcccggggctcactcactggcagagcccacgtcacttcgcgcacttctcggcgacggccagcaacgtgggcgccctcggcgaggctctcgccgccggcctcaacgtcaaccctttcacgtgggaagcctcgccggcggccaccgagctggaggtcgttgtcactgactggctcggcaaggcgctgcacctgccggagaggctgctgttcgccggaggcggcggcgggacgttgctggggacgtcatgcgaggccatgctttgcaccatcgtcgccgcgagggacgagaagctcgccgagatcggcgaggagaggatcggcgacctcgtcgtctactgctccgaccagactcacttctcgttccagaaggccgcgcgcatcgccggcattcgccgtggtaactgccgggagataccgacgtgccgggagagcggcttcgttctcacggcgacggcgctgcaggccgccgtggccgcggacgaagcggcggggagggtcccgctgttcctgtgcgcgacggtcgggaccacgccgacggcggcggtggaccctctgcgcgagctgtgcgccgccgtggaggggcgcggcgtgtgggtgcacgtggacgcggcgtacgccggcgccgcgtgcgtgtgcccggagttccgccacgccatcgccggcgccgaggccgtggactcgttcagcacgaacccgcacaagtggcttctcgccaacatggactgctgcgcgctgtgggtggcgcggccggcggcgctcgtcgccgcgctcggcaccgacgacgacgtgatcctcaaggacgcggccgcggcggcgaggcccgcgaggggcgaccaccaccaccacgccgcggtggactacaaggactggcaggtcgcgctgagccgccggttccgcgcgctgaagctgtggctcgtcctccgctgccacggagtcgacggcttgcgcgccgtcgtgcgctcccacgtccgcatggcggccgcgctcgagcgcatgctcgtcggcggcgacgagctcacggccagcaacgagctcaacaggaggctcctcgaggcggtgaacgcgacggggcgcgcgtacatgagctccgccgtggtgggcggcatgtacgtgctgcgctgcgccgtcggcaactcgctcaccgaggagcaccacgtccgggaggcgtggagcgtcgtgcaggggcaggccgccgccgtcttggccaccgccggcgccgccgctgacactgctcgtaccaaggaccacgccgccggcgacgaccatggcgcagatcagccgcacgcgatgacgacgacgacgacgatgggatgtcgctccggtccatgggagctgtga

SEQ ID NO: 43434 - DNA, 131 bp, Oryza sativa
  Clone ID: PAT_MRT4530_46592C.1
tacttacacaatgcaacacaaccaaatcgggggatctttattaccacacgtgcgcaacacacccataacaggcctgaacaggcgattcaaatagtcaaaaactaccatgcgcacggcgccacatagagaac

SEQ ID NO: 43435 - DNA, 605 bp, Oryza sativa
  Clone ID: PAT_MRT4530_46593C.1
agcaccaacccgtcgtcgatacacagacagatccgcaaaaatggctggaggcaaaccccgtggtcttaacgccgcccgtaagctgcgaacaaaccgaaaggaccagaaatgggccgatctcgcctacaagaagcgtgccctcggtaccgcttataagtcctctcctttcggtggttcttcgcacgcgaagggcatcgtcctcgagaaggtcggtgtcgaggccaagcagcccaactccgctatccgaaagtgtgtccgtgttcagctcatcaagaacggaaagaaggtcactgccttcgtccccaatgacggttgcttgaacttcgtggatgagaacgatgaggtcctcctggctggtttcggtcgcaagggcaaggccaagggtgatattcccggtgtgcgattcaaggtcgtcaaggtctccggtgtcggtctgcttgctctgtggaaggagaggaaggagaagccccgttcttaagcgaagagcgcgtggatggaaatttcaccatatttcgacacgtggagtctcaacaaaaaaaaaaaatcgacattacggttagggatctgatcatgggagacgggtctgcaaaaggaaaatagatcac

SEQ ID NO: 43436 - DNA, 382 bp, Oryza sativa
  unsure (1)..(382): unsure at all n locations
  Clone ID: PAT_MRT4530_46594C.1
agtgtattggtatggtgtttcagatcgtagaccagggtcntgaaaattggtagtcaacgtcgcgtcgaaggtggtgggtcgtaccgagtttgtagtgtagagtgtagttagtcccacaagtaaagtggtacaagtgtccgtgtgtgtagtagtgcgtcttaggtaccacagtatcgtgtatgctagagcacttgtttataaacacaggattagtctgatgcgctattatgctgatactgtgattgctcataacangcgtacacttctttgttatgagaagcacatacttccatgtgggtgtttcaaaagtttagtcccatgtataaaatatatgatgaatatatctaggtgagaaatggttggaaaaaaaaaaaaaaaaaaa

SEQ ID NO: 43437 - DNA, 457 bp, Oryza sativa
  Clone ID: PAT_MRT4530_46595C.1
ttctttcgtctgaccgcgtggcgttgctcacacaggctagcgaaagcgagagacacaggcgggtgggggggcgacagacagggagagggagagggagagagagagagagactccgccggtttctttcgcctgctcccgctcgttctttctcggggtgggtgggtgagccggtccacgaggcggcgtcggcgaccgtggtgcaacactgccgcagcacaggggtcatgagacggggccggctgttggcggaggagaagattgggcacaacgagactatagagcaagcgacgcctccttttctttttttctccgatccatctaggggaagcattctcccatgctcgttgactattgagaacggattattcgaatggagtgagggttttgtatggctcatcgggagctgagctgtgtgatcttgtctttccgacagttactagcacgaactggtgcactg

SEQ ID NO: 43438 - DNA, 473 bp, Oryza sativa
  Clone ID: PAT_MRT4530_46596C.1
ttgattccccatagccatagaggcctagaccctgcacgactactacctcgccatgatggccgcggagccctcgccggcggcagcctccgccgttgaagacctcgaaactctccccctagactcttcctactcctccgcccccgccactgatccactcctccgcccgcctgcttccccgtccgccgcctccgccgccgctggtggggaccacgaccccttcgtcatcgacgacgacttcctcgtcgacgaggaggatgacgacgacgtcgggccccctgcgcccaccgccatcccgctggtggccgcggcggcgcgggccccggagttcgcgcggatcgccgtgtccgatccgaagaagcacgcggagcccacgtcgggggccgccggcgtgatcccaggctccgggagctacttctcctacctcatcaccacccgcgtcggggaggccgaggtccgcgtgcggcggcgcttcc

SEQ ID NO: 43439 - DNA, 428 bp, Oryza sativa
  Clone ID: PAT_MRT4530_46597C.1
ctcgaattttcagttgatacacagggccccaatgacctggtatggtgaaagaagcatgtgggattttctgagaaaaaaaaaaagaagctttgtgcgatactttacgaaagactgtaaccttctttgttcggtcagattaattcgtgagaaagccttgcatcacctgggggattttttgaactttagctgcccgagtaatactaactgtttttattccctgagctgctgtgaccataaatggttctggctaaaagcggcataaccgggaatgggtaaaattcttgaggccttaaactactagttgaagagaataacatgcacaaccttaacaagctaaggttcacccccgaaggcattaatccatcttgctctgatccgaacattattgaggatctggtttaccggcctaataaacccgggcctacttg

SEQ ID NO: 43440 - DNA, 450 bp, Oryza sativa
  Clone ID: PAT_MRT4530_46598C.1
atgccggaggcctccctctccctccttcccccactccgccaccgcctccccgctactccccatccccagcccctcgcgcacgccgccacccgcccccacgagcctccgccgccgccgccgccgccactcgacgagaagctgctgctgctgctaccgccctccccggcctcgcctcaccattggcagagaggcagggagagagagtgggtgccagtacgagatggctggctcgcgctcgcgctcgcagggaagccttgtcgttgtcgttgccgccgtggaggcggcgtggtgatggccgcgtgcgcgtgggggatgcaacgcaatgcaaccaaaccaccagctagtcaagcgttggcgacggaacggacgggagggaggaagaggccgtgggggaagaacggcgttccaccccaggtgtccctgagccgagcccctgacgacgactggtga

SEQ ID NO: 43441 - DNA, 238 bp, Oryza sativa
  Clone ID: PAT_MRT4530_46599C.1
gtgttctctagctagcccgcttggctcccttgatgtaatagtaaaagtacttgtatgaattctagttttgtgctttcttacatctatctggataggtgctttccaatgaccggtacggttatcagagctgcttcctttcgttactatatctgacatcgtccttcgaaacaatggcacacctgccagatgctgactctacagcgagatatgcgaattggtttgagggatatgagaaacc

SEQ ID NO: 43442 - DNA, 1948 bp, Oryza sativa
  unsure (1)..(1948): unsure at all n locations
  Clone ID: PAT_MRT4530_4659C.1
gcgtccgggatcagttcatcaccaacaaacaaaagaggaaaaaaaacatatacgcttctaatgattgtctgattgctacatacagtgcgctagcatgggtcctcttcttcatgccgacgctcatgcgcggcatgtgggccatctccggagcgcagctgagggagacgtggaatgagattcagacacaggagattgtcagcgacaggcgcaggtacagccccctgatacgagggccgcaaacatgatcaaacgtgcacgctcacctcgtcgacaaagactctcaaggccatgctccgccgcccgtgggcgctcgcgctgggcctgcggagctgcacaatacctgcaagacgtgtaagcgcgagtggcactcctagagggcgaatttacccggcggggacggccaagagaagcagaaatccccaacccaatcggaggaggaagagaagggcggcggcggcgagcggagatggtgaggaaggcgaaggtcgagttcgacgagagcccgccggatgacttcgacccgaagaacccgtacggggacccggtggcgatgctggagtacagggagcacctggtgagggagaagtggatccagatcgagaccgccaagatcatccgcgaccgcctccgctggtgctaccgcatcgagggcgtcaaccaccaccagaagtgccgccacctcgtcgaccagtacctcgaggccacccgcggcgtcggatggggcaaggacgcccgcccgccggagctgcacgatcccaagaaggtggttgaggccgacgagtagctttgctgctgctgctgttcctgggctggagaggttatctttctattggatttgaaaggagtaaaaatgaactgctgcagtccttattttgacctctctagttgctcatggatttacaataaatgatgatgtcgaagtaacattgttgtgtgttgcctgtatttttccctgcccgttctataagagccgagcaaatacatgcttgaatttatctgccttgttcttgtactcaacgatatgaatgatatttagttttcatttaccctgaaaaaaaaaaaaaaaacaccaaattaatcaagctcagttcatcgcagatcgatcgatcgatcaacatgtcggacaagtgcggcaactgcgactgcgctgacaagagccagtgcgtgaagaaaggaaccagctatggcgtcgtcatagttgacgccgagaagagccacttcgagatggctgaggaggtcggctacgaggagaacgacggcaagtgcaagtgcaccaccggctgctcctgcgccggctgcaactgcggcaagtgatgaacaaagctatcctctgcaactgccccacaatccagtgtgtcatccgttatgcgcccatgcgtgcatatatatgcatatgcatgcatgcatgctaaataatgtttcgtgttgcgtatgtgtgccatgtgacttgctatcatgtgagtcatcacctgcacctttgtgtgtctatatgtatgtacgtgtcctgtgatgtgatgatgtacctgtgctgtcatatatatggagtatactgatatataacttaaaaaaacaaaaaaatggctgaggaggtcggctacgaggagaacgacggcaagtgcaagtgcaccaccggctgctcctgcgccggctgcaactgcggcaagtgatgaacaaagctatcctctgcaacctggccccacaatccagtgtgtcatccgttatgcgcccatgcgtgcatatatatgcatatgcatgcatgcatgctaaataatgtttcgtgttgcgtatgtgtgccatgtgacttgctatcatgtgagtcatcacctgcacctttgtgtgtccatatatatgacagcacaggtacatcatcacatcacaggacacgtacatacatatagacacttctagatcgcgagcggccgaanaaaaaaaaaaaaaatttgcgttc

SEQ ID NO: 43443 - DNA, 375 bp, Oryza sativa
  Clone ID: PAT_MRT4530_465C.1
atgaaaacgggggtacccacacttgtttactggcattgatatgatcagtccacaaaatgtattttgtaacagaacatgttaaatcccttgcattattactatggtctaattctgttggacaaatcgaaatcaatgctgattaagatacttaatctgctcctgtcacaaccataatttaaagggattggttgagttcatgcagagaagggggggaaggcgacgacggagctgcttggcgatgtggagggtgaactgaccgcctttttcgatcacgtacagtttgtacacgcacgggcggtggcaccatctcgaagcttctcaccaggttgccgactataagcgccagaatgggcagagccaggatgatccccgggc

SEQ ID NO: 43444 - DNA, 537 bp, Oryza sativa
  Clone ID: PAT_MRT4530_46600C.1
atgacgtcatcctccctccccgacgccacggcgccgacgacatggccggggctccccttccccttctccgacccgtccgcccacgccgccgtccaccgcgtccgccggctatccccaccaccacctcccccacgcgccttgccgtcctccccgtcgccgccggccatccgcgccgccgccgccgcagccgccgcccgcttctctgcccgccgcttcgccacgtactcctccgagatgtacacgtccatcgacaaagcaaaatgccaggctaagcaagcaagctgtgaagccgtcgacgagctcggccggctccggtggcagttggcgcagacggcggcgctcgtggccggagctggcgaggtcgccgagctgcgcgacgacctggccaccatgaacgccctccaccgcgtgcagtccgaggccgacgacggcgccgtggaccacttcgtcctagagtggatgaagcagctccacgagctcacctacgactcggaggactgcatcgaccaataccgcttgtccagctacagcatatga

SEQ ID NO: 43445 - DNA, 633 bp, Oryza sativa
  Clone ID: PAT_MRT4530_46601C.1
atgctggggtcggggctgaatctggtgaccacggtgatcggcttcgggatgagtgccaccttcatcgtcttcgtctgcgcgcgcctcatctgcggccgcgccgcgcgggccgacgccgaggccgacgccgccgagggcagggtcgcggccgcgcgggccatggcggctggccccgcgccgttcgacttcgacgtcgagttccgggccacggatctcgaccgcacgattgagcatacccgtagtggattggaaccttttgttgttgctgcaattcctacaatgaagtacagctacgaggccttccaatcaaaagatgatgcccagtgctccatatgtttaggtgaatacaatgagaaagagattctgcgcatcatgcccaaatgccgtcataattttcatctttcctgtatagatgtatggttacaaaagcaaactacttgtccgatatgccggatctcattgaaggacctacccagtggaaaacctgccgagtcccctgtccgtagtctccctcaactattcagccaccctgaaagctcaaaacgccgtgcgttcttccagcagcagggcagcacgtacacggctttggcacagaattgcaaggaatttgtttacgacaggactggattttag

SEQ ID NO: 43446 - DNA, 330 bp, Oryza sativa
  Clone ID: PAT_MRT4530_46602C.1
cccccagcagcgtccaaaccacccagcgagaagatcgagcaaggccaaccgcccatggccaccgtcagcgccccagcacgcggcagacactccgtcgttgcaccgcacacagtcctcagcacgggccacttgggctgccagcagatgagggcgaggaggagcgagagggtgaggtgcaaacatactcacaaggaggcaggcagacacacaggcggcagcacgttcaagggaccggcgcgtcgctactggcgaatggccgggcggaaccggccggccgcccccccgaattggccgccttccttccggaaccgaaggaaggaatgttccgaa

SEQ ID NO: 43447 - DNA, 579 bp, Oryza sativa
  Clone ID: PAT_MRT4530_46603C.1
agcagtgataaactgatgatatctgaacaacggcgctgctacaaatattttcgcggccccgaatctgatcagtattgttaatgcttccttttacactatacatcaaggacacataaaaaatgaacagaggggcaaaaggcaacccgctaatctacaccctcaaatgtacaaagaatgcctaaaatccagtcctgtcgtaaacaaattccttgcaattctgtgccaaagccgtgtacgtgctgccctgctgctggaagaacgcacggcgtttctgcaatagaagatatctttgttgctcaaccgaaaaacaaaatagtttcatcaacttctatcgatatctcgcctctatacatccatgtcctcagtgcatttcttgttggatttcaatgaccacctctactgtttcttgtgaagccgggctgctttctctacctccagtacgatcacgatggataggaagtatccaatgaggtgatcgactcactgagctttcagggtggctgaatagttgagggagactacggacaggggactcggcaggttttccactgggtaggtccttcaatgagatccggcata

SEQ ID NO: 43448 - DNA, 336 bp, Oryza sativa
  Clone ID: PAT_MRT4530_46604C.1
tttatttctcaacaactagattccattccttggggggggttggataaatgcgccctgcccacatggcctgcaggcgctctgtatgatgacattggcagggctgcgatctgcctctccctgaggggagggggactggcactgcatccgacatgcggtgctacacgtccacaagagttgtgcactgggacacgatgatgaccatcgtagacagcgctctagcacggtctgtaagaggtgccaccttcggggtggagggcacggacttatgcacccacaaagcggaacctgccatttactgaggctctgatgcgactgccacatacagcatggagctga

SEQ ID NO: 43449 - DNA, 144 bp, Oryza sativa
  Clone ID: PAT_MRT4530_46605C.1
tgtactgtccgagaaagaagaaccgctaggtacgatccagctgcaggaaaagaaataccaatgaagaagccgaacacggccgcggataatgccgtaaagatcgaacttgctgctttcatcttcgacctgcttttgctaagctaa

SEQ ID NO: 43450 - DNA, 135 bp, Oryza sativa
  Clone ID: PAT_MRT4530_46606C.1
tcggctcctcctcaataacaggacgatgattaacactattcgcatactactcgctcgtctccaagacgatacaagcgtctacatggaggagtctacctaggcgttgtgactgacacggggcagacacaaccctca

SEQ ID NO: 43451 - DNA, 411 bp, Oryza sativa
  unsure (1)..(411): unsure at all n locations
  Clone ID: PAT_MRT4530_46607C.1
ttttttttttttttttttttttttttttttttttttttttttttnaaaaggcaacccggttttcccggcaaaattttttttttaatcgggcctgatttggcccctttccgcttttaacccaaaaaaaaaatgggttcccaaatgggaatttatgggggaccttgcctttaaaaaaaaggtggggctttttgggaagccggccccaaaagaaattggaaagggtcaaacaaggggcggggctgggagaaaaaaccctttaaaaaaaaaaaaaaagagtggggaggggatcaaattttaccttcctgcctgagaaaaaacgcacaaaagggggggggtttttttggggaggggcctaaattcttaaccttttggaaaggggggttttctccccgggaccccagggaggggggg

SEQ ID NO: 43452 - DNA, 276 bp, Oryza sativa
  Clone ID: PAT_MRT4530_46608C.1
gtgccatacaacaaagctcatgagaactctgatatctacagttagtgtgaggaatggcagctagccattgatcgaatccccgataaggtagcctcggaagggatcaaaactctcctgacagtgatacacgcagttgtggtacaacaggcggaggagcaaaagcaaaagaagaggtcagagtctgcattcaaggaactggagaagaaggcagaggaactaagatcccttgaattcaaatatgggccatattcgggtgctgaaggctatggagatatg

SEQ ID NO: 43453 - DNA, 825 bp, Oryza sativa
  Clone ID: PAT_MRT4530_46609C.1
ggccgcaaattttttttttttttttgtgataaccaatctgcgagtaatcatgattataacaaatcagtcattacattgatcccacagaatccacaattgatcctttctcaacatgctgctcaggtacaagcaggggtgcgtttaggagaatatccagaacgcacaggcttcggtaggtagaaaagaccaaatcagttggatggtcaaatcaaggattaatgcaatgccgttgcccggcatctataacaggagagaagctgagcagcaatccaaagagacaagcttaggagagtacatatataacccacggggttgaaaagaggagtctgcatcatgaggacgacatgaaatcttcgggccttgcaatggaaacttcctcaaacacattgtcatcttttctcagtgttaatgcaacaacagcatcattttcaaccttctgatctgctaatgtctttgagtcatccaaaacaacttcagttgtggccaacaagatcagctgttgattaccgggaggctgatcaactaatgaatgcaacttttgtttaatgcttaaagtcgtctctgttgggtcacattgtatgaagtaggtagtcttgttccgtttcactcgaatatacattgccggtgagcgatggtgcggcggggacaggaggaggacgccggcgccacctctgctagcaggatggagatcggcgccggcggcgggcgaggagacgggagtcgtcgagggcggtgggcgaggagacgcgatggattggggagccggaggtcgatcgtggtgcggtgcggggccgtgcaacgctctgctgccgaggcctatgggcc

SEQ ID NO: 43454 - DNA, 471 bp, Oryza sativa
  Clone ID: PAT_MRT4530_4660C.1
atgggcatgccaccagtgcatggtgaagttgtttggcagctgggtggaaagactgggctgagtacgatttcggtggccacagtgtatttggtactggactttggtgcggtcactgggctagatgttgtggtgaagcttggtgtagaggcagagctgagtgtgcttctagggaacaacactgcagtcgaggttgttgtagtggccaggcttgatgtggtggttggactagccggaacgagtatggtggccaggcttggtgcagtagtctggctaggagcagtcggcgtgctagttgcaacgaccgcgcttggtcgtcttgtggttgccggaatagctcgggtagcatcactagccctggccctttccttcctgaacctcgctgaacgcactacagcaatggcagcagcatcgttgcctgatgcagcagcagtagcagcgcagagagatggctctccggtgatctccattgcg

SEQ ID NO: 43455 - DNA, 656 bp, Oryza sativa
  Clone ID: PAT_MRT4530_46610C.1
acatcatgagtaatgaaaatggtaacatgccaagggcgaagatatcattaaccaagacaacggtgggaagtgaaaattctgctcccaaaatagcagctttctcatcgaggggccctagttatatctatcctgaggttctcaagccagacattgctgcaccaggggttgcgattttagctgcttcaccaaatactccagagttcaaaggtgttccctaccattttcagtctggaacatctatggcttgcccacatgtatctgggatcattgcggtgctcaagtcccttcatcctaaatggtcacccgctgccctcaaatctgcaattatgactacagcaaatacctttgacaacaatgggatgcctattcaagctaatggaagagttccaaagattgccgatccctttgattatggagcaggctttgttaatccgatcatggccggctgatccaggcctcatctatgacatcaacccatcagattacctcaagttcttcaactgcatgggaggactaggctcacaagccaattgcactggcgacaaagggatccgtgattgacttgaacctgccatcgattgccattcccaaccttaggacatcccaaactgcggtgcgcactgtcactaatgttggtgaccagcaagaggttgtgt

SEQ ID NO: 43456 - DNA, 139 bp, Oryza sativa
  Clone ID: PAT_MRT4530_46611C.1
tccagtgaaggaaaaggaaaatttgttcggggcccaaaacaggagtgaaaaacccctagcaagaaatttggcccacgctgccttggttggggctttgcttttaccgttattaccatcttctaaatcttcaaacttgaac

SEQ ID NO: 43457 - DNA, 617 bp, Oryza sativa
  Clone ID: PAT_MRT4530_46612C.1
ggagaagagaagcgagcagcgaaagcaccggcgacctcggcgaggagccaggccatggcggcgacgagccacctccgccgcgccttcgcgcccgcgctttcccaccgccgggcccaccctgcccccttcctctcccgcctcgcgttcttgtccacctccgcatccccggatcaggcggcggcggcggcgaagaagggggaggctgctgcgggcggggccgggaagggagcggcggcgggagaggaggaggaggagaagaagaagggaggcgacgctggtgacgcgaggaaggaaggggaagacggcggcggcggcggcggtgagtacgtgaacaaggacaccggcgagatcggcggcccgcgcgggcccgagccgacgcgctactgtttcatcttctatgttttccagaattccagtagcaccacataccttgttgctgttgctaggtcgacacagaaaaattgcaagttgcaagcttgtcgattcaacaaggggacgccgaaaaagtttcgcttgctgttcttgattgttcagcttgcatttcggttttcaacattccctgaaagtgcagctgcagtaccctctgcattttaggtttcagagtttcagagcactaa

SEQ ID NO: 43458 - DNA, 957 bp, Oryza sativa
  Clone ID: PAT_MRT4530_46613C.1
atggacttccccggagacgccgaggatttcgccctcgagttcatccgcgagcacctgctcggcggcgacgcccctgtactgccgcctgctgctgtaccggcggcggcggcgtacctacccaccagtaccatgttcttgccacagcagcagcgaggctacgcaggcctaacgccgcaggagtacgtggtggattccgccccggctgctgatcaggccgcgttccgtgatgatcagcccgatccggcggccgacgtgatgatcatgttcggaggcgagcgcttccctgcggtgaagccgtcgtcgtcgtcgtcgccatcgctgactgtcaccgtgccccccagctcgttcggatcatgggcgccggccgccgtgcccgccgtggcggccacggccgccgccgtggaggacttccgcaagtaccgaggcgtgcggcagcggccgtgggggaagttcgcggcggagatccgcgacccgaagcggcgcgggtcgcgcgtgtggctgggcacgtacgacacccccgtggaggccgcgcgcgcctacgaccgcgccgccttccgcatgcgtggcgccaaggccatcctcaacttccccaacgaggtcggcacacgcggcgccgaactgtgggctacgccgccgccgacgaacaaaaggaagcggcagccggaggacgacaccgccgccgccgacgacgtcgaggtgatcggagtggcaaacaaggctgtaaagaccgaagcgccgacgtccgcctactcatcgtcgtcactgtcatccatgtcgcgggacacgacggcgaccacgtcgtcggcggggacgtcgactgggtcgtcggagcccacgagttttccggtggtgacgccgtcgagctggagctgggaccagtactgggacggcctgccgccgctgtcgcctctgtcgccgcacccggcgttggggttcccgcagctcaccgttagctaa

SEQ ID NO: 43459 - DNA, 259 bp, Oryza sativa
  Clone ID: PAT_MRT4530_46614C.1
tttttgttttttttttttttttttgctacccaatggcaagagtattcagaaaaaattgaagtcatcatttattaccatatgatatatgcttcctgacaaatgaaagcactagttatttagcaaccccacagagtcatacacagggggggggtgagttgtctagtgaccagtttttggggtcctatgataacctattcagttgtagacaccatttgtcccattggggatgtcacaagaggagaacgccgggaggtcggta

SEQ ID NO: 43460 - DNA, 154 bp, Oryza sativa
  Clone ID: PAT_MRT4530_46615C.1
tttttatccaaagtgtcatcttggataccacgggcaggatgattatcgaagagtggggataacctcaagaggctaccagaactgtctttggctgaattcccgcagaactcacgcagcctatactatctgctgatgaacccacagcatattctac

SEQ ID NO: 43461 - DNA, 288 bp, Oryza sativa
  Clone ID: PAT_MRT4530_46616C.1
atggggaggagaggagatgaagagaatgaggagaggaggaagaggaagagatggggtgaagaggaggaagagataaggtacaccacgaagggccttcggccggacctaccgaaaccaaaaagcttaggcaacaagctcagaccggaggcaagcggcgaaggtcgaagagagaaccgtatgggctggaagagacctcgtcggatgggcacccgggcgaaagcgagagaaattattcaaatagatgagaatgcccccgggccatatgctttaaacatagcgttggagtaa

SEQ ID NO: 43462 - DNA, 354 bp, Oryza sativa
  Clone ID: PAT_MRT4530_46617C.1
atgacggcggcggcgggcttggcgctcgacggcggcgaacttcttggcctcccctcctctcgcgtgcccccgccgcctcgtccgcgtcttcctcgcgcgtcgtggctcgttagggagcggcgtggcagcgacgagtctcgacgacgtacggtgtggcagctcgccagatccagcggcgatggctcgtccggcgcggcacgtggatggccgtggccgtggctttgtcaccgccaccgtggtcgccgccgcgctgccctcctccccaggccggcgacgcggatctggcggcacgggacgacctcggagcgggcggcgctgcggcgacacgccctacctgtcccccacgaccgctag

SEQ ID NO: 43463 - DNA, 135 bp, Oryza sativa
  Clone ID: PAT_MRT4530_46618C.1
atgagcttcgacatggcgtggagcgtggaggactccaccgccggcgacaagctctggcgtgagacgtatcagctgatacctcgcaagtatcgcctgataaaggtgaagtatcagaacatgatacctcagaggtag

SEQ ID NO: 43464 - DNA, 1338 bp, Oryza sativa
  Clone ID: PAT_MRT4530_46619C.1
atggaagaagaggaatatgagattcctgatctcaaccttgatcttggtgtgcaagaagtgctacaagatgaaggtgatgggatccctgaccttaacctggatcctgctgtgcaaggagaagatgccttccaatatgaagatgaagagcttcctgacaaccaatgttttggtgctcatgaagatgaacatccagaccctgccatgcaagcagttgaactctccaatggccggagtgcacaagaaatttgtcatctaaacatggagccagcaaattatggagaagatgatattgtatttgacgatgacagactctatgttctccaagatcaatcaaattatgcagacgaggaggattttgatgtttattctccttatatggatgttgtctttgatgaagatctccatacatcaagtgatgaggaagatactcaacaagacaatataaagagaaggaaatatttaccagaagctgagaacaaagctatttatggtgctttacttgcaagtactatcaatgggaaacttgttgatagagatactacaacaattattgcaactatggttgatgtgacaaggagagttgtacaagacatttggacaaaggcgaagaaatgtttagcagcaggtgttgaagttgactttaaatcaaagaagcctgatgttgctactttgaatgctgaaccaagatttatagacatgcaaaacattgtgcatattgatgaaaaatggttcaacgccactatgaaaaacaagaccttctaccttgtattcaatgaagatgaacctgtgagatgtgtgcaaaataaaaatgccatagataaagttatgtttttatcagctcttgcaaagcctaggtatgatgaggaaggaaattgctacttcgatgtcaaaataggaatatggccctttgttaggaaggaaccagcacaaaggagtagtcgcaacaggccgaagggtacattggtcacaaaatctattacggtgtcgagagaaacaagtagggctttcttgattacaaaggttattccaactattgcctcttgttggccgagagaagatgtagggaagaccatttggattcagcaagacaatgcacggacacatattctgccaaacgacgaagcatttgccctcgcggtggcccaagtaggcctagacatacgcatcatgaaccaacgccctaattcaccaaacatgaatgtgcttgatctgggtttctttgcttctcttcaatcgaagacatacctcaaaaattgtagtaacatggatgaattaatcagcaatgtggacgaagagtacaatgagtataattctaacttggtaattcagcataactag

SEQ ID NO: 43465 - DNA, 186 bp, Oryza sativa
  unsure (1)..(186): unsure at all n locations
  Clone ID: PAT_MRT4530_4661C.1
atcaacaagaacgaaattttccttccctttaaacantttctaatttcgttccagagtattagaaactttttatttatataatgagcatagttacggcagaggtacatggtttattagatattagcaatccccaatcaatatcatatcttcctatatagtattgattctttttttcacaaagaaatt

SEQ ID NO: 43466 - DNA, 280 bp, Oryza sativa
  Clone ID: PAT_MRT4530_46620C.1
aggacgctggggctagtgtggacatatgccagggtattcggacgggtcaagtcttctacgcaagacaggagcgaaaccctagctggggatatttatcctattctgctttattgtctccgatgcactctagtgaccgagtgtgcgtgagcgatggtgaccacgacagatctgttaagtggagcgcactagctgacggatgggtgcgcaccgaggtgtgaacggcgcgcgtgccgtggcaccggcgcacccaaaaaggtgcttggagtgcaagccaaatcac

SEQ ID NO: 43467 - DNA, 1731 bp, Oryza sativa
  Clone ID: PAT_MRT4530_46621C.1
atggaagaagaggaatatgagattcctgatctcaaccttgatcctggtgtgcaagaagtgctgcaagatgaaggtgatgggatccctgaccttaacctggttcctgctgtgcaaggagaagatgccttccaatatgaagatgaagagcttcctgacaaccaatgttttgctgctcatgaagatggacatccaggccctgccatgcaagcagttgaactctccaatggccggagtgcacaagaaatttgtcatctaaacatggagccagctaattctggagctgttgatctggtgtttgacgatgacgaattctatgttctccaagatcaatcaaattatgcagacgaggaggattttgatgtttattctccttatatggatgttgtctttgatgaagatctccatacatcaagtgatgaggaagatactcaacaagacaatataaagagaaggaaatatttaccagaagctgagaagaaagctatttatggagctttacttgcaagtactatcaatgggaaacttgctgatagagatactacagaaattattgcagctatgtttgatgtgacaaggagagttgtacaagacatttggacaaaggcgaagaaatgtttagcagcaggtgttgaagttgactttaaatcaaagaagcctggtaattgtggccaaaaaagaagtgacattgatttggatcaggttttagcacttcctttgaactcaaggtgtagcatcagatctcttgctagtgcattgaatgctagcaaaagccaggtgcataggttagtcaaagaaggagcccttcgccgtcactcaaatagcattaaaccttacttgaaggaagctaataaaaaacaaaggctcgagttctgtgtatccatgctagatgctgctactttgaatgctgaaccaagatttatagacatgcaaaacattgtgcatattgatgaaaaatggttcaacgccactatgaaaaacaagaccttctaccttgtattcaatgaagatgaacctgtgagatgtgtgcaaaataaaaatgccatagataaagttatgtttttatcaactcttgcaaagcctaggtatgatgaggaaggaaattgctacttcgatggcaaaataggaatatggccctttgttaggaaggaaccagcacaaaggagtagtcgcaacaggccgaagggtacattggtcacaaaatctattatggtgtcgagagaaacaagtagggctttcttgattacaaaggttattccagctattgcctcttgttggcctagagaagatgtagggaagaccatttggattcagcaagacaatgcactgacacatattctgccaaacgacgaagcatttgccctcgcggtggcccaagtaggcctagacatacgcatcatgaaccagccccctaattcaccagacatgaatgtgcttgatctgggtttctttgcttctcttcaatcgaagacatacctcaaaaattgtagtaacatggatgaattaatcagcaatgtggacgaagagtacaatgagtataattctaacttggtgagtagggttttcctaaacctacaagcttgcttcatagaagtgatgaaagccgatggaggcaatggctacaagataccccatatgaacaaggatcgattggagaggcttgacatgctccctactagtctgacttgtgatattgcactttacaacaaggttatgcagaccttgttgaactag

SEQ ID NO: 43468 - DNA, 187 bp, Oryza sativa
  Clone ID: PAT_MRT4530_46622C.1
cacactttaagagaaaccagacgtcatgtgcacgtgcgcaagtttggggacccgtgagagcgcgccctctttttttttggggtttttttgatttttttttttttccacctttaaacagggtgtactgaatttgatcaatacaaagccaacatatatccaaaaaaagcaagttgaaacaaatgttaaa

SEQ ID NO: 43469 - DNA, 322 bp, Oryza sativa
  unsure (1)..(322): unsure at all n locations
  Clone ID: PAT_MRT4530_46623C.1
cgccttccgcaccgtcgncggcctcggccgcagccctntgcgcagtccctggccacgnccgcggccctccacggcccaggtcatcgtcgtcgcgagcctccgtgaccgccgccctccgtgactgccgccgtcctccgcgccccatgtntcatcatcacgagcctccagccctccaccgccgctgctgccgggataggatttggcatgggagaagaaaggaggaggaggaggaagagagacttacttgtgggncccaatgttaaattggagaatgtgaatggagagactgttggncttaaaaaaaaaaaaaaaaaaaaaaaaa

SEQ ID NO: 43470 - DNA, 1994 bp, Oryza sativa
  Clone ID: PAT_MRT4530_46624C.1
actagtggatcccccgggctgcaggcgcaccagctgcagcgccacactccactcctcctggacgactccactgtctcctcttcaactgaatcagtaccagaccacgccgcagctgagctgcagtgagcgcgcggccagtagccttcgtggcgcagcagcacggtggcggcagagccgtcgccatgaaggcggcggcgagggagaggaagccgaggcacagcaacgggagggccgcggcggcggctgccaagaacctgagcaaggtcgagcccggcaggcacctcgccgtcgtcaggctttttccggcgtgcctcctcgccctgcttatctgcctctgcgtcgtcaagttcttctcctctctctcgtctcaatcccagcggattggaaccaggagcaggatggtgagttcttgggaaggcagcgccagtacgaatgtacctcgaattcctgttgctcctctgattatgggcagggtcgatgaagatatttcgacaagatcgccggaattaggagtagtaattgtctttgtacttgctgtttctagagtagttacttttcttgttgaaacttgcaaaggccttgggttttgtcactggaaaccgttgtcttacccaatgctaattttgaaggggaaacaaggttccgtgtttaaaaatgaaaattttaagaatgggacagattcagagaataaatcaagatcagagagacaggttgcaatctctacagagaatgatccccctcctggaaaggaagaatctttgacaaaatcaccacagacagcagtttcagagagtgaagttccaaagcctaagagtaagataagttgtgatgataagagtaaagatgaaggcttcccttatgcaaggccaatcgtctgccacctgtccggcgacgttcgagtttctccggcgacctcctcggttaccctgaccatgccattgcagcaaggggaggcagcggcgcggcgcatcaggccatatgcacgccgggacgacttcctgctacctcttgtcagagaagtggccatcacatcagctgcaagtgaaggcgatgctcccagctgcaatgtcagccatggcgtccccgcggtcatcttctccatcggcggctacaccggcaacttcttccatgacatggcagacgtgctggtgcctctgtacctcaccaccttccatttcaaagggaaggtacagctgttcgttgcaaactacaagcaatggtggattcagaagtacaagccggtgctccggcggctttcgcatcgagccgtcgtcgatttcgactccgacggcgatgtccattgcttcgatcatgtgatcgtgggcttggtgagagacagggacctgatccttgggcagcatccgacgaggaaccccaaggggtacaccatggtcgacttcacgaggttcttgcgccacgcgtacgggctgaggagggacaagcccatggtgctcggcgagacgagcggcaagaagccgaggatgctgatcatatcgcggcggcggacgaggaagctgctgaacctacggcaggtggcggccatggcgagggagctgggattcgaggtggtggtctccgaggccggcgtcggcggcggcagcggcggcgtgaagaggttcgcgtcggcggtgaactcgtgcgacgtgctggtgggcgtccacggcgccgggctgacgaaccaggcgttcctcccccggggcggcgtggtggtgcagatcgtgccgtgggggaggatggagtggatggcgaccaacttctacggcgcgccggcggcggccatggagctcaggtacgtggagtaccacgtggcggcggaggagagcagcctggcgaggaggtacccgagggagcacgccgtgttcagggaccccatggccatccatggccaggggtggaaggcgctcgctgacatcgtcatgacgcaggatgtcaagctcaacctgcgaaggttcaggcctacgcttctgcgtgtgcttgatcttcttcaggactag

SEQ ID NO: 43471 - DNA, 1664 bp, Oryza sativa
  unsure (1)..(1664): unsure at all n locations
  Clone ID: PAT_MRT4530_46625C.1
aaggaaggtccaacctccaaggactaccactcaccaactcctcccaaccaaaccaccacaatcctctgaatctcactcacttcaaacccatccagaatcccagattcacaattctgcaggagccaccacagcattccgaaaatccatttttttgacaaattcgttccttttctttttcaaacagtgagctttgggatgaaaacaaagtcatattatctgcagcatcgcatcggcatcatatttttctttttctttttttgttgttgggattgatttatgacatcnacatctggcgttgatgtcgtgcctgctggtgctgctcctctccctcgacaagttcctcctccactacctcaagaagcgctggctctccccgaggatctcgacttccccgtccaaatcgcggcgatccatggcggcggcggcggcgggcggcggtggcgccaagtggagcgagacggccatgctcgtcatcgacatgcagaaggatttcgttgacccggcgatgcggagcccgatgctggtggatggcggccaggcggtggtccccaccgtcgccgaggcggtcgccgtcgcgagggagcgcggcatctacgtcgtctgggtggtcagagagcatgacccttctggagcagatgttgaaatttttcggagacgctattattctggtgggaatgttgggatagatatatgacatcaagatcctgatttgatggatggccttcttgtgctgcacctctccctcgacaagttcctcctccactacctcaagaagcgctggctctccccgaggatctcgccttccccgtccaaatcgcggcgatccatggcggcggcggcggcgggcggcggtggcgccaagtggagcgagacggccatgctcgtcatcgacatgcagaaggatttcgttgacccggcgatgcggagcccgatgctggtggatggcggccaggcggtggtccccaccgtcgccgaggcggtcgccgtcgcgagggagcgcggcatctacgtcgtctgggtggtcagagagcatgacccttctggagcagatgttgaaatttttcggagacgctattattctggtgggaagggcccaacagtgaaaggtttgaaaggtgctgatctagctgatgggcttgttatcaaagaaggggaatacaagttggtgaagacaaggttcagtgctttctttgcgacaccccttgattctgtcctcaaaacctcaggaataaagaaattggttatcgttggggttcaaacaccaaattgcatccggcagacagtctttgatgctgtagcattggactatgagaaagtgacagtcattattgatgcaacagctgctgctaggccagagatccatctgtcaaatataagagatatgaagaatatcggagtggaaacaccaaccttggaagaatggcgacgataaaattgctgtttctagtgatatactacatgctcaactccaaagtattggagacatccctgttcctttccatctcagtgggtgtaattatattaaccttatgtcaggtagaccaacagcagatactgtttatatatatatatatattcaactgtacaactcctaaccattcctatataaaattgatcatattgggattactgctaaaaaaaaaaaaaaaaaaaaaaaaaaaaaa

SEQ ID NO: 43472 - DNA, 417 bp, Oryza sativa
  Clone ID: PAT_MRT4530_46626C.1
atggcattccatctcctcgtgctcgccacgtggctcctctccgtacgtatcggtcgccgcctaaccctggatcgctttgcttatcgtcaaaaggcagagaccgcacgtccgcaccggtctacctttcgtctccgcacgcatatgcgtacatacatgcatccgaattttacgatccaatcaatcaacctagacgacacaccatgcatgacacgcgtcatgacggccacggccggccggcccacgagcagatcgcacaagtccctacgatttcagttcattcatctgcgtccctctgcaataatgcaacgcaccatcgttgaaaacaacagtgaaaacttgaagtaccaccttaaatctagaggtcgacgagctagcaaacctgcatatggcgaggagttcgatcagctccggaatcca

SEQ ID NO: 43473 - DNA, 2016 bp, Oryza sativa
  Clone ID: PAT_MRT4530_46627C.1
aaggatgggttcatgaccccttatccaaggatgggaatggaaaacctagcggaaaatcagctaagaaactcaaggagatagcagttatgggtaaagtcctcatcaatttgacaactcgatggggttttcaccaccgcatattggacaactactttttctaatatattggttctactcttgtctagactggtttcagatgatgtgccatgtgtagtgcagattgaaacaacgatacaaaaatatactgtttttgggtttgagaaccattgaatgcaaatacaaggttttttggatgtagtgcaattgtactgttatagtgaccttgggatttctgatctagcaaaagacctctcaagcaagccaagattttaagaaaaggtaaataaatggagcaagaacctatccaagtttactaaactcctaggtcactgtaacttagtcctaaatttcttgggctacaagaatagaacctgagagagttgatcaaaagatagattttggttcagtcaaaaaaaaaaagatagattttggagctcttccactataagaaattatactggaagaaaagatgcactagaagatggatgttatatggggatgaaaatacgaatttctttcattctgtggccactgagagatatagacaaaacacaatagctcatattgccaatgatgatggagtatttgtacagtcacatgaggcaaaagcttttcccttctggcagtcctctaaatacagaatgggtataactactttacctgagatggcttataatttgactgatctgctcacaaggaatgtaaatatggataggttggtgactcactttttgacccaagagacgggtgatcagtaagacgaatgccaatatataagaccccaggccctgatggtttcagtggtggctttattaagttctgttgaccactaaatgcacaggatttctacattctctgtgcacacttccatgcaaaaatcctatatttaagatctatgaactcattctatataactttggtacccaagatgagctcactagaaacaattaatgattccagacctatatccttgaatgaatgtctcaattttttgaccaatgcaaactcttggctgaaagattgcctagttaaataatggaagtggttcatgcatatcagtaaggcttcattaaaacaaggacaatccaagatttcttccatgggcttttgagtatttacatcaatgccaatagcccaaaagagagataattctacttaagctagattttgagaaagcttttgacataacaaaacacgagttcatcattgagataatgaggcataaaggttttcatgcaaaatgattgtcatcggtacaaactacttttagcacaacaaccacaacaattttgttaagtgatgttctaggaaggtggtttgaatgtaaatgaggtgtgaggcaaggagaccctctttcatcattgctctttgttctaggagttgatctattgcaatctattatcagtaaatcttcatcctgaggcctgttgtcaaagtctattggaaatgctgatatggatttttctatagtccaatatgcggttgataccctgttatttgtcaaggctgatgcaagagagattttatgtttaaatgctgtcttgaacacgtttccttagtccactggtttcagagtaaattatcacaattcaagcatgataccgctgaatgttccagaggataaaccaggttccctagctgatctccttggttgctccattggagaacttcccgtcacataattggggttacctttgggcacaacaaaaccgaaagttttagatatggcacccatggtaagtagggttgaaagaaggttcagctctactgccagattcatgacttatgggggaaggttgacacatgttaactcagttttgtgatgtcacccaacatattatatgtgaccttttaagctacctagaatagtaatagaggcttttcataagtatagaaggcactgtctgtggataggga

SEQ ID NO: 43474 - DNA, 150 bp, Oryza sativa
  Clone ID: PAT_MRT4530_46628C.1
atggcagtaacggtcggaaaacggcaaagtgcgaacttactcgggatcgaagcaaagtcggaggcggagattgagttcagaaacagagcaggaatcggctggagtccagatcggctacgattaggatcggctgggtctgagtcggactag

SEQ ID NO: 43475 - DNA, 417 bp, Oryza sativa
  Clone ID: PAT_MRT4530_46629C.1
atgcaggcgcgggtgcaagcgtgtgtctgggcgatgcacgcgcctgcagtccactcacctccacagtctcatttgcatcttccctatcctcctacccctctcttcttgctgttcgccttcgagtattcacggccaatcgaggagcaccaaggaccggcatggtctttctgcgctgggaagaagaaggggcttcaggaggtcagctggggaagaaggggcttgaagttgaagaggaagaagaagcccggtagaaaatgccggatccggtggccacaagctcctaggcagcagatctggcgatgggatcttgtggggagctcggctgcggagtcgagcgatgagcatcttggagttcggcggtggggagcgagccgcgtggctagcctcatccaggatgagtcatacgagccttactag

SEQ ID NO: 43476 - DNA, 870 bp, Oryza sativa
  Clone ID: PAT_MRT4530_4662C.1
atggagatcaccggagagccatctctctgcgctgctactgctgctgcatcaggcaacgatgctgctgccattgctgtagtgcgttcagcgaggttcaggaaggaaagggccagggctagtgatgctacccgagctgcagagcgcaagaagaggagagccctgcatcaagcagcaaggacgcttgctccggcacacaagcaggctgccacacctattccggcaaccacaagacgaccaagcgcggtcgttgcaactagcacgccgactgctcctagccagactactgcaccaagcctggccaccatactcgttccggctaccacaagcgcacctaagccagccacggcatcaagccctacaaaggtaccagctttgtctgtcaatcccattctatctatcataggcgtacctagtccaaccaccacatcaagcctggccactacaacaacctcgactgcagtgttgttccctagaagcacactcagctctgcctctacaccaagcttcaccacaacatctagcccagtgaccgcaccaaagtccagtaccaaatacactgtggccaccgaaatcgtactcagcccagtctttccacccagctgccaaacaacttcaccatgcactggtggcatgcccatttccgcaaatcgcaatgtagcgttcaagaaggaagggtctagcatatgcgctaccactcgcgccgcagagcgcaagaagagaatagtcttgcaacgaacttttgtgttacctaatcaagccactacaccaaaccctgctaccatgcctgccgctgtcaaccgggctgatgtaataagtctcccaaacacaccaagccccgatgtcatgcccacaatagctgccacgggctag

SEQ ID NO: 43477 - DNA, 1119 bp, Oryza sativa
  Clone ID: PAT_MRT4530_46630C.1
atggatgccaagaagccatatttcattgctatcatcatacaggtgatctacactggcctgttcgtcgtcaccaaggcagccttcaaccatgggacgaacaccttcatcttcatcttctaccgccaggcagctgcctctctcctgctgctgcctctcgccattattctcgaacggaaaaatgcgccgccgatgtcgatccggctgtttgccaagcttttcttgtatgctctgcttgggaacacaataagctttaacctgtacaacacgggcctcaagtacacttcgtcgacggtggcatcggcggcagccagctcggtgcccgtactgaccttcttcttcgcagtcctactaaggctggaagtgatccggctgaggcgcttgtcgggcgtggcgaaggtggccggagtggggctatgcctcggcggcgtgctggtgatcgcgctctactccgggccggcgttaagccccctgaaccaccaccgcgcgttcggcggcggcgcagagagcggaagcagtggcgcggcgacgagggcgaggtgggtgacggggacgctcctgatgctgctgtccaacgtgacgtggtcgctctggatcgtgctcatgtcgccgctgctcaacgagtacccctgcaagatgctggccacggcgctgcagtccctgctcagcgcggcgcagtcgctggtgctcgcggcggcggcggcggcgcggaacccggcggcgcggaggctgcggctcgacgccggcctcctcgccgtcgcctactccgccgtcgccgtcaccggggtctcctactacctccaggcgtggtgcatccagaagaaggggcccgtgttcctggccatgtccagcccgctcagcttcgtcttcaccatcttctgctcctccttcttcctcggcgaggtcgtccacctcggcagcgtcgtcggcggggtcctgatggtggccggcctctacagcgtgctctggggcaagagcaaggagcacgacacgctcacggtcgccgccggacagcaggaagaagacgctgctgcaccacccgctgcagagagcagcagcagcagtgacaatgagagcaaacaccagcaggggagatttgcgtcggcagatcaacaagtctag

SEQ ID NO: 43478 - DNA, 1333 bp, Oryza sativa
  Clone ID: PAT_MRT4530_46631C.1
cccgggctgcaggaattcggctctttttttttttttttaattagtctttaccgtttttggtctcgttttttttttttgttttgttgttttttttgacccaaattaactgctcttcattgtaatgcaaagagaggtactgtatatggtcgatcctaaaacaatgctcgacccaaattcttattgggcttgaaaaacagacaatgagatcaaaagacatgtgtcaaatgttgttccaggtcaaaacacgtaacaaaaaaaccaagcttttcccaagcgggagcttgacaaaacattcagtgagcaacagccttctgagccttgtttgggaggatgttgtccgggaggatgagctccggcgggatctcacggaccacgccgagcatcgaatcatactcctcgtctttgtgggcatactttttcctcagcatcttctcgagctcgatctcgtcgaaggtcttggaattctcggcagcatggacttgggccagattgatgtagttcgttgctgactgagcaatgaacgctatctcctcttcagtaagctttcttaggaacttggcaggattaccgacccagacctctccagaaggaatccttgtgttctgcttaacaagcgatcctgcaccaaccatgctgtgcttttcaacgaccactccatcaagcagagtggcacccataccaacaaaagcttcatcctcgacggtgcatgcgtgcagaacagcactatgacctattgtaacattgtttccaattatggttgggagaaccttcccgctgatgttagcttttgcaacatgtacaagggaattgtcttgtatatttgatccagatccaatatgaatgctgttgacatcacctcttaaaatggagccgtaccagattgaggatccatgtccgatctcaacatcgccaatcacagctgcactgggagcaacaaaaacatccttgtggactctgggctctttctcaaatatgttcatgatcgtgcgatgccttgaaagctgctcctcgacgcggaggccgccctggatggtggatccgaggcggtccatggcctgccccgtgccgcggatccacttccccaccgtgtagatcgcgcgcccgagggtccccatgcctgtcgcctccctccctccttccctcctcgccctctccgctcgcgccctcctctgtctgtccggagctcgccgccggccgccgccgccgccgccgccgcgggaggtaggggtttgatggcgtctggtggtgagaagagggagaagagtgagagagagagagaggggcccaaggaggcaggagagaaggaaatggttttgctccaataaataaattt

SEQ ID NO: 43479 - DNA, 634 bp, Oryza sativa
  Clone ID: PAT_MRT4530_46632C.1
ttcttattaaatacaccgaaaaaaaagtcagtaaaaaaaaaaagaccacctaaacttaactaccccttgccctcccactgaacccttctttctaattcaaaaaaggaagagcgcaccaaacaaaaagaataaagaaaaaattccgcaacttacgctctcattgcagcggcacaaagtggcggcaagaaagaaaagaccaaaagaaggttttttttaatacctctgacgaaccaagcagtctgatcatccttgcccgtccccctcttctgtcaaccgttgaaagagcatagcccaggaatgaaccatatcgatccaaggttgcaaggaaagaagaaaggtaaaccagaccataggaatcttctgatgaagtcaatcagagaggacggttaggttctttgttgcctcatctgcttagcttatagaatcacactgttctagctatagataggctcaaatcacacggtttatcacgatagacattccactgctgaatgatggaaacggaagctttttcttactgatggactgggagttcagactgacggttagatggttgttcgcttgtgtgcttcttttccttccccactcaaaaacagtgttacagaatgttcttcaaaaaaaaaaaaaaaaaaaa

SEQ ID NO: 43480 - DNA, 214 bp, Oryza sativa
  Clone ID: PAT_MRT4530_46633C.1
aaaaaaaggggggggatccccccaattttttttttgaacaaaaaatttttcttacaaggaccccgggttaaaaacgggaggggtttcaaaggggaaatttgttggggaaggaaccccttttttcctcccccaaaggcccccaaattttaggttcggctttttagtttttaaaaacaaaatttggaacaaacggggaaaacttttgggggtcccc

SEQ ID NO: 43481 - DNA, 175 bp, Oryza sativa
  unsure (1)..(175): unsure at all n locations
  Clone ID: PAT_MRT4530_46634C.1
ctcgtttcctttcnnttcgtttccaagccgcccagatctcgcttctagaaccttccactccanggcggaggcgggatgctcntcaggagcccgctcccgcgcgaacggcgcccnntgcccccncccccgccgccgcgntgncggcangtgcanagcgccgnaagcgnggtcggtg

SEQ ID NO: 43482 - DNA, 753 bp, Oryza sativa
  Clone ID: PAT_MRT4530_46635C.1
atgaatcctaagctgctcatggctgctcgacatggagacatcgagaccctaaaacgcctcctcgccgtgaacacagcacagccaccgccacaagtcgtcctccaagtcgaccggcctgcggcggcggcgccatctgcagctgcgaacacgctcctggagggagtcaccagcgaaggggactccgcgctccatgtcgtggcggcagcggcggtggcggcggcatgcggagacgacgacgacgacgtgttcctcgactgcgccggggtgatccacggggcagccaggcacctcatacgtgcccgcaacagcaacggcgacacgcccctccatcgcgcctccagggctgggagcgttaacatggtccgccgcctcatcgccatggcaaaagacgaggccggcgacgacgaccacgacgaccacgacgacggcggcgaacggcggagacagagggcggcggtggagctcctcctgagagcgcagaacaagcgcggtgagacggccttgcacgaggcgatccgctcgaacagcagggatctcgtcgtcgacgagctcctctcccacgatccggagcttgcccgtgttccaggagaagaaggaggcacctcgccgctgtacctggccatctcactgcgacggtttgaggttgcgaagaagctgcacgagagggacgaacagctgtcctactctggacctcaaggccgaaacgctttgcatgtcgcggtgctcattggcaaaggacttaaatttgggtga

SEQ ID NO: 43483 - DNA, 2469 bp, Oryza sativa
  Clone ID: PAT_MRT4530_46636C.1
atgcccctattatttgaattggataaattattgagaaatgctggatattctttatcacactttaatttgccacttccagatgatattggtagtgcatctgcagataatagattattactagatgaactcagctatgatattaccagcattgcatctacatctgctaatgacatcaatagtctgaatacaaaccagaaggaaatcttcaattctatttctaactcagtcataaataatgagggaagaacattctttgtgtatggatatggaggaactggaaaaactttcttatggacaactttattaaactttgtgagaactcaagggaaaattgcattagctgttgcatcatcaagaattgcagccctcctacttccaggagcattagatcgcacacttagagatatattatcggacattcgacctaatgcacagcataggcaatttggtggaataactgttgcatttggtggagattttcggcaaacacttcctgttattcagaatgcaacaaggcaccaaattctgcgagcttctattgttaattcatgcttatggcatcaatgtgtagttcttcaactgactgaaaatatgagacttagctcacaaaacctttcaccatccgataaagaagaactacgggtatttgcagattggcttttaagagtaggaaatggtacagagcctcatatttcaatagaaaatgaaaccaatggtacttttatagagataccccaatctcttctgttgccctcagattccagaaatctggatagcttgatttcctttgtgtatgacttaggatatgaaccaagcaatattacaacatatttttgtgatcgtgcaattttatcaccaacaaatgaggttgtttcagaaataaacaacaaaatcattgctcaagtaacagctgctgaaatgtcatattatagctcagatactattgatgatagctgtgcaaaccattcaactcgagaggctctatacccaacagaattcctcaacacaatatctttgaatggacttccagaccatgttttgcatctcaaaattggtgttcctataatgcttttgcgtaaccttgatccttctagaggtctctgtaatgggactagacttattgttacacagctcacaacccgcatcattgaaggggaaataatgactgaaaaagccaaagatctgataggagttatcagccatgttgggccatatgattatgctggcaaaacatcatccaagaaaaacagaaagctcaaaatccgtaacaaagatgaacaagaacaaggaatagtcctctggggtgaatatggagagtcatttgatgaagcttttgttctacagaaatctacagaccacaaaatagtagtagctatacttgttggacttacagcagggacttatttaggcaaaacagaggctacatcaagtttagcaacacaaatatattttgactccgatataacagagattgttgaatatcaaagcaggtacaaacttcctttaacaattaaagatgaattaggaactttggacgcagtagcattctacaatgtggctgaggatttggttgaggtaaatgctactcaagctacccagaacttgaaaattgatgcaaccgaacatgccatagctcttgatacagccattgggaaaacaagactgtttcacattgccatgaatacaaagtactcttcacacttcactatcaattatgtcctcaagaagagttatcccgttgaaaatgaaaatacaagtttgatgctacctactctggaaaatacaaaggtagcaaaggaatcagccaccaaacaacttgcaacagatgaagggctaaccaccatggaacattacagcagcaaagaagaccaacatcccactacgccaccgtccctacaacctccagaaacaactctagacaacaatacagtaaaccaaattataccttcagcaaagagagctcttcaatttgaaaaggagttacacattgatcaaccaagcccagcaattgcaaacactattcaggttgcaacaaatcaactttatcattcccaacaagtagatctcagcaaggaaaaacaaccgtcaacagaattttctccaggacaaaattctaagcgccataaaaaagtaatggaagcctccaccaatggagaggaaaaccagctgcagcagccaaagatagctgatcaacagccatcgggtcacaaggaacagatggaccaacaaccagaaaaaaataggaaccatgaggtgcaactcatccacaccaactacctgcaagcagtttccaagattattgcatccaaatcaacagctatttctatcactctccaagggaaatcatccaccgacgacctctccaagctgcagccaactcaagctcacgttgtgaattacatgaaaaataagcttcctcacatgcatatcattctcgatggagaaaatgtcaaaaacaatgagatttag

SEQ ID NO: 43484 - DNA, 249 bp, Oryza sativa
  Clone ID: PAT_MRT4530_46637C.1
atgacacattatgagcacttccagcgggaattggacgccgccaagggtcttcatgaggagctggtgaagtcagtggagcccaccctggagctgtttttcccttcccggtgtaagggcaaagatcttgtgcaactggcaacagagctggttcctgaggggccaactgctgttcgtcggctgtctgagggtggtggcagggaatgtggcggtcgccgcgaaggtgactccggtagtggataccttagctaa

SEQ ID NO: 43485 - DNA, 4216 bp, Oryza sativa
  Clone ID: PAT_MRT4530_46638C.1
aggaacaccaagatcttcaccagaggataaatataagttgagtgaaacacatgcaaatataaaattaagttttgtttatttgattacagcaaactgtaggtaggtagtaatactatgagctggaaacagtaggaaactgtaaggtctaaatctcattgtttgtgacattttctccatcgagaatgatatgcatgtgaggaagtttatttttcatgtaattcacaacatgagcttgagttggctgcagcttggagaggtcgtcggtggatgatttcccttggagagtgatataaatagctattgatttggatgcagtaatcttggaaactgcttgcaggtagttggtgtggatgagttgcgcctcatggttcctatttttttctggttgttggtccatctgttccttgtgacccgatggctgttgatcagctatctttggctgctgcagctggttttcctctccattggtggaggtttccgttacttttttatggcacttagaattttgtcctggagaaaattctgttgacggttgtttttccttgctgagatctacttgttggggatgataaagttgatttgttgcaacctgaatagtgtttgcaattgctgggcttggttgatcaatgtgtaactccttttcaaattgaagagctctctttgctgaaggtataatttggtttactgtattgttgtctagagttgtttctggaggttgtagggatggtggcgtagtgggatgttggtcttctttgctgctgcaatgttccatggtggttagcccttcatctgttgcaagttgtttggtggctgattcctttgctacctttgtattttccagagtaggtagtatcaaacttgtattttcattttcaacgggataactcttcttgaggacataattgatagtgaagtgtgaagagtactttgtattcatggcaatgtgaaacaatcttgttttcccaatggctatatcaagagctatggcatgttctgttgcatcaattttcaagttctgggtagcttgagtagcatttacctcaaccaaatcctcagccacattgtagaatgctactgcgtccaaagttcctgattcatctttaattgttaaaggaagtttgtacctgctttgatattcagcaatctctgttatatcggagtcaaaatatatttgtgttgctgaacttgatgtagcctctgttttgcctaaataagtccctgctgtaagtccagcaagtatagctactactattttgtggtctgtagatttctgtagaacaaaagcttcatcaaatgaccctccatattcaccccagaggactatttcttgttcttgttcatctttgctacggattttgagctttctgtttttcttggatgatgttttgccagcataatcatatggcccaacatggctgataactcctatcagatctatcaatggttttgatattccgcttttagatggtatctgatcaaatgggcagaattcaaaaccatagtttgggatggatgaacctcttgattctaggtgatgaacctttgtgctggacttaaactgcaacatgtatttttggtggtggtaaatatattttttgtttttaatgtcaacagtattgacatcaacaaacatgtagacacaaccttggcttttgttaattgtcatcgcatatgacaaacgtattggaaattgacgtctttttagcttgaatggccacttagattgggctgatgtcgttataatacgcggtatgtatgcttttgaacctttggcttttccagtcattatttccccttcaatgatgcgggttgtgagctgtgtaacaataagtctagtcccattacagagacctctagaaggatcaaggttacgcaaaagcattatagaaacaccaattttgagatgcaaaacatggtctggaagtccattcaaagatattgtgttgcggaattctgttgggtatagagcctctagagttgaatggtttgcacagctatcatcaatagtatctgagctataatatgaaatttcagcagctgttacttgagcaatgattttgttgtttatttctgaaacaaccttatttgttggtgataaaattgcacgatcacaaaaatatgttgtaatattgcttggttcatatcctaagtcatacacaaaggaaatcaagctatcaagatttctggaatctgagggcaacaaaagagattggggtatctctatgaaagtaccattggtttcattttctattgaaatatgaggctctgtaccatttcctactcttaaaacccaatctgcaaatacccgtagttcttctttatcggatggtgaaaggttttgtgagctaagtctcatattttcagtcagttgaagaactacacattgatgccataagtatgaattaacaatagaagctcgcagaatttggtgccttgttgcattctgaataacaggaagtgtttgccgaaaatctccaccaaatgcaacagttattccaccaaattgcctatgaaagtttaataaagttgtccataagaaagtttttccagttcctccatgtccatacacaaagaatgttcttccctcattatttatgactgagttagaaatagaattgaatatttccttctggtttgtattcagactattgatgtcattagcagatgtagatgcaatgctggtaatatcatagctgagttcatctagtaataatctattatctgcagatgcactaccaatatcatctggaagtggcaaattaaagtgtgataaagaatatccagcatttctcaataatttatccaattcaaataatagggcattgccaacaaaagagtctgcaaatgaactattactttgtgatagattttgatttgttctgtatctaaaatcttcactcatatgctgggcatgttctgtaaaaagcctttgtggatttgtcacctcacaaaacagtaagattgttacaaataactgacgtaactgataaggtaaggcccagtgcactgcatcattgagagcatgggaccactcttggtcatcaccaaggagacctagagcttcacatgcagctcgaaatgttggatgttgctgtccagatatatttctgatttcagagaaggtctttggtcctttaactatatggagtaacatcctcaaataatacttctcccctttggttggatcaacatgagctatacgtccaatcttattgtaacaaccacgacgtatatcccaatatttttcacttgcatgccatgtaaagtattcagggaattcaatatatgtatgctctctagcttgaggaaattgactattagcttctaaccatgcagtaagtttggatttctgatttcctgggttttcaatgacttcttctaggtcatcatcctctgtgtacacaacattattctctaaagggaggtggaccggaaggcgttcaactgatgggtctgtatggtgtatatcaaactgaagtaaacgccaagcaacatcatttggggttacacatcgacattcaagatagttgtctatttcatttatagtttcatttgctgaattacgacgaataccagctctagaacaatcatagacttttgtaacgtacttaaaaagatacttatgcataccatcatgattaacactttccaaatttatgtgatcttggtacttaaccaccaaatcaacattatgaggaacaatgactctgttgtcaatgtcaaccccattttttgtaactatttgattgtttggtcgtgcgtattgggtaaaaccattttgcaatatataagtgtgttcacagaattcctttggataaaatttggagcaccttccttcagacatgcatggtgaataggaaattccaggaccgcaaggcccatggatcataaaagaagtaacagcttcaaatcctattggatcaagtgtaggatttggtagttgagctgaaatacgtaggtcaaccttttcagcatctagaggttcttcttttgaaagccaaatgattatatggacatgtggtagtccacgcttttgaaattctacagtgtagacaaggtcaacgatatctggacgatctgaaggttgttgtccaggtgctagagcttgtagaatttttggccaagatgcatttgatgtgaatgtgacaaaaagatctgggcaaccatacttctctgtggcagatctatccactaattttgaagacatatggtccat

SEQ ID NO: 43486 - DNA, 777 bp, Oryza sativa
  unsure (1)..(777): unsure at all n locations
  Clone ID: PAT_MRT4530_46639C.1
gtccacgcgtccgactaattactactaaccgttaaaagtagccgccggttaatattcgatcgatcgatcatgtggtgtacgtgggcgttggggcgggtggtgttggcggtggtgttcctggttgcgttggctgccggcgatgcagcgccgcccaaggttcaccggaaccacggcaagttcacggcggggccatggaagcaggcgcacgcgacgttctacggcgggcgcgacgggtccggcacgctggacggcgcgtgcgggtacaaggacacgtccaaggaaggctacggcgtgcagacggtggcggtgagcacgccgctgttcggcgccggcgccggctgcggcgcctgctacgaggtcaagtgcgtggacagccccgacggttgcaaggtcggcgccgcccccttggtcgtcaccgccaccaacctctgcccccccaaccccggccagtccaacgacaacggcggctggtgcaacccgccgcgcgagcactttgacctctccatgccggcctttctgcagatcgcgcaggagaaggccggcatcgtgcccatatcgtacagacgggtgccgtgtgtgaaggtgggtgggatcaggtacacgataaccgggaacccgtacttcaacctggtgatggtgtcgaacgtgggcggggcgggtgacgtggcagggctatcggtgaaggggaacaagagggtgaagnggactccgctgaagcgcaactggtggcaggagtggcagacgtccgaagttctcaccggagagtcgctgacgttc

SEQ ID NO: 43487 - DNA, 320 bp, Oryza sativa
  Clone ID: PAT_MRT4530_4663C.1
accgtgttatctcttggacgccgcgagccgagctgagctacgccatggcagaggcggtggcgctggcgctgattctgctgctagcggcaaagccgatccgatcgaagacgcaaaacgtgggaagaggaagccaggacaaggcgcagaacctcacgaacataactggtaccagcgagaaaggcgtccttcaggccactgcaagctagcgactagcacttggaaggaggttgagatatccgctacagccaagcacaaaatcatctgacaaactttcggtattttgaagatctgtccaacagaaacaaagaacctgacgatga

SEQ ID NO: 43488 - DNA, 467 bp, Oryza sativa
  Clone ID: PAT_MRT4530_46640C.1
gagtgaaacacatgcaaatataaaattaagttttgtttatttgattacagcaaactgtaggtaggtagtaatactatgagctggaaacagtaggaaactgtaaggtctaaatctcattgtttgtgacattttctccatcgagaatgatatgcatgtgaggaagtttatttttcatgtaattcacaacatgagcttgagttggctgcagcttggagaggtcgtcggtggatgatttcccttggagagtgatataaatagctattgatttggatgcagtaatcttggaaactgcttgcaggtagttggtgtggatgagttgcgcctcatggttcctgttccttgtgacccgatggctgttgatcagctatctttggctgctgcagctggttttcctctccattggtggaggtttccgttacttttttatggcacttagaattttgtcctggagaaaattctgttgacgg

SEQ ID NO: 43489 - DNA, 243 bp, Oryza sativa
  Clone ID: PAT_MRT4530_46641C.1
cattaaaaattggaggtcccatacagagagcccataaaaacacaccccatttaagtttaccgcggagaatttcctgtaacatttccaacaagacaagaaatactgccaactcaaataaaaaggaactactcgtgcctatcatattaacatagacagatggtgctaatgcaccccaaatatacaaggaaataggacagtgaattacttgaaaaggaatttggctaaataaatccacccaaagcc

SEQ ID NO: 43490 - DNA, 586 bp, Oryza sativa
  Clone ID: PAT_MRT4530_46642C.1
tggatccccgggctgcaggattcggacgagtctcgatgtgttttgtaataattgttcatcgagcaagactgcactcagttcagtttgtgatgttactgatgttacataacgccttgcaaatctaaacttgggatggagagttttggcatgtttcaaattatactaccaagttggacaatgtttattgtccttcgaactctaattttgaagcttaatctatatccttagaagtgccaatgtcagctagactatatttgtggtttggacgcatttttcagtactacatagcttattgagtttaataacatttgcacagttctcttcttcacctctgtggttacctggaacattgttcttaaacgttgtgttgttcctggcagtgtttgggccaacattctgtaggcaccatatattaattttactacttgagcttagtttgggactccaatattctaggcatttttatgttgatgtaatggcgtggaatttgtcggtgttccatgtatatttaatttagttgcttaaaagtcggtggtttcgatccgtccacatcaagcctccacacatgttcattactaattcatct

SEQ ID NO: 43491 - DNA, 5337 bp, Oryza sativa
  Clone ID: PAT_MRT4530_46643C.1
cgttgttgacatgcagattattgatgctcttacttgaccccaagtcagggcagctgggaacctttgcctgagattagcttcatcttcccaggtcgcttcatctttcttatggagcctagtatccagaacttggactggaaactgaatactggaagttggaccaggtagctgactctgaacaggatgcttgaacccacaagagcctttcaattgagagacatgaaagacaggatgaacagcacagtccaatggcaactgtaacttgtatgccacttgaccaaccttggcaatgatttggtatggcccataatacttaaaagatagtttgtgattagctctcttggcaactgaagattgcacataaggctgcaacttaaggaaaacccaatcacctacctaaaactcctgaaaactcctttttttatcagcttgatatttcataacctgtcgggctctattcagatgttgcttaagcagttgagccatcaacttcctttcagataaccattgagctaaatcaggtatactgcaagcatcttctctgatgccgaaatgagtaggaggatagccatacaaaacctcaaaaaggtgacttatacagtgaagaatgataagagcagttataccaaaactcagcaagatgtagccattcagaccatttagagggagtagcatggacaaaacagcgaaggaagatttccagacactagttaaccctctcggtctgtccatctgtttgaggatggtaggctgaactgagatgtaacttagtgcctgacctgatgaacaattgctcccacaatgtactggtaaaaattttatctctgtctgaaattatagcttgtggcaacccatgcagcttataaacattaagcatgaagactttggcaacatccatggcttcaataaaatccatggatataatctgccaagctccatcaggaacgggtaaaggttgcagcagtcctggatatttagctctgtctggcttggattgcaaacagattgaacaagcattcaactgttgttggatggtatccttcatatgaggccaagagaaaagagatttgattctgtggtaggtaacaggaaatcctaagtgtccccccatgggactgtcatgcaaggcagagatgatttgctgttgcattgaagaattattgccaacccacactcttcccttgtgtttcaagagccccttgtgcagcttatactgagggtgagaagcaggattaacggccaattctgtcagaagcttaactgaaacaggatcttggtcatatccctagattatgtcttgcaaccacacaggagaacattcagatagagccaagaattctgacacttcggcaggaacattccttgaaagggcatcagcagctacattgtgcttgccctttctatagacaattttatattgcaacccaagcaatttagtgaaagccttatgttgccagggagtgttaagcctttgttcagcaaggtgcatgagactatggtggtctgtcaagatcaggaactcttggaattgtaagtaagggcgccaatgatcaactaccatcataatagccaaacattctttttcataggtggaaaggccttgtgttcttggtcctagaggcttgctcacataagctattgggtgctgattttgggaaaggactgctccaatgcctaggtcactggcatcggtttccaaagtgaaaggttgctggaaatcagggagagctaacacaggagcagaaaccaaagattgtttgagcaattggaatgcttgttctacttctgcagtccaattgaaaggagcatccttctttagcaattgtgtaagaggtttgctaatagcaccaaaattcttaataaatttcctataatagcctgccaatcccaggaatcctctcagctttttaatagtagtaggtctgacccaatcgacaatactctggattttagaaggatcttttgcaactccagccccactgataatatggcccaaataggatatatgttcctgggcaaatgcacatttactgagtttaaccttccactgatgattagataacagctgcaggacttgtctcaaatgagtaagatgagtaggcagatcaggactgtatatgaggatgtcatcaaaaaacactagggcacatttcctcaacactggactcaaggtgtcattcatagcaccttggaaagtgccaggggctcctgtaaggccaaaagacatcaccttatattcatagtgtccactgtgggtttgaaaagctgttttgtgctcctccccttcagccattctgatttgatgataaccagctcgaagatctaacttggaaaaatatctagcaccagccaactcatctaagagctcatcaataactggcatggggtaagttcctttctgagtgatattgttaagctgtctgtaatcaatacagactctccaagaaccaaccttctttttaaccaagagtgcaggtgaagaaaatgcactgctgctgtgctgaatgactccattttggagcatttcttgaacctgtctctctatttcatccttatgtccaggtgtatgcctataaggtctgataaacactggtttggagtttgggaataagggtatcctgtaacctgaccattgagtcattcaactgaaattctagccacttgtgtacccaatccaccctcattgggctaaaccgttcaagccaatccatttcaagtatcacatcgtaggcacccaatgctaaaagtctaaagttgctcttgaaatgtattccttgagttaaccaatcacagtcaattatgtgcagtgagcaagtgaggaacccaccatcagcaaccttaactctagctagtactggcatagccttaacccctgataatttgagaccaatctgttgatacacaaacgagtgagtactgccagaatctatcagcataagaacttcaatgccctgaacccatcctcttaacctgattgagtgattggagtcagtaccattaatagcttgctatgatatagccattaaggtgtcagattcaggtggttctgaaacagcctgctcagactgagatgaaccttgtaagacgtccagcaactcttggaccacatgtaactgaatggaggaagcacatttgtgatctctgccccacttctccccatagacaaaacaaagtcccttggatctcctataagacttgagagctgacaatctatcatattcccttgaatgattgcttaattcagttcctctcctatcatttgaaatgattggaggccctcctttagtggttggtggcagaggcaatggcatagcacctttgactgactgtttctggtatccatcagattttttagattcttttggcttatcaccctccaatgcttcttcctgtaaaagagcaagagtacaagcaacattcaaatctccaagtctttgaagcagaatagcagacctaatcgcatgccttagcccctcaacaaatttagtgacaaagtagactggtttcaaagatgggtcataagccatcatttgatgcatgatgcaatcaaactgctctacataatcagctactgatcctgtttgacaaattttaatccattgtctaataagggcttgctgcctatctttgttaaacctagtacaaattttttcacatagttcagaccaagtaaccccttctagttgagacctaactgcttgcagccaaaaggcagcattaccagtgaaattgagtgttgctaccttaacccaattacccggatgtatgccatagacatcaaaataagcctcacaattagacttccacatgattgggttatctccatcaaattttgggcaagtcatgggggctaccccaccagtcataccaactgacaaagcagactgaaacgaattcatggcagaagcatccaaatggaaaggaattggagagacattgtgagacgcatacgtaccattggccgggattggctttggggtaaaaccctcagcctcctcacgattcaaaatttgaacgcggtggccatctagaccggttgagccatttggtcgaacacctggtgagtccagggttcccgctggagttgtttgctctgttttgttggctgaagagctctccagttgatttacttgcatttgcagcagatccacggtggattggagtacatccaccttcttctccacagctgggatccaagattccaccgcctccttgaacaaccgcatctcctacgcctgcctcttctccccttcctccctcttgcgctcagttttctccatcttctttagaaggagatcaagttttgcttcgttctccatgattttagcggtctacttcgtcacaaaacgtggtttcttctctatagcttgggcaaagtgtagttaccagtagtagaagtcctctctgtcccgaaaaccggagtcaaaaccgccgagggaaatgaaggagaagacgttagcgatggtttcgggcttgcctagcgcgaggatgatgcggcaaagtagggcttcgtgggtttaccagctgtcaccaatgacttgtgctgttgccggcactagcacgttggtgagcatggaggtgatgcatgataccactgggaagaaggaagtggttgtctgttatatgaacgcccctctaccgtacatgattgaagagaattacgggggatgcttctttgaagacgacgttgatcttgcacaggttctccaggaccaggaaatagtctatcaattaatacaaggaaattatggtactggttcatccaaaactcattcaaatcctagttctagttatagccatggatgtgaattgggtgaacggaaaccatcaggagttgcaagttatgaagcgcaactagttgttgatgaagctttagctcgagagctgcaacagatggaggaccaactagcaagtgcatcaattgatgaccataacataatagaacatggaagaaagccaatagcttcttcaacatctagcggtggtaatgcttctgcaagcagacctcctcaggtagtgatggaggatggcattgatccagataacatgacttacgaggaactgcaacaattaggggaagctataggtactgaaagcaaagggttgccggaagatgtgatagcgctcttgcctacttcaacatacaaaattaggatattctcaagaaaggaaaagcatgacgaatgtgtgatatgctgtatgacttacaagaaccgagataggctgactaaattgccctgtgagcatcagtaccatcaaacttgtgtcaccaaatggttgaagatcaacaaggtatgccctgtttgcaacaaggaggtttatgggtcgggcaagtga

SEQ ID NO: 43492 - DNA, 189 bp, Oryza sativa
  Clone ID: PAT_MRT4530_46644C.1
gccccgacgtcgaaccattggctgtaaagcccggcaaaactcaaacccaaggtcgaagtgctgctcctagcaccctacgccttgatgcgtataatgatcggagcttcactatcccctcgacctccacagcacgccgcacagttagctctctggctctgtgtgatcctagccgctccgccgccactcacg

SEQ ID NO: 43493 - DNA, 260 bp, Oryza sativa
  Clone ID: PAT_MRT4530_46645C.1
cagatgacgagtccgatccaatccattccattaaaccatggggacaatcgaggcatttgtctgagagaacaacagctttagttttttcttaacaaaaatattcactggttgttgatttcttcttgttttagcaatgcaatcggcatttgtggtattggcatgatgaggaaaaccgatgtttttggatctatttgatgataaattcctcctactcattctgaatgctgagaccacagtgtgtgaaaaaaaaaaaaaaaaaa

SEQ ID NO: 43494 - DNA, 597 bp, Oryza sativa
  Clone ID: PAT_MRT4530_46646C.1
cattgccttttagcctgctttgaacgctttgattttttcacagtaaatgattaatatcatgtatatttcaacattatatctctctaaggtgaattaataagagaaaagtgataattacaattaagcaattatcccttatatcctcttcatcttcaccctcatcaccaactacgagctttttaactgcaacaactttaatatacgctattggagctggaattaccgcggctgctggcaccagacttgccctccaattgatcctcgttaacggatatatattacactcattgtttggatatatcatatttttatctacaatacatcctcactatttcttgtcactacctccccgatttaggattgggtaatttacgcgcctgctgccttccttggatgtggtagccgtttctcaggctccctctccggattctctccctaaagatccgttacccgtcaacgccatcgtaggccaataccctaccatcgaagctgatagatcagatacttgaatgattcatcgtcttttttcaatcaacgatttgcttttttattatgattcatctttctttttattgaatgatttcttttcctcgtgcc

SEQ ID NO: 43495 - DNA, 545 bp, Oryza sativa
  unsure (1)..(545): unsure at all n locations
  Clone ID: PAT_MRT4530_46647C.1
tgctgcatgtatgtgtctaaacatttaatgtgacagattttttgaaagtttaaagggaagagtcacaacctatgtcaccgacgcccctctccgatcagggccatcgagggcaccaccacacagcttgacctccatccaggaccctcaagggcgccaccgcacggccttacctccttccaggctgcctcgcccgctccatcttatggtgctgcatccccttcgttggcggtcaccggatcccgtgttgcagactgatgcactctcagtgtagctgtcaagtgaatgcactgcttgatgccgttttaacatgtgggaaaaatctacttttgttgattgagggggaatggactcctaccagaaaatctttgtgcaaactgagtaggacaaactgaaattgcaatatgatcgacttcaggttgttgttgctacttgctgtcatgctccaggcgtccaagtaggtgataaaaaagtaatgagtaatcatttgtcttgaatctgcagcctanagtttggtgggcattctattgaattggcagttaaaaata

SEQ ID NO: 43496 - DNA, 235 bp, Oryza sativa
  Clone ID: PAT_MRT4530_46648C.1
cctgtgccttgctccgtgtggcgccaagtgggagggaagtgcggtggtggcggcggcccgcggccctagtggctggggaagtgcggcggctggggaagtgtggcggatgcgcagccgggcgccggcaccgcagccgtgcggcggccggcggatcgcggcgcagatcggtggcctggtggcggctggccgcctgggtgaggtcgtgaggactgaggaagtgaggactgaggactga

SEQ ID NO: 43497 - DNA, 518 bp, Oryza sativa
  Clone ID: PAT_MRT4530_46649C.1
atggcggtggcggcggaggcggcggcgatctcccgcagcgcctcctccatggcggccttggcgtcggcgagcttcatctggacgcgctcctcccgccagagctcggcgacgcgcagcatccggcgctcgtcgtcgacctcctccagcgcgcgctccacctccgcgcgcatctcgcccacctccccgcgcatcctcctgcactccgcctccgccgccccgcgccgccgcctctccctcctccagctccacggcgagcacctcgctcaccgcctccgccttccgccgcatccgccgctccacctccagctccaccctcagctccctcacctccacctccaccgccgccgccgccccgccgccaccgcagcgataccactccaccatgtcatcctccacctccacctccatgccgatcataggatgccgagacgaagcgctcgaggaggcgtggcggcgcggcaacaagtagggagggcttggatcgacaaagctagtggtagtgcgccatgaatggggcg

SEQ ID NO: 43498 - DNA, 262 bp, Oryza sativa
  Clone ID: PAT_MRT4530_4664C.1
tcggctggatagcatgtgtagaagatgttatacagctgtgatttctatacaacaggcgcggtgcttgtccgacaattgcgacgcaccaaattcaatagaggagacctgtctggacccaagatggtcccggagagccacggtcgtttttgggcgcgctagtacactctttgatatatgacgtgatgcccgctcatcctggtggggatgggcgggcatgcaccaccacatgtggcaggggtggcagcggtggtagattttaccg

SEQ ID NO: 43499 - DNA, 459 bp, Oryza sativa
  Clone ID: PAT_MRT4530_46650C.1
atggcggcattcacaggccagagatcggagcgcttggggcgaacgttgaagttcacgctcccgaacaccgtcttcttcgttccggccggggtcaccaccatcttcgaattcatggtggcaaaaaatatggcgccgaagagttcggcgctgggttcaaacccggaggatctccggcaacaacatgttgcacggaaaccgaagccccgcctcaaaaaagccggcgaacaccaccgtctggttgtcgacgggcttcggtaccacggccttcccaggggcgaaagcctgcccctcaaccaacaccccagagctgaccaacttcgccagctcgccgtcatctatgagagaaatccccaaaaaggctgtggtgtcgtcgtcaatccggcccgtggtttggcttgcgaggagccatggcgaagggtgtgtgcagtggcgaacaaagagaacgggcgaaagatatga

SEQ ID NO: 43500 - DNA, 440 bp, Oryza sativa
  Clone ID: PAT_MRT4530_46651C.1
ggggatattttctctcatttgatagtgtaatccataaatttactcaaaggtagaaaacaaaacccaatgggtacaatcaattcacatacaagcacttagccatacatgctctttccaacaaatacaaaaaaaaaaaaaaatttaaaacacataaaggtcaagcatatgctgcatcatgctaaaaaaaaaaggataaggggcttatattcaagggtacttcactaacatcggggttcttccttggtctgacacttcgggggaaaaaaacatcatccatgccttgggattaacatttggttcattgatgatggatgatgtgatcgtgaaggatcttgaactcttacaattcattatgaatgtgcaaaagtttcaaatcatggatttcctctcgaattttgggatcttccattatcatccgtataccatctattcctcgtgcc

SEQ ID NO: 43501 - DNA, 143 bp, Oryza sativa
  Clone ID: PAT_MRT4530_46652C.1
atggcttgctcggacgcacaccgagagcagcagcacgacgccgagaaccacccgtctcatcctcgcacagcctccgggcaccggtgccgccatgcatgcagacgacacgatgagctgcgtgcgagctgctgctgctaccagag

SEQ ID NO: 43502 - DNA, 378 bp, Oryza sativa
  Clone ID: PAT_MRT4530_46653C.1
atggccacgcgtgcatacgtacggaaacctcccacggtccgtgcgtcggtcaatgcatgggtgtggtgtccggctgtccgctgcagcgtttgtcggacgcagacggaaaactgtttcgttcttcactgggcgaggccgagatcgagtgcatggagttcagttcgccatttcgccgcggccggagaccggtcgatcctcctcctggcgcgtgtgcgtccgcgcatggagacgacggaacgtttgtgcgcactaccgcgctacgtccataaaacacccctgttcgccaacgtccagctcggctttttacgtggtcccctcgacggacgctggccccgtacttacgtctgcaagatggaagaaaaagttggcgttgcttga

SEQ ID NO: 43503 - DNA, 1487 bp, Oryza sativa
  Clone ID: PAT_MRT4530_46654C.1
agagggagggggaaggggaggggcagagccgccgacgcgacgcccgtagaggaggtcgacgtggagggcgccaagtctgaagaggaggaggaggaggaggcggccgcggggagcgggggtgatacggaggcggaggacgctaaggaggagggggcgtcggagagtgagggcgaggctatggatgtggaggccaaggagagcgccgacgagaaggaggaggaggaggcagaggcggaggcggacggggatgagggtgaggataagagcgatgagatggacgccgaagcgggtgcagcggaggaggaggcgaaggaggaggaggagttgaaggatgctgaggtcgaaggggaaggcgcggggagtgactccgagcgcggcgaagcagaggaggcggacggggagaacgaggaggaagccgccgcgacggacggcgagaaggaagaggaagccgccgagaccgacggcgaggaggaggcggaggaggaagccgctgagaccgccggcgaaaatgaagacgaaggcgcggaatccgatcccgaaggtgaggcctccgacgccgaggagaatgcttcggaggaatcccctccgtcccctccgacccgcggacgccgccgcaagcgcgcggctacctccgaccctcctcctgaggatgacgaagaggaggggacccctgcgcagccgcgccgccgcaagcgcgcggctacttccgaccctcctcctgaggatgacgaagaggaggggacccctgcaccacctcgccgccggcgccggcggaaggcgggggaccgcggcgactctccccctcctctgcccgaccacctccggtgccgccgcagtgatgggaagaagtggcgctgccaaaaccgagcgctccccaccgttagcttctgtgagtatcactactcgagggccaacaagggcaaaaagccaccggcggacggagaggtccttgctgttgctctccagcggcagaagaagaacaagaggaagggtagaaggaatgtgaatgcatcaccagcatcacctccggcagccactagcgacgtgactagggatctcccgaatggactgatgaggatctctccagggagcagcgagcctgccgcatcgctgccatcgccagtgacaacaaaagttggagtggatattcctgttccgacgcagcgctgctaccgctcgaagaatgctgagccgatgcctgttggccctgttaaggttgttcctcgtgcaatgggtatgtcaaaggcagggcaaaagacgtgtcaccgctgcgggatgaagaaggccgctcgtattgtccagtgcaaaaactgtgacaataggtacttctgcaacagctgcatcaacaaatgttgcttctggttattgctattgctgctgtcaccaccgctgcttgcagcctagggttcatgtggttgtaaacaatgcacccttggtcagactaagggtgccattagtaaggaatcatcaggtgatcaagacaagct

SEQ ID NO: 43504 - DNA, 1598 bp, Oryza sativa
  Clone ID: PAT_MRT4530_46655C.1
atgcccggcgcggcggtccacgcggtggacccacggggcggcgcctccccgccccccgtcgccaaggcggaggcggcgacggctgcagcggcggcggcgggagggtgcgagccggcgcggaaggcgggggcggtgaccatggagcacgtgctgctggcgctgcacgagacggaggcggagagggaggcgcggatccgggagatgttcgccttcttcgacgtggacgggcgcgggcagctggactacgcgcagatcgaggccgggctcgccgcgctgcagatccccgccgagtgcaagtacgcgcgggagctgctccgcgcctgcgaccgcgaccgcgacggccgcgtcgggtacgacgacttcaggcggtacatggacgacaaggagctcgagctctaccgcatcttccaggccatcgacgtcgagcacaacggctgcatcctccccgaggagctctgggacgcgctcgtcaaggctggtatagagattgatgatgaggagcttgcacggtttgtcgagcatgtggacaaggacaacaatggaattattacttttgaagagtggagggactttcttttgctatatcctaatgaagtaaccattgagaatatttatcatcactgggaaagagtatgtcttgtagatataggtgaacaggctgttataccagaaggcataagtaagtcggtcaatgcaagtaaatatctgattgcaggagggattgcaggtgctgcatctcgtactgcaactgcacctcttgaccgccttaaagtgatcatgcaagtacagactacacgaactacagtcatgcattcaattaaggatatatggagccagggtggcatgttagcattttttagagggaatggattgaatgttgtgaaagttgctccagaaagcgcaataagattttatgcctatgaaatgctgaaagaatatattatgaagagcaaaggagaaaataagagcgaagttggtccttctgaacgtcttgtagctggtggtttggctggtgcagtagcacaaacagcaatttatcccgtagatttagtgaaaacacgactgcagacttattcatgtgtggatggtaaagtacctagtcttggtgcattgtcaagggatatattgatgcacgagggtcctcgagcattctatagaggtctggttccatctttgcttggtattgtcccttatgccggaattgatcttgctgtatatgagacattgaaagacgtatccaagacatatatcctgaaggatagtgatcctggtcctctagtacaactgggctgtgggactgtatcaggagccttgggggcaacatgtgtttaccctttacaggttatcaggacaagactgcaagctcaacgagccaattcagaatctgcatatagaggtatgtctgatgtattctggagaacgctacagcatgagggtgtttctggattctacaaaggaatcctaccaaatcttcttaaagtggtgcctgcagcaagtattacctacctagtgtatgaagcaatgaagaaaaatctctcccttgattgaaataccgagctgtttggcaaatcggccatcatttattgacatggctgact

SEQ ID NO: 43505 - DNA, 183 bp, Oryza sativa
  Clone ID: PAT_MRT4530_46656C.1
atgacgacgatgggatgcgcagtcctccctcgcagatctggtgatgacaacaatgatagcaagccatcgggcggcggatctggtgagcccggccctaggagggatggatccgcctacgtcggcctctggtgcagccgggtctcgacgacgatggtggcggcggctaggacggatttgggttag

SEQ ID NO: 43506 - DNA, 201 bp, Oryza sativa
  Clone ID: PAT_MRT4530_46657C.1
atcgtcttttccttctatcgtcatgccccggggagcggcagcttaaccatctacatggtgcagggcaattgcaccggactgggggggttacttcacagcatccctagtcgtctaaccaaccatccatgtttcaacccggactccaagagccttatattgaccttcaactactccgtcatctcccccgagccggtctccaac

SEQ ID NO: 43507 - DNA, 2135 bp, Oryza sativa
  Clone ID: PAT_MRT4530_46658C.1
actagttctagatcgcgatctaggagagaaggagagagaaaatcgcagaggagagagaagaagaagaagaagagcggaagagaaggaggagaggagccatggatgcttcagcgctcagcaacccgcggctgcaggccatgctagaggaggagaagaggaaggcaatggcaaacgagttcgtggcgaagctgactgatgtttgctgggacaaatgcatcactgggagcattggaagcagcttcagcaacagcgaagcctcgtgtctgtccaactgcgcaaaacgctttctcgaactgaagatgctcaccatgcaacgacctcaagaagccccagcttcattttctctgcccttaccaaagtcaccagttcctataaaagctacaccaatctcagcggcatttccaacaccgcaacatgaagatgaatcatcagatcaagattacaagcccttttgcaggcagaaaaaaccaacgctgccaaagagagccaagaggccccagcaagctgagaaatctaatgatgccaacatcaagcgcagatcaataaggaggagcctggacaacgagttcaacttgtgttcatcctcatcagacaacccaaaggaatcggtggaaggaatcctgatgatgtttgattcccttcggcgccgtgtactgcagttggatgaaaaggaggatgcaagcaggcgggctgacctgaaagctggcaccctcatgatgcagaacaacctcagaatcaacaatcataagatgatagggcatgtgcctggtgttgaagtcggcgatatcttcttctttaggattgaaatgtgcatcattggtttgcatgcaccagccatgggtggcattgattacatctcttctaagaacaaagatgagactctggctgtctgcatcatttcatctggaggctatgagaatgacgatgatgacactgacattttggtctacacaggacagggaggcaatagtcgtcacaaggagaagcatgatcagaagcttgagagaggtaaccttgctctcatgaacagcaagatcaagaagaatcagatcagggttgtgcgcagcgcacaagaccccttttgtaactcaggcaaaatatatatttatgatgggctttatcgtatcgaagacacttggacagacacggcaaagaacggatttaatgttttcaagtacaagctgagaagggacccaggacagcctgatggaatttcactttggaagatgactgagaagtggaaagcaaatcctgccacaagagaaaaggctatattgttggatttatcatcaaaggttgaacacctacctgtgtgccttgttaatgatgttgatgatgaaaaagggccaagtcacttcaattatgttgctggagtgaagtatttgagacctcttaggaagacaaaaccattacaatgttgcaaatgtcctagtgtttgcttgcctggtgaccctaattgttcgtgtgcgcaacagaatggtggtgatcttccttacagcgcaacgggattgctggcaaagcacactccaatggtttatgagtgctcctctaactgtcagtgttctcataattgtcgaaacaggatcacacagaagggtataaaactgaactttgaggtattctggactggagaccgtggctggggcctgcggtcttgggatcctatccgtgctggcacattcatttgtgagtacgccggtgaagtcattgatgaaactaagatggacatagatgttgaggaagacaaatataccttttgcgcttcatgtcccggcgataaggctttaagctggaatttgggagcagaattacttgaagaaaaaagtacggctgtgacaaccaagaactttaagaagctaccaatcatcataagagcaaacaatgaagggaatgtggctcgttttctgaaccatagctgttctcctaatctcctttggcaagctgtacagtatgaccatggcgatgacagctacccccatatcatgttttttgcaatggaacatatccctcccatgactgaactgacttatgattatggtacaagaggtgctccccctggctttgagggaaaacccttcaaagcttgcaaactcaaatcatgcctctgtggctctaagcattgtcgaggatattaa

SEQ ID NO: 43508 - DNA, 555 bp, Oryza sativa
  Clone ID: PAT_MRT4530_46659C.1
ccccgggctgcaggaatcggcacgagggcttgctctacctcaccccctctgccctctctcctctcagagcaagaacaatattgagctataagtaagctatatacttgtatataagagagttaaagaaaaataataagtgttaactcgcacgtaagaactaactctacatgactacatatactcaaataaatatgcataaaagtcataataagagaaacagtgagagaaagatagagctaaccttataactaacctattactccttcccataatataagagattttgtagggatgtgacacatcttaagaccatatatctagacaacagtatgtccagatacatgattctagaatgtgtcatgtccctctaaattcccctatattatggaactgaaggagtactatactctatagtagtaataaatttagaggttgctctatctcagctccatctcccagctagctagcttctcctctgtcactgctaaagccgacgtcattgctatcgaacatcgtcgcctcatcgaacagatgccatagagtcaagtaggagta

SEQ ID NO: 43509 - DNA, 180 bp, Oryza sativa
  Clone ID: PAT_MRT4530_4665C.1
atggggctcaaggaggaccactggagctgccgccatcaccacttggggcaagactacgttggagttgccgccatcaccacttggggcaagactacgttggagcagctgccgccgccgccgcttgggggcaagagagtaggagccgccgctgccaccgccagtcaccactgctgggggtag

SEQ ID NO: 43510 - DNA, 152 bp, Oryza sativa
  Clone ID: PAT_MRT4530_46660C.1
agatgtaagtcacaaagcacacaggctcacaggtcgtgcttaacttgctggtaatcagtcaaatacaacttgcatagtaacaattataaacacaattgttgcataaagatgacaatatgatagcgcatgcaatattatttcattctattact

SEQ ID NO: 43511 - DNA, 2532 bp, Oryza sativa
  Clone ID: PAT_MRT4530_46661C.1
tcatcttccttggacataagatggaactacattgccagatttctccatgctatcaccacttgttacttctaagctcttcattgggaattgattgctggttccatcaacaatgtcacccttttcttgaagttgcaaggcaaattcgagtttccataacacatcacccattgacgggcgatcgacaccgtagtcagcaagacatttctcagcggcctcagcaaatatttcaagtgaatcaggacggatttgccctgaaatgtggggatcaattattttattcagctctcccttgcggtgccatgtacgggcccattcggcaaggttcacctggtctcttggaagtgttggattgatggctggccttgcacacaatacttcaaagagtaccactccgaaagagtatacgtcagacttctctgtcagctgttgacgtctgaagtactctggatcaagatatccaaaacttcctttgacagctgtgctgacatgagtttgctcaagggatggagcagcttttgataagccaaaatctgcaactttggctacaaaattttcatcaagcagtatattggtggtcttgacatcacggtgaattatgccctgagctgcacctgtatgaagataatgcaggccctttgctgccccaatgctaatttccagccgttgcttccaagagagaggcttgatgtctgtgccaccatacaaatgatccctgagcggaccatttgacatgaactcataaaccaggatcatctcattgttctcatcacagcaaccaataagtgaaactaagtgacgatggcgaagctttgataacatttgaatttcagtcaggaactcattcataccttgatcagaagatggatttcctcgtttgatagccagctttgtcccatcctcaagaacaccaagataaacttttccaaagccaccaactccaataacagccttctcttcaaagttttttgtggctttctgaatttccacaaaggtgaaatagcgccccagtccatatgcactagatgcaaagatactcgaaaacccacttttggtccttgtagagccaaaacgatttctggagctcagcctgctgcaggtgctcatgaagctggattgtgtggagttgagtggaaggaaccaagactggaagctatttgtcttctgccatccaggtctatggcgtcgcctgcagcacatgactacagctagagcggcagccattactgccattgcaagccctatgccagtcattgtcttcttgccaagctgtgaacttctttttggtgaaaagagcccatctaagctgttttcttggttgcttatcttcatgatctcaaggccattaagaatagcattgggattgctggtgtcagttgtgccagggccaatttgcactatgagggtggagttgatgatactggaggagtcaatgatgaagtctctgtagtagggtactgcaagccccactgtcaggctcgacaagtcgaggttaaggacacccatcatgccatttatgtatacattgaagtagaggctgttgagtgccttgctgacaatgtcacagaaatgtaggcggacaaagtagctgaatcctggctcagtcaccatttcccatgttatgttgaatcttgcatccgacgtgtttgttgaggccatctgttgtgcggttgagtagatgtttgcaggagcaatgaggggcgtgttggtcttgtcatctgggtactttatggttctaggaggaacccaggctgcatttgctgctgcctgaagtttcagaaatggtgcatctggcagccagattctacctagtgtgtcattgaaggctgtaaccagtggtcctcccatgttcagccggtagacaacctgcaacgcattgttggagatgtcaagttggccctgaggagccataccggtggtggtatttggaataaggcttggaggggctgaaacaacctcaatggcattgatgaatgctattgagtcctttttaggggtaaaaatgattttcaaggtgtctccctgtgttgcaacaatatactccctaaggactgggttaggaggagtggctataaaggagaagtcatgaagaagaaccatgtcatcagtggagacagagaatgtagctgtagtgaggttgtaatggtcatcagggataggtaaaaaatggagacgaatccaatggtgaccaggctgggagatgaagaagctatatgtcgagatgtcagagaaaactcttgatgtaaggtagagttgggatgatggtgcacctgaagccagggagtttttagcagtaatcttgatgtccaccggggtggagagaaaagacgccgagtcgggatcagaacggaacgtcctgccatcatcaagctgcacagcagcaggcgccccgcagctgagaaggtagttgtcacgaggtacgaacctatctgcttgtgatgcaatggcataagtggtggctatattggttatggaaagtatgaggaggatggagaacaatggtactctcttccacccaagcatgcttcttgccat

SEQ ID NO: 43512 - DNA, 862 bp, Oryza sativa
  Clone ID: PAT_MRT4530_46662C.1
ccccgggctgcaggcccccccttgtcttgtctcgtgtttttttttttttttttttttttttttttttttttttttttttttgagcctgtaacaagtgcatgatatttcccaaggtgttaatctttggcatagaattgccgaagtcagtagtcggactgaaattttactgcctgtctacatcttacagttcctgttcctctaacataagtcagtagtgaaactatgcgtaaggccatccggttcaattcatccaaaaacagcatgtccttgtcttcaaaacctaagacagctctcccaaaaccatgcccattaaagtaggtttgcactctttcaatctggctccatcttttaaagctcaaatcttgctctattttttcttgccactttcgacaccactacaaccttctactcctttgcggccagggtgatggaaaaataaagaaaggaatgggtccacttctttggttgtgtcagtatgcaaatgtggcttacttccaggtccaacaaattccacagacataactcctgaagaatcttgattgttttcatactggatcaactctggtggactgtcataagcaacgatcaagcacttgctaccggtaaaatgcggaatgcaacccttgtgattgataagtacgtgtgctctgtggtcaggaatagaatgctgggaaacattggctccagattccccaatacaggaagggtaatcatacgacgttaattctgaaataacctcttcagcagagacatcatttgcaaatactatcacaagtcaggatcaaggtcccgcatagcccttcaaagcatcatttttctgagccttgctccagacctccatgtatattagttgcttcaaaag

SEQ ID NO: 43513 - DNA, 398 bp, Oryza sativa
  Clone ID: PAT_MRT4530_46663C.1
cacaccaagtgcatggcagcaacagtggttgccaacagctcaggctgggtagcgcaacaatgctgcactgaccaggccctttagtagcgttcaggcgattgtggcagcaacttacagctgcagacaggtgcggtgttgtctactttgatgcagactgcaagctgcaagctccaagcctttgctgcgccttaaacttggccatgccatgatgtgggtatctatgcctgagactgactacattgctccgaggacgctattgccccccgttggtggtgtgctggtgactggaatgtggtgaatagtatgaatgggttgcaaatggtggaaaaatgaaagtgcatggcatcatcatggcgtggccagttgaaacttggatggtgcatgatgaaatgctgaaa

SEQ ID NO: 43514 - DNA, 300 bp, Oryza sativa
  Clone ID: PAT_MRT4530_46664C.1
atgaagcgaagcaaaccgtggcgaagttcagcaaagcagagtggcattaagcaagccgacaacgaggttgtatggcgtgatggtggccgtgcatccctgtcggccagatcgcagaaatcgtcgacagaggctcatcattgggtgtactcgtgcgcctaccgcgctcgcctccgggcggcgtacgacctgccggagacgccctgctccgactgcctcgtcaccttctgctgccagacttgctccatcgcacagatgcaccgtgagctcaagaaccgcggccacgaccctaaccttggttaa

SEQ ID NO: 43515 - DNA, 1098 bp, Oryza sativa
  unsure (1)..(1098): unsure at all n locations
  Clone ID: PAT_MRT4530_46665C.1
gnaaaatttccaaaaaaaaattttttaaangtttgggnttttaancccccccgggttnggnaaattggttttgggggaaaaaaaaaantttggaaatttcctttggttttcccccaaaaattaaaccaaaaaccggccctttttcccttgggaaaaaagncctttggttttatttaatttaattcccaaaaattttaatttaaaaatttttttggtttcccatttggtttccccctncccangaaaattttggaaannaaattttgggggttccccccctgggcccccaaaaccaattttttttttggcctttgggggggccccaattccccttgggggaaaccgcccccttggtttttttgnaaaaaccaaaaaaaattcccttattccctttcccccgnaaaagggccatttatttatttggaaattgnaatttnccccnccccgttttnttttggccattttcccaaggggccgnttccttggccccttggggggtttttnaaaaaannnnnnnnnnnnnnnnnnnnnnnnnnnnnaaaacttccccaaaggggggggggggggcccccngggttanccccccaaattttccccccccccccaaanaaanttggaaanttccctttattttaaaccaaattttcccccctnggggncccgtccccttttttttaacaaaaaccctttccctttgnaactnggggggaaaaaaaanccccctggggcgnttttttnccccccacctttttaaatttccnccccctttgggaannaaaaaaattcccccccccccttttcccccccncnnctttnggggggtttttttttttccccaaaaaaaaaagggcccncccncccccnaatttttnccccccttnncccccaaaaaaatttttttnccccccccccccccnnaaaattnggggnnaaaaaatggggggaaaantttttttttnnccccccttttaaattttttttttnnttttnaaaaaatncccccccntttttaaaanttttttttgnttttaaaaaccccccccccccnttttttttttaaccccccanttagggggccccaaaaattcccgggccnaa

SEQ ID NO: 43516 - DNA, 124 bp, Oryza sativa
  Clone ID: PAT_MRT4530_46666C.1
gaggtggttatttttttatttatttatatatgtatgcatgacaagaaaactgagagaaatgcagtagtggttagtacacccacagaaacactatgtcatggttgacaagacctcaaggaggatg

SEQ ID NO: 43517 - DNA, 390 bp, Oryza sativa
  Clone ID: PAT_MRT4530_46667C.1
atgttcacccgcgccatcaacgaggagccatggcggccgtccatgtcggcgggatctagcgcccgcgccgtcggagatggcagtggcggcggcgtgggggaggccctcctactcccgcgtcgtcatcgccgccgcctcgtcacccgtcgtcacgttgtcaccgctgttgccgcctcgccgccggactcccgcctcccctaccagcctcctccctacccgcaggctacgctgccagtgaaagaaaagaagaggagagagagaggaagaaaggtggagaggggagaggaagaagaggctggcatgtgggacccacgtgggtcccacgctgagttagctgccacgtcgaacaaaaccggagtcaaaactgccgagggacctagtttgcactag

SEQ ID NO: 43518 - DNA, 300 bp, Oryza sativa
  Clone ID: PAT_MRT4530_46668C.1
atgtggattcgccggggtggtgtcggggaggacccctgggcttcctggcacacttggaggtctcccgacgtggttgatccccatgggctgggtgatccggttgctgaagaagatgaagcggatccagctgatgaggagttcttccaggagcaagccggctacgatgagtttagggttaatttggagcgtcacgggctagttccggtcgggactggttcggggcgtgacaatgcctacaatgacatggtccccaccttatgggaggagctaaacaacaatataattggagggcgaccttga

SEQ ID NO: 43519 - DNA, 205 bp, Oryza sativa
  Clone ID: PAT_MRT4530_46669C.1
atgcggtcgacaacggccaggaaggacccccagcacggcattaccagcgccgcggcgttgaacttcactttgcgcgccgatgaccccgggagtagagccggcccaagttccacccttagtttccgtgggtcctccgcccgccacgggcaaaagggccccttccccaagccccaccccggcggggctaggggctcgggcttctttg

SEQ ID NO: 43520 - DNA, 183 bp, Oryza sativa
  Clone ID: PAT_MRT4530_4666C.1
ggatcatagcacgggtctcctgcatccttcactcagtggcatcattgttggggccatctttgtggctctccctggccctccccccgcgcctcgcgagtcgcagaagcagccggggggcctcggggtgccacgtcacgcccttcgggccctcgcgctgcctcgccccaaggccctcgcccaact

SEQ ID NO: 43521 - DNA, 462 bp, Oryza sativa
  Clone ID: PAT_MRT4530_46670C.1
cttttaaaagatagtgcattgtaatttacatacagttgtagtttacatgcaatggagtgggcagatttaaatgtatcttttgatggaattttgacagttaccttctatccctttctggttaagtctcctcacctcccagacaaactatctgatttctgtcaccatgtcttagtttttcctcttctggatgcttcttggaataatagattgtattcttttgtggtgtttgtgttcaaaataattgttttagatttacctgttatgacattccttccttattgctgagtaatatttcattataggaatcagatataatttatgaatccattcctctgcatatgtatatgtaggtggttttcattttggggattttcatgaataaagctgctgtgaaccttcttatttaagctttttaatagacacatgttttcagttctatgggtaaatgcctgggagtgggaa

SEQ ID NO: 43522 - DNA, 178 bp, Oryza sativa
  Clone ID: PAT_MRT4530_46671C.1
atggaatcaagggaggatgtagcagcatggtatagagatgggctcgacgttgcgcaagacgacgagcaaatgaaaaatagcaaacaacctccatcactggcggactccaccttgtcctgcggccagccacatggagcacgatgtgcaaatgtaggatctgtgcagaccatcaattcag

SEQ ID NO: 43523 - DNA, 1001 bp, Oryza sativa
  unsure (1)..(1001): unsure at all n locations
  Clone ID: PAT_MRT4530_46672C.1
cccgaaaaaaaaaaaattttncccccccctttttggggggaaattccccctttaacccaaccccctttttccccnaaaattgggggggggtttggggggggccaaaaaaaccccctncccgtttggaaaccccttgggtttatttgaaaaaaaaaaanccttggcccggggganttccccccaaanttcccnaaaataaaaaccccttaaattttcctttttttgggccttggggaaaaaaaaaagcccccncccccaagtttggttccccaagtttaaccaaccttggggcccacccggggtggccaattgggggcggcccctttccctcccccanctttggggttccttggaaattggggcaaanccttggaaanggaaanttngcccccaaaaattgnaaaggggttttccttttgnaaacccgggttttccaagggggaaaaccttngggaacatttgnccttgggnaaaaaattntttnccccccccccttggcccaattggggggggggaaaaccaaaaaacccgcccccccttggttcttccaagttcccccaactttggcttcccatccttncccccggggcttggttgnaaaccaagaaanccaaggnaaaaccttgccccccaaaaaaaattttttttnttttcctttccctnaaaggggcccattttttngggccncttttngggcccccccccggggcgnaaaaccccccccctnaaancccccctttccccccctgaaattttgcctccccaaanggggggggggggcccccgggttnccccccaantttcccccccccnnaannaanttgnaaatttcctttntttanccaaatttcccccttggggccccttccnntttttttaacaaacctttcctttnaaactngggggaaaaaaanccccttggnccntttttcccccanccttttaatttccncccctttggnaaaccnnnattccccccctttttccccccnngnnttngg

SEQ ID NO: 43524 - DNA, 393 bp, Oryza sativa
  Clone ID: PAT_MRT4530_46673C.1
agctagaacactgctgctaccatgggaaaggagaatctccctggaggggtgaacatcagaaattcaccactcaactcacctcgtcaccaatgcatacggatccatgcatgcacgaaccaattaccacacctcacacagttggtttgaatttaatcacaaacatctttgtttctattctgcccccaatggattaacatcgtatacatgcatactccacaaaaaaaaaatgcagcaccaagaggggtacattttccatcgaccaattatcggtgtcaccagcccgaactcatgaagctccttgagacgccctggccctgatggaatccatcacacgctcagtctgacaagctttggatgatggtgttgtgccacgggtcaaacaggtgctgcagc

SEQ ID NO: 43525 - DNA, 2382 bp, Oryza sativa
  unsure (1)..(2382): unsure at all n locations
  Clone ID: PAT_MRT4530_46674C.1
ccctgactttgtgaaatctgcagttgtgccactgacatgtgggccccactttttcgcgatggctcacatgtcagttccacaactgtaaaatgcaaaccgcacaaagtcaggggagtctctcgttcgcgtgcgggatggggtngttggtctcttaagagttgagaatgagatggtgtagtgttgatttcatgcggctgcgttgatgattcgtgatggcgctcgtctccgcctcctcctccaccaccgccgtcgcggcgctccccggcgccgccagggcctcctccttcctcggcggcgccggcaggagcggcaggctgctgctgaggcaggccgagtcgtcgtccgcgcgggcgtcgttcgccgtgcgcgccgcggcgcccgacaggccaatctggttccccggcagcaccccgccgccgtggctcgacggcagcctccccggcgacttcggcttcgaccccctgggtctcggatcggacccggagagcttgcggtggaacgtgcaggcggagctggtgcactgccggtgggcgatgctgggcgcggcgggcatcttcatcccggagttcctgaccaagatcggcatcctcaacacgccgtcgtggtacaccgccggcgagcagcaatacttcaccgacaccaccaccctcttcatcatcgagctcatcctcatcggctgggccgagggccgccggtgggctgacatcatcaagcccgggttgcgtcaacaccgaccccatcttccccaacaacaagctcaccggcaccgacgtcgggtaccctggtggtctgtggtttgacccgctcggctggggcaccggctcgccggagaagatcaaggagctgcgcaccaaggagatcaagaacgggcggctcgccatgctcgccgtcatgggagcttggttccaggcagagtacaccggcaccggccccatcgacaacctcttcgcccatctcgccgaccccggccacgccaccatcttccagattgagaagctccgccccctgttgagtcctcccaacatccatgttggatccgcccctggagccacccaccatggccgcctccgcccgccgcgcgtcccagctgctgggatccgcggcctcccgcctcctccacgcgcggggcttcgcggcggcggccgcggccgcgccgtcgccggcggtgtcgtggacaagagcacccgcgtgatctgccagggcatcaccgggaagaacggcaccttccacaccgagcaggccatcgagtacggcaccaccatggtaggtggggttacccctaagaaaggtggaaccgagcacctaggccttccggtgttcaactctgtggcagaagctaaggctgagacaaaggcgaatgcatctgttatatatgttccaccaccatttgctgctgctgcaataatggaagcgatggaggccgaacttgaccttgttgtctgcattaccgaagggatacctcagcatgacatggtgaaagtgaaggctgctctgaacaagcaatcaaaaactcggttgattggaccaaattgccctggtatcattaagccgggtgaatgtaaaattggaatcatgccaggttacatccacaagccaggtcgtgttgggatagtatctcgctctggtaccttgacatatgaagcggtgtttcaaacaacagccgtaggcttggggcagtcaacgtgtgttggcattggtggtgatcccttcaatggcacgaattttgttgattgccttgaaaagtttgttgatgatcctcagacagaaggtattgttctcatcggagaaattggaggtactgctgaggaggatgctgcagccttcattcaggagagcaaaacacaaaagcctgttgttgcattcatagctggactcactgctccacctgggcgtcgcatgggtcatgctggagcaattgtgtcagggggcaagggtacggcacaagacaaaatcaaggctctcagagaggctggggttactgttgttgagtcaccagcgaagattggttcaactatgttcgaaattttcaagcaacgcggaatgttagaatagggagagcaaatggtacagtagagaaacattggaaaactttttggtgctcgtgggcaacagcgagcaattcctttgtagagccgcattgctggccgcggaactactcaaatcttccttttaccctagcctttcctcttgcttatcttcggtgtgaagatggcctacctgaggctcacttgtctcttttcaataagacaggattctcgagttatcgacatgatattttgtttggaaatggcgcagaaacctaagatgtttctagttttttttttcaaaaaaaaaaaaaaaaaaaaaaaaacggacgcgtgggtcgacccgggaatccggacc

SEQ ID NO: 43526 - DNA, 206 bp, Oryza sativa
  Clone ID: PAT_MRT4530_46675C.1
tcgcctgcttgaagttggcccatcgccagatgaaaggaatgaactgaaatgaaatgaaatgaaatgaaaattgcgccacgcccaatttggcgtttccttgctaatgtaacctgttaaaagttttcctttatgaatgatgcagttgctggaatggctgaaggcacatgccctgccagatggtgctttgctgaaaaaaaaaaaaaaaa

SEQ ID NO: 43527 - DNA, 342 bp, Oryza sativa
  unsure (1)..(342): unsure at all n locations
  Clone ID: PAT_MRT4530_46676C.1
ggatngncggnagctcaaaagacacacattccaaaagcatctgtggccatctcctcctagtcctaggctcgcntcaatggcggcgtccaccatggcactctcctcccctgcngccctcgccggnaagnggtcgcaatgccaaggtgttggcgagggcgcgtcacgtgcgaagtcggngccaagccaagccgccgcgcgtcgggagccntggtacgngccgccgntgtctactnggccgttttcgcgagcgcgtcctactaacgnganttccgggactaggttgacacgcgggttttggccncccgaangtngcaaaccggagttagtatcattccgtggcat

SEQ ID NO: 43528 - DNA, 152 bp, Oryza sativa
  Clone ID: PAT_MRT4530_46677C.1
gattaaaatttaatattctcatttgacttgtaaaatggtgaccactacaattggtcacgattcaaaatgttggatgaaacgtaaaggaaggaccctacggatgagtccaacaaccaaacccgtaggggcacaccattgcaccacatagcacc

SEQ ID NO: 43529 - DNA, 1218 bp, Oryza sativa
  Clone ID: PAT_MRT4530_46678C.1
tcagagaaacccaaacgtgcgcacggctggcgacggatgcatcttgaagaaggcgtgcgccaccgtgttctccctgaacgccacctgcaataacccgccgttgcgcgcgccgcacgcgaacacgtggagcgccctccccctcgccgccgtctcatccacgccgtacagcgtgatgcgacgccgggtgaacgtggcgccgccggcgtcgccgccgccgccgccgtcgtcatcccacacggccacgctcgccggcgtagagactggtaacatgcagctatatttgcattcccagacaggtgcccactgctcgccggcgtcgccgccgccgccgccgccgacgtcatcgtcgagcacccacagcttgagcgtcgacatcgctccgcctttcagcaccgcgagtgccccgtccagctcgaacatcagcacgtcgtcgtcgtcgccgttgttcgccgccgtctccggcgacggcgccaccagccggaacgcctcggacaccgtgtcgaacgccacgagcttcgcgggggcgtaggggtttaggtgcgggtgtctgccggcctgtggcccaggtgagagcacgggtgtctctccacgagctggtcggcggtcgcgccgccggggttcgccgccgccgccggccgagatgacgaagtacgacgagctgtgcttgcgcgacggatcggggcccttggacagcacgcggtactcgccggacggccggtggaggtagaagcccagcgcggcggacgacaggtgcggcgggaggcccgaccaccgccgcgttgtcgggtcgcagatgacgcggaggcgccgccggtggtcggcgaagaggagcaggccgtcgcaggacgcgaggagggtgcagtgggtgtagccgccggggaacgacgccgtgtagcgggcgagggggcggcgcgcctcctcgccctcggcgccgccggagatcagcggggcggggacgaccacgctcagctcggcatcgtcgtactgcctgccgttcgagtccgacggccgcctggagacgcggaggagctggagcggcggcgcgcggcgctcgcgggccgcgaggaaggtcgggtcggcggcgacgcggcgccactgcttgcacacggcggcgaggcggccgacggagttggcgggaacgaggaggaggatctcggcgaccatgtcatcgctcaggcttactggccgtctctcgcacggcggcggcggcggcgccat

SEQ ID NO: 43530 - DNA, 357 bp, Oryza sativa
  Clone ID: PAT_MRT4530_46679C.1
atggccttgccaccacctgagcagtgcagctgtgaggaaagcggcgacggggttttccagaggagacctcggtgcggcggaggggagtgtcgggtctgcgggttccagcccccaaatctagcgacgtgggaggcggaggggccatgggcagtggtggtcaaggccgcgcgtgccagcggaggttgttgggagggatggaggcgcaagcgttggacagcagcagtggctgaacccgagattggcatgcggcagcggaggggtcgggaggcggtgtcacagcgggtcggccgcgacgtctctgcggcggcgggtgtagcggaggacagcgggtgcagcggaggacagcagggggcctaa

SEQ ID NO: 43531 - DNA, 227 bp, Oryza sativa
  Clone ID: PAT_MRT4530_4667C.1
tggcacgaggagaaattgcatccaacagcagctgccatagttgcaagtgagctagagctcagagaagaggaggaagaagaagtgcgtcaatggcgaccaccatagctgcgatgtgccatgcttaatgcctgtccaagatcgtggctgctggtcatctgccggcgccgtcggggagctggcagtggttgcctagcatctcgctcaagagcctggccaagaagggcatg

SEQ ID NO: 43532 - DNA, 343 bp, Oryza sativa
  unsure (1)..(343): unsure at all n locations
  Clone ID: PAT_MRT4530_46680C.1
atgggaaggttaaaagaggggctgcaggacatcgacgcagttcagttcccccagtcgnnnnnnnnnnnnnnnagcagagggaaaagaggagcggggcaccagtgctccggtggttgggaggtggtgacgccggcggttgaatgtgttcctgagcttggctcactcgagaaaggtgttggccggtgcagagagctaaggagatggccggaacggcggatggaagggcttggctctggcggcaaagaaggtgatggtggtgagcgggatggggaggctaaaagagagaggccaccaccatcctttgattccatgcccatagaggtgaaagccttcaccggggcaa

SEQ ID NO: 43533 - DNA, 1527 bp, Oryza sativa
  Clone ID: PAT_MRT4530_46681C.1
atggacactttcttttctgctgttcttggtgatcttctcagcaggtccatatccttcatgattgacagatacaaacagcaacagcagagcgtggaggaggagagccgtctgcagcagttacaccgcgtgcttctacggatcgaagccatcgtcgaggaggccgacgggaggctcatcacaaaccgagcgatgctgcaacagcttggcatgttgagagagatgatgtacagaggctactacttcctcgatggtttcaggtatcgaatcgctcaaccacatgctcaagatgaggtgggtgatctgtcccctttcagtccattaaagcggttctgtatctccactagagataggaaaactacaatatccgaaattttggagaaaaaagagctgcaagagatgcttggtcgcctgaaaaccgtagtttcagacatgcaggagtttgttgtgctcgtcagcggctaccctcgtatgaaacgccaaccatattgcagctacttgttgctggagaactgcatgtttggccgccaaatagagaaggagaggatcatcaacttcttgctagcaccacatcctctcggtgatgaagaagatatcgatgtgcttccgataattggaccgggcagagttgggaagagcacactcgtcgagcacgtctgccgtgatgaaagggttcgtgaatacttttctacgactgttttctatggcccagatagcattggcgatggagacctggcgcctcttacagacaccggtgcaatcaaacatcgaaatcctgcctcaagcaagctgtcactagcgatcattgaacttgtggatgagatggatgatgaaacatggagaagaatattgcaaagcctaagatcaggagaccatgtagcacctgtgagcaagatcataataacaagtcgatcaaacaagatcgcaacttttggaacaacaaaagcactccatttaggttttttgccaaaagaagatttttggtatttcttcaagacggtcgcatttgggagcacaaatccagaagaggagccgaagctagcatctatatgtatggagattgcagctgttctgaatggatctttcatgggattaaacatcgttgcgagcatactcaattctaatctcagcgctcaattctggtacagtttgctcaaacgcctgaaatttttcacatacaggcatatacatctgctaggtgaacacccaagagacttgtataatgctaacagtggacgtacttacatttggatgcatgaaaactattgtggtgacagtgacttagtgacatacaattattaccaagtaaattctgcaaggttaaatggtctacaaacggtactaacaagcagagatattctaaccggaactgttaagcctcaggcagcaaaatatgaagtcttggaatggcaatccagcatacctccatacattagctacatcacgcaatacgagatacttgcacaacagaaacttatgctacctcctaaaaggaagcgatccggggcgctctcagaagagttagtttga

SEQ ID NO: 43534 - DNA, 820 bp, Oryza sativa
  Clone ID: PAT_MRT4530_46682C.1
ggatactttccgttttaggcgccgtcttcctccggccgggaatgccccggcagcgtcccaagaagggggagcgccggatcgacgccgccatcgaccacttcacccccatgggctacgccaccgccgacgtccgtgccgtcgtcaaggaactcctccaggtgtacggggggaacgacgggtggccgttcctggaggaagactcgtaccgcgtcgtgcaggaggcgctcttcgagaagcaggagcaggaggatcaccaacagcagcctcaccctcatccacagcaattggaggaggcaccattggaagacaagagcatgtcaagcatagaggtgcacaatgtgatgcctgctgagactgaacaacaagtcgaggacgcggaccccatgcttgttgacctgcctgcagttgaagcaactctgccccttcctgaagccaaagtaacatatggcacaaggaggccctgttatgggtggatcgaagagtacgaaagtgaatccgataacgaggaacagcctgccagattgatttgtaagaggaagcgtccgagtagatgggatgttaaacccatcaactgattatctgaaaaggaggtgacaaggcaatgtggctgcacaggtggtatgcttaacccttgtttttgaggcattctggatgtgctgatttttcataagttttgtattgtacacagcagtaacagtgggaagtattgatgcaatgtagagactttaggttatgcatggttgcatgccaattaatttgcatgatggtgtatgcagacagagacatgatggttgatgtatgcagaatctatttcaggttg

SEQ ID NO: 43535 - DNA, 1389 bp, Oryza sativa
  Clone ID: PAT_MRT4530_46683C.1
atggacatctctagggcaaatgaaggctacacgagctgcggcccggtagtcgagatgtcatggcacagggctggtgtcctgctgctaggggctcagtcctgcctacctgtcccgggggttccggccgtaggtggggttgggtcggtactcttgtctatggctaggatgggttggaaactatgtcacgtcttccgtccgtataccgtggtgaaaaaaattgccccaaaaagaaaagaaaaggcccttgttcattatgaaattatttatgacagaaaaaatggtgtgaggcaggcggacccaaaagtgaggcatggcgctgcatttgatagcagaggcatgagttccggaggtgggggttctctttcggttaccctatttgggttgtcgagttttggagtttggaggggtgaagaggaaactttccgttttaggcgccgtcttcctccgctctttgcaatgccccggcagcgtcccaagaagggggagcgccggatcgacgccgccatcgaccacttcacccccatgggctacgccaccgccgacgtccgtgccgtcgtcaaggaactcctccaggtgtacggggggaacgacgggtggccgttcctggaggaagactcgtaccgcgtcgtgcaggaggcgctcttcgagaagcaggagcaggaggatcaccaacagcagcctcaccctcatccacagttgtgctaccgaaattctacaaaattggaactgtacaatcgctgtcacgttttccatccatctcttcctttttttttccgttttctttccttctttctcccatcgtcttcccgcaccgatgagtggcgggaccgtgcgtggagccgttttgagacaacactaaggattggcccgtcgatggcctcagccgccgcagccaccacggcaggggccgaggaggagctggtggaagaggtagccatgggtagggttttgggatttgagcttggagatggaacgacgagggtagggaagaagggcaatcggctgaggccatggggtccacgcggagctccatcgccggtggtgtcgcctcgcctcaactccatccagatctggtattggcgtgtaatgcagcaattggaggaggcaccattggaagacaagagcatgtcaatcatagaggtgcacaatgtgatgcctgctgagactgaacaacaagtcgaggacgcggaccccatgcttgttgacctgcctgcagttgaagcaactctgccccttcctgaagccaaagtaacatatggcacaaggaggccctgttatgggtggatcgaagagtacgaaagtgaatccgataacgaggaacagcctgccagattgatttgtaagaggaagcgtccgagtagatgggatgttaaacccatcaactggtga

SEQ ID NO: 43536 - DNA, 1686 bp, Oryza sativa
  Clone ID: PAT_MRT4530_46684C.1
aaagctaaacgcccaaaatgaaattcactcataaaaatatatatccagaaacgttattacagtagtttagctataaagatatctccaattttacaacatcctctcacttctccatttaatttgcataattgacaatatcaactagtttctcccaagcaagcttgactgtgttcttgaaaagggttgcagatgatatgatcagaaatagcttagcatagctttcggctcttgaatccaacgatccttcataatcgcataaatttcacgcttttgaacatcctcaagcaggatttcatgaacatcaagaacattgcggtggtctgctttgctaagatattccatggcaactctatatccattcaaacaattaagcccttcagtacataacatcaccgttccatggggaacagcgacaaccggccttggatctatcttcattgcattgagcatgacagaatttattaggatatggcgtaaaagctccaactgatctttcatgccgtaaaatccagtaacataggcgagcttgagattggagtgagcgtgattggggagacttcgaagaacaccatgatcttcacagtaatgttggttatcatagggcatccacatatgcaattccagtatttcaagcaaaggagcaggcaaaacgtcaattccaatctcaaatgctttagatacataaattttacggtcttctctggcaaagtagccctcttgagttctgaacagtttacttggcagtttggtgaagatatattcaagagcagaatctatatctgataacttcatcatgacatttgtcatcaacaaaggtccaggaggtgctaaaggtatcagtgggccttcatactcaagttttgtcaaaccaaaatttaattgtatatcttgaagcattgtacagttctcgacttgcaaatgcttaagctggtttagaggttgggatgtctgcaatcttgtaagcattccacaataaaggataccaagaaaattcaaggcattgcagtttgagaccaaagtctgcatatcatcatcactaatatctgtgcaatctagcttaagcttttgaaggttccgaaaacccatgaaattcgctggcagctttagagaaacagagataagtttcaatgcttgcaactgcaagctgttagtagcattgaaaagcttaaaaggaaagttatatggtgccactttaggatagtaaggatccaaatcaagaataagctgttttgtctttgaagcaataacaaagttcagccacctatctatatggtctgcatcttcgttttctaattcataaagaattgccactgtttgaactcctagaccactgcgttgctttaacactgaatcgactctctcgatgaaaagttctttatttaacctctgaccatcggaagtccaacatcttttgatatgatgatgcattgaaagcactgtataaaatctaaacaccaagctttctcgggaacaccaaatatttttccagtggtttgataatacacttgtccttgcagcctcctttaatggcagaagtgatatgatacgattcaatatatccattaagttgtttgaatttttcactcttgccctctgccattcgattcgatgaaactctctatcaagcagcgggcatcggtgcggtggagcggtctggacgcagaaagggtggatctggggcgccat

SEQ ID NO: 43537 - DNA, 256 bp, Oryza sativa
  Clone ID: PAT_MRT4530_46685C.1
ttagttatcggccttcctttttttttttttcataaagtacactttgtttgactacgcaccatattcaacacatactttcactttacactagagcttatttatataagttccacttaacaccaggatatacatggacactagcaatgtattttgatggaaataaacaattgcactggccttgcattacatgcatgattagctattgccaatttaaagtggccgtcaaaccagtcaaggcattaaggccagagatttg

SEQ ID NO: 43538 - DNA, 1095 bp, Oryza sativa
  Clone ID: PAT_MRT4530_46686C.1
atgccgacgccgccgccgcctccccatcgcggtgccacctcctgctctacccggccgcctccgcctcgcgctgccgctgctgtcgtcgctgtcgatcgccgtctccggctggctcacctccgccaatgccgagcagtgcctcaacctcttcggccccaacaagctcaaggagaagaaggaaagcaagttcttgaggttcttggggttcatgtcgaacccgctgtcctgggtcatggaggccgcggcgatcatggccatcgctctcgccaatggagtaggaagctgccgggctggcaggacttcgtgggcatcatcacactgctcataatgaactccacaatcagtttcattgaggagaacaatgccggcaatgccaccgccactctcatgggccgcctcgccccaagggccaagttcctcgacctgctgcttccgctgctcgtagcggtcatgaggcaggtggctggcggcgtccaagccccatccccaaggctcttcccagtggccatctcgggaattgagatgctatcacttggatcattcaaaactggtgctattctcttggggatgaaattgttaccaatgggaaggaaaagtttattttacctcacaatttatggatctgtggtaggggttggctcctatgctgtacactatttctccacattggttgcttctattctggaaaattttggtttaagtgaagagatgcacaaccctgaaacatctcgcaacgatctacggggcgaggttggagtccatccacaggaggacgacgtgagagtggccgcagctggagccaaggccaaaaaagaagccgaagctggtgggaatgtcagcggcaagcagagcacagccgggtttgacacctttggattgcataccagaattttccatgttattcagctcgcaataattcatcttcagtgcacccaattcttgagcttgagatgtgcaactaaacattttcagagtacagataagatagatatcaagtttgcattggctaactctttcatgaattatgtgtttgtggaaatggcaggcaaccatgcggtcggtggaaaacaattagaggcaatagctgtctcttga

SEQ ID NO: 43539 - DNA, 585 bp, Oryza sativa
  Clone ID: PAT_MRT4530_46687C.1
atgacgcgggagcaggggaggggcgtcggcgacggcgaggggagcaaggcagtggctgcggcagcctccattgcgcaggcgcagaggagggcattggcgaccgacgaagggaagacggtctttcttttcagcacgtcgccccaaacctttctccgcgaccaacgattggtgacgcggcggcggtggcggcgacgcaggagaaggagaggtggcgactgccgccatgacctcgccctcctcgacaagttccccttcaatgttgacttcactagcggcagtgactttcgttggtggcggcggccgacgagcggagagaggagtggcggccgaagcaagaaggacattgccaggctcgctgcatccatgcgcagggtggggagaggagcagaggtggagatggacgcgacggcggtgctcaatcgaccaatcaaccaagctgccgccgacgccgactgccagcttcgcgtcaactccttcctgcgtccaccaccggccccgaggcgacgcccttccttgcaggccgccgctactcccccgctctccgccgctggcgcgccagggcaagcgccgccgccaggatgctga

SEQ ID NO: 43540 - DNA, 2568 bp, Oryza sativa
  unsure (1)..(2568): unsure at all n locations
  Clone ID: PAT_MRT4530_46688C.1
catcttcttcttcctgcagctgcaggggcctctttctttcctctcctcttctcacctgcacccaccacccaccatgcctgctgcctgccatggcgcatccggcataagcaagctggccatggcagccggcagcctcacctgagacctgtagctagcaaagcaagctggccatggcccatggagggagcgctccctgctgccgtccggccggccggatcgagactgcacagatcgagcttgacgaagctgagccctgagctaagcaagctacctacctcgagctcagcgcgctagctgcttctcttctttggatctgaagctatacctaatacaaatctcgatggatccacagatcggcgatggattggaagtcctctatctaagctaggaagccatggccaccaaggaggaggacacagaggaggtcatgttcgagaacaagttcacgcgctaccgcaaaggagcgctcgtcgggactaagtccggtttcgcattcatcgtctaccccatgccctccgttgggtatttcgacgatcctctggtggccaggagggaccaggcctccgctctgggtgctgaaggtaaagggaagatgggaaaggcatacatgagccagaagaaaggcgtcaaagctggtggaagggcccgtggccgtggggccaaggcacagctacttgtccttggctggtgggatgtgccctggaatctgtgtgttttggttgtttcaaagtctccgactgccttcacctctgccttcccctcgctccgacgcctttccgccgagcgtgggcttcgaggtgaacatggagaaagggaggaggcgaacactcttctccacccccgccgacgccgacgccgacggcgccgccgcctgcccatcgcggtgccacctcctgctctcgccggcctcctccgcctcgcggtgccactgccgtcgtcgctgtcgatcgccgtctccggctggctcacctccaccaatgccgagcagtgcctcaacctcttcggccccaacaagctcaaggagaagaaggaaagcaagttcttgaggttcatgtggaacccgctgtcctgggtcatggaggccgcggcgatcatggccatcgctcttgccaatggaggaagcatggcatggaagctgccgggctggcaggacttcgtgggcatcatcacactgctcgtaatgaactccacaatcagttttattgaggagaacaacgccggcaatgccgctgccactctcatgggctgcctcgccccaagggccaagagaaaaaaattaccggttcaatcggcgacagcaatggccgctcaaccttggtggcggttcctcgccctgctgcttccgctgctcatagcggtcatgaggcaggtggctggcggcgtccaagccccatccccaaggctcttcccagtggccatctcgaggtggcaaggctgtgctcagaggagttgcttggttgttctttgttgcacagagtcgtttctgatgagcttcaattttgcatgcagtgagggtggccggatttctgatcatgttgcgcgggagagatggcagcagcggctggagcgatgtgatggggaacaagggaggaggccagcatcagcgctctcagtggagtttaccaagtctcaagttgttacatcaatcccaggatttttcttttgcatatggtattctgcgaagaagcattggctagcaaacaatgttttggggattgctttctgcattcagggaattgagatgctatcacttggatcattcaaaactggtgctattctcttggggatgaaattgttaccaatgggaaggaaaagtttattttacctcacaatttatggatctgcggtaggggttggctcctatgctgtacactatttctccacattggttgcttctattctggaaaattttggtttaagtgaagagatgcacaaccctgaaacatctcgcaacgatcaacggggcgaggttggagtccatccacaggaggacgacgtgagagtggccgcagctggagccaaggccgaaaaagaagccgaagctggtggcaatgtcagcgtgcgtgcctcggaactagggtcaactactatgtcgactgttgctcgcacctccattgacatcaatctcatatccaaggattcatccaaggttatcttctttaacaacgtaaatcttagtttctttcgatttattactaattttccatgttcagctcgcaataattcatcttcaggcaatagctctcttgaaaggttctcacagccttacagatcagtagatcacaatgggcaagggcaagattggaaggaaggactccttgacccttcatccagggcatcccgatcatataggagcttcagaacaattggcacctccttcacagcttcagtgttgcatgaagacaagaaaactacgaagaatgggttcttatttctcaaaacagttttggattatgtcaacagatccatgagagtttgagntgagttttgaactacctaagcctggactgataaggagcgacttatctgaccacgcgactcggttacccacgaagacatttcagcagc

SEQ ID NO: 43541 - DNA, 661 bp, Oryza sativa
  Clone ID: PAT_MRT4530_46689C.1
agaaactcgatctgcgccggtgaagttcgccggagaagggtgcggaggtggtgaagcggcgacggaggagacgaacccaaccccgacgaaggtgccctcgccggggacctcgctggcgcgccgcttcacgacgacgccgacgaaggtgccgcgccgccagatccgtcccgatgaaggcggaggagcagctcgacgccgtacggagcctccacccgagcgacgccgccgtcgaccacgagcacacactcagaagcagttggtaagaggagaggcacaagcacagtcgcccgacgccgtcaccgccgccgccgcgcagctgcccgacgtcgccgcccgccgcctcggatccacgacaccgagatccgagcatcggcgcgccggcttgggaagaatggccgcctctccgcctgagcgacgccgccgcggtggaaggctacggcgccgccgccgctgcgcgccccgacgagccaaagccaccagatctgggagctcggccaacgcctctccgctccaagccaacacccgcctccttgactcctctgcgcgccgtcccccaccaagctcccgagtgccgtccctcgccgagctcccgccgcaccgccagaatcctgtcgagcgtgatgccgaggccgctccggcaccttccactcgtcggagatga

SEQ ID NO: 43542 - DNA, 516 bp, Oryza sativa
  Clone ID: PAT_MRT4530_4668C.1
atgaaccgaaggttcagcgccaaatgcttcggcgctgaacgtagccagctcagcgcttggtcaaccggcgctgaatggcatgccaccgtggatggcaggctgactcggcgtgctaacatgtcaaagttcagcaccacccgactcggcgttgaggtggctaatctctgcgccattcgatatggcacagagcttcgagacattaaggcctacccgccccggccgagagaaggagctctctcaattctctctctttcccgctccacaaaaactatgatggcgacggcggcgttcctctctgaccctaatccgcctctaacccatggggaatcaatgggatttggaggggatttcatgtggaggttgtggagtaagcccgggaatgctggcaagtacgtcgtgctcgtgaacatgtacgtcgcgcgcgagatgtggggcagcgtggctggcacgcacgaggcgatgtggacccggcctagagcgcacgacggcatctgtcggggcgtcgccgagggctaa

SEQ ID NO: 43543 - DNA, 268 bp, Oryza sativa
  unsure (1)..(268): unsure at all n locations
  Clone ID: PAT_MRT4530_46690C.1
aaaaaaggaaggaaaaaaaaaaagagaaggcgacgcgaaaagcagaaaggaaaaaaaaaaaactccgttctctcctggaagaacaggttggggaaggagaggagaggagaggagangagaggagaatccgcgtaggcttgccccccgcagattccgattgattggggccttttccggggaacccctcgtcctcctcgggttggtgttcctttacaatggcacaagaganctggaaaaaagggggcaanaggagacttgagttcaaaca

SEQ ID NO: 43544 - DNA, 257 bp, Oryza sativa
  Clone ID: PAT_MRT4530_46691C.1
ggtcaaaagcaagcggtggaccagttggctgtggggcaaagcagaaggtctgtttggaggaggcggccgatggtggtggatccgacggcggggagccgccgaagatggggaagacgacggtgcgagggcagcttgccaccactggcttgatgaaaaggagaggagagggagggggaggaggacgaccggagggtcttactagagccactgatgccttctggcagtcgatgagactagggcactgggcggtggtggag

SEQ ID NO: 43545 - DNA, 489 bp, Oryza sativa
  Clone ID: PAT_MRT4530_46692C.1
atgacgaagcgcgggttgccgtcgtcctcgatcttgggcagctgcggcatgcgctgctgctgggaccgccggtccgaccaccccctccccctcgcctccaccaccagcgccgcccgcctcgccggcctcgccgccgcctgcagcctgctcctcggcgccgtcctcatcagcaggaagctccccccgccgctcgcctcgccgggcgacagctgccgcagccgcgcccgcgccggcgccggcgaagacgcgctcagcgacgacacgccgcccaccacctccattgaaacctcctattccggtctcgcgccgctgtgtggtgtacgtgttgtggccgccgacgaggacttgggagaagaagcagtggaggggaagaggagggaagataaagccgtggaggggagcttatctggtggtggtgagatggctgtggggtcgctgatgtgtgggcccgggtgggggttctggacccacttgtcagtgtgccagtga

SEQ ID NO: 43546 - DNA, 430 bp, Oryza sativa
  Clone ID: PAT_MRT4530_46693C.1
cttccaagttccaagcctctctcttctcttctcttctcttctcgtgcgaccgcttccttcaccggacgccgccgccgccaccaaccgccgccgccgcgggagccggcgcagaggatcacagcacagggtttcctcggcggaagctgcgccactgttcgttctcctccgccgattttgctctggcggatttgggagaagttgattttgctctgagcgccgccggtggctcggaggtctctgtgtattccagctcctgccatccgccgccgccgcatgaggaggtccccgtcaagtgcacagctcccgtcgccgagctgccaggtctccgcggagcaccaccgccagcgagccaactaggtcagagtggctccatttggtgcactagctctgcaaaaagcttcatcgtttggatgagagatccccgttatat

SEQ ID NO: 43547 - DNA, 297 bp, Oryza sativa
  Clone ID: PAT_MRT4530_46694C.1
atggctcgctgctggatgcaaatatctgttagcacatatggcctatggggctatggccggccggagctggggctggagccccaaccagccccgacgatggatccgccgctgcctttaaccccaccgccggagctgcacgcccccctcctagctgtcgcccccagctgtcacccgctccacagcaccgcgtgggtggcggtgtgcctctccaggtcaaaccctgctcttgagagccctgcttcatccgggatctggctcatccaggtctgcctcgacaacgacggcttccacggctga

SEQ ID NO: 43548 - DNA, 476 bp, Oryza sativa
  Clone ID: PAT_MRT4530_46695C.1
aaaaaggccccggattatttttttttcccctggggcccttacaaagggaaaaaagggaaggagttgcaccacatttattacaaaaaaaaccggtgatactcgggacgggtcccatcgtctaccaatggcggggatggaaaagaaaacctttattgaggggggggggggggctcaagaagcgattacctgcaaaacagccactttgaaggattcatccatcaacttaaacttggcaggtggggcggcatcaaggacagctttagctgtttttttggaggcaagggaagttgcaaaaacttttttttaatttccttgggccctcccgaaagcagttatggggaaaattctccgcttccacgggggagcttaaacttcatccttttttggtggggggggcaacagccacaacggagtcgggggcctcgttgatggcctgagctgcctcatccaagcgcttatcgacaggggcgaggagg

SEQ ID NO: 43549 - DNA, 1668 bp, Oryza sativa
  Clone ID: PAT_MRT4530_46696C.1
atgtcggcggctgccaccgctgggacctactctccggcttctgccgcgggggaaaagcgtcgggagaggaaggaggagctgcggcgccacctcgccgaggacgccgactggccccgcgccgacggccgctccttccacgactgccgtcctgcatgtaaatcctcctcctccaccttctcaacctgctccgatttctctgtttgctctgatttagtgccgaccctcatctccatggaacgcccccattcgtgctcagggagcaaggatgctgatgatgttatgcaaacaggaccaacaaccgctgcatcaggatctgcttatgcagaatttgggaagacaaagggaacagataacaaggagtactccgcaatgcttcataaagctctggaaggcgcagtgatgttgcacacttttccaaagaccactgttgatgtttttgccttggttcttgagtctggtggcagtgatcttcccatcattatttcttgtgctagtcttgcgttggctgatgctggaatcatgatgtatgaccttgttacatcagtatctgtgtcctgttttgggaagaacataatcattgatccaacctctgacgaggaagcatggcaagacggcagccttatggtggcgtacatgccagcccgcaaagagatcacgcagctaactcttactggagagtggtctgatggcaaaatcacgaacggtttcctcggcggaagctgcgccactgttcgttctcctccgccgattttgctctggcggatttggggagaagttgattttgctctgagcgccgccggtggctcggaggtctctgtgtattccagctcctgccatccgccgccgccgcatgaggaggtccccgtcaagtgcacagctcccgtcgccgagctgccagaagcacccgagagctactgctggttggttttgactaagctgggtgatagcatgatcaagcaaatccttggacggttccccaagaagccatccaaatccggagacaaggaccctattggcaggtcaagcccctcagtgccgaatccaccattgggtccaagaggtgcagaaaggacactgactaccccgcccagagagaataagattgaagccttcgatgtggatgatgaggagcctgtgatggatcctgcatggtcacacttgcagattgtttatgagctgttcttgaggttcattcagtctccagagaccgatgccaagttggcaaaaagatacatcgatcattcatttgtcctgagattacttgacctctttgactcggaggaccctagggagagggagtacctcaagacgatacttcaccgtgtctacggaaagttcatggtacatcgaccatttataaggaaggcaatcaacaacatcttttaccagttcatctatgaaactgaaaaacacaatggaattgcagaactattggagattttaggaagtatcataaatgggtttgcactgccacttaaggaggagcataagttgttccttgtccgggccctgattccacttcataagccaaagtgcattgggatgtaccatcaacagttgtcttactgcattacacaatttgttgaaaaagactgcaaactcgcagacactgttatcaggggcctattgaaatattggccaatcacaaacagctccaaggagggctaa

SEQ ID NO: 43550 - DNA, 1545 bp, Oryza sativa
  Clone ID: PAT_MRT4530_46697C.1
acccttccccgaatcactccaccgaaagcggcgctgctgaggaaggccgacgcggccacggccacgctctccgccgccgccaccgccaccgccaccgtctcgtcgctgcatagttcgccggcctcccgtctctctcgaatctagagacgcacgccgagctcagagacccgatcctgctaaggtttggttggtagctcgagcagccgacggcgacgacgcacacccagttcccggcgatgtcggcggctgccaccgctgggacctactctccggcttctgccgcgggggaaaagcgtcgggagaggaaggaggagctgcggcgccacctcgccgaggacgccgactggccccgcgccgacggccgctccttccacgactgccgtcctgcatttatgcaaacaggaccaacaaccgctgcatcaggatctgcttatgcagaatttgggaagacaaaggtcattgtgtcagtgtttggaccgagagaaagcaagaaagcaatgttgtacagtgatactggtagactcaattgcaatgtgagctacacaacatttgccactcctatacgtgggcagggaacagataacaaggagtactccgcaatgcttcataaagctctggaaggcgcagtgatgttgcacacttttccaaagaccactgttgatgtttttgccttggttcttgagtctggtggcagtgatcttcccatcattatttcttgtgctagtcttgcgttggctgatgctggaatcatgatgtatgaccttgttacatcagtatctgtgtcctgttttgggaagaacataatcattgatccaacctctgacgaggaagcatggcaagacggcagccttatggtggcgtacatgccagcccgcaaagagatcacgcagctaactcttactggagagtggtctgatggcaaaatcacgaacgcggtggagctctgcatggatgcctgcagtaagctctgtgacatacttcgggagcgcttgaaagatgcttccagcttggctgagtgaataaagttttagcagcaggatgttgcaagctcaaacagatatccttagctgtacaaattttgtaggcaagggaggctgatgcctgatgtttgcgggactacatgattatatgctgattgtttcctttgcaaaacagctaattgttcagagagaaagtagcattgtctgtatgttgttttgtactactcctgattgtaatactttatagatgaagccataaaagaatgcaaaattagcttattgtgggatttaaaggacatagctaatattttgaaaatggttccatgtgagataaggatcaattgaaaagaatgaaagaaacaaggaaacctttcccctcagcttgaagattccttgaggagtaccagtggtaggaactcttaggatgcccatgttagagtcctcaattttgggaataaggaagattgatgttaaccatgaggtagaaatttaagtccttttttatttgcaaacttggtggcaatcgtagcgtgacctgaaactgaaatttgctttgaagggttcc

SEQ ID NO: 43551 - DNA, 791 bp, Oryza sativa
  unsure (1)..(791): unsure at all n locations
  Clone ID: PAT_MRT4530_46698C.1
ccacgcgtccggatagaagnacaaggtttccggtgttcaatagaacgacactcgtgttcgtgctgctgaacaccggaaaccttgtgatagaaagcacaacaaatgtagtgttgtgggaaagctttgactccccaacagatgttgtgctccctggtgccaagtttggttggaacaagatcactggcctgaaccgtcaatgcatctcaaagaagagcttgatagatccaggtcttggctcatacagtgttgaactagacactaatggtaccaagggggtgatcctcatgctccgcaaccctcctaaagtgtattggtatggtctaacatcaccaactcttataccagagctcagatccctgctagcaatggatccacggacgagaggtttgatcatccctacatatgttgataacagccaagaggagtactacatgtacactttatccaacgaatcgccttcttcgttcctctcactggacatgtctggtcagatcatgctcaatgtatggtcagaagctaaccagtcttggcaaatcatatatgcccagcctgctgatccctgcaacccatttgctacatgtggaccttttaccatctgcaacggcaattcaaatccagtatgtgaatgtatnggagagttttactcgaaagtcgtctcaggattgggaccttgggtgatcggacaggaggatgctccagaaatactccattagattgcactattagcggtaacaggacaagttcagcagacatgttccaccctatagctcatgttaaaattgccctatgac

SEQ ID NO: 43552 - DNA, 2130 bp, Oryza sativa
  Clone ID: PAT_MRT4530_46699C.1
atgttcgcgccggcggccgcggcgaggccgcacaagcaggcgccgctggcgcgggtgcccacgcggctggtggccgcgctctgcaccgcctgcttcttcctcggcgtctgcgtcgtcaatagatattgggcggttcctgagcttcccgattgccgaaccaaggtgaattcggataatccgggggctgtaatgaaccaagtgtcacaaactcgggaagtcatcatagctttggatagaacaatatctgaaatcgagatgcgcctggctgctgctagaaccatgcaagctaggagccagggcttatctccgagtgattcgggtagtgaccagggaagcaccagggctagattgttttttgtcatgggcattgtgaccacgtttgctaatcgcaagcggagagactccatccggcagacatggctgccacaaggcgagcatttgcaaaggctggagaaggagaagggcgttgttatccgttttgttatcgggcgcagtgcaaatccaagtcctgacagtgaagtggagcgtgccattgctgcagaagataaagaatacaatgatattttgagacttgatcatgttgaacgaaatggcagtcttcctttgaagattcagatgtttctgtcaaccgctctttccatttgggatgctgatttctatgtgaaagttgatgacgatgttcatgtcaacataggtattaccaggtcgattttggcacggcacagatcaaaacctcgggtgtacattggctgcatgaaatctggacctgttgttgataaaaatgaatctaagtattatgaaccagatcattggaaatttgggactgaggactgcgaatggaaggcgcaggctgggaacccgtgcgcagcgtcattcgactggaactgcaccggcatctgcaatccggtggagaggatggaggaggcgcgagctcacacagccatcgtctctctcgagccgtcgctgaagccaaaaaaccgagcgagctgcgctactaggcaatacacgcagtttccggcgatgtcggcggcggcggcggctactgatgggacgtactctccggcggcggccgcgggggaaaagcggagggagaggaaggaggagctgcggcgccacctcgccgaggacgccgactggccccgcgccgacggccgctccttccacgactgccgtcccgcattgacgaccttcatcgaacgcgcccacccattcgtgctgaagggtcccggcatactgtcagagatatgggcccggggcctggtcctgtccccgcattccgcgaaccgcaggagcggccggggggtcggggcctcggggtgccacgtcatgcccctcgggcccttgcactgctttgccccgaggctcttgcccagccgccgtgtggcggggggagcaagcaaggagggggcccaggctgaacttcctttaatgcgcgcagcgccccaactaatgaccggtctgacgccggtcacgtctgactggacggacaaccgtgctcccacgtcgcatctgcttccggcggagtggagggctgtcccccgtgtcaggcgagggacggcgctgggccccgctcaaggacaagctgtggtttaccttctaggcgaaggcacgggtcgagttccagtcaagatagggtgggtccccacccgaaagaagattatgcaaacaggaccaacaactgccgcatcaggatctgcttatgcagaatttgggaagacaaaggtcattgtgtcagtgtttggaccaagagaaagcaagaaagcaatgttgtacagtgataccggtagactcaattgcaatgtgagctacacaacatttgccacccctatacgtggacagggaatggacaacaaggagtactccgcaatgctccataaagccctggaaggcgcatcctgtttcgggaagaacattatcatcgatccaacctctgacgaggaagcatggcaagacggcagcattatggtggcgtacatgccagcccgcaaggagatcactcagctaacacttactggagagtggtctgatggcaaaatcaccaatgcggtagagctctgcatggatgcttgtagtaagctctgtgacatactacgggagcgcttgaaagatgctgccagcttggctgagtga

SEQ ID NO: 43553 - DNA, 160 bp, Oryza sativa
  Clone ID: PAT_MRT4530_4669C.1
cgctatattatgcattaaacaaaggaatacgatacaaaacattgctcattttaggtacaaggctagtctagctctactttagtttcacaacaaaagctattacaaaaagaaaaacaaaaacacgaatttcataggagcgaattcatcctagtagcctcag

SEQ ID NO: 43554 - DNA, 567 bp, Oryza sativa
  Clone ID: PAT_MRT4530_466C.1
actagtggatccccgggctgcaggttttttttgtgtaatattttttttttgagaacaatatgtgtaaatattagtacatctttgttacactgaagtggaaaacccacatacgggcaagaacataaataacatagataaacatttgtagtccagtcatagaggctcatatataacatgatatgtacacgattacattaagtagtctcaaaagtatttttcatattgccgtgttgaatgtgatctatggtaccttccgttgatcaatatacttgtaactcactgcatgacaacatgaggtcctagtacgcccattatttagacatttccatgttggcttctcacccctagccttcaaataggtccaacacattattctctatatcctcaagagtgtattttatgaattttgagttcaaaagcataccaaatcgtcccacgaatgcccgatatgctggaataacctgctgtaatataacaaggcgcaagtgttgtcgaagctgagggttggggactttccacgtcgtctggaccctgcttatttctccgaatattgaattgaagttcttg

SEQ ID NO: 43555 - DNA, 207 bp, Oryza sativa
  Clone ID: PAT_MRT4530_46700C.1
agttattaacaatggtcatcacattagatggagggctttacagcacaaacaatacaaacagtttcacagtttctctacttaatatttgcagagcctgaatatcatagcatcaaggaatggaggagctagtttcattcaggttcatacacaagactccaggcatttcgattacatttgatccttataaaagaccatctaccatatctt

SEQ ID NO: 43556 - DNA, 592 bp, Oryza sativa
  Clone ID: PAT_MRT4530_46701C.1
atggaccagacgggccgtgccgtgccggcccacggggggaggcgtcggaccaagcacggcccacaggccagcgtgccttgccatgactgggccggatacagtaccgtcgtggtcggcccggcccagcttagcacggtccatttagcctacaatacccctagccagttgccactcccgtcccaaacccttccccgaatcactccaccgaaagcggcgctgctgaggaaggccgacgcggccacggccacgctctccgccgccgccaccgccaccgccaccgtctcgtcgctgcatagttcgccggcctccagtctctctcgaatctagagacgcacgccgagctcagagacccgatcctgctaaggtttggttggtagctcgagcagccgacggcgacgacgcacacccagttcccggcgatgtcggcggctgccaccgctgggacctactctccggcttctgccgcgggggaaaagcgtcgggagaggaaggaggagctgcggcgccacctcgccgaggacgccgactggccccgcgccgacggccgctccttccacgactgccgtcctgcatgtaaatcctcctcctccac

SEQ ID NO: 43557 - DNA, 243 bp, Oryza sativa
  Clone ID: PAT_MRT4530_46702C.1
atgtagtattatgtaaaaatgataatgcttatcagctccctcctgtgtacacaatttcctgggacgtcataatgaactttggaagtgtaatgatcattccaggctgccaacaaactgtcggatatgaagtactacagctcacttgtatgatggtctactgggaagacattgtacattgagcatctatagtcatactggatacgaaagcgttacagagttcagttctatgacgcgtttcattca

SEQ ID NO: 43558 - DNA, 349 bp, Oryza sativa
  Clone ID: PAT_MRT4530_46703C.1
tcatgccctcgggcccttgcactgctttgccccgaggccctcgcccagccgccgtttggcggggggagcaagcgaggagggggcccaggctgaacttcctttaatgcgcgcagcgccccaactgccccctgtcgcatttaatgcagtggggcagacgtgcggcgtgctaaactgacgcgagatggtcaagatcaatgatcggtctgtgactggcctgacgccggtcacgtctgactggacggacaaccgtgctcccacgtcgcatctgcttccgatggagtggagggttgtcccccgtgtcaggcgagggacggcgctgggccccgctcaaggacaagctgtggtttag

SEQ ID NO: 43559 - DNA, 448 bp, Oryza sativa
  Clone ID: PAT_MRT4530_46704C.1
ctaccttcccatcctgccacgtgtccctacagcctggtcctgcccccgcattccgcgaaccgcaggagcagccgagggggtcggggcctcggggtgccacgtcatgcccctcgggcccttgcaccgctttgccccgaggccctcgcccagccgccatttggcagggggagcgagcgaggagggggcccaggctgaaccccctttaatgcgcgcagcgccccaactgccccctgtcgcatttaatgcagtggggtagacgtgcggcgtgctaaactgacgcgcaatagtcaagaatgaccggtctgtgaccggcctgacgccggtcacgtctgactggacggacaaccgtgctcccacgtcgcatctgcttccggcggagtggagggctgttccccatgtcaggcgagggacgacgctgggccccgctcaaggacaagctgtggtttag

SEQ ID NO: 43560 - DNA, 243 bp, Oryza sativa
  Clone ID: PAT_MRT4530_46705C.1
atgaaggagaaattcttcagtcgttacatcgagaacgctgagggttacctatacccgtttcgatcttcatcaaggaagaacaggaatggcttttggtacagcaagcctggtagtcatggttatttggcttctgataatttctttggtgatggtggtcatgaatcagaggaaggcgatccaggggactacataaagtttgacacagatgttcttgaagaaacaagaggtttatattttcaatag

SEQ ID NO: 43561 - DNA, 256 bp, Oryza sativa
  Clone ID: PAT_MRT4530_46706C.1
aaaatgtgctagcggcgatggtggcggccttgacgcccgcatggactccacctcagccaatgcatagccctgtgccgagctccaactattgtagtacctgcaggctgccacccttgcccgatagggcggtgctggacgaggagcaagaaactggccccagcagcctgcgaggaggtgtagagccgtctcctggacccgacgacataagggacatatggatctatttgatcatccccgagtacatagtctatcagag

SEQ ID NO: 43562 - DNA, 2629 bp, Oryza sativa
  Clone ID: PAT_MRT4530_46707C.1
ctagaactagtggatcccccgtggctgcaggtgcgacctgcttccttcaccggacgccgccgccgccaccaaccgccgccgccgcgggagccggcgcagagtgatcacagcacagggtttcctcgtgcggaagctgcgccactgttcgttctcctccgccgattttgctctggcggatttggggagaagttgattttgctctgagcgccgccggtggctcggaggtctctgtgtattccagctcctgccatccgccgccgccgcatgaggaggtccccgtcaagttgcacagctcccgtcgccgagctgccaggtctccgcggagcaccaccgccagcgagccgactaggtgagctccctcccgccgaatcgatgagccggcgaagccccccattactaactcctcaacaaaatttggagtggcgatggagaggtcagagtggctccatttggtgcactagctctgcaaaaagcttcatcgtttggatgagagatccccgttatatggaaatggacttagggtttacttttcagtaataccaattgccacattggagtcgggagaaaagttgtttcagaagcacccgagagctactgctggttggttttgactaagctgggtgatagcatgatcaagcaaatccttggacggttccccaagaagccatccaaatccggagacaaggaccctattggcaggtcaagcccctcagtgccgaatccaccattgggtccaagaggtgcagaaaggtcctccaatttgagtagccagacaccggttatctcaagctctgggcttagttatgggagtggcatgcatgttgggaatgcaaactcaagggtgaacgggaattcggtacaaccgactgttgagctgttgccaagctttaaggatgtgcccaacacagagaagaataacctgttcgtaaaaaaactgaacttgtgctgtgccacatttgacttcacagatccaacaaagagtgtaaaggagaaagaagtaaagaggcaaactttgttggaacttgttgactatattgcctcagccaatgggaagtttccggagataattatgcaagagatcacaaggatggtttctgtaaacttattcaggacactgactaccccgcccagagagaataagattgaagccttcgatgtggatgatgaggagcctgtgatggatcctgcatggtcacacttgcagattgtttatgagctgttcttgaggttcattcagtctccagagaccgatgccaagttggcaaaaagatacatcgatcattcatttgtcctgagattacttgacctctttgactcggaggaccctagggagagggagtacctcaagacgatacttcaccgtgtctacggaaagttcatggtacatcgaccatttataaggaaggcaatcaacaacatcttttaccagttcatctatgaaactgaaaaacacaatggaattgcagaactattggagattttaggaagtatcataaatgggtttgcactgccacttaaggaggagcataagttgttccttgtccgggccctgattccacttcataagccaaagtgcattgggatgtaccatcaacagttgtcttactgcattacacaatttgttgaaaaagactgcaaactcgcagacactgttatcaggggcctattgaaatattggccaatcacaaacagctccaaggaggtcttgtttttgggagagttggaagagatattagaggctacacaacctgcagagtttcagaaatgcatggttcctcttttccgtcagattgcacattgtctaaacagttctcacttccaggttgctgagagagcattgtttttgtggaacaatgatcatatcgagaatctgatcaaacaaaatagtagggtgatcttacctatcatcttccctgcactcgagagaaatgctaatgggcactggaaccaagctgtgcaaagcctcacacttaatgttcggaaattgttctccgatcatgatgttggtgtatatgatgagtgtcagcggaaatacgaggatgaaaaagccaaagagaaggagacaaaattgaagcaagaagtcgcatggaagcgcctggaagagatggcatcagcaaaagcaacgagtggagcagctgtgcttgtctctcgaaccttacctcgccaatcttcagctgtctagcgcattgttcaagtggtccttggagattcaaaaagcactgtacaggattgaactgtacagacaaggtatatcaaggcgggcatattgatggaagatctgagaagccagttgggttacgcagagtaccagcaatcacctctcaatcctgagtcttggcttttgatatgctgagatctgcagttaattgctttactatcctttaaccttgtccgaagttggttgcgaacttgcaatttgttttcagctggtgctgcaatcttcccatgggtgtttgttttggaagcaaatggttgttggtggtcagtagatagaagttagttagtccttcaaaatgagtcatcgttgttctccagttggcatgggccttcatggttgtaaatggaaacagaaatttttttcttgagtacaatatgaacaaatatcgctcaaaaaaaaaaaaaaaaaaaa

SEQ ID NO: 43563 - DNA, 378 bp, Oryza sativa
  Clone ID: PAT_MRT4530_46708C.1
aagtacaaatccgacttagtcattacgcgtagtgttcaccctcacgaggcatgcatatagatctaccttcttatacatactcactaggacacataatgcagacactactagacactggcaccacgcatactcgacaaacagaggctgggaacaaccagtctcattggtagatacaccaaactggctgattactgaccaacacagacgcggaactccagtatatacggagactcctggtcgatgtcagaactagcgaatgggtcgactctctatcaactgctcgttgcaaactataactaactgttggaatggtacaatcttgtacttggcctggatcttggccttgatatgctcgtcagctgatgacctctcaacact

SEQ ID NO: 43564 - DNA, 504 bp, Oryza sativa
  Clone ID: PAT_MRT4530_46709C.1
ctaccttcccatcctgccacgtgtccttacagcctggtcctgcccccgcattccgcgaaccgcaggagcggccgggggggtcggggcctcagggtgccacgtcatgcccctcgggcccttgcaccgccttgccccgaggccctcgcccagccgccatttggcggttggagcgagcgaggagggagcccacgctgaacctcctttaatgcacgcagcaccccaactaccccctgtcgcatttaatgcagtggaacagacgtgcggcgtgctaaagtgacgcgcgatggtcaagaatgaccagtctgtgaccggcctgacaccggtcacgtctgactggacagacaaccgtgctcccatgtcgcatctgcctccggcggagtggaggtaggtatgacccgttccatcggagggtcattcggagggcggccaccacaagtcttcacccattaatgagggaatgacagggctgtcccccgtgtcaggcgagggacggcgctggccccg

SEQ ID NO: 43565 - DNA, 3007 bp, Oryza sativa
  Clone ID: PAT_MRT4530_4670C.1
ccacgcgtccgagcagagctcctgacgctggcgccgctcgcgccaccgcaccccgcaccgccatggcgtcgtcctcgtccaaggcctccgattcctcttcccaacgccccaagcggccggatcaagggccgtcgggcaaggacgcggccggcctcgtcgcgctgcacgggaagctggcgcagctgaagcgtcaggtccaatccacccgcctcgccgcgatcaaggagagggtggaggcgaacaggaaggcgctgcaggtgcacacgtgcgctctgttcgacgtcgccgcggcggcggaggtggcgtcgcggggcgccgagggcggcaacgcgctgtcgcggggcgcggcggaggggcaccgcaggttcgtggggtgggactcggcgagcgggccgggggagagggagttggtgcatgtgcaggaggagaatctggtcgccgggacgctcgtgctctcgagctctggtggtagcggcgcctcgcataggaccgtcgtgcagcttgtgaagctgcctgtggtcgacaagattccgccctacaccacgtggatcttcctggacaaaaaccaaagaatggccgatgatcagtcagttggtaggaggagaatttactacgacccaattgtcaatgaggctctgatctgcagtgaaagtgacgatgatgttccagagccagaggaagagaaacatgttttcacagaaggagaagatcagctaatatggaaagctactcaagatcatgggttaagtcgagaggttttaaatgtcctctgccagtttgttgatgcaactccttcagaaattgaggaaagatcagaagttctttttgagaaatatgagaagcagtctcaatcttcttacaagacagatttgcaactttttcttgacaagaccatggatgtggctttagattcttttgataatctcttctgtcggagatgtttggtttttgattgccgtctccatgggtgctcccagaacttggtattccctagcgagaagcaaccatatggtcatgaacttgatgaaaacaagagaccgtgtggcgatcagtgctaccttcgaaggagagaagtatatcaagatacgtgcaatgatgaccgaaatgcttgtacaacatataatatggattcaagatcttcctcactcaaagttagtgctaccatattgtctgaatcagaagattcaaacagagatgaagataacatcaaatccacttctattgttgaaaccagcagatcaaaaataactaattctgaatatgctgacaaaagtgtgacgccacctcctggagatgcttctgaaactgaaaatgtgtcccctgacatgcccctaagaactttaggcaggcgtaagatttcaaagcatgcctccaagtctaacgatcattcacctgataaaaggcagaagatatatagctcaccgtttccttttgcaatgagtgtactgaacaagcaatctgttccagaaattggtgagacatgtccagattccatagaatctgcagttgatcaacttccaagtctggatgaccctaacaagaaaatttctaccaaagatatgtgtgctggaagcacaactaacactactgaaaatacattacgagataataataataatttgttcatctccaacaaggagcactctatttctcattggagtgctttagagagagatttgtacttgaagggaattgagatatttgggaaaaacagttgtctcatagctagaaacctattgtctggcctgaagacctgcatggaagtggccagctacgtgtacaacaatggtgcggcaatggcaaagagacctctatctggtaaatccattttaggtgactttgcagaggctgaacaaggttacatggagcaagatttggtggcaaggacaagaatctgtcgtcgtaagggccgagctcgaaagctcaaatacacttggaagtctgcagggcatccaactgtaagaaaaagaatcggtgatggaaagcaatggtacactcagtataacccatgtgggtgtcagcaaatgtgtggcaaagattgcgcctgtgtggaaaatggaacttgttgcgagaagtactgcgggtgctcaaagagctgcaaaaataggtttagaggatgtcattgcgcaaaaagtcaatgcagaagcagacagtgcccgtgttttgctgccagtcgtgaatgtgatccagatgtttgcagaaactgctgggtgagctgcggagatggctcactaggtgagccactggcaagaggtgatggctatcagtgtggaaacatgaaactcctcttaaaacaacaacaacgtatattgcttggaaaatctgatgttgcgggttggggtgcattcattaagaacccagtaaatagaaatgattaccttggtgaatacactggcgaattgatttctcatagagaagcagataagcgtggcaaaatatatgatcgagcaaattcatcgttcctatttgatttaaatgagcagtatgtactggatgcttatcgcaagggggataaactgaagtttgcaaatcactcgtcgaatcctaactgctatgcgaaggttatgttggtggctggcgatcatcgagttggtatctatgcaaaggaccgcattgaggctagcgaggaactcttttatgattaccgctatggacctgaccaagccccagcttgggctaggagaccggaagggtcaaaaaaggatgaagcatctgtctctcaccaccgagcgcacaaagttgctagatagtccaacagcagctccagatgataatatcaactgtaaattataccgtcattgaaacacatagttcaatcctagtccattatacggccaatcgttggcataataagcatattctatattccttagttccttggtaaataaactgagatatcgagtatgcgaataaaagaaaaataaggcactgtaagtttatttgtacaaagtttggaatttatgctatgtatagttttgcctgtaaaaaaaaaaaaaaaaaagcggcc

SEQ ID NO: 43566 - DNA, 1086 bp, Oryza sativa
  Clone ID: PAT_MRT4530_46710C.1
atggggcccgcgacgccgctgcgccgccggacgagggcgcggccggccgccaccagggcggagggcggcagcggcggcgacggcgacgacgacgacgttcgctgcgaggcgtgcgggtccggggagtcggcggcggagctgctgctgtgcgatggctgcgaccgtggcctccacatcttctgcctccgccccatcctcccgcgcgtccccgccggcgactggttctgcccctcctgcgcctcgccgtcgccgcactccaagaaatcacacgcggccaagaagcccaagcagttcccgctggtccagacgaagatcgtggatttcttcaagatccagaggggcccggcggcggcgctggcggcggcggcggagtcgtcggaggggaagaagaggaagcggaaggtgggtggcatccgcttggtctccaagaagaagaggaagcttctccccttcaaccccagcgacgacccggcgaggcgcctccgccagatggcgtcgctcgccacggcgctcaccgccaccggcgccgtcttcagcaacgagctcacctacgtccccggcatggctccccgcgccgccaaccgcgccgccctcgaatccggcggaatgcaggtgctaccaaaggaggacgtcgagacgctgaatctgtgcaagaggatgatggcgagaggcgagtggccgcctctcctcgtcgtctacgaccccgtcgaggggttcaccgtggaggcggacaggttcatcaaggatctcaccatcatcaccgagtacgtcggcgacgtcgactacctgacccgccgcgagcacgacgacggcgacagcatgatgaccctgctgtcggcggccacgccgtcgaggagcctcgtcatctgccccgacaagcggagcaacatcgctcgcttcatcaatggcatcaacaaccacactccagatggccggaagaagcagaatctcaagtgcgtccgcttcgacgtcggcggcgagtgccgggtgctcttggtggcgaacagggacatctccaaaggggagaggctgtactacgattacaatggatcggagcatgagtacccaacccaccattttgtatga

SEQ ID NO: 43567 - DNA, 947 bp, Oryza sativa
  Clone ID: PAT_MRT4530_46711C.1
gatccccgggctgcaggctctctcaccggctccgtgctcctccgccgcccaagggtgtctccggcgactcgcccggcgccgcacgcgaagcccggagatccggctgcggcggaggcgagaaggaagagggagatgagggccgtggtgcagcgtgtcctctcggcaagcgtcgaggtggaggggcgggtggtgtcggcgattggccccggcctcctcgtccttgtcggcgtccacgaggccgacaccgacgccgacgctgactacatttgtcggaaggttctgaacatgaggctatttcctaatgagaagactgaaaaggcatgggatcaaagtgttttgcagcggaaatttgaagttctattagtcagtcaatttaccttatatggaatcctgaagggtaacaagccagattttcatgtggctatgccacctgctaaagcaaagccattctatgcttctttagtcgagaagttccagaaatcatactcagctgatgcagtgaaagatggcatttttggagcaatgatgaaggtttctttagtgaacgatggccctgtaacaatgcaagttgactcatcctcattgcaaaatcctgctcagtcaagcaatggtgatgttggctcagttggggacaatgaagcacaagtacctaaagagacttcttaatctctgtaactggtcttctacccttcctgcacatgatttgaacatggttatcgctgtcccacatcaagccatgcagaattttgagtttgtttttgaggtttgagcagaaagaagccctccagtgagctcgtgccatgggtgctacaagtcgtgttttcatttctccacttaaatattgattactggggaaatatattagtattcatttcgtcttcaaagacatgaattttattactgatctgtcattcatacacaaatatcaaattgattcagttggcctt

SEQ ID NO: 43568 - DNA, 385 bp, Oryza sativa
  Clone ID: PAT_MRT4530_46712C.1
gggccccccaaaaaaaaggggaaaacggtgaaaatttttttaaagggggaggcaaagttttggtgacccggcacaaaaaaccgtaaaaaatgctttttttagaaacaatttcccccaattttggggctttaaaaaaaccccggggtggcccaacccttttaatttttccccaaggttcccccttttttttttcaaagggcccgctttttaaaaattttgggatattaggggcaaaagggggttttttaaggccccaccagttttgggatttgacccacgggggaaatttttgcgttaaacccttgggcttttgtaaaaaatttgggaaggcctttttttttcaaaagaaattttttaaaaaaacccctttttaagggttggtccc

SEQ ID NO: 43569 - DNA, 540 bp, Oryza sativa
  Clone ID: PAT_MRT4530_46713C.1
gggaaaccagggggcccccatttttttttggaaaaaccgcccccaggcccgtttttttttttatagggaacccccccattaccaggggggacagggcccccccccccccccccatttccctggaccccccccccactaaataaaacttaaaaacccccaaattcaatccccctttcttttttaaagaaaaaaaacccggcccaagaaagcaaaaccccccgaaaaaaccccctttttttttcctcccggaaacccgagaaggggaacaaagcaaaaaaacccccaggccctccctttttaaaatcccaccccgaaaagggggccccctcacttttttaaagggtcccccttaaaggccaaagggacggggctaaccctggggggggccttgggggcctaccacatttcaaggggggggggggtttcacccccctccagggtcgaaacctccttccaaaaacccgaaaccccgggggggggcatcaccccctcaaaagaaaacctccaggggtttttttcctcaataccctaaaaaccccc

SEQ ID NO: 43570 - DNA, 1055 bp, Oryza sativa
  Clone ID: PAT_MRT4530_46714C.1
ctaaggttccctatccactcccacacacccaaccaatccgcacacataattgtcgcacgaatgccacactgccaccaccgggggccaagaagccagggtcggcatttgcaccgtcacaacagctgcactagatctgccgtacctccacacctcaccaacggtcatcgccagcaacaagccacctccaccgcacaccagcatgcaccgtccccaatagctaccaccctcaccaacgttgtacccatccgtgagggcctggatctgggtgtcggtgtcgctcgctccccaccaccaagcacgttggcgcctgcctcctgccggtggcacgttccccatcagctgccagcctcaccggcgctagatccggcctcgaaaggccccagatctggatgtcggcgccgcacggcagccatggctcctgcttgatggtcaccgtccgccaccactacgcacgctggctggctgactgcctcctgtcgggtactgtccccgtctgcggggctcactagtgctggatccagtcatggagggctcggatctaacagcggcgtctgcccggtcatcccatcgcctacagtatatgcgctcgggaggagagagccccaccgccgtcgtccttgaggccgctcggctctctagcgtgccattcgggcggcggcgaggttgccggcggtggcgatggcgaccaggaacggggaaggcggcgcgcctggggatggggaaagcgccggcacggacggggacgatggttcggctcggcggcgcggcgcaccaagcgctcgacttgaacgcgtgccacggcgtcacccccttctccgatgtgctcctcgacatgggcagcgacctgctcgcagcggagctccttgtcgaggcgacctgctcacgcgcgcagccgcagccagctcaaccccgcggcgtccagcagcttgagtgggccctccaacctcgccggggagagagatcgacgccggccatggtggagctcgctattgaagagggacttcaaaatccaccacggagttaaacaacgtataaaaaaaaaaaaaaaaaaaaaa

SEQ ID NO: 43571 - DNA, 4155 bp, Oryza sativa
  Clone ID: PAT_MRT4530_46715C.1
atgcatgcatccatatactctggccgtgcattttccttccaattgcaaattaaccatgtacgcacaacaagtggcgacatcgtgatagtcgaccataaatcaaacaaatacccacttcggttacgcttcatggtacagggccatgctagtagtaatacagatagcagacctactattacgactgtcccggttttcccgtcgtcagattctggcacgcccgaaccagatcggttactcaaggagagggacctaaaccggtcaaatgtagtcattcacggcttcaaccaagcaggccaagaagccttgagcactatatcgttggtcctaaaactggaaccattgtccacctatgtgaccttccgtataattgatgccactacttcatataacgcgttacttgggcgcccatggctgcacgagaaccaagtagtgccatctactctacataagtgcatcaaatataaggataaatcaggagaaactgtgagaattttcgccgatgaaaggccattcacggtggctgaatccttttacacggatgctaaattctacattgagcccatcgaaaagatacagaaaccaaaagcaaagtcgctaacagaacatttcgtcacaagtggaagttatggtgaatcgtcttcaaaccggaaaatataccaatatataccaagcaaccggagaaaggaggggcagctcgcgccgttcgagaaaatattgtctcaagcacagctcgaagcgttgcagcaagataagaaattaaaagagaagaaatatggacttggttatcaggtttgcaggacctcagccaagctcgtggacgcaacgatggcatctccacaaatggaggatgggaatcaacccaccatcgatgaattggaagaaatagatattgggacacctgatatcatcgcccaatttttattagcaagcacctatccgaagaaaataagaaaaaaataccataactttctttcagctaacaaggacgtgtttgcttggtcttatgaagaaatgcctggtttaagccctacggttgctgtccaccagctagctgtgcaggaggatatccccccggtcaagcagccgcagagaaggttccgaccagagctcctcccaaaaattgaggccgaggttgacaagctcatagctgtcgggtttattagagaagtcaaataccctacatgggtctcaaatattgtacctgtaaggaagaaaaataaccagatccgcgtatgtgttgattttatagatttaaataaagcatgtccaaaggacgacttccccattcccatttccgaaattctgaatgatgccactatgggatatgaaatattctcctttatggatggtttttcaggatacaaccaaataaaattagcaccggaggacgaggagttaaccgcgttccgaacgcctaagggcatatattgttatgaagtcatgcccttcggattaaaaaacaccggcactacttaccagcgcgccatgacagtcgtcttggacgggttattatatgaaattgtcgaatgctatatagatgacatcgtcatgaaatcaaaacgcgaagaagatcatctgcaacatttagccatagtgttcgagaccctcagaaagcacgaacccaaaaggaaccctatgaaatgtgcatttggtgtattgtccggaaaatttctcggatttatagtcatgaaacaaggaattcggatcaacccgacaaaaatacaagcaatagtgaaaatgccaccacccgtgaacctacataagctgaaaagtcttcagggtcacttagcatatattaggcgttttatctcaaatttatcagggagatgcaaacctttttcccgcctgatgaaaaaaggagttccatttcagtgggatcaagcgtgtcaaaatgcattccaagatattaaaagatacttaattaatcctccagttttaagtgctccagttaaagggcggcctctcatactatacacggctgcgatgcctacctccctaggtgcactgttggcacaaaataatgatgatggaaaaaagacagcattatattatctcagccgcacattagtgggggcagaatgcaattatttagacgtggaaaaaatatatctagcgcttgtcttcgcagcacaaaaacttcggcactatatgctagaacacaccatacacctcgtgtcgggggcggacccattctgatatatattgagtaaaatggtcctctcaggaagattagctatatgggcgatgtttttgtcgcagtttgacattatatttgtcccacaaaaatcaataaaaggacaagccttagcaaacttcctcgctgcacatccaattccggatgagtttcccattgatgacgacttacctgacgaggaagtatttgcgacctcaatttttaacccatcatggaaaatgtattttgacggcgcgcgtcgccggtcgggggcaggcgcgggtgtggtttttgtcacacccaacgaaagcataattccatattcgttcactttaacgacggcagtgtctaataatgctgctgaatatgaggcactgattatcggccttgagatagccttgaatatgcggctagacacactctatatatgatgattcacaactgataatcaaccagcttgctggaaaatacgcagtaaaaaaggaaggtttaatggcttatttcacgagagcaaaacaactcatggccatgttcgcaaatctaaatatcgaacatgttgttagaagtcaaaatgagagagttgacgctctaaccagcttggctgctagcatgtcagtcaattcttattaaataatggacattcaagttgagcagcgtagagtattaccggtactcattgaaaaggaggaagaaattccatcggcagctatgataaccgatgttcacgaaatagaggcaggagattggagaactcccctcctggaatatttattgcacggatatttacctttagaagcatccgaaagatctagaattagaaaaagggtgactcgttatacgtgcattaatgacacgttgtactgacgtgcatacgacggaatgctactgcgttgcatcgcgggtgatgaggtcgtagacgctttaaataaagtgcatgctggagtttgcggtgcacatcagtctggatctaaattgtactatcaattaaaacacttaggttattattggccgactatgtttgaggattctatgaaattctcgaagaaatgtcatgagtatcaaatacacgctgactttatccatcaaccacatgagctgctgcatcctactaacatggcatggccattcgaaatgtgggggaatggatgtagtcggacaaattcaaccgccatcatctaaaggacataaattcatcctcgccgctaccgactatttctccaaatgggcggaagtcgtgccattgaaagaggttaaagctgaaaatgttgaaaattttattaggacacatctcatataccgttttggcatcccttctcggattatgtccgataatggttctccattcaaaaatgcactgatcgaaaagttgtgcgcgaagtttaaaattaagcataatttctccacagcatataacactgcggccaatggacaagcggaggcgttcaataaaactctctgtaaacttttgaagaaagtggttacaaagaataagcgagactggcatgataagctgctcgaggccctgtgggcatatagaacaacaacacgcacgccgaccggaatgactccttactctttagtgtttggaggggaagcgatcttacctatagaagttcaaatcccgtcactgagggttgctattcatgaaaatatagcagaagtcgaagcggcaaaacaacgcggaaatgaattagagaaattggaaggtaaaaggctgcaggcgttacaaaatttggaagcctatcaggctagagcatcgcgagccttcgataaacggctcaaaagaaggtcattcaaacaaggagacttagtgcttgctcttatccgccctatgaatattacacatcgaatgtagggaaaatttgagccaaaatgggagggtccctatgtcatgaggaagtagcgcgtacaggatcatctcgccggacggtgaatattatccggcacctataaatggaaaattcttgaaacgctattatgca

SEQ ID NO: 43572 - DNA, 248 bp, Oryza sativa
  Clone ID: PAT_MRT4530_46716C.1
gcgcgtacgaatgagtgagggctcggacggctcgttcatacgccgtgctggccgcggacgccgagggagggacagctccacggtgggcctcagggcggtgagtccggcgtgacgccggtggtctctgtatccgcctgggaaggtgctgtgtcgtctcgttgcttgcgcctcacgatctggtcgacggcgcttgtggaagggggtcgactcgctgacgtgtatatggtgcaacagctgcatccaatgga

SEQ ID NO: 43573 - DNA, 198 bp, Oryza sativa
  Clone ID: PAT_MRT4530_46717C.1
atgcccgatgaccaggaaaatctgggatgtggtggcaacgcggatgacctcccacagctgaaaaccgcaaaactggttcgacacgtcatccctcgaggaatggtggtgccagagtgtcaaggctgcaacaaaggagaaaagaggggggggcatcaattagatcctcatctcctaggaaatatggagagagcggaatag

SEQ ID NO: 43574 - DNA, 404 bp, Oryza sativa
  Clone ID: PAT_MRT4530_46718C.1
tttggtttttttatttttgtggggtttctttttcttttttttgggtggaaaatcccaataaattgggcctactagctatgcataagacccagttggacccatcgggagctcctctggaaagagggttattaacaatccaacaacgtcaacctatggagacagccagccagaatccccttataatggttccaaatcaacctagcctaaaaaggaaccgtcagaagaataccaagcccaagattaaactaatagcacatcagatctatgcgcatgagtcagaaatggcccccagccacgttctgaaagaaaacatacctatatacgctgttcatttctaccagtagcctttgcacgttcagatgtgcatggccagaaatgaagtaaaggcgatccaaataatactc

SEQ ID NO: 43575 - DNA, 300 bp, Oryza sativa
  Clone ID: PAT_MRT4530_46719C.1
atggtcccgcgccacggcgccacgcgacctgctcggtcccgcgtgcagccgccctctaccacgctaccgctctcctgggctgcgggagtgaggcggtgtcgcacagccatcctgcaggactgccggtcccatggaatggaagcgcggcaccgtttcggtcctgcgtccccatcgtgcggagaggtccggaagttccggtctggtgaaaaagattttcctaactgttttccagaagttcctgtcttccaggtccggaacttcctgtctagtttcaagttcaaaattgtgagtaacggctag

SEQ ID NO: 43576 - DNA, 405 bp, Oryza sativa
  Clone ID: PAT_MRT4530_4671C.1
atggagcttacagacgtgcgaaggaaactgggttccggcgaggattggaggaggaggaggggtggccgggctgcggacgacggctgtggtgtcggggaaggagacgacggaatgcggggtcaactagggcggcgagaagcggcggtcggaggcggtaaaggtggtggcggctcgggtgtggtggtggaatggtggtgccggtggtggaggagggaaatggagtggaggccgtgctcggggagtggagaccatggctgggcgtggtggcaacagccggcgaggtggggtggcaacgtgggcgcgtggtgggggcaaaccggcaccgaaatttgggggaaaagtgggggaaggggtggaggaggtggtgggaatgcggttccaccacttgggcgcgaacaggggtga

SEQ ID NO: 43577 - DNA, 186 bp, Oryza sativa
  Clone ID: PAT_MRT4530_46720C.1
atggcgcggtcccgcttctcggaggcgagggaggatgacaaagatgagttctttgactcgagggaggtcatgtcgccaacgtccatctcttctccggcgagctccgggcgccatgacaacgacgggttgcgctatgacggacccatgtttgaggtgtgggccaccacccagcgctactgccgctga

SEQ ID NO: 43578 - DNA, 317 bp, Oryza sativa
  unsure (1)..(317): unsure at all n locations
  Clone ID: PAT_MRT4530_46721C.1
ttctaacgccccctggggggggggtttaattaaaaaacagttcatgcgatacgcgatctgcttcantcagcagatcgctccgataattaccattatttgtcaatgatttctttcagtaatctgacaattctacaatgatacagatcacattgcctacgctcttagggggggcatctaaactaatgctcctggttgttttttttgtgatctangctcttacatgttacatctactgctacaaaactggaaggttaatggtacatggtcgcgccccaaagagagttagtccacaggagaagcagattaccaacagcaca

SEQ ID NO: 43579 - DNA, 133 bp, Oryza sativa
  Clone ID: PAT_MRT4530_46722C.1
gtgctttttcaatatattgacgaacacacaatataaaacacttgcgttaatgctgttagcgtcacggaaaggatcgactaagatgtttataactctcgtacccaaggtattcattaaggaccattggtgagta

SEQ ID NO: 43580 - DNA, 208 bp, Oryza sativa
  Clone ID: PAT_MRT4530_46723C.1
gacactaagatgcattcattcaattcatatgagggacgcaaacacgagacgagctttgagggcccatgaaaaacaaagccgggcaaaaccacggtggcagggacataaaaaatttactcgcgagcctaacaaagattacaaacggatgattatgatggaggcgccccttgttatatggagaaacaggtcatggggaaaagataactga

SEQ ID NO: 43581 - DNA, 1841 bp, Oryza sativa
  Clone ID: PAT_MRT4530_46724C.1
ctgcctcatggaggttagatcaggctgcttcttccatctatgtttagatcagctgttgcagtgagccagttagctacgacgacgacggtgtggatggatcgtggcttcaacgagatgatcttgagcgagagcgtgtggaatggcggcggcggcggcggagatggagatggtggggcggtggtgctgccgccggaggtgggtggtgtcaatgcggtggacgggagcggcatgacgatgctggagaggctggtgctcgacgaggccctggcggcggcgatactcgagctgcagggcatccaggcgccggggtgcggcgggggcggcggcaaggtggcggtggtgccgccgccgacggccggtgacggcggcgtcgaggcggcggtcgccttcgcggcgatggcgacggggacgcctgcctacgctgacgttgacgcggatgtcctgcagcgacagcggcagcatcaccatcgccaccagggcgcgatggggatggctgccgagtacgacgtcgcaccagcaacaccggctgtcacgttgagcgctgtaccaccaccaccaccaccacctgcgttcgcgaccgcagccgcctccgttgacggcggcggcgccatggacgcgacggtcttctccggcatcggcaacgacgacgtcgtcgacgcggtgagcgccacggtggcgatgactactgccactgcaacgaccagccagtgcgaacgagtcagaggaggcggcggcggcggcggatgtggacgtaagcaacgccggccgggaagaaagcggaaggccgccgagccaaccgccgccgccgccgcggcggacatgtcgtcgcaggacaaccctctctgcagcctcctggcgtcgaacaccgccggcgccgacggcggcatccagatcgcgttcagcacgagcgccccggcgtcgaagcgggcgaagccgtcgctgagcagcagctcgtcgagcatcagcttcgacggcaggggccccggcggcaactgcggcggcggcggcggcgacgacccactgtacgagcccgacacggaggcgctggcgcaggtgaaggagatgatctaccgcgcggcggcgatgcgccccgtgaccctcggcgccgaggacgccggcgagcgcccccgccgccgcaacgtgcgcatctcctccgacccgcagacggtggcggcgcggcagcggcgggagcgcatcagcgagcgcctgcgcgtcctgcagaagctcgtccccggcggcgccaagatggacacggcctccatgctcgacgaggccgccaactacctccgcttcctcaagtcccagatcagggagctgcaaaccctagaccgccggaactacccgaacgccgccatgtccatcaacaccgccgccgccaccaccatggcgacatccagttcaccaacctacaacaacagcaacgccgccatgccagccttcgccttcccggaaaccctaggatgcggaggaggaggagtcgagcagctgatctaatccatttagctagatagattggagacgacgacgacgacgacgacatggaagccatgaaggcgcatggcggcatgcatgccaagcactgttgccaatgtgttgtcccatgtgagaccatcatatgatagattcatcattgttaggcatggtgattaactagctacgatcatatcgatggaatcatcatgcatgtcatggaccctattagctagcttttttttttctcttctcttttttcttcttcttctccttgtcgtcataatttagttctgatcagtttgatgatcatgtatgcttgcatgtccagcctacgtgctttattttcgagctaaaaaaaaaaaaaaaaa

SEQ ID NO: 43582 - DNA, 351 bp, Oryza sativa
  Clone ID: PAT_MRT4530_46725C.1
atggcgagctcgcgggttcctggatggcgcgctctgctctgcgacggggagaggagaaaaacgcgggaggagggcgcgcgcgataagataaggcgtagatgggttcgagtttgcgtgatgtcgatgtcctcgccggcgacgcctcttctggccggcggcgcgcacgccatgcggccgccgcggcaggacacgtcggcggcggcggcggccggggccaccggcgggggcgggtcgtacacgccggtgttcatcgtgctgggcgtcatcgcggcgctgctggtgatctcctgcatcgtggggcaggtctgcaccaagaagcacctgcggcgcggcggggcgcagaatagatga

SEQ ID NO: 43583 - DNA, 390 bp, Oryza sativa
  Clone ID: PAT_MRT4530_46726C.1
gtccggcccccccccctccttcctcctctttccccacctcccctctcttcatctctcccctctcctcggacatgcgggaggcagcggcggagaccggcaatgccgacggggcgacggcggcacgaagccgacggggcggagtggggcagccggcgggcggacgcgcgggcggagcggcggcgcccgaaggcacgaagccggctggccggaagccaagaggtggtgggcttctcttttgactttattagtgttaggaataagttcatctgcaggtagtaatcctgaccctgtatagatcgatcgtgtgctgatcaattacttctgcttctgatactgtaatcctgcggcggctccattatttcttctcctgatctgaaaaaaaaaaaaaaa

SEQ ID NO: 43584 - DNA, 927 bp, Oryza sativa
  Clone ID: PAT_MRT4530_46727C.1
atggcggggctcgaggagctgaagaagaagctgcagcccctgctgttcgacgacccggacaagggcggcgtcagtagcagggtgcctctcccggaggacacctgcgactcctacgtggaacaaaaatatcgatgttacatacgtacccttaaaggttgccatatttctggaaggaacagattggatagctatgggcaactggtgcctggtggtttagcattgctggccaggactggtactgaaggtagggtaagggaagtgaaggtttctgatggtggaactgtgaatttgttgagtagatcattgggtgagtataacatcaatgagcatggctttcataaacgaagcactgggccagaggagtcagattctggtgaaaaggcataccgatgtgcctctcatgatatgcacatatttggccccattggtaatggtgcaagcagtgttgtgcagagagctgtttttataccagttcatcgaattttggccttgaagaagataaatatatttgagaaggagaagagacaacaaattctgaatgagatgagaacattatgtgaagcatgttgttatattggtttagttgaattccagggtgcattctacatgcctgattctggacaaataagcatcgcccttgaatacatggatggtgggtccttagctaatgttataaagattaagaaatcaataccagaaccagttcttgcacatatgctgcagaaaggtttgcgctacttgcatgaagtaagacatctagtgcatagagatataaagccagcaaatttgctggtaaatctcaagggtgaggcaaagataacagattttggagtgagtgctggtttggataatacgatggccatggacattgacacagtctccaagccagatgttttatcatttcttattctaataatatatttataa

SEQ ID NO: 43585 - DNA, 454 bp, Oryza sativa
  Clone ID: PAT_MRT4530_46728C.1
agtgtcgtcggcacccggcgtacgaggagatggtcaggaactgcatgaaccaggacctctcctggaagggcctgcagaagaactggtgagaatgtgctctctgggcctgggcttcctccgcagcgcaccggggatcgaaggctgacgagatcgcgccgctgcgcacaagggagaacgtgggctggctccttggaagagcctggagatctgacatgatgggagtggattgaattgaatatgagcaagtatatggatcgagagacgaatgaaccacgtggtttgtttgttggtgagtgaattgtgtagctataccattatgatgaggctaataatttgatttgtactcttctgggtgtgcttaagtatcttatcggacccctgaatttatgtgtgtggcttattcccataatattaagtaataaagggtttattatattataaaaaaaaaaaaaaa

SEQ ID NO: 43586 - DNA, 714 bp, Oryza sativa
  Clone ID: PAT_MRT4530_46729C.1
aatcttcgactgatgtcgcgtggcaaactcctgctgaccgtggagtccaagaagtacccacatctgcgcatccagggacacatcgtgacccgagccagctgcgaaatcttccagaccctgctggcgccgcacagtgccgaatcctcgaccaagagcagcggtttggcgtgggtctacttgaacaccgatggatctctggcctacaacatcgaaacggagcacgtgaacacccgggataggcccaacatcagtttgattgaggagcagggcaagcggaaggccaagctggaggatctgacgccgagcttcaacttcaaccaggccattggtagtgtggagaagttgggtcccaaggtcctcgagtcgctgtatgccggcgaactgggcgttaatgtggccaccgagcatgagacgagcctgatccgtggccgcctagtgccccgtccagtggccgatgctcgggactcggcggaacccattctgctgaagcgacaggagcacacggatgcacagaatccacatgccgtcggcatggcctggatgtccattgacaacgagtgcaatctgcactacgaggtgacgctcaacggtgtgcccgcccaggatctgcagctgtatctggaggagaagcccatcgaggcgattggagcgccagtgacgaggaaattgctcgaggaattccactgcagtagaacggaatcctaatacaagtag

SEQ ID NO: 43587 - DNA, 2100 bp, Oryza sativa
  Clone ID: PAT_MRT4530_4672C.1
atggccgatgatcagtcagttggtaggaggagaatttactacgacccaattgtcaatgaggctctgatctgcagtgaaagtgacgatgatgttccagagccagaggaagagaaacatgttttcacagaaggagaagatcagctaatatggtggaaggaaagatcagaagttctttttgagaaatatgagaagcagtctcaatcttcttacaagacagatttgcaactttttcttgacaagaccatggatgtggctttagattcttttgataatctcttctgtcggagatgtttggtttttgattgccgtctccatgggtgctcccagaacttggtattccctagcgagaagcaaccatatggtcatgaacttgatgaaaacaagagaccgtgtggcgatcagtgctaccttcgaaggagagaagtatatcaagatacgtgcaatgatgaccgaaatgcttgtacaacatataatatggattcaagatcttcctcactcaaagttagtgctaccatattgtctgaatcagaagattcaaacagagatgaagataacatcaaatccacttctattgttgaaaccagcagatcaaaaataactaattctgaatatgctgacaaaagtgtgacaccacctcctggagatgcttctgaaactgaaaatgtgtcccctgacatgcccctaagaactttaggcaggcgtaagatttcaaagcatgcctccaagtctaacgatcattcacctgataaaaggcagaagatatatagctcaccgtttccttttgcaatgagtgtactgaacaagcaatctgttccagaaattggtgagacatgtccagattccatagaatctgcagttgatcaacttccaagtctggatgaccctaacaagaaaatttctaccaaagatatgtgtgctggaagcacaactaacactactgaaaatacattacgagataataataataatttgttcatctccaacaaggagcactctatttctcattggagtgctttagagagagatttgtacttgaagggaattgagatatttgggaaaaacagttgtctcatagctagaaacctattgtctggcctgaagacctgcatggaagtggccagctacatgtacaacaatggtgcggcaatggcaaagagacctctatctggtaaatccattttaggtgactttgcagaggctgaacaaggttacatggagcaagatttggtggcaaggacaagaatctgtcgtcgtaagggccgagctcgaaagctcaaatacacttggaagtctgcagggcatccaactgtaagaaaaagaatcggtgatggaaagcaatggtacactcagtataacccatgtgggtgtcagcaaatgtgtggcaaagattgcgcctgtgtggaaaatggaacttgttgcgagaagtactgcgggtgctcaaagagctgcaaaaataggtttagaggatgtcattgcgcaaaaagtcaatgcagaagcagacagtgcccgtgttttgctgccagtcgtgaatgtgatccagatgtttgcagaaactgctgggtgagctgcggagatggctcactaggtgagccactggcaagaggtgatggctatcagtgtggaaacatgaaactcctcttaaaacaacaacaacgtatattgcttggaaaatctgatgttgcgggttggggtgcattcattaagaacccagtaaatagaaatgattaccttggtgaatacactggcgaattgatttctcatagagaagcagataagcgtggcaaaatatatgatcgagcaaattcatcgttcctatttgatttaaatgagcagtatgtactggatgcttatcgcaagggggataaactgaagtttgcaaatcactcgtcgaatcctaactgctatgcgaaggttatgttggtggctggcgatcatcgagttggtatctatgcaaaggaccgcattgaggctagcgaggaactcttttatgattaccgctatggacctgaccaagccccagcttgggctaggagaccggaagggtcaaaaaaggatgaagcatctgtctctcaccaccgagcgcacaaagttgctagatag

SEQ ID NO: 43588 - DNA, 186 bp, Oryza sativa
  Clone ID: PAT_MRT4530_46730C.1
atgggccccgtcaccgcctccccgccgttggagtcttgggagattacggtgaccgacccggattccggtgccgtgtgcagtccatacaccgagatgatcggtgcaaacgtgcagtgctatgctccgtgtgcttcggcctgtcggcctctcgggagtcgggacgggaggacgaatacaagagcctaa

SEQ ID NO: 43589 - DNA, 855 bp, Oryza sativa
  Clone ID: PAT_MRT4530_46731C.1
atggacgcgggcgccgcgcccgcctcgccatcccctcccaggtcgtcgaagaagcgctcgtcccgccccaagccccgcgcgggcgacgccgcgcgccacccggcccccaaccctagcccgccccccgccgccgccgcgcccgcctcctcccgcagccgcgagcgcgagcgcaagcgcaggcagcgcggcgcgttcgcggaccccgccgcggtgaccgcgcccgccgccggggggcagcacgggggcgccgtccagaagctctggggcgacgccgacgaggtcgcgctcctcgccggcgccgccgccttccgcgcgcgcgccggccacgtcccgcgcctcccggacatgggcgcgctcttcgactccatcaggggctccctctccccgcacatcgaccaggccaaggtgtactacaagctgaagcggctcaagggcaagtacctgcacgcggcgcccggcgcgtccgcgggaccgcacgaacgccgcgtgcgcgacctctgcgcgagcgtctggggcgccgacctcgagccccttgctgagggcgacgacgaaagggccgccgccgccgccgccgccgccgccgccgaccagccgcgcactgtcccggacgccgccgccatgctgcctgtgctgactgagatgcttgatgagtactggaagacggatgggcgagcgctgtccagtgtgtccctggcgaaggggttgtcactgctagggacagaggaagcaagattcatcgagggcaagtggaggaggcagcttgattcagagatacaaacgcagatgcggcgacatgatctggccaaggaggtctacgccttgctcatggacgccatcaaggccctcgggccttag

SEQ ID NO: 43590 - DNA, 528 bp, Oryza sativa
  Clone ID: PAT_MRT4530_46732C.1
ctaacccttctcaaaacctggtggcacctccgggaagcctaaacctccctgcgccgcatctgcccctaccgccgttcccctattcttcttcccgccatccctagccactgtggacggggtatagcccggcgggagcagcacaaggccactacggagctcaatctgcgtgaacttggggcggtcgtccatggttcggtcggatcaaaggagcagcggaatgggacgacgcgacgacgagcgagggaaagatgtgcagcgagaggcgggcgggcggacagacgatatgagatggagtggacgaatcgatctggtcggcaacaaggggagggcgacggtgtgtgtgccggagtgggaggaggtgacggcgtgtgcggcggagtgggaggaagcgcggcgagaggaggacgaggcggagagacgagaggaattgctggaatcgccgaatggatagggtcgaccctcgctccaggaggggtaggtgaggaaaatttctttgcccctcccgtgacctcgcgcattgttgggtaa

SEQ ID NO: 43591 - DNA, 588 bp, Oryza sativa
  Clone ID: PAT_MRT4530_46733C.1
atgccttgccgcaccccgtccactgctcctcttccccaatccattgccaaaacgccgcagccacattcaccatctctctccgccaccgtcgccaactccagccgcaccgtaccgcctctccagccgaccccgcactgcgctgtcaccttccccggcactgcagccaccgttcttccggccgctgtccgccaattcccactcgcggaacgccgctggaccaccgttgccgcgcctccccgaggagcccgccgccgctttcccttcgtcttctcatcattgcgcgagcacccctccctctccctctatctccccttcgtcgaccgcctcgtgccgcgctgccgccgccggtggccgtccagtcaggccgcttgcagccggtggccgcacgccgccgccgtgccatggctcggccaggccggcttgagccgtacccgcgcctcagccgcccactccagcgccgttggattcaccctcgggtgggtgaatccaggtcgtccacgtggtcgtcttggtgccgtcccgcgtcggtgccacctcggcgccacatccttgccacctcgcccgcttgtccgtcgtgaccgccacgtg

SEQ ID NO: 43592 - DNA, 1469 bp, Oryza sativa
  Clone ID: PAT_MRT4530_46734C.1
ttttttttttttgcagacatggtttatcagcaacaacaaaactgagaaacatgttacattctcttctccctacattacaaatttacttgacaccatcagctaatctgtcagtttagctcaatttgaaccaaagatatcagcacgtccctagcaacggggaaaaattggcagaaacaaaggattacaaggatacctttacagtgtaatctatgaacaactcgtgagcgctacccatttacatctgacggatatatatcacacaatatcattgtttccccacatcaggaatgagggacctcagcagagtaattggacagttctacatcaaccaagtttgagaggtcgtatggctctgaaggggcaacagtttcttccatgccatgggagggcattgttttatctgcctcatgtgttaggatgactgatgccaacggagctttcgagtccacgacagagacttctaccagctgtatgtcctgtactgttgacacaacactggcagagctatattttgtcggttcatcctcttcctcgttactgtagagcacatattcatgatatgttggtgcaaactggtgcacagtatcatgatagaagtcattgaatttcagagcatgaaaaaggcttcccctgaatccaccgaaaggacgggcattggaaccagcatactccttgtacgagaaggcaaattggtgcccaatagctgctatgagcatctgccagtaggtgaggaacaccactgatttgataatgataaattttggaacaggattatatggctgaagaagatctctgcatgctacgtagaacagtgctagagcaaacagtgccatcgaatacgaaattgtgtagatgatagttatgtatagataggattgattgacactaaaatttccatcttcatattttcctttggcataaagaatgaaggttataacaaccaatattggcttgaggatcacaaactgcagacaaccctgtttgcatctccgtataaaacgcccatctagaggaacagctgaaaaacagcaagtcatcatgaaccatgacggtttcagagatcggccagtcaaacttactaccacggcaccaggacctcctacccatgccaagcagagtgaaaagaaattgtagatgacccatgcgtcatagatttcgcgaatagagttgaagtagatggcgctaccaggtagtacaagggaaagaaatgacatcacagcatataccaacatatatgatgtatcacttgcactcaaatcgcagctggaaccatgtggccttgactgaattatggaatcagcacatagactcgggaccatgaggatgatgcggacgatgaagcgctggtgggtgggctcggcgtagtggaggaggtggcggtagacgaggcgcagcgccaccaccgtcgccgccgcggcgcacgccagcgccgtgcccgtgtacgcgaccgtcgccacccacccctccat

SEQ ID NO: 43593 - DNA, 636 bp, Oryza sativa
  Clone ID: PAT_MRT4530_46735C.1
gtttagagggaggaggctgccccccgatgccacgtggccctctcccgaggggagtcaggcctgaggtaggacggcggccactccttcccagagactggatggaggaggctaccctccaatgccacgtggccctcccccgaggggggtcgggcccgaggtagggcggcggtgttgatagtgaaatttggtaaggccaaagtcatcatcggcttagaatcattatcggctgcaacatctcggaatcagccgatgggagttatcaagtcgccaatagtcggattcctgctatattcgccggctttttgactgccaataagggtttcatcggggtttcagccgatgagttatctagatatgttgcatcggcttacaaggattgcatccaaatggtttctattggactacattattgctatattatattattatcggccgatcacctttatattgttatttacatcaagtgtcagaatctacattggatatatagccgattgctcaaaaccctatcgctatcggctggattaaactggctggcatgtccgcatctcatcaacctttggtccttcactggagctaagcagatctcccaggccagtgtgtatttttcgcgtcaacagtacctaatcaacttat

SEQ ID NO: 43594 - DNA, 496 bp, Oryza sativa
  Clone ID: PAT_MRT4530_46736C.1
agagtggagaggcatgggaggcatggcagctgctccttttccaggcaaatgcttcctcctcctccaacaagtacccaagccatcggcggcgctggccgcagctcacccattactactaggacgccgtcggctggctgccctcccggagacggccgcagcgtgcgtggccgccgcggggttggtgggagtcgcagccagcttgctagtgggcagggcggcggaaggagcacgacgagaagaggaagaggaggaggaggaggagtgctcggagtgcggcgggacggggctgtgcccgcggtgcaaaggggaagggttcgtgttcaagcagctgccggaggaggcggccagcagggcccggaaggcggccaagaacatggccaccagatacacttccggcatggaggtggggcaaaggtggctgttgatcgcccactcatggatctacgagaaccccttcacatacgatggctcacacatcgttgaagtggaagcctga

SEQ ID NO: 43595 - DNA, 414 bp, Oryza sativa
  Clone ID: PAT_MRT4530_46737C.1
tatgctgtaacaagagatttagcaaccttcatatcagcaaatcggcatatctggcacaaatattcaaacgaagacgtgtcatttggttcttggttgattggattggatgttgagcatgtggatgagagaagcctttgctgtgcactcccccagactgcgaatggaaggcgcaggctgggaacccgtgcgcagcgtcattcgactggaactgcaccggcatctgcaatccggtggaaaggatggaggaggtgcaccggcgatgctgggaaggtcatgtgcccgatttgcaggcacagttttgacaaccaatgggtggtagttcaggcatcctcatagtattgttttctctgaacccaacatgtaaattgctcgggagaacgaaattgttatgcaatgcagtggttagttttttcc

SEQ ID NO: 43596 - DNA, 343 bp, Oryza sativa
  Clone ID: PAT_MRT4530_46738C.1
aacagaaggaaacattaccacatccatgttattacaaacctcaacaggaaacagggctgatagcctgatagtttcggggcaaatggacctttaaaaaaacaacacttggaactgacaggtgcaatactggtttttaaaaacaaccccccccacatatttgacatttaaagggcaagagcatggcaccgggtggaagggttcaagacgtttaactaaactttggggggaactttgagctccatgtatgtttgaacaaccttgagggctttgggggcttccatgaggggctttttgggcattaagaagcatttaccaaggttggtcacaaaacatttaggggaac

SEQ ID NO: 43597 - DNA, 369 bp, Oryza sativa
  Clone ID: PAT_MRT4530_46739C.1
atggccggccggtcagaccggccgacacccgccagtcagaccgccactgcctggctggtcagaccgccgctctctggccggccgggatcattaaccgcacgtcatggttggtacgacatcgtttgtgatgtagcgattgcatggcgtcctggacttgttctgcaatttcctcctcccgcgctgtccgctcccaccgtccccgctgctcccaccgtcggcgtcgcgccgtccactcccaccaccccctccgctcccaccgtcgggaaaggcggatccgtccgccgccgcccaccgcagtgctcccgactccgcatcgaccaccatccgccgccgtggccaccacatccgcctcggacgctaaggagttga

SEQ ID NO: 43598 - DNA, 1281 bp, Oryza sativa
  Clone ID: PAT_MRT4530_4673C.1
atggcgtcgtcctcgtccaaggcctccgattcctcttcccaacgccccaaggtgcgcgccctcgcctcagtctcgactccccgcgcccgattccccactccgatctccttccccaatctgatcggcctcgctgtgcagcggccggatcaagggccgtcgggcaaggacgcggccggcctcgtcgcgctgcacgggaagctggcgcagctgaagcgtcaggtccaatccacccgcctcgccgcgatcaaggcaagcgcccgcccgccgatcacgcatctctacagtttcagctcgcagggggaagagagggtggaggcgaacaggaaggcgctgcaggtgcacacgtgcgctctgttcgacgtcgccgcggcggcggaggtggcgtcgcggggcgccgagggcggcaacgcgctgtcgcggggcgcggcggaggggcaccgcaggttcgtggggtgggactcggcgagcgggccgggggagagggagttggtgcatgtgcaggaggagaatctggtcgccgggacgctcgtgctctcgagctctggtggtagcggcgcctcgcataggaccgtcgtgcagcttgtgaagctgcctgtggtcgacaagattccgccctacaccacgtggatcttcctggacaaaaaccaaagaatggccgatgatcagtcagttggtaggaggagaatttactacgacccaattgtcaatgaggctctgatctgcagtgaaagtgacgatgatgttccagagccagaggaagagaaacatgttttcacagaaggagaagatcagctaatatggaaagctactcaagatcatgggttaagtcgagaggttttaaatgtcctctgccagtttgttgatgcaactccttcagaaattgaggtttttgattgccgtctccatgggtgctcccagaacttggtattccctagcgagaagcaaccatatggtcatgaacttgatgaaaacaagagaccgtgtggcgatcagtgctaccttcgagacccaaaagtagaccctccatacagtacatacactgttatgaactatggatcgtacaatgtgacaccacctcctggagatgcttctgaaactgaaaatgtgtcccctgacatgcccctaagaactttaggcaggcctagaaacctattgtctggcctgaagacctgcatggaagtggccagctacatgtacaacaatggtgcggcaatggcaaagagacctctatctggtaaatccattttaggtgactttgcagaggctgaacaaggttacatg

SEQ ID NO: 43599 - DNA, 303 bp, Oryza sativa
  Clone ID: PAT_MRT4530_46740C.1
atgggccggggaatgctgggcggcgaaagcggcggcatcaactacagctacggcagcggcatcggctatggctacggtggcatcggctacggcttcggcggcggtggctgcatcggctacggcagcggcatcgacggcggtagagcggatccgtggccggctaacgcggggaggacggatccgtcgccggcgaccgcgggaacgatgacagtgggcttcgggaaggcagcgacgacgatggtggtggcggcgacgatgacggacctccagggattccttggacaccttgtgtgctgtgagaag

SEQ ID NO: 43600 - DNA, 473 bp, Oryza sativa
  Clone ID: PAT_MRT4530_46741C.1
atagtcaatgtggtctaactccatcggctgagaccgccaatgatacactatcggctgactaactctgcttttgtcttttttgctgattacaagatcaaattagctggcacgcctaattacaatggcgcaggctagcccattctgtgcaagctaaacgaggacgcaagtgctcatttgtagcaattcctagagatctgtagcatctatactatcaagggagtcagccaagatgccatccaactccacatgatcccgttctctcttattgggagagcgaaacagtggtttgcgggaaccgtgcatcaatcggactcctggaataagtgctcaactgcgatcctctccaatttctttccgatgggcaaaacaaatgctctttgtagaagaatatccagtttccagcagacgagaaatgagatcattcctgaagcatgagaaaggctgtagtaatatgtcgctagacttataattta

SEQ ID NO: 43601 - DNA, 333 bp, Oryza sativa
  Clone ID: PAT_MRT4530_46742C.1
gctgcgccatcaaccaacccatatgctgcaccatcggctgaatatgcagaggtatgtatccatcagctagatcgctttctcttagcagcaaatcgattttctcttgtcttatatcgctttttttctcggccactttggatttgtagcatctttccaatctcattgcggtccccagtctggcacatgagtatcagtattttcttggtccgatcggcaatatcgaccctactgagtttattagtgctgacactaataggatccctttcatactagccaacccaaacttaagccactggaaaaacacctttaagtcctggccctcccttgagaaaa

SEQ ID NO: 43602 - DNA, 502 bp, Oryza sativa
  Clone ID: PAT_MRT4530_46743C.1
gaaattcctagcaataacaattttggttgtttagatgaactctgaagtctgatctgttatgtgcaaatttcatgtggtcattgttgtgctcatcaaaacctttttttttcaagaaagaacaaaggaatgttctaaaacatgtttattttgataatatagagtgggtagatgtatgcttaaattgttatatttctgcagctttctgcaccaaaggaagcagcagttaagtttcatggatcctgtaaaagcgtcaccagtcacaaggatacaattttctgttgggttgttttgggggccagtctgattgtagtgcagttgtgtaatggaaataattttttttcacgatataccactttgcagattgaagagttgtagttctaagaattcttgtattttcataagaagcattgtcatttgaattatctatgtggattgtattggttgagataaacttggtcgaatgttgtcgatgtttaataccaatttgacttttgctgaattt

SEQ ID NO: 43603 - DNA, 450 bp, Oryza sativa
  Clone ID: PAT_MRT4530_46744C.1
atggcgagggtggggcgggcgtggtgggctggtggcgcgggactaacctcgtcaccgacgacgacgaatccaccgccgattgctcctcggtggcggcggcgcgccgcggcggagcgggcggagggcggggagggcgagagggcggcgccggcggctgtggagggggcgctaatgattggggcggcggcagcgcgagcaaaaaagggggaggaggggggagcacgtgggggatcgtcgggggccggcgccggagccgatgcggagggcgacggcgtgagcagacaggcggcagcgacacgagcagaaaggggagggggaaggggaggagcaggtgagggagcggtgggggccggcgctggagccggagccgagcagagggcgacggcgctcgccgctgccgagagcccgagaagagaaggcagagaatggcttcgatttggtctcggctga

SEQ ID NO: 43604 - DNA, 437 bp, Oryza sativa
  Clone ID: PAT_MRT4530_46745C.1
atcacccatcacctcgccaccgatggataacggccagaacgccaatccgcgtcatccctagccctagccaactaccttaggacgggaaaaccgccccagcaagccgccgctccgccacagctcccatgtgcgcgcgttccgtcgcccccattcgcgcccaatgaataaaacggagcctcctgccacagctagagttagaaccaccgctagagatcaccattgtgaggctccccggccggagctggaggttggagggagtggaggaagagccgtgctgccgccgtcgccatggggaagccgggtagccgctggacatcaagaaacgttgtcaagcaccttacgtcgccgtcgtttgcccctgtcctgcaccgcgtcgagctccacttcgccgcgtttcgccatctcgccgtctcgcggtacaccctcgcgccagtagc

SEQ ID NO: 43605 - DNA, 1137 bp, Oryza sativa
  Clone ID: PAT_MRT4530_46746C.1
acttaaatttattttttaaataagacgaacgattccaccatgagtgaccaagagtgcttggaggccaatcataggctagaggagaagatcgatctgattttgaagaagttgaatgagatagaagctaacaggagcaagttcttcgaggagatgagcgcctccatcaaggcgaccactactgtcctcacggctgcatcacatcctccactccaggcaccaccttcttcgacgcccaccacctgtttgatgaagtgctccaacgacgatcgtccttgggcgacgtcgagctcaggccacatcgacaaggagactgctccgacagttgccctagaccttggggatggcgaggacaaggttcatgacccctgcatcgtcaccaaggactcatccaaggtcacgcccaccatgtgttcgatgaaatgctccagccccgatactaagcccgatctcaccatggttgcggaggttacctacgccagcgcagccactgcctctatggagttggtaactgctcaggaaaccattggtgccatgtacagcgacacctctgaccattccaaggtgatgcacaccaagtgtttgacggttgtcctcgatgccattggtgacaccggtcaagctatggttgtgttccagacctggacagatgcatttaaggacgatccaacctccgttcagttcatggactttttctcatcaagtatgatggctaacatcaagtggaacacaccaatgcccactaagtgttcggtacagtgccttgggcatggcagcatggcattgatgcctacaaacccttttgatgttaatccatggccacctctaattagtggatgggattcacagcctatggctggtccaaaattcaaactctattgggcaagagtacgtcgtttgccaccttggccgccacctatcgaagtaagttgtcttgcattggtgtgtcatgacaatgtaatgattttcactgagctgaaggatattaatttgcattggggtgagctgaaaccatggcccccaccaagtcaaacaaacttcaaaaatattatggttcagcccgagcaatgcaagtattggaaaattagagtagaaatgagtatatttgctaggaaggagaagatgatgcgttcttaatta

SEQ ID NO: 43606 - DNA, 1143 bp, Oryza sativa
  Clone ID: PAT_MRT4530_46747C.1
atggcgacggtggagcatgtggacatacaggcggtggcgtcggtgcagctggggatggggaaggcggcgacacggctggggacggggacggggacagggatggcggcggcgccgacatggttggggcaagtggggatgttatcctacgtcgacgcggatggcgtcgccgacgccaccatcgtcccagccacgccgctgagccgagcagccttctccacccacgccggcatcatctccgtccccagccgcgccggcgccagggatccatctcctccacgcaagtcaactaaatgcttccctgcccgccggtactcctccaccatatcctgccacgtcatcttcgtgtaccgcaaggcgtccgccaccgccgcctggaggaaggcctgccccgctgctcgctccgcggccgaagacggcctccacttcttctcccgcgcaggctccacttcttccttctccatcccgatcgagtttaatctggttgctttccgctggaaatccgcagatacgatttatagttcgtacgcgttcgcctacgtctcggactccaactgttcgtttttccgggtcggagttgagttccggttacgcgagatagcagcggagaccctccgcgcggctcaacgctggggttcggcgctgcacgccatgtccgacacggattcatcggcggcggcggcggcggagggtcggaagccgtcgcctgctacgtcgcctcctccggcgaggtatcggcatcgtctattatcggctatcggctggaactactccatcggcttgttagccgatcggctatttgatctattgtttacatatcttgtcagttgcaggatcaaactgactggcacgcctgtatgtcatcatatttggacctgcactggagctaagcagatctcccaagccggctgttttcgttcctccaacttcctaactcactcccccgcgttttccgtgcgcaagcttcccaaacggttaaacgagagaataagcgtggttggctatttttgcaaaaaactactcgtgtttatagaaaatatcacagagatccttaaaccgactaacaacccgtcatgttttatcctgaaaacaccttgtctttcagtgaaatacaatgtgaaaaagagaaaattccgcttcaaagag

SEQ ID NO: 43607 - DNA, 2904 bp, Oryza sativa
  Clone ID: PAT_MRT4530_46748C.1
atggaggccaagcgtaggtgtgatgagaagattgatcgaattttgaagaagttggacgagatagatgctaataggaacaagttcttcgaggagatgggtgcctctatcaaggcgaccactgctgtcctcacggctgcatcacattctccactccaggcgccaccttcttcgacgcccaccacatgttcgatgaagtgctccaatgacgatcatccttgggcgacgtcgagctcaggccacatcgacaaggagactgctccgacaattgccctggaccttggggatggcgaggacaaggttcatgacccctgcatcgtcaccaaggactcatccaaggtcacgcccaccacatgtttgatgaaatgctccagtcccgacactgagccggatctcaccatggttgcggaggttacctacaccagcgcagccactgcctctatggagttggtaactgctcagaaagccattggtgccacgtacagcgacacctctgaccataccaaggtgatgcacgccaagtgtttgacggttgtcctcgatgccattggtgacaccggtcaagctatggttgtgttccagacctggacagatgcattcaaggacgatccaacctccgttcagttcatggactttttctcatcacgtatcatggctaacatcaagtggaacataccaatgcccactaagtgtttggtgcagtgccttgggcatggcaacatggcattgatgcctacaaaccctcttgatgttaatccatggccacctccttggttagatggagtgattaaaggcagagacttaaggccttcaccatggccgggattcaatttttgtgggacagtggaacacttggtgccaccatggccaccaccaactcagataagctaccttgcattattactcactgattttgcaattttgtccacagaaatgttgctcacagtcaggcattgggcacgagtacatttgatgttaccatggcctccaccaaataattcagattccaaacatactatgattcagcttgagcactgttggtcctgggaaattggggttacaattaaccaatctgcttggaaggaacagtggggcttgagacaaattcatggatgttttgtcatctttactgaagggccttggagatgtttgcatcatgtgcatcctttcagtgataatgtagaattcggtgtgggagagctgatggtagttgaaacaactgagcgatctggcattcccttaactgttgcttctcatcttacaagatcaatcctatatggtccacatgattttgatcttaatgcagctctagagtacctttgggatgcctacactgaaggggtgcagatcatttgggcaagaacaatatgtaaaaagatgtctcaactttcttgctcagtacaaaaattcaagaagctcaagactttctgggtgaagattgttctaagctgcactttggaacttggttggagcgtcaatgcccatttcagatcaaatgcaaaattattggagaattatatcaaggagatctacgagtcagcacaatgtggtgattctactatcccgttctttgtgcaactcacatgggatcctggtggcagtggcaacaatttgcatcggtttgaggacaagccgaatgttaaggagaggggattgttagcaacacaattgtgctgcatatgggctagagaagaggtctctaacagagtaggaggaattttgccctgtacctctggtttgattgactccaggatgatgcatgaggagccaatccggcccagacctaaccaattgtctatcatctggtagctcccaaacatcacgtacgcaatggtatgacgtttgggagctaccagatcgtagtgcagcagctcgggtacaggagacgacagcatgaaacatgtcttcgtaacctagctagcttgtcaacaaatacggcaataagttgcatctgcttccaatctgcgcatcttccaatataattacccatcgtggcaagaccttctctagctaattaactgccaagcaaagattttaatgttttgtgacactcgggttgcccataaactcgcccatatattatatatattacgttcttcatttgtcgatgaactagcttagatgatcgatcccagttcggttgcattcatgcatatgattgatcgattgattggtcagggccagacaataagcgttgcggacgcctatcttttaaaaatgccaagctaggaaatcttctcttctgccatgtggcaatttaatcttcaaaattttcattggcatcatactgaggcggcatctcccactctggcgtgatagtccaaagctggattctctaggaatccactggtccttccaaattccatctccgattctccaaattaagcctttcttaagtaactcaaggccatgttcaacagctttccatgtaggtgaggtatccgatgggaaaacagcatcaatgagatcacagttcggataatatttggcagtagcaggcaatttaaatactcccataacatatgtcgggatagcctgtgcgactgatttgattagaatctctttagccccagacgacatatatttttcagaccagtcagtgagcctcttagcaaaacgttgcttcaaagttttgaactttccagccttcatcctaccctccagagtaggtaatcccagatatttcgtctcaaaaacagttgattcaacctgcaaagcctgtcttatattctcccgtagctcatccgggacatctgcaaaccggcaccggacctcctccacaatcttctcggagagatcaccgggcaactcctccacaagccgtctaggaggcggcaacctccaagaataacaagcaatgacccttaacctattagatatgagatcttcatcaaaatgttgcttcat

SEQ ID NO: 43608 - DNA, 2069 bp, Oryza sativa
  Clone ID: PAT_MRT4530_46749C.1
gaatcggagagggtctcttcccacttcgcacccacacaagtaaagctcccaaaatcaaattaaattaaagagaaaaaaaaagagaagagaagggcaaatcgattcgccatggctgctccccgcacgcctctccccctcgtcctcctcctcgtctccgccgcgctcctcgcggcggctcccctctcgccggcggccgagaccggtgccgccgcgttcgacgtccgccgccacctctccaccgtcaccaggtacgatgtggcgaggggatccaatagtgtgtcctccgcgccgtctatgtcggatgagtgccgcgtgatccacctcaatctcgtggcaagacatgggactcgcgcacctaccaaaaagagaatcaaagagctggatagactggcggttcggttgaaggctcttatcgatgaagcaaaacaagggcctgaaagtgactccctgaaaaaaattccttcatggatgaaagggtgggagtcaccctggaaaggtagggtgaaaggtggtgagctggtcagtgaaggggaggaagagctatacaaccttgctatcagagtcaaggagaggtttcaaggcctatttgatgaggaatatcaccctgatgtgtattcaataagagcaactcaggttcctcgggcatcagctagtgcagtagcatttggtttgggtctactttctgggaaagggaagcttggacctgtgaaaaaccgtgccttttctgttctgagtgagagtcgtgcaagtgatatttgtctgcgattctttgatagctgtgaaacatacaaggactacaggaaaagaaaggagcctgatgttgaaaagcaaaaggaaccaattttagaacacgtcacatcggcattagttaaccgttatcatctcaattttacaccaaaagatgtttcttccctctggttcctttgcaagcaggaagcatctttaatgaatataaccaatcaagcttgtcaactttttaatgaagctgaggtttattttctagagtggacagatgatctggagggctttgtgctaaaaggttatggtgagtcaataaactatcggatgggactgccattgctcaaggacgttgtccagtcaatggaagaagcaatcgttgctaaagaagaaaaccaccctgatggtacatatgagaaggcaaggctccgatttgcacatgctgaaactgttgtccctttctcatgtcttcttggtctttttcttgaaggatcagattttgcgaagatacaacgggaggaatcattggacatacctcctgtgccaccacagggaagaaattggaagggcagtgttgttgcaccttttgctggtaacaatatgttggctttgtaccagtgcccaggaaaaactgatggtggtaagatttctcgggatcagaagagctcatacttcgtgcaggttatacacaatgaagctccagtttcaatgccgggatgcgggaacaaagatttctgcccatttgaagagttcaaggagaagatagttgaaccccacctgaagcatgactacgacgccctatgcaagataaggccggtggcaagagaggagccttcctccttcagttccaggatgtccaatttcttcctaggtttgttctcgcagaaaggataccgtgttagtgctcaggatgtgaagtcggagctgtaggtttatactaggcagatggtgcatcttctacctttcgcactaagctgctactatccatctaccatggataaccaagggactgactcgtggactaaactacggtgtttctgtacttgcaaccctcagtttgatgagcgagtccaatgtgtaacaacacgctatcactggtgcccctcttctttcagatagaagacgtttgttgatcaatgtaatctttgttttaatcaaaaaaaaaactagtactcaactgctgactctgttgagatcaaactgaaagtactagcacacggttgtgattgtggcccttgtggtaggttgagatcatgtactactacttggacaatccgtttcaagctttcagctcaatcaatccagatttgggagatccccaattcgagatg

SEQ ID NO: 43609 - DNA, 5859 bp, Oryza sativa
  Clone ID: PAT_MRT4530_4674C.1
atggccgagcgagcaaaggcgcacgacctctctccgagtgtgagcggcgacgacggggagctgaatccacgccgtcgagctcgtactcccccatctcctccgcgcccaagccctaagcagggggaggcgcttgagaaggtcgacaagtccatggcatcaccagtcgcaggtggtgcaggaggacggcaagatggggagcgccgcctcctcgtctacggcgacggcagcacgcctcagggtgcgcttcaggctgctggcgcgctcctacgacatccgcctgtcgtccatgacccggagtctccagcccaacgatggctggaagatgtggccaacttggtcatgacggcacagcagcgcctgggtgctggtggacgagtgtcacctcgacatggacgtgaggaccagccctccgtgcctccggctggtggtgttggctgtagagcctttgtggcgagtcttcggaatgtccgttggcccccaaggttccggcccaccatcaccgagaagtacgatgggagcgtcaaccccaccgagtttctccaggtctatacgaccgggatcgaggccgctgggggtgacgacagggtcatggcgaacttctttcccatggccctaaaaggacaggcgcggggttggctgatgaacctgccacccgcgtcggtccactcctgggaagatttgtgccaacagttcaccatgaacttccaaggcacatatccgcgcccaggcgaagaagcggacttgcatgcagtacagcgaggcgatgatgagtcgcttcgctcgtacattcagcggttttgccaagtccgcaatactataccttgcatccctgcacacgcggtgatctacgcgttcagggggggcgtgcggcacaaccgcatgctcgaaaagatcgcttccaaagagccccagactaccgcggagctttttcagctcgcggaccgagtggctcgtaaagaggaagcgtggacatggaactcctccagttccggagtggcagcttcggccgcccccggatccgccgctcagacagggcggcgtgacaggaggaggaagaagaggtcggaccgttccggcgatgagggtcatgtcctcgccgtcgagggcgctccgcgggccacccgaaaggggaggcctgcgagcgacaaaaagaaagaggctggtactcccagcaaggagcgccccgccggcaggtggtgctccgtccacaacacctccctccacgatctcgcggactgtcgcgcagtcaaaaatttggctgagcgaacgaggaagtgggaggaggacaggaggcaggaacgccgtgagggcaagtccccggcggttccttccggcaaacggcgaagtgaggccaagcagaaggcccccgctgttgacatcgatgatggtgatgatgacctaggtttccaagaacctggggccaccattgccaccgtcgatggaggagcgtgtgctcacgtctctcgccggagcttcaaggctatgaagcgagagcttctggccatggcccctactcatgaggcgacgcgtcgggcgcggtggtcggaggttgctctcactttcgaccagaccgaccacccaccgtgcattgcccggggagggcaggttgcgatggtggtttcccccaccatctgcaacgtgaagttgggacgtgtcctcatcgatggaggagcggccctcaacatcctttcccccgcggcttttgatgccatcaaggccccggggatggtgctccgaccgtcccagccgattatcggtgtgacgccggggcacacgtggccattaggtcacatcgacctaccggtcaccttcggtggacccgccaacttccgcacggagcgggtgagcttcgatgtggcggacctcagtctgccctacaacgcggtcctagggaggcccgcgttggtgaagttcatggcggcggtccactacgcctacctccagatgaagatgccgggccccggtggccccatctctgtccatggcgatcttaaggtcgcgctcgcttgcatggagcagcgtgccgaccgcctcgctgctgcatccaagcccgagggtggtgacgagaggcctggcccctctgcccccaccgccccgaggcagcggatcgctacatgcgacgaggtcccggaagacgcgctcgtctccttcctgcgggcaaacgctgacgtcttcgcatggagaccagcggacatgcccggggttcccagggaggtgattgagcaccgtctcgccgtgcggccgggcgcgaggccggtccggcagaaagtgcggcggcaggccccggaacgtcaagtcttcatccgcgaggaggtggcgagacttctggaggccggattcatccgtgaggtcatccatccggagtggctggcgaacccggtggtcgttcccaaggcgaacggcaagcttcggatgtgcatcgactacaccgaccttaacaaggcatgtcctaaggatccttaccccctgcctcgcatagatcagatcgtcgactccactgcggggtgcgaccttttgtgttttctagatgcatactctggttaccatcagattcgcatggctagggaggatgaggaaaaaactgcgttcattacccccgtaggaacctattgttatacatcaatgcccttcgggttaaagaatgcaggtcctacttttcagcgtactactcgaatttctttgggtagccaaataggacgtaatgttgaggcgtatgtcgatgacttggttgtaaaaacgcgcaaccaagaaactttactttcagatctagcggaaacttttgagaacctccgctctgcccgcataaagctgaaccccgataagtgtgtgtttggtgtacctgcgggcaagcttctcgggttcttggtctctgcccgaggcattgaggccaaccccgagaagattcgagctatcgagcggatgcgcccccccagcaaacttagggatgtgcaatgcgtcaccggttgcatggccgccctaagtcgtttcatatcaaggctgggagagaaggcgctacccttgtttaagctcctcaagcgctcggggccgtttacttggacggaggaagcagaacatgccctcactcggttaaaggcatatctcagctctcccccggttctagtcgctccagagccaaatgagtccctgctactttacttagcagcgaccccccaagtagttagtgcagcgttggttgtggagcgcgatgaggacaatcctcatttcgtgcacccccattctgtgctaacttggcccgggagcaagcagggaggagaggcccccgagtcaaacggtggcctaaggcccctgacgaccggagacggccctctgcccgctcgtcagacggtgctgggtgcccccgaccctcaggaaggccccgaggccactgcgggaaggccgcacttaacgccctctgaccccgaggctaaccctgtgctgactcgacccgggaaagagcagggagaagaggcccccgagccgaacggaggccagaggcccctgacgaccggagttggccctttgcccgcttgtccgacgatgccaggagcccccgacccccaggacggccccgaggccactgagggaaggccgcccctttcatcctccgaccccaaggtcatcggtacagaagacaagtgcgccccgaaaggccacttgaacgaagaacgccccggggatacggcccctagcagagaggatcggccccaccgaagggtgcagcggcctgtctactttgttagtgaggccctccgggacgccaggacccgatacccacaggcccagaagatgctttacgctattctgatggcctcgaggaaactgcgccattatttccaggcgcatcgggtcactgtggttacgtcttaccccctcggtcaaatcttgcataatcgagagggtacaggacgagtggtaaaatgggcaatagagctttctgagttcgatctgcactttgaaccacgccacgctatcaagagccaggccctcgccgattttgtggcagagtggaccccggctccagagaccgtctcaatgcccgaggccagcacgaacccctcacagctgcctcacgccgcccactgggtgatgcaattcgacggttctctgtctcttcagggcgccggtgcaggggtcacgttgacctctccaaacggagacgtcctcagatacttggtccgtctcgactttcgagcgactaacaatatggcagagtacgagggactccttgccggactcagagtggcagctggactggggatccgccgcctcttggtgttaggcgactcccagctagtcgttaaccaggtctgtaaggagtaccggtgctctgacccgcagatggatgcctacgtgcgccaagtacggcgtatggagcgccattttgacgggatagagcttcggcatgtgcccagacgggataatgtgattgccgacgaactctcacggctcgcgtcctcgcgagcccagaccccaccgggcgcctttgaagaaaggcttacccagccgtcggcgcgacccgatcccttaggggagacggatgtgcctgaccggcccccgaggcccgtcggagtccaggcctcgggacccgaagggagcgcttcaagctcccttagattgattgcttggatctctgagatccaaacatacctcacagataagactctacctgaggaccgcgaagggagtgaacgcgtacaacgcatttccaaacgctacgtgctggtagaagggaccctctatcggcgcgcggctaacggaatcctcctgaagtgcattcctcaggaacaaggcgttgagcttcttgcagacatccatgagggcgagtgcggagcccattccgcctcacgtaccctggttggcaaggcctttcgtcaaggattttattggccgacagctctcaatgacgcagtcgatctggtccggcgatgcagagcgtgtcagttccacgccaagcaaatccatcagccggcccaggccctgcagatcataccactgtcatggccatttgctgtctgggggcttgatatcctgggaccgttcaaacgggccccgggcgggtttgagtatctgtatgttgcgatcgacaagttcactaagaggcccgaggcttatccggttgtcaagatcgataagcactctgctcttaaattcattaagggcatcacggcccgttttggagtgcctaaccgtattattacggataatggcacccaattcactagtgaactcttcggcgactactgcgaagacatgggcatcaagctctgcttcgcctcacctgcccaccccagaagcaatggccaagtggagcgcgccaatgcagaaatcctcaaaggccttaaaaccaagaccttcaatattctcaagaagcacggcgattcatggatcgaggagttgccagcggtgctctgggcgaaccgaaccacaccaagccgagcgaccggggaaacgcctttcttcctcgtctacggcgcagaagcggttctcccatctgagctcaccctgaggtctcctcgggccaccatgtactgcgaggctgatcaagatcagcttcgtagagatgacctcgactacttggaagagcgaaggcggcgcgcggccctccgagccgcgcgctaccagcagagcctgcggcgctaccatcagcgccacgtccgggcccgatcactctgcgtcgacgacctcgtcctacgccgcgtccaaacgcgtgctggattgagcaagctctcaccaatgtgggagggtccgtatcgagtgatcggtgtcccccggccgggctcggtacggctggccacgggcgacggcacggagctgccaaacccgtggaacatcgaacaccttcgtcgcttctacccctaa

SEQ ID NO: 43610 - DNA, 185 bp, Oryza sativa
  Clone ID: PAT_MRT4530_46750C.1
atttggtatggaaaccccaacttttttcagtattctgaattctggatggatcatatcagaatcaacacagcatcgtacaaactgggcaagcaattggaacaatcgagcgatggacagagagaagtagcctacaatgggcggctgggcccatttcacgagccccggcgctggaaccttggttggcc

SEQ ID NO: 43611 - DNA, 903 bp, Oryza sativa
  Clone ID: PAT_MRT4530_46751C.1
tcacttccctttcaggtcgctggccgagtctcccccaggcccacggctcggaccgggtgccctggagccgccgatccgactgctgcctgcggtcgcgccgctgctacccgcgccgtcgcccccaccggcagcaccgacggccgacatcacagccaggatactctcccggtcgcggtcgctgcagagggggaggatcccgtccaggatcagcgtttgctcggcagtgtccagacccagcacccgtcggatcactgtctttgcgtcctcctcgccccagtcccagcgctcacccacgtgggtgcgcatgggatcgttgtgctcggtgtactcccacgcgccacgggaccgctcctggagaggcgcgatgcagcggcggaagtagtcgtcaaacaccatcgcccccgttaggcccttgtttcgcaggcccctgaggcggtcccgcactgcatcgtactcctcgcccagctccgaaaccgccaaccacgaggcggatcgctcgggggtggggggcggtagggaaccgaagtcgcggatgatccggcagcgcggtgtagaaccaatccttcttccaatctctcccacttcttgcggagatggcctgacgaacatctcgcacaagtgcgcaaagatggccagcgtcattacggcgttgggtgcgagatgcaaggcatggatctcgtagaaatccaaaacctcatggaagaacctggagaatggcgggatcaaccccaccatggcaaaggacaggaggtgcacggatcgctctgggtaccgcggtcgcggccgcaactcccccaccctcacggcgacgtcctccggcatgatcttgcgggagaggctaaggtgcctctctgccgtgatgcgcgacgccaggagcacagcgtcaccagcgtcttgggccat

SEQ ID NO: 43612 - DNA, 759 bp, Oryza sativa
  Clone ID: PAT_MRT4530_46752C.1
atggtccactttaacatgtggcatggcatgatggtaaatggatttatggatatcagtaatctgtcggcaaagataatctgccaggggaagatgttgatctctgtcagcagaagtggtactggagacagattgagagattacaaattaatatatgcattagatgttggtaaaactttcggcgactacgacagcccagcagcagcagcagagctggctagcgacaaggtacacgcgaacggcgacgccgccgatgccggcggcggcggcgaggaggaggtggtggtgagcagcagcaaggcggtggtggaggagctgtaccgcgcgctggagcgcggcgacggggacgccgtgcggcggctgctgaacccggacgtggactggtggttccacgggccccgcgcgcaccagcatctggtgctcatgcgcctcctcaccggcggcggcggcggcgcggcggggctcccgttcaaggtccgcggcgtggacgccttcggggagacggtgctggcggaggggacggacgccacggggaagctgtactgggtgcacgcgtggacggtcggccccggcggccgcgtcaccggcgtccgcgagtactgcaacaccgcgctcgtcgtcaccaggctcggcggcggcggaggcggcaagggagccgaggcggcggcgccgtgctcgaggtcgcagtcggagcagttgtggcagagcaggctgcctgaccgggctcgcaagaacctccctgccctcgtcctcgccatctga

SEQ ID NO: 43613 - DNA, 577 bp, Oryza sativa
  Clone ID: PAT_MRT4530_46753C.1
ggggggggggggtttttttttttttttttttttggtgtttttttggcgagcccaagtagatttctcatagaggagtaatgaagaagtagctcaatttaagaggaagcttcattttgatacaagtgatgctaataaaaaggaaaagcacgtttggaagatgtgggggaagatagcccagaagattatgtgtcagattctccacgaggtagcccgacttatgctgaatcgggggatagtagttcaagtgatggtgaagctaatggtaagtttgcagtttcaaccgctttcattttaagtgcttcaacatcctgaactttctttccatcttttatcatctcacagatgatgtcgatgctgttgttgatgttggtagtgaggaggatcatggtgaacctactgctaggggagcacctgttggtaatacatgtgtgcttgataaataatgaatcaattgtgtatgtaacatttaaatttaaatgggtaccaataagacttacatcttattttgcaggtgagcaaccagccccactccacccaaaatcaacaaggaaaaggaaagtttctgtcaaggttcttt

SEQ ID NO: 43614 - DNA, 1467 bp, Oryza sativa
  Clone ID: PAT_MRT4530_46754C.1
atggcccaagacactggcgacgctgtgctcccagcatcgcgcatcacggcggataggcaccttagtctcccctgcaagatcatgccggaggacgccgccgtgagggcgggggagtcgcggccgcggccgcggtacccagagcgatccgtgcacctcctgtccttcgccatggtggggttgatcccgccattctctaggttcttccacgaggttttggatttctacgaaatccatgccttgcatctcgcacccaacgccgtgatgacgctggccatcttcgcgcacttgtgcgagatgtttgtcggggtgcggccgacgatgcggctgttccagcacttcttcgtcccacaattgcagcagggcgcggtggtgggaggatgctacctccagccccggctagggatggcggggcaatacatcgagagccacctccacaagaagtgggaggactggaagaaggattggttctacaccgcactgccggaccacccgcgacttcggctccctacctcccccccagcagtccgccgcatggagcggtcccgtggcgcgttggagtacactgggcccaacgatcccatgcgcacccacgtgggtgtgcgttgggactggggcgaggaggacgcgaagacggtgatccggcgggtgctgggtctggacaccaccgagcaaacgctgattccagatgggatcctccccctctgcagtgaccgcgaccgggagagtatcctagctgtgatgtcggtcgtcggcgccggcaggggtcggtcccgccggagtggcgctggtggtggcggcagcagcgccggcagcagcagcgcaaccacaggtggcggttggatcggcggctccggcgggggcggcggctccagggcgcccgggcaaacagagccgtgccgggggagtttcatcgagcccccgaagtggaccttcaagtgttccccacgcaggggcccaccctaccttgatcggaacatgatccgtgccttcgcctggaagccaaaccacagcttgcccagcggtgggacccagcgccgtcccccgtctgacacggggggcagccctgtcattccctcattaatgggtgaagaactgaagacttgtggtggccgccctctcatggagagagcttcgaatgacccctccaatgggacgggtcatacctacctccactccaccggagacagatgcgacgtgggggcacgggggctcatccagtcagacgtgaccggcgacaggccggtcacagaccggtcattcctgactgaccgagccagtcgggcgtgccgcacgtctgcccctaccgcattaaatgcggcaaggggcagttggggcgctgcgcgcattaaaagtggttcagcctgggccccctccccgcttactccccccgccacatggcagctgggcgagggcctcggggcgaagcggcgcgagggcccatatctccgacaagctgagaacctctga

SEQ ID NO: 43615 - DNA, 2643 bp, Oryza sativa
  Clone ID: PAT_MRT4530_46755C.1
gtcctcgctgccgtcatcgccaccaccgtcctcgctcccgctctcctcatccgaggcaagcgcgaggttgaaccgaggggccgacccctcgaagctggagacgatcgcgtcggccgcctcccggacttgctcccgagcccttgcctcggtccccgggggaaagtcctcgagcgcgcgtcacgggaagaagtcggggtcgcgagcttgatggctcgcgagaaccagctccaccgcagcccgtgccaaggaagccgacgacgacttcacggcctcgccgacctcctcctccagcctctccaaatctgcagccatcccatccagccgaagtgcatggagatgcctacccggcgccccgcgcgctccagccgttcgatggcataggagagttggccaggcccaatctcgttggtgaggcggagggccgcaatctcctcggcttggtgctgcaccaggcgtcccaggtcggcgagagtgtcttgagccgcgacgagctggctgaccaactccgcgccgccgggctacccgcctgccatcaactccttctcccgagcctccagctcggaagccctcgccgccatcgctgcgcgctcagcgcgggcgctctccagatgccgggcctcgcgcccagcgatgacctcctcacgcttggtgagttgctcgcccagccaccgcgccgccacctcgcgacggttcacctcggcctcatgtacggcaagcgcggcgtcctgttcccggcacgcctcctctcgaagccacagctcctccgcgcgacgagccaccaaagctctgcggtgagggtggtccggttgtgctcagctgcggtctcctcacggaggcgaagggaggattccgcctcggtggccgttctctcgtgggtggccaaggtggtctcgcgctggtctagcatgcgtgcccgctcctccaactcccgggctcgcagcccctgttcccggctacgcccgtcctgttcgcgctggttacggtcgaggacctcgatccgtcgacggatcatggcctcgaactcctgcatggagcgggcacgctcgtctaaggccttgcgctcggcctcgagcgccgcagtccgagccaagcggatgtcgcccagcgtctcatccaggacgcttgaagcgatgagcgccgcctggcactcctcctgtctcccgcatgaccgagtctagcgtttcctcgcgcgcctggatctccgccagttgggcttggtgcattttgcgccccacctccaccatgtcgtccatggcgcggcgcccctcgtcaacccgcgtgcggtccgccgcgagctgtgcccactccgcctccagggccgcccgctcgtccgctagggcttgaacttgggcattgagcccctcccggacggtggaatcggcggcggcgagcacctgcaggagtggctccatgctcgcgggagttggagaagaaaaagtcgcggtccgcccccgggatgacggagtgctgctagaccccccgcgatattgggggctgctctcggcccaagactcggcctcccgagtagcgctcctcgtgggtcgcgccctcgggatcgccctgggggggcgcctgtaacgtcccgccttcccccaggccaccccaggccgggtccacttacatctgtggcgaactcggagccagacccgccgtgtggcccgtgggccccgccagggtgctgcgaaggctccgtggcaccgggtcggccgggtcccggcccgatcacgttaagaagaaaaagaagggggaggagcaagaggccaaggtggatagagagcaccgagtcgggcgctagcgatcctacctgcgagggggcgtttgaaggtctacttcgggggctcgatgaaactcccccggcacggctccgtttgccctatcttccggagccgcttcttcttccgtccagcctcggacgtggcggggcgtttgtggcccgctggtggatggtccgccgttcgcttagcgcgccctatgcgcgggggagaacgcggccgagattcggacacctttcgcttccctttcgggtcgcaggcccctgaggcgatccgtcactgcgtcgtactcctcgccctgcgtcatactcctcgcccagttccaaaaccgccaaccacgcggcggatcgtttgggagggccggcggggagccgaagtcgcggatgatccggcagcgcggtgtaaaaccaatccgtcttccaatcctcccacttcttgcgaaggtggctctcaatgtactgccccgccgttcctggccggggctagaagtagcatcctcccaccaccacgccttgcagtagctgtgggacgaagaaggacaggaacagccgcatcgtctgcgcaccccgacgaacatctcgcagaagtgcgcgaagatggccagcgtcatcacagcgttgggtgcgagatgctaggcatgaatttcgtagaaatccaaaacctcatggaagaacctggaaaatggcgggatcagccccaccatggcgaaggacaggaggtgcacggatcgctctgggtactgcggccgcggccgcgactcctccaccctcacgacggcgtcctctggcatgatcttgcggatgaggctaaggtgcctctctgccatgatgagcgacgccgggggcacagcgtcaccagcgtcttgggccat

SEQ ID NO: 43616 - DNA, 2301 bp, Oryza sativa
  Clone ID: PAT_MRT4530_46756C.1
atggcccaagacgctagtgacgttgtgctcccggtgtcgcgcatcacggcagagaggcaccttagcctcatccgcaagatcatgccggaggacgccgccatgatggtgggggagtcacggccgcggccgcggtacccagagcgatccgtgcacctcctgtccttcgccatggtggggttgatcctgccattctccaggttcttccataaggttttggatttctacgaaattcatgccttgcatctcacacccaacgccgtgatgacactggccatcttcgcgcacttgtgcgagatgttcgtcggggtgcggccgacgatgcggctgttccagtccttcttcgtcccacagctgctgcaaggcgcggtggtgggaggatgctacttccagccctggccaggaacagcggggcagtacattgagagccacctccacaacaagtgggaggattggaagaaggattggttctacaccgcgctgccggatcatccgcgacttcggctcctcgccggccctcccgaacgatccgccgcgtggttagcggtttcggaactaggcgaggagtacgacgctgtgcggtatcgcctcaggggcctgcgaagccagggcctaatgggggcgatggtgttcggcgactacttccgccgtcgcatcgcgcctctccaggagcggtcccacggcgcgtgggagtacattgggcacaacgatcccattcgcacccacgtgggtgagcgttgggactggggcaaggaggaagcgaagacggtgatccggcgggtgagggggcgccgagcgaacggcggaccgaccaccaacgggccacaaacgccccgccacgtccgaggctggatggaagaagaagcggcttcgaaagatagggcaaacggagccgtgccgggggagtttcatcgggcccttgaagtagaccttcaaatgcccccctcgcagtaccctggcggggcccacgggccacacgctgggtctggctccgagtccgccacagccgaggtgcagccagccacaggtgatggcagcggcggtggcgcccccccggggggcgatcccgagggcgcgacccacgaggagcgccactcgggagtggaggccaaagcaggtcgtggcccagaggccgaggctgggggcgggcccgaacccgaggccgaggccgagtcagcccgagggctcgaggcgggggggacgggggcaaccgttcccctctgcatctggggcaccctcggggctggccacgtgctcgctgccgccgactccaccgtccgggaggggctcaatgcccaagttcaagccctggcggacgagcgggcggccctggaggcggagtgggcgcagctcgcggcggaccgcgcgtgggttgacgaggggcgccgcgctgtggacgacatggtggaggtggggcacaaaatgcatcaagcccaactggcggagatccaggcgcgcgaagagacgctggactcagtcatgcgggagatggaggaggagcggcaggcggcgctcatcgcttcgagcgtcctggatgaggtgctgggcgacatccgcctgcagtacgaggcccacgccgaggatctggtgaagagggttgaagacgcccgtggagtcctcgacgcggctgccgcccaagagaggcgggcatcggaggtcgatgccttgttgcgggctcggtcggcggtgctcgaggccgagcgtaaggccttggacgagcgtgcccgctccgcgcaggagttcgaggccacgatccatcgacggatcgaggaccaagccggggagatcgtggccctccgcctcaccaacgagattagacctggccaactctccgacgccgtcgaacagctggagcgcgcgggatgccgggtaggcatctccgtgcgccaggacaggaagctcccgcctacacagccggcacttgcgttccggctggacgggatggcggcagatttggagaggctggaggaggaggtcggcgaggccgtgaagtcatcgtcggcttctttggcgcgggctacggtggagctggtcctcacgagtcaccaagctcgcgaccccgacttcctcccgtggcacgcgctcgaggactgccccccggggaccaaggcgagggctcaggagcgagtccgggaggcggccgacgcaatcgtctccaacttcgaggggtcggccccttggttcaacctcgtacttgccttgaacgaggagagcgggagaaaggtcgatggtggtgatgacggcggcgaggactgggacgaggtggtcagcggcgccggactcgggggcccgagcactccgtga

SEQ ID NO: 43617 - DNA, 552 bp, Oryza sativa
  Clone ID: PAT_MRT4530_46757C.1
atggcgacaccggcggcggcggcggcgaaggaggtggacaagaaggtgcagctcatgaaagagattcagaccatcctgtaccagtgctatatcaagttcatattatatatgcatagcaaagagctcatcatcttccgttttgaaggagataaagccgaaagacaaaattgcatgatattttatctgagtttttcttggttatattatgagtatcatgagacatccaatagcttcttggcaatcagcaagaacatctctagtttgctatatgccctagagcttaccggcgaggcggtgcagtatacggcggtgtaccagaagacctgcaacctcttcttccgcaagagcgtcaaatctgcggtcacgtctgagcagaatttgcttattgttcctatgctaagaccttgttgtaatgtgattccggatctgtcaatactcttgtatgcttccagaatccagctcggtaggataaaaggcttgctcgcagctaagcacatcttaagttctttctttccatttccaaatgcttgtgcgttgcctcatgaaacctga

SEQ ID NO: 43618 - DNA, 2202 bp, Oryza sativa
  Clone ID: PAT_MRT4530_46758C.1
atggtggcgcacggcgttctcccagcaaaggagatcatcgggtggcggccagcatttggtgaagctttcccaacccctgatacacatgaggtcgtggttttctctcacttcttctatggcggttttgctctgccaacttcgaagtttttccgtgggatcttgaacttctatggaatcaatttgcatcatttgaatccgaactctatagtccacattgcaaattttgtccatgtctgtgaagcttttttgggcattaggcctcattttgctctgttccgccgaatcttcttcctcaagccccaaccgaacaagagcaaaccatgcgtagttagaggcgctggattccaattgaggggaaccttaagccaaaagtatttctccatgcccttcaagacttcaaacaaaggatggcatgccaactggttctatgtccaaaatcctgagcctgctcttcccgaatactcctgccttccgccagtataccaagacacctggaactcactgcccatgggagatgaagctgcccaagccctagaactgatggagcgcatgctgaaactcaaggaacagggcttacagggagagcaaatcactcggcacttcatcaattattcacatctgctgccagtcgttccctacaacgcatttaatccacctccgcaggaattggctttgatgaagtctgaccccccaattactcaacgccgatctcctcgtcatcagaccgttcaggggagtgggggacttaaaatcaggtcagaccctcaacctaaaacttccaatccgactgggcagtcagattctcgcaagagaaaacttgcactgagcgacgacgaaggtgatggcaacaagggatcacccaaaaaacagccaaagcacactgctccgaagaagaaaacgtctagccgccccataccaaagtttaggaagtcctccaggaaaccatcagacatagatccttccggaaaggactctgatccgacaaacatggagacgaattcctcaaaggaggctgggccgacttctggggaagacccgactggcgctcaagcttcaactgacaacataaacccaagcgaccaaccgtcgactggaaaccagtcggctgaagcggaaaccgctgctagccaggagcccccgactggaaaccagtcggaagcaggaccaagccaggaaatccctgggattgaaactcaggcaaatgctttccaagaaccaaacgctgataacgatccgacacccgggtcatcagataaagggcaaggatcacctcgcgctcatccagaaacttcttcaggaccactaactggtgatggagaaaaaatccctcgaataaaagcagctgctgattctcgtccccccatactaatcaaatggtgggacgacaacttggagcctgcgggcatcgtcataaaccgacagaaggaagacgaagaagtgcgccagctgaagaaagcactcggagaagctacccacattgtaaatagaatccatctccgaaatgaggccaaaaccaccactctagagaagctggttcctcatttagggaccctggaagctgttagagagcagttacatgaaaccaaagagcttgctaaaaagacagagcacgatctaagggaccggattgcccaactccaggattcaaactttgaactgagtggctcatcaaaagtgcaagttgccaagatagctcaactggagaagcggatcctgaccttagaaagtgacaaagcagaattggctgcacaaagggactcagctttaaaggaggttgaagaccgcaagatcaagtcgcaagcccagttcgacgtccttgtcggcaaaattaaaagacttgaaggaaccagggatgaggccatgttctataataacaatggtccgagtacattcgatgcttctgaagtgtttgataagctgagagtcgctccggacacctatttcaagaacattaaagaagccggaagcatgggagcaagcttagccctggcgatgaccaaatccctatacccgaagatcgatattgataccgtcgatggctttgcggatgggacaagcgaagaggctgcccttgatcttattaacgacgctcaaaaagcagccgacaagattgcaagcgatgtagtagatcggtttcaggacaccaaccttcggccgactggcagcggcaactctgatgatgagaaaagtgatactgattga

SEQ ID NO: 43619 - DNA, 2453 bp, Oryza sativa
  Clone ID: PAT_MRT4530_46759C.1
atggcggaagaaaaggaaagctttgaaagccaatgggcgccatccgacgtgacggaggagaacttgaaggagatggtggcgcacggtgttctcccagcaaaggagattatcgggtggcggccagcatttggtgaagctttcccaacccccgatacacatgaggtcgtggtttttgctcacttcttttatggcggatttgctcttccaactttgaagtttttccgtgggatcttgaacttctatggaatcaatttgcatcatttgaatccaaactctatagtccacattgccaatttcgtccacttctgtgaagctttcttgggcattaggcctcattttgctctgttccgccgaattttcttcctcaagccccaaccaaacaagagcaaaccatgcgtagttggaggggctggatttcaactgagaggaaccttgagccaaaagtatttttctatgcccttcaagacctcaaacaaaggatggcacgccaactggttctatgtccaaaatcctgagcctgctcttcccgagtactcctgccttcccccagtataccaagacacttggaactcactgcctatgggagatgaagccgcccaagctctagaactaatggaacgcatgctgaagctcaaggagcaaggtttgcagggagagcaaatcactcggcacttcatcaagagccgactagctccaatcaaggaaagatcccgtacagcttttgagtttgatggaaagcatgatccaaaccgcgaagacccagattctttggactttaagatcatgaaagaaaggatgtacaagattttctccaatgccattgctgtcagttattcacatttgctgccggttgttccatacaacgcatttaatccacctccgccggaatttgctttgatgaaatctgatcccccaattgctcaacgccgatctcctcgtcgttagaccattcagggaagtgggggacccaaaatcgggtcaaactcccaatctgaagctcccaatccgactgggcagtcagattctcgcaagagaaagcttgtgctgagcgacgacgaagatgatggcaacaagggatcacccaaaaaactgccaaagcacactgctccgaagaagaaaacgtctagccgtcccatgccaaagtttaggaagtcctccagaaagccatccgacatagatccatccggaaaggactccgatccggctaacacagagacaagttaatctaaagaagctgggccgacttctgaggaccacccgactggcgttcaagcttcaactgacaatgtcgacccaagcgaccagcccccgactggaaaccagtcggcagaagcggaaactgtggctggccaagagcccccgactggcaaccagttggaagcaggtccagaccaagaaattcctgaagttgaagctcaggctacagcttctcaaagactggacgctggcaacgacccaatgcctgggtccccagataaagggcaaggatcgcctcacgctcaaccagagactgcttcaggaccactgactggtgacgaagaaaaaatccctcgaataaaagcaaccgctgattctcgtccccccccatactaatcaaatggtgggatgacaacttgcagcctgcgggcatcgtcataaaccgacagaagaaagacgaagaagtgcgccagctgaagaaagcactcgaagaagctacccgcattgtaaatagaatccatctccgaaatgaggccaaaaccacaactctagaaaagctggttcctcatttagggaccctggaagctgttagagagcagttacacgaagccaaagagctagccaaaaagacagaacacgatctaagggaccggatcgctcaactccaggataataactttgaactgagtggctcatcaaaagtgcaagctgccaagatagctcaactggagaagcggatccagaccttagaaagtgacaaggcagaattggctgcacaaagggactcggctttgaaggaggttgaagaccgcaagatcaagtcgcaagcccagttcgacgtcctggtcagtaagatcaaaagacttgaaggagccagggatgaagtcgcaaatgccactaccccacttgtccaggcaatgttcttcaataacaatggtccgagtagatttgacgcgactgaagtttttgacaagctgagagtcgctccggacacctacttcaagaacattaaagaagccggaagtatgggggcgagtttagcattagcaatgaccaaatccctgtacccgaagattgatattaatgccgtcaatggttttgcggacgggacaagtgaagaggctgcccttgatcttatcaacgacgctcaaaaagcggccgacaagattgcaggtgatgtagtagatcggtttcaggataccgaccttcggccgactggcagcaataatactaatgatgaaaagactgatactgat

SEQ ID NO: 43620 - DNA, 234 bp, Oryza sativa
  Clone ID: PAT_MRT4530_4675C.1
atggatggcgcgggcgcggccggtggcacggcgcggttcggcggcatgcgcgcggaggcgacctgtagcggcgggctcggcgtgggctcggtgacgggctcacggtggcgggtgacggggaacggtgggctcgtagcggcggacgaccgccccccgcccggatccggccacaaatggatggagttctcggccatggagatggactccttcatgttaatgccggcgtgtcagtga

SEQ ID NO: 43621 - DNA, 696 bp, Oryza sativa
  Clone ID: PAT_MRT4530_46760C.1
atggcagcgtgtaagcctgctaaggccgccgctaccgtccccgatccaggtcgccttggcgaagatctctcctgcttccttggcaagtctctcatcaaggagtcggatcttgcctccctggtggcctccggagccatcgccgaagggcagggcttcgtgtcgggcgaagctctagttccaactccgggcgacagtgttcgactaggcatgtcataccgcgctggcttggccccaaccgcggagttgttcgacgccatcttcactgctaccatcctttccaaaactgtgcagacggctgctgggccgaagatgatggtcttcggcagtgccaacttcattcttcgaccggaacgatccaccgccccttcacctgctgaatcggatgcgaacgatgaggaagaggaggacgagagggatgaggaggaggaggaggaggtggtggtggtggaggaagcggccgaagaggatacggagggcaagaactattcgccaggttacaccccaagtccggatcatccggaaactggcgtggcctccagctcgtcaccccttcgccagaaagacctagagggggcaaagaccctagctgctatagtgggtgccacctcgaggaagggtacttcggctgccggcaagaggccagcgaaggccgtgaccaaaggtttcgtgaagatatatattcaatgttacatctaa

SEQ ID NO: 43622 - DNA, 345 bp, Oryza sativa
  Clone ID: PAT_MRT4530_46761C.1
aaaaaaagaaaaaaaatttttttttttttttttttacccaaaggttaaaatggaaaaattgaggatttttgggcttttttttaaattccgaaacatttttttgttaaaattttttaaaagaaacccccaagggggggaatggtattgggggcaccataatacctaggggagataccatttttaaagggggcgttaaaaggcaaaaaagtttgggcttgggccaaatttcgttcaaaggggaaataaccaaactggtggagttgtaacttttgtcttttggcctgaaaaatgttaatgttctgttaggaggattgttggcccaacagggggggttgttgccaaaat

SEQ ID NO: 43623 - DNA, 379 bp, Oryza sativa
  Clone ID: PAT_MRT4530_46762C.1
aggggggcccccgggggttaggggaagaagggggcagtcatcaaatccgcattttccaaacttggggaggctggatccggcagccgacggtttacggttggggaaaaaactggggcgtttggatccgggggttattggccgggaggcgggaaaggcggcaacagcggccggatccatgtcccggaggaggaacatgatgcggctggcggcccggtgaaacactggggggggcggatctacaaaccctgacctcatggaggaaaaatcccccccccaacagtcaggggatgtaggcggcggggcttggctgtcggcggcaacatagggaaaaaggaaatggcacccgggggccggatccgtcctccacaaggtcggggga

SEQ ID NO: 43624 - DNA, 329 bp, Oryza sativa
  Clone ID: PAT_MRT4530_46763C.1
ggcatactatggccataaaacggatcctcgtgctgtgtaaattggccttcttctaattgtttcagcatttcaatacttaaaccagttcggaaggtatagtacggccatacgaaactgtgaagcaaactcctgcttacaaaaataggttacgaagcattggagtttgagcgaacaggaggaatttcaagcaaaaagaagggtcacaagcagatagataagaaagttgaagaagtgctaagtaacgaagttgaggtgcagatccagggggttgaaaaaccttccttatggagactctatggtgtgcagtttatacttctgccatattccat

SEQ ID NO: 43625 - DNA, 303 bp, Oryza sativa
  Clone ID: PAT_MRT4530_46764C.1
atggcgttcatgcggtatcaccgggcgctgccgcagggggagacgacggtggaggagttcagggcgtggctgagccagttcgacgcgaacggcgacgggcggatcgggcgggaggagctggagcgcgcgctgcgcagcctcaacctgtggttcgcgtggtggaaggcgagggaggcgatgcgcgaggcggacgccaaccgcaacggcgtcgtggaccgcgacgagatggtcaggctctacgccttcgcgcagaggcacctccacctcaagatgaacgacctcgacgatgttgcttcctactaa

SEQ ID NO: 43626 - DNA, 861 bp, Oryza sativa
  unsure (1)..(861): unsure at all n locations
  Clone ID: PAT_MRT4530_46765C.1
ccacgcgtccgggtctctctttaccactcaacctctcctaacaacgtcgccggcggtttgacgtcgaacggcgtacggcagaggcgacggtaaacccccacaccgccgccctccgccgccgtcgtcgttcatccgtgggagggggatacatatgcatgcaagcacgcatatcgactttcattgctcgtagttgcagagattaatctttgtggttacttcaatactgtatcaagtcttagtgaaggataattatcttgaagtatatcatacttcccagaagctagatacaaacacgagttgtcactaccatgggttcctgtgcttccaagtctgtcattgagcagagaccaccagcaaggcactataccaggaaaggaagaagagctcgtactaattcccgatccatcatgccagaggcgcccaagtcacggttgaacgattcaagaggacacatgactgacttctcaatgagtgaggttgtccattttgagacatcatcaaaccatggaaaatcagagcattccaaaacattccacctcacacagatgcagtggcaccacagccagagggattccaatggttgctgcaaagaagatgcctggtttgactccgtcagtattctcgaggacgactccgacgatgaatttaagagtgtcaatggagattggcctgatgatgataaccaaatgaagagtgagaacgcttcccgttttgctgacgcactctctcgcatcggagacttatgccgtggggtgcccatgacattatctgtagaacagtatctgaaagagacatagtaatgatcctgaccgtnagagccaagcatggcaatgtgcgcaaccaggtgccctaccagcctct

SEQ ID NO: 43627 - DNA, 156 bp, Oryza sativa
  Clone ID: PAT_MRT4530_46766C.1
atggcgttcacccgcacaccgtcccgtgccagctgcctcgccaccgttcacaccatgccgacgatggccgccttcgatgtggagtatgcgctaggtccaaagccgccgaccacctccatcgtgctggtcgtgcacaggatgcagcccgtgcggtga

SEQ ID NO: 43628 - DNA, 828 bp, Oryza sativa
  Clone ID: PAT_MRT4530_46767C.1
atggcatccgtggctctgatcgtccttcttatgaacaagaatttgtatcggccaggcatccggagctatgccctcattatctgcatggtagcaggcatgttcggggtcatgggtgcctacgctactggaagctccatgtatttacgtaccttcatcattgtattggtattggttcttgtggcttttgtaggtgtagtctttctagccatcaaccatttcaacaaacttcataagaagaagatggagaagaacaaacgacaaccagcacaacaacaacaaccaccgagccccaaaaagtcctccttaacaacgtttgcgatgcaaaaagacatgctcaagtacttgatgctggtagggatattagcagcaaccgccacctacctgacgggcctgaaaccccctggcggcctgtggaaggacaacgatgatggacactccgccggcaatccggtcctctatgatatcgacaagaagcggtacaacattttcttctatagcaactccacttacttcatggcttccatcaccgtcattgtgttgctgctccaaaggatggtgttgcctgagaggagcggcggaaaggttttttggtcgatgcacacggtcatgctgctagacatgctcgctcttatggtagcctatgcggcaggcagcgttctggactgggagacgtcgaagaatgtcttcctactgctcctccccgtacatatctttgttgggggtttgctcttcatatgcaagcaaatacaaccttcaccacaagatgaggccggcccaaatgctggggctaacacccaggagatttcaaatcctaccccttcaagttag

SEQ ID NO: 43629 - DNA, 351 bp, Oryza sativa
  Clone ID: PAT_MRT4530_46768C.1
tgatggacggatgcgaagacaaccacaggacctgcgtagtgaacccgcgcttcaaggcccccgcgggcaatgtagtggcagcacccgccgtaacgtatagagggatcggacgccaggaaggcccaccacctctgcggagaccccaagaacctgcggcggtgcggcgcacgttgatgcgacacaccattacctgcggaggaagcgttggaggtggctgctggcgccctctgcggagaacctggcgctcgcgtgcttactcggtgtcattctgggtctcgactgcgacctgtccctaaccgacgccggcgcgaaccgtcggctgcggcttcaatacctgcattacatctgcga

SEQ ID NO: 43630 - DNA, 489 bp, Oryza sativa
  Clone ID: PAT_MRT4530_46769C.1
atgccgctcatgaccaagttttgctcattctctgctttaaaccaaaacagaaatcaattttcgaaattgaattccagccgggtccacagggtgctcaccaagcagagaaacggaggcagcgaggtccagggagcggcggagacggtggttgttggcccacggcggcaaaaatccggcgtcgacgtcgccgggtcgactcaaggcgcgaactgcaacttcgagagtacggggctgttagagatgagccacagagagtgcatgcgcgagaaatccggcggaaactcaccggagcgggaggattcgccggcggcggcggatggccgaaaagggggagggggcggcgacgttccggcggtgcagagtgcgtcggctcgatcggcttcagtcgaacctcgatggggtcgaggcgagcttgcagacgaagtacattggcttggtgttgcttcggtgtgttggttagcaacagttgacagtgcagttaacagctga

SEQ ID NO: 43631 - DNA, 5859 bp, Oryza sativa
  Clone ID: PAT_MRT4530_4676C.1
atggaatcgcccacgtggcctggcaccttcggggacgtcgggcccgagggtgaggtgtccgccctcctcctgatttccccgagggggggtcgggttgctcttgccccggccccgagggccgaggtgccccgaccccctgtgggagagagcttgagatctcaccctaagcccccggccgaactggcaaaggggggcctgtgcggtctcccggtgaggagccacgagctccgtcatctggcgcgccagggggaggcgctcgagagggtcgaaaaatccacagcatcaccggtcgcgggtgatgcaagagaacggcgagatggggagcgtcgcctcctcgtctacggcgacggcagcacgcctcagggcgcgcttcaggctgttggcgcgctcctacgtcacccgcccgtcgtccctgacccggagtctccagcccagcgatggctagacgacgtggccaacttggtcatgacggcacagcagcgcctgggtgctggtggacggtccgccaccaccaagacctccggcgccgccactaccggctccgtgtcgtcaaggcggagggcgcggcgagcggcggctgttgcacgccattcggctaccactccctcgtcggcacctccgactcgggaggatcagcatgaagagccggatgcccgcctcgacatcgagcgtaggcgtaatagccggcgtactccccgcgcagcggagggcgcctcttcgtccagagtgtcacctcgacagggacgtgaggaccagccctccgtgcccccggttggtggtgtcggctgtagagcctttgtggcgagtcttcggaatgtccgttggcccccaaggttccggcccaccatcaccgagaagtatgatgggagcgtcaaccccaccgagtttctccaggtctatacgaccgggattgaggccgctgggggtgacgacagggtcatggcgaatttctttcccatggccctgaagggacaggcgcggggttggctaatgaacctgccacccgcatcgcggttctgccaagtccgtaatactataccatgcatccctgcacacgcggtgatctacgcgttcagggggggtgtgcggcacaaccgcatgctcgaaaagatcgcctccaaagagccccagactaccgcggagctctttcagctcgcggaccgagtggctcgtaaggaggaagcgtggacttggaacccctccggttccggtgtggcagcttcggccgcccccgggtccgccgctcagacagggcggcgtgacaggaggagaaagaagaggtcggtccattccggcgacgagggtcatgtcctcgccgtcgagggcgctccgcgggccacccgaaaggggaggcctgcgagcgacaaaaagaaagaggcaggtgctcccagcagggagcgcccagccggcaagtggtgctccgtccacaacacctccctccacgatctcgcggattgccgcgcagtcaaaaatttggctgagcggacgaagaagtgggaggaggacaggaggcaggaacgccgtgagaacaagtccccggcggttctttccggtaatcggcgaagagaggccaagcagaaggcccccgccgaggacatcgatggtgacgatgatgacctaggattccaggagcctggggccaccattgccaccgtcgatgggggagcatgtgctcatgtttctcgccggagcttcaaggctatgaagcgagagcttctggccgcggtccctactcatgaggcaacgcgtcgggcgcggtggtcggaggttgccctcacctttgaccagaccgaccacccaccgtgtgttgcccggggaggacagattgcgatggtggtttcccccaccatctgcaacgtgaagttggggcgtgtcctcatagatggaggaacggccctcaacattctttcccccgcggcctttgatgctatcaaggccccggggatggtgctccagccgtcccaaccgatcatcggtgtgacgccggggcacacatggccattaggtcacatcgacctaccggtcacctttggtggatcagccaacttccgcacggagcgggtgaacttcgatgtggcggacctcagtctgccctacaacgcggtcctggggaggcccgcgttggtgaagtttatggcggcggtccactacgcctacctccagatgaagatgccgggccccggtggccccatctctgtccatggcgaccttaaagtcgcgctcgcttgcatggagcagtgcgcggaccacctcgctgctgcgtccaagcccgagggtggtgacgagaggcttggcacctctgcccccaccgccccgaggcagcggattgacacatgcgacgaggtcccggaagacgcgctcgtctccttcctgcgggcaaacgctgacgtcttcgcatggagaccagcggacatgcccggggtccccagggaggtgattgagcaccgtctcgccgtgcggccgggcgcaaggccggtccggcagaaagtgcggcggcaggccccggaacgtcaagccttcatccgcgaggaggtggcgaggcttctggaggccggattcatccgtgaagtcatccatccggagtggctggcgaacccggtggtcgttcccaaggcgaacggcaagcttcggatgtgcatcgactacaccgaccttaacaaggcatgtcctaaggatccttaccccctgcctcgcatagatcagatcgtcgactccactgcggggtgcgaccttttgtgttttctagatgcatactctggttaccatcagattcgcatggctagggaggatgaggagaaaactgcgttcattacccccgtaggaacctattgttttacatcaatgcccttcgggttaaagaatgcaggtcctacttttcaacgtactactcgaatttctttgggtagccaaataggacgtaatgttgaggcttatgtcgatgacttggttgtaaaaacgcgcaaccaagaaactttactttcagatctagcggaaacttttgagaacctccgctccgcccgcataaagctgaaccccgataagtgtgtgtttggtgtacctgcgggcaagcttctcgggttcttggtctctgcccgaggcattgaggccaaccccgagaagattcgagctatcgagcggatgcgcccccccagcaaacttagggatgtgcaatgcgtcaccggttgcatggccgccctaagtcgtttcatatcaaggctgggagagaaggcgctacccttgtttaagctcctcaagcgcacggggccgtttacttggacggaggaagctgaacatgccctcactcagttaaaggcatatctcagctctcccccggttctagtcgccccggagccaaatgagcccctgctactttacttagcggcgaccccccaagtagttagtgcagcattggttgtggagcgcgatgaagacaatcctcatttcgtgcacccccattctgtgctaacttggcccgggagcgagcggggaggagaggcccccgagtcggacggtggcctacggcccctgacgaccggagccggccctctgcccgcttgtcagacggtgctaggtgcccccgaccctcaggagggccccaaggccactgcgggaaggccgcacttaacgccctttgaccccgaggctaaccctgacggccccgaggccactgagggaaggccgcccctttcatcctccgaccccaaggtcatcggcacagaagacaagtgcgccccgaaaggccacttgaacgaagaacgccccggggatacggcccctagcagagaggatcggccccaccgaagggtgcagcggcctgtctactttgttagtgaggccctccgggacgctaagacccgataccctcaggcccagaagatgctttacgctattctgatggcctcgaggaaactgcgccattattttcaggcacatagggtcactgtggttacgtcttaccccctcggtcaaatcttgcatgatcgagagggtacagggcgggtggtaaaatgggcaatcgagctttctgaattcgatctgcactttgaaccacgccacgctatcaagagccaggccctcgccgattttgtggcagagtggaccccggctccagagaccgtctcaatccccgaggccagcacgaacccctcgcagctgcctcacaccacccactgggtaatgcagttcgatggttctctgtccctccagggtgccggtgcgggggtcacgttgacctccccgaccggagacgtccttagatatctggtccgcctcgactttcgagcgaccaataatatggcagagtacgagggactccttgccggactcagggtggcagccggactggggatccgccgtctcctagtgttaggcgattcccagctggtcgttaaccaggtctgtaaggagtaccggtgctctgacccgcaaatggacgcctatgtacgccaagtgcggcgtatggagcgccattttgacgggatagagcttcggcatgtgcccagacgggataacatgatagccgacgaactctcacggctcgcgtcctcgcgagcccagaccccaccgggcgcctttgaagaaaggcttacccagccgtcggcgcgacccgaccccttaggggagacggatgcgcctgaccggcccccgaggcccgtcggagtccaggcctcgggacccgaagggagcgctccaagctcccttagattgattgcttggatctctgagatccaaacataccttacagataagactctacctgaggaccgcgaagggagtgaacgcgaacaaggcgttgagcttcttgctgacatccatgagggcgagtgcggagcccattccgcctcgcgcaccctggttggcaaggcctttcgtcaaggattttattggccgacagctctcaatgatgcagtcgatctggtccggcgatgcagagcgtgtcagttccacgccaagcaaatccatcagccggcccaggccctgcagatcataccactgtcatggccatttgctgtctgggggcttgatatcctgggaccgttcaaacgggccccgggcaggtttgagtatctgtatgttgcgatcgacaagttcactaagtggcccgaggcttatccggttgtcaagatcgataagcactctgctcttaaattcattaagggcatcacggcccgttttggagtgcctaaccgtattattacggataatggcacccaattcactagtgaactcttcggcgactactgcgaagacatgggcatcaagctctgcttcgcctcacctgcccaccccagaagcaatggccaagtggagcgcgccaatgcagaaatcctcaaaggccttaaaaccaagaccttcaatattctcaagaagcacggcgattcatggatcgaggagttgccagcggtgctctgggcaaaccgaaccacaccaagccgagcgaccggggaaacgcctttcttcctcgtctacggcgcagaagcggttctcccatccgagctcaccctgaggtctcctcgggccaccatgtactgcgaggctgatcaagatcagcttcgtagagatgacctcgactacttggaagagcgaaggcggcgcgcggcccttcgagccgcgcgctaccagcagagcctgcggcgctaccatcagcgccacgtccgggcccgatcactctgcgtcgacgacctcgtcctacgccgcgtccaaacgcgtgctggactgagcaagctctcaccaatgtgggagggtctgtatcgagtgatcggcgtcccccggccaggctccgtacggctggccacgggcgacggcactgagctgccaaacccgtggaacatcgaacaccttcgtcgcttctacccctga

SEQ ID NO: 43632 - DNA, 1353 bp, Oryza sativa
  Clone ID: PAT_MRT4530_46770C.1
atgggtgaggagtcgtcgccggcggcggcgccggcggtggaggtgctgtcctacttcgtgtgcccgatctcgctggagatcatgcgggacccggtgacgctgtcgacggggatcacctacgaccgggagagcatcgagcggtgggtgttcaccgacggccacggcgagtgcccggtgaccaagcagcggctggcgccggcggaccgggagcccacgcccaaccacacgctccgccgcctcatacaggggtggtgcgccgtccacgccgtcgagcgcttccccaccccgcgcccccccgtcgacgccgcccgcgtcgccgccatcgtggacgccgcgcggccgctgctgcgccggcgtcgtcagcgggaggagctgatggcttcgctgagggagctcgccgacatcgttgccgagagcgaccgcaaccggcggtgcgtccagggcgcctccggcgccgtggagttcctcctgtccgtcgtcaaggagcgcgcctccgtggcgggcgtggacgacgcgacgtcggccaagccggaagagacgacgtgcggcggcgtgcatgatccggcgaaggcgagctcgccggaggaggcggccctgagcatcctgcattcgctcaagctctccgaggagagcttcaagagggtcttggagggcagcggcggtgaggatttcttggaaaccatggcgtgcgtgctgcggcgaccgagctacctctcgcggatgcagggaatccacctgctgaaatcggcgctcccggcgatggcccccgcgcggctgacgtcggcgagagccgcgctggtcgacggcgtggtgggggtggtggcggacaggccgtcggcgaaggcggtcaaggtggcgctccacgtgctctgccggctctgcccgtggggccggaaccgcgtcaaggcggtcgacgccggcgccgtgtcggcgctcgtgcgcctcctcctcgacgagggctgcggcggcggcggcggcgaccggcgcgcgtgcgagctcgccgccgtggcgatcgaccacatctgcggctgcgcggaggggcgcctggctctggtggcgcacccggcggggctcgcggcggtggcgtgcgcggcgacgcggctgcccgccgcggcgggcgccgagagcgccgtgcgcgcgctgcacgccgtggcgaggcactcggcgacgtcggcggtgctgcaggagatgctggccgtcggcgtggtggcgaggctgctcttcctggtgcaggtcggcgcctccggcgagcggacgagggcgagggcgagggagatgctcaagatgcacgccagggtgtggagggactcgccatgcttggcctcgcacttgaatgcttcctaccctcgctga

SEQ ID NO: 43633 - DNA, 273 bp, Oryza sativa
  Clone ID: PAT_MRT4530_46771C.1
ccacagcgacccttcatccgacgacgaaccagattttcctaacttcgaccaacacgtggcacacatcttcggtggttcaacatcctattcctttaagcgagaatgcaagaaggtagaacgtgaagtttgctccacatcccgggctgataacttccggacaaagcagatcacctttgatgtagcagagtttcacactgcgtacaatgctatcatcaaaagagcggcacttgcaaaattcatggggcttcgcactgcgcatactagcggattaag

SEQ ID NO: 43634 - DNA, 246 bp, Oryza sativa
  Clone ID: PAT_MRT4530_46772C.1
atggctttttttttttctccctttctgcaaggcggagaaggtgaaagggtgcacagctacagctgtagctgcaagaaatccaagcgcctcaatctgagataccagattgctggtcacttgaggttttccgatccatcttccatgattctctcactaaacagtctacaaaattctcaagggcagatgcttgtcacacatactggagcagatggtcttgcaaaatgcagtatattgaagggcatgtga

SEQ ID NO: 43635 - DNA, 793 bp, Oryza sativa
  Clone ID: PAT_MRT4530_46773C.1
acccttcatccgacgacgaaccagattttcctaacttcgaccaacacgtggcacacatcttcggtggttcaacatcctattcctttaagcgagaatgcaagaaggtagaacgtgaagtttgctccacatcccgggtatcaatgtccaaaatgaagtggtcaggtcagaagatcgagttctctgataacaacccctgatagatatccgatagtagtcgagcctactatttggaatgtcaaagttgcacgtgttctcatcaacgatggcagcacaatcaacctcctctttgcagatactcttgacgcaatagggatccctagaagtgagctcatttcttcaaagcagctcttccatggcgttacacatagtcatcatcaagattgttatggaagataatgttgcttgtgactttcggcaaggctgataacttccggacaaagcagatcacctttgatgtagcagagtttcacactgcgtacaatgctatcatcaaaagagcggcacttgcaaaattcatggggcttcgcactgcgcatactagcggattaaggttccaggacctaaaggaataatcacaataccgagaaacgaaaagatggttgtgcagtgtgacaaaaggaatctcgacatgattgagcaaactcccaccactcccgccgcaaccgagccaccccaaaaagtgagtaaacccaactcggtaggtgaactagggtttataggatttcaattttggggatttttgtttcgtttagcatgaaaaaaaatacagttaggtggcaataacatgccccgt

SEQ ID NO: 43636 - DNA, 3465 bp, Oryza sativa
  Clone ID: PAT_MRT4530_46774C.1
atggacgacctcactgcccgtcctctccttgactcggtggtcgtctcagccactggcgagattgagaggcgcagagaacgtttctctgctcgctccttagttgcctggcaagttggggctctgggtgacaaagttgagcttaatgtcttcgctgacgatgttcgttctgctttccacattagaagagctgacatccaattcaccaaattccaccccgaagatttctttgttacctgctccaaccaaagtgatcgcgatgccatcctccgccaaccaaggcttgctacggcctctggccgagtcttcctctttcgtccttgggatgaaagtctccatggtgtcccagttcgctatcgctaccgtgctcgcctctgtatcgaaggtgtgccaatgcatgcccgtactgatgaaacggcggcaaaggtgatcggtcgcaagtgttctatccactatgtggaggagtactccaggcgtggcaattacaaccgcacatatgacatgtgggtttggacagatgagccgagagccatccctcggggtggttcctttgccatcacgtctgctgacaaggaaggcctccccactgacatccccctccccgagctggagccactccgcaatcctcctccttctgagccaaagaagggctggtcctacgacgtcctcattcatgtggacaccctcgaagatcttcacgctcgcaaagcctgggcgtacaagtgggactataaagtccaggacgacggcatcaacttcagagagtacccgcttccctgcagggctgagccggacccagctcgtggcccggatgatgaagacgaagatggaaacgatccttccaggggtcggtatagaagccgctccctctgggatcggctgagcgggcgctcccacagccgaagcagagatccgaaccggcgagacacccagcgacgtgaccaagaaaggaggggcagatcgcgggacagagagcgctctgatcacagataccgagccgttgaaatccttcagcctgatgaaccactcttttcgcaggggcgtgtggacatcctcgacattttggagagccatctcgacccaatgcttcatgaagcagccgtgcatcattccatctattctccagatacttcctcccctcgtgtctcttcccctgtttttgtgcctacttctacaggacatgcaggagcagacacaccttctgcgtgcaaggcaatgaagattgacagcttcatcaacggccttgcaactccagtccagccgcctctcctgccagcccccgacgtcaatgcacggaagccttcccgtgcaaaggtgaaaatccctgctttagtttcggcgcaacgacacagcgagcgtctgctttgcaagcgtcgtgctggcgcgaagcttgaaaactttgcccaagaaatcctctcaaagaaatttggtatcattgatgaatctgcttcttttgatgataacattaaaaagttgtatttacagcggtacaagaagcctctctcgccagcatcactgaagataatcgccgacttggttgaaaagggagggtgcaagacgatcgggatgaagaatttgaagaaaaatgcggcaattatgtcacaagataatgtagccctgttcaattggaatgtgagaggtatgaatgccaaggccaagcaagactctgtcaatttctgcattcaacaacatgctgcttctattgtttgtcttcaagaaaccaagattgctgttgtatctgaccaaatcattctaaactctctaggtcagcgttttgttcgtcaatatgcagctttgccagctgatggcaccaagggtggcataatccttgcctgtgatgaaaacttcttctccctctctgatgttcggctgggaaattactcaatttctgctactgtaaccatgcgagaggaaagagttcaatggtccatcacagtagtctatggaccacagattgaggccgacaaaattgccttccttgcaaaattagaagatcttcatctcgaaatgaaacctgcttggtttattgtcggagacttcaatctcatttataaagccgcggataaaaataacgaccgtctaaatagaagaatgatgcaacgttttaaaggtctcattgataaattacaagtaaaagaactgcatcttccaggtcgccgttttacctgggtgggagacggatctaacccaactcaaactaaaattgatcgtgctttttcaacctcggattgggacctgcttttccccaatttgtgcctcttcccgctgtcgtcgacttgttctgatcatgcccctattttcttcgttggaaatgaaaagcttagcaaattcccaaacttcaagtttgaatcttactggttgcatgtgcccggtttcttggacgtggtgcaaaattcttggcagaaaacgattcttgccacaaataagcttgccatttttcgtttaaagctccgtcgtttagctcgtgatcttagaagatggagccgctaccaaataggagacatcaagctgcaacttgcaattgcgtccgaagtaattcttcaactcgagattgcacaggaatctagaatcctctctgttgatgaacaaaatctcttgaccaacctcaaatcgaaattcctcggactagctgtgttaaacaagctcaagattagacagagatcgagaatgacttggctcaaagaaggggatgtaaattcgaaatttttccacattaaggcaaattccaggaaaagaaaaaatttcattcacactctacacacccctacaggtatagccatctcggcaaagacaaagaggaagaattatacagaagatgtttcagaagaggaactaaaagccacgatttttgctcttccccctgagaaggcgccgggcccggacggtttcatcggagcccttttcaaagttgcatggaatatcatcaaggaggacctgctggcagcgatttcttcgttcttgaaccataacacctctcagctagcagaacttaactcggcttatatttgcctcattccaaagaaagacgatgcccttggcgcagaccactttcgccccattagtctcattcatagttttgctaagatcatcgccaaaatcatggcaaacaggctagctccgcggttaaatgatttggtttctcataaccaaagtgcctttgtccgcaaaagggcgatccatgacaacttcctttatgtccaaaacatggtaaagcttttccacatatcgaaaaagcaatgtcttttcttcaaaatagacatagcaaaagccttcgacacagtaaattggccatatcttttggaggttctcaagcaatatggatttggaaatcgttggctaaattggatttccaaccttttcgcctcatcttcgtcccaggtgctgctaaacggctccccaggccgacaaatcattcacactagaggactccggcagggcgacccgctaccccgatgctttttattctag

SEQ ID NO: 43637 - DNA, 633 bp, Oryza sativa
  Clone ID: PAT_MRT4530_46775C.1
aacccattggggggaattaatgcactttcatctagttcttgaagcagaggcgttgtactcatcaaaggaaaaaaaaagattaaggcatttcagtttaatcattcttggctcaaggtgaggaattgaataattgtccaaagtttcaagcattggagtccctcaggaggccaagttcccagaagtctttgaccccaacttagagagctgatgaagaagatgatggtagcaagagtacaactcctaattcattacaaccgaatgataaaaaagagaccaacatgtagaaagcaagtaaaggagaatttgaagaatggaggagaagctggaccatacaaggaggcgatgaaagatttgcttgatgtcaaagagaaataaggatttgagagaagagagatggaaggagaccaaggagattcaagagcgcaagctctcattcgctaagcataagatagtgtgggagcaagaacagaaaatcatgttctgtgatgtctccaccttggaacagatgtgagaacatatgtgttggccatgaggacacaaattgttgcttcaaaggtggctgccctcaatggccaatttggtagtggtagtagtgtctttggaggtgaatttggtagtggtaatgaagaagtt

SEQ ID NO: 43638 - DNA, 216 bp, Oryza sativa
  Clone ID: PAT_MRT4530_46776C.1
gaattcgatgaatgtgcttgcgtgccgctgggtgcgcagctatggtcagggtttcacttatcgcacgataatcgcgtgattatcgcggttatcgcgcttatcgcgggggtacgatgtgatttttgtgcgattttagacgattatcacgcgattatcgcggttatcgcgctaccgtggggtggcgataaccccggcccaaacgataaggtaaaccct

SEQ ID NO: 43639 - DNA, 534 bp, Oryza sativa
  Clone ID: PAT_MRT4530_46777C.1
tataaaatatattgatttttagatgaattgttgtaaaataagtaaaccaaattgtttttctgaatctatgctctatagcacttcctttcttgtttatatacatagaagacatgaaaaaccgaggaatgatgcaagggttagatacatagaaggataaagtaaatatagcatgtttcatgcatgcccacttgacatgtacacattacgtcttaatcagcataaacttggtaaaattggccttgtcgtgtccttttggccttggttcgcacacactagacaagtctttgcactaaaacgagtgtttgccaagttcatccactagattgcacccaccaaacaagttcatgtaccaccaatgcaattcactcatatggtaaagaagttgcattcagcttgcaaataatttcctagttattgcttgtgctattatactggtatgtctagcccaacattaacaagatcaaccaaattgtagaaccaacagtacagaactctgtttggttcctgatgagttgtcaccaaaaatagattttg

SEQ ID NO: 43640 - DNA, 183 bp, Oryza sativa
  Clone ID: PAT_MRT4530_46778C.1
atggcgtcatggcgatgtgccaatggattatcagatcgagtgctaagtttcacctccatgtctaagaccccacttagagcacccgcaatggagttgggttccctcccccatccgaactcagcactagacacgcagctatttaattatgcagatgtccatctgcatggagaccatatcctctag

SEQ ID NO: 43641 - DNA, 1544 bp, Oryza sativa
  Clone ID: PAT_MRT4530_46779C.1
ggttgaattttttttttatatattccggtttattcactgtagtacaaccaacccatccaattcaattttcgatggttttaaaacatgtcaatttacaagtttaaactagctatcaaattgtacgaaaaacaaccttctacaaccattttctgtatcacccaataaactcagaacttgcaaataaccacaggaacaaatggacttgactcctcgcaatccatttgtatatttgtggtcctgtttataataaataagtatgcacttttgagcaaattagaagggcataatggttacagaaccaaatatcttgtgacttgtaatgacaatgctggtggcaatggcttgaatcttgtcaaccccaaactttagctgaaactttctgagtttctgatcattgcaatcggaataaatcctcaatggaggggccaatgcacatgacttcatcagccctttgtttcacattgggcctagcaatgctaaatgatgccagaccattattagtgatcttgccacatccatggatatgcagaacttgaaggcatacacagccatcccctagagcctgcaaaccttggtcacaaatgtttcggcaacggttaacatgcaagattctcagcttgttgcagagcaatccaatcgcagaccatccaggcaagcgaactccatggcagacagcgaggctccattcctcaatcaatggacacccgctagctattgccgtcacagaatcatcggtaaggtaacggcacatcctgaggtttaaaaaccgaagacttctcgcataaccaactctgtccaggccatcaagtccagttgggcttttcaaattgtacaaatttagatactccagtccaccaccactcactacatccaacaaaccatctggagaaagcatgcacgactcagcttctagatgagaaagtgtacctggacaacctctgaatccaacaccggataaacctctgcaatatgctatgataattgtggaaatattcgggcaattcctaaagattgcagcaatcccttgatctgaaatggctacacagtaacccaggttaagactcttcaaagcatggcagcccttgcaaagattttccaaaccatgatctgtaatattaaagcagcggtagagttcaagactcaccaaattagggcatccgattgagaccacctctaaaccatcatccgtaataccagagcagcagcccacgcgtccgcccacgcgtccgcggacgcgtgggtcgacccgggaataagccgcgtcaggtagttcttaaaccaattcttacaagttaagccaaaagcattcctgtccgattcactttcaagcttgttaaatatacaaatcaagcaatcatctgataggaaattgatatagttttccacgttgtcatccatttcctctctttccaaattttggctgaagttgacagactactgagtactatccgaaggctggagagcctggatttttattaaatacttttgggatgtactagatgatgaactggctggatcaaagctgcacagaacagctggttcac

SEQ ID NO: 43642 - DNA, 5298 bp, Oryza sativa
  Clone ID: PAT_MRT4530_4677C.1
atggccgagcgagcaaaggcgcacgacctctctccgagtgtgagcggcgacgacggggagctgaatccacgccgtcgagctcgtactcccccatctcctccgcgcccaagccctaagcagggggaggcgcttgagaaggtcgacaagtccatggcatcaccagtcgcaggtggtgcaggaggacggcaagatggggagcgccgcctcctcgtctacggcgacggcagcacgcctcagggtgcgcttcaggctgctggcgcgctcctacgacatccgcctgtcgtccatgacccggagtctccagcccaacgatggctggaagatgtggccaacttggtcatgacggcacagcagcgcctgggtgctggtggacggtccgccaccaccaagacctccggtgccgctaccaccggctccgtgtcgtcaaggcggagggcgcggcgagcggcggcggctgcacgtcattcggctgctactccctcgtcgacaccttcgactcgggaggatcagcatggggagccggatgcccgcctcaacatcgagcgccggcgtaatagccggcgtaccccccgtgcaacggagggtgcctcctcgtccagagtgtcacctcgacatggacgtgaggaccagccctccgtgcctccggctggtggtgttggctgtagagcctttgtggcgagtcttcggaatgtccgttggcccccaaggttccggcccaccatcaccgagaagtacgatgggagcgtcaaccccaccgagtttctccaggtctatacgaccgggatcgaggccgctgggggtgacgacagggtcatggcgaacttctttcccatggccctaaaaggacaggcgcggggttggctgatgaacctgccacccgcgtcggtccactcctgggaagatttgtgccaacagttcaccatgaacttccaaggcacatatccgcgcccaggcgaagaagcggacttgcatgcagtacagcgaggcgatgatgagtcgcttcgctcgtacattcagcggttttgccaagtccgcaatactataccttgcatccctgcacacgcggtgatctacgcgttcagggggggcgtgcggcacaaccgcatgctcgaaaagatcgcttccaaagagccccagactaccgcggagctttttcagctcgcggaccgagtggctcgtaaagaggaagcgtggacatggaactcctccagttccggagtggcagcttcggccgcccccggatccgccgctcagacagggcggcgtgacaggaggaggaagaagaggtcggaccgttccggcgatgagggtcatgtcctcgccgtcgagggcgctccgcgggccacccgaaaggggaggcctgcgagcgacaaaaagaaagaggctggtactcccagcaaggagcgccccgccggcaggtggtgctccgtccacaacacctccctccacgatctcgcggactgtcgcgcagtcaaaaatttggctgagcgaacgaggaagtgggaggaggacaggaggcaggaacgccgtgagggcaagtccccggcggttccttccggcaaacggcgaagtgaggccaagcagaaggcccccgctgttgacatcgatgatggtgatgatgacctaggtttccaagaacctggggccaccattgccaccgtcgatggaggagcgtgtgctcacgtctctcgccggagcttcaaggctatgaagcgagagcttctggccatggcccctactcatgaggcgacgcgtcgggcgcggtggtcggaggttgctctcactttcgaccagaccgaccacccaccgtgcattgcccggggagggcaggttgcgatggtggtttcccccaccatctgcaacgtgaagttgggacgtgtcctcatcgatggaggagcggccctcaacatcctttcccccgcggcttttgatgccatcaaggccccggggatggtgctccgaccgtcccagccgattatcggtgtgacgccggggcacacgtggccattaggtcacatcgacctaccggtcaccttcggtggacccgccaacttccgcacggagcgggtgagcttcgatgtggcggacctcagtctgccctacaacgcggtcctagggaggcccgcgttggtgaagttcatggcggcggtccactacgcctacctccagatgaagatgccgggccccggtggccccatctctgtccatggcgatcttaaggtcgcgctcgcttgcatggagcagcgtgccgaccgcctcgctgctgcatccaagcccgagggtggtgacgagaggcctggcccctctgcccccaccgccccgaggcagcggatcgctacatgcgacgaggtcccggaagacgcgctcgtctccttcctgcgggcaaacgctgacgtcttcgcatggagaccagcggacatgcccggggttcccagggaggtgattgagcaccgtctcgccgtgcggccgggcgcgaggccggtccggcagaaagtgcggcggcaggccccggaacgtcaagtcttcatccgcgaggaggtggcgagacttctggaggccggattcatccgtgaggtcatccatccggagtggctggcgaacccggtggtcgttcccaaggcgaacggcaagcttcggatgtgcatcgactacaccgaccttaacaaggcatgtcctaaggatccttaccccctgcctcgcatagatcagatcgtcgactccactgcggggtgcgaccttttgtgttttctagatgcatactctggttaccatcagattcgcatggctagggaggatgaggaaaaaactgcgttcattacccccgtaggaacctattgttatacatcaatgcccttcgggttaaagaatgcaggtcctacttttcagcgtactactcgaatttctttgggtagccaaataggacgtaatgttgaggcgtatgtcgatgacttggttgtaaaaacgcgcaaccaagaaactttactttcagatctagcggaaacttttgagaacctccgctctgcccgcataaagctgaaccccgataagtgtgtgtttggtgtacctgcgggcaagcttctcgggttcttggtctctgcccgaggcattgaggccaaccccgagaagattcgagctatcgagcggatgcgcccccccagcaaacttagggatgtgcaatgcgtcaccggttgcatggccgccctaagtcgtttcatatcaaggctgggagagaaggcgctacccttgtttaagctcctcaagcgctcggggccgtttacttggacggaggaagcagaacatgccctcactcggttaaaggcatatctcagctctcccccggttctagtcgctccagagccaaatgagtccctgctactttacttagcagcgaccccccaagtagttagtgcagcgttggttgtggagcgcgatgaggacaatcctcatttcgtgcacccccattctgtgctaacttggcccgggagcaagcagggaggagaggcccccgagtcaaacggtggcctaaggcccctgacgaccggagacggccctctgcccgctcgtcagacggtgctgggtgcccccgaccctcaggaaggccccgaggccactgcgggaaggccgcacttaacgccctctgaccccgaggctaaccctgtgctgactcgacccgggaaagagcagggagaagaggcccccgagccgaacggaggccagaggcccctgacgaccggagttggccctttgcccgcttgtccgacgatgccaggagcccccgacccccaggacggccccgaggccactgagggaaggccgcccctttcatcctccgaccccaaggtcatcggtacagaagacaagtgcgccccgaaaggccacttgaacgaagaacgccccggggatacggcccctagcagagaggatcggccccaccgaagggtgcagcggcctgtctactttgttagtgaggccctccgggacgccaggacccgatacccacaggcccagaagatgctttacgctattctgatggcctcgaggaaactgcgccattatttccaggcgcatcgggtcactgtggttacgtcttaccccctcggtcaaatcttgcataatcgagagggtacaggacgagtggtaaaatgggcaatagagctttctgagttcgatctgcactttgaaccacgccacgctatcaagagccaggccctcgccgattttgtggcagagtggaccccggctccagagaccgtctcaatgcccgaggccagcacgaacccctcacagctgcctcacgccgcccactgggtgatgcaattcgacggttctctgtctcttcagggcgccgtcgatctggtccggcgatgcagagcgtgtcagttccacgccaagcaaatccatcagccggcccaggccctgcagatcataccactgtcatggccatttgctgtctgggggcttgatatcctgggaccgttcaaacgggccccgggcgggtttgagtatctgtatgttgcgatcgacaagttcactaagaggcccgaggcttatccggttgtcaagatcgataagcactctgctcttaaattcattaagggcatcacggcccgttttggagtgcctaaccgtattattacggataatggcacccaattcactagtgaactcttcggcgactactgcgaagacatgggcatcaagctctgcttcgcctcacctgcccaccccagaagcaatggccaagtggagcgcgccaatgcagaaatcctcaaaggccttaaaaccaagaccttcaatattctcaagaagcacggcgattcatggatcgaggagttgccagcggtgctctgggcgaaccgaaccacaccaagccgagcgaccggggaaacgcctttcttcctcgtctacggcgcagaagcggttctcccatctgagctcaccctgaggtctcctcgggccaccatgtactgcgaggctgatcaagatcagcttcgtagagatgacctcgactacttggaagagcgaaggcggcgcgcggccctccgagccgcgcgctaccagcagagcctgcggcgctaccatcagcgccacgtccgggcccgatcactctgcgtcgacgacctcgtcctacgccgcgtccaaacgcgtgctggattgagcaagctctcaccaatgtgggagggtccgtatcgagtgatcggtgtcccccggccgggctcggtacggctggccacgggcgacggcacggagctgccaaacccgtggaacatcgaacaccttcgtcgcttctacccctaa

SEQ ID NO: 43643 - DNA, 599 bp, Oryza sativa
  Clone ID: PAT_MRT4530_46780C.1
ggggtcctttttttttttaatctgacgagacaactgataattcacgcatttaaaaattccgtacatatgaattcggtaagttataagtaaacaaaaattgagcagtagagccactgaacaaaaattcagtagaaaattcagtcatgctctattgctaggcagttgggggctttcctcccagctttccctcgcataccgcctttctggccgccgcccttcttccccttgcccttagctcctttgccacccttcactttgctggccctcttgtccttcttcatacgcttatccaccagtatcttccctttgccagccctcacctgaacgcccttctttgcgacaacgtactccttctggggcttctttggaatcgccttcttgtaaatcctgtcgatcatcttcctctttgactgctcgtttatgtcgttttgatctgcgatggcatctgccttctggcgcgccttatccagcttcttcatggcgacgcgcttcttccgagccttagcctcagcgaccttcttggctggccgagcatcgatctccttgaactgagccctcatggcagctaccctctctttttgttacaggcttcgtaggct

SEQ ID NO: 43644 - DNA, 477 bp, Oryza sativa
  Clone ID: PAT_MRT4530_46781C.1
atggggaagacgaaggggaagcagcgacaggataagttctaccacctcgccaagaagcagagctaccagagtcgcgcggccttcaagctgctccagctcgacgcgtggttccgcttcctgccgacggcgcgcacggtgctcgacctctgcgcggcgcccgggggatgggtccaggtggccgtcaaccacgtgcctgtgggggccttcgtcgtcggcgtcgacctcgtccccatccgcggcgcgcactctctgacggaggacatcaccaccaccaagtgtcgcgccgcagtgcggaggctcatggactccaacggcgtcgtcgtgttcgacgtcgtgctccacgacgggtcacccaacgttggtggcgcgtgggtgcaggaggccaccgtgcaatcgtcgctcatccacaacagcctaccgccgtgtcgcctcgtgctcccgccgtcgcatcggtgcagcccacctccgcagcgctag

SEQ ID NO: 43645 - DNA, 2820 bp, Oryza sativa
  Clone ID: PAT_MRT4530_46782C.1
gcaattcctccaaaaccctagcgctctctctctctccccccccaccctcccttcgcctatagctgaggcggcggctcgtcggcggcggcggcggcggaggaggaggaggaggaggaggaggcagcaatggggaagacgaaggggaagcagcggcaggacaagttctaccacctcgccaaggagcaggggtaccggagccgcgcggccttcaagctgctccagctcgacgcgcggttccgcttcctgccgacggcgcgcgcggtgctcgacctctgcgcggcgcccgggggatgggtccaggtggccgtcaaccacgcgcccgtgggggccttcgtcgtcggcgtcgacctcgtccccatccgccccatccgcggcgcgcactccctcacggaggacatcaccaccaccaagtgccgcgccgccgtgcggaggctcatggactccaacggcgtcgccgcgttcgacgtcgtgctccacgacgggtcccccaacgtcggtggcgcgtgggcgcaggaggccaccgcgcaatcgtcgctcgtcatcgacgccgtgcgcctcgccaccatgttcctcgcccccaagggtgccttcatcactaaggttttcaggtctcaggattacaacgctattatgtactgtcttaaacaggttagggatcctctcaagccggacagacagaagaggaaccgtgatggatacgaagaaggaaatacaacattgcgaaaagttggtctggcttcagattttatatggtctgagggccaaacgcccctagagtttcttggttcttttaatgcaatttcatttgatgacccagcatctcttcctatcaagaaccatgagcttactacagatgagataaaagctctttgtgaggatttgtatgtactggacaaaaacagcttcaagcatatcttgaaatggcggatacgcatacggaaagcactatcatcttctgaagtcactaaaaaaactgatgatactgcggtggaagtcaatgtcaaggatgatgaccaacttctacaggaaatggaagaattgacgagtgtcattgatagaaagaagaagagagaaaagaagcgtcaatcaaagcgccgtgcaaaggataaagcacgcaaagcaacaggaatgcaaatagatgctacaggagataattacggcgatcctgatttgttttctataagtgctatcaagggcggaaaagaactccaagctattgaatcggctgagcttaatgtagaagatgcccaaggagatagtgagaatgaggatattcaaactcgtgaatactctgatgaggaaatggattctgacgaagaacagcagaggttttataattttaccgcaatcccaaaaatgtgtaacatggtaatcttcccaaccaggtatgatgcccaacttgaggaaatgcttgatgaagcttatgagcgttatgtaactaaaaagggtggtgaagtgaaacaagtacgcaagcgtgcaaaacgagtaaatactgatgctgatgaagaattattagagggaggtgaagatgacggtgacgatgttgacatggatcaaggttctgatgaagagcaagatcaagagaccaatccccttttattatccctagatgcagagaaaccaacaaaagagcagatgatggagcagtggttcagccaggatgtattcacagaagcaggaacaggtgtggttgagcagagtgatagtgaagatgaaagagagcagctaactaggattgcaaaaaagaaggcggattctggaaagaaggaaaagtctgctaaagcaaaacacttgcaacaggacgattttgagattgtgccagcagaaccagtccgaactgaagatgactcatcttcatcttctgatgagtctgatgaactagatgaggacctcgacgatgacacaaaagctgaagtactagcctatgcaaggaagatgttgaggaagaaacagagagagcagatacttgacgacgcttacaacaagtacatgtttgacgacgagggtttacctaaatggtttgctgaggatgaaaagaggcataaccagcctatgaagcctgtaacaaaagaggaggtagctgccatgagggctcagttcaaggagatcgatgctcggccagccaagaaggtcgctgaggctaaggctcggaagaagcgcgtcgccatgaagaagctggataaggcgcgccagaaggcagatgccatcgcagatcaaaacgacataaacgagcagtcaaagaggaagatgatcgacaggatttacaagaaggcgattccaaagaagccccagaaggagtacgttgtcgcaaagaagggcgttcaggtgagggctggcaaagggaagatactggtggataagcgtatgaagaaggacaagagggccagcaaagtgaagggtggcaaaggagctaagggcaaggggaagaagggcggcggccagaaaggcggtatgcgaggggctgcaatgtttaaggggtttaatactatgattaagggagaagttgaccgtgttattcaggctggtgcatcttctgaagtttcaacgtcaggcaaggaattccaagaaccaaacatctctgtagatcaaaagcagacgattgacaatgataagcacagtttggactttggaccaacatgaaaaaaaactgggaggaaagccccaaactgagtagtaatagagcatggctgaattttctactgaatttttgttcagtggctctactgctcaatttttgtttacttataacttaccgaattcatatgtacggaatttttaaatgcgtgaattatcagttgtctcgtcagattatattttcgg

SEQ ID NO: 43646 - DNA, 1237 bp, Oryza sativa
  Clone ID: PAT_MRT4530_46783C.1
cctttttttttttttttttttttttttttaattccaccaaggaaatttctttctttcaaattgctcgaaggaattaattaacatctcgaacatgcatgcatgcttacaagcattcagccgaaagatcgtacgatatgatcaaggaaggggattaacttttacattccattttccatttcatttggtggtcactaattaacatatgagatggccagcgcagggcgatggaggagggacccctcgaggtaattaagcttcaaaaaagggaagctgtatagcaagcacggcggcgcctcgctgcgccgccggccggagctcgtgcatgggagggggagcatgtacatggccgtcgatccgtcgtcgtcgccggcctagctcgcctttcaacccagacccttctcgtcctctctctgggtgtttgattacccatctttaccacgatcatcctacgtacgtgcacacgagcatgtaggcacatataaacatgtgagtatgtgacctctacgccacctgctgcacgccgaggctacggcgcggcgagtggtggtgctgctcctcggggatgctcgcgagcgccgggcgccacgccaccgccgccgacgatgtcgccatggcacggcgtatctccatcctcttgatctcggcgatgatctgcgcggtggtcttccggcggccaccgcctgcgccggcgccggcgctgacgacggtgagcgacagcagccgcgccgcctcctcctttgtcagcaccaccttcacccgcaccacgcccttcctttgcccaccttgagccgctcttcgcgggctcaccttgggcttactgctcccgatcgccgcctctacgcctcctcctgccaccgccgccgctgtggctgaagctgcttccgccggcgccgccggcgatgacggtttgctgctaccgatcttcttgcccttgttaggcttcatcatcatcttcttcttcagcttgtggagggccttgacgaggagcttgagggagtagagcctctgcttggggttcatggcggccgggagggtcgtcctgccttggaccaagcacggcagcatgttgcccatttggctctcttcctttttcccccctgcactgcccggcctttgctctctagttagctagcgaagttgtgatctgatggaggtttgggtatggggatgagctagaggagaacaaagagagggggagaggaagggaagctgaatgctgctggagtgctgggtgatg

SEQ ID NO: 43647 - DNA, 463 bp, Oryza sativa
  Clone ID: PAT_MRT4530_46784C.1
ccaaattgtaacatggtatcagacccttgttccaaaaaccctagccaccaaatccgatcatcaccggcgcaccggcggcggtgagccgccggcgagccatcatcatcgtcctccttcatccctcaacgtttttgtctccaagcagcaagcctgcagttcgtcgtcgtcaccgtgttcctgttcgccggtcgcagccgccgccagttgcggcgccgcgcccgttcccacttctccacccacgcagccacgccgtcgtggtgttcatccacgctgctcgtcgcggggctcgttcttgccgccgttcgagagccgccgctgtggcctcgtcaatctacatcaaggcatcaagcaacatcagtttttggcccatttcttgtcagttagcatcagcaaaccatcgtcctctctgatctgcagcagcaacaacaacaactcccgttcacctcctagtagatgcagcagc

SEQ ID NO: 43648 - DNA, 818 bp, Oryza sativa
  unsure (1)..(818): unsure at all n locations
  Clone ID: PAT_MRT4530_46785C.1
cnggcactggcgagatgtgaaaacgtctcagtgtgatgcagcgaccaggaaatctagcgcggcaggttacgtccatctcacccgttcatcttccgatcggacggcccacgctccacggacgcgacggttggagccacttcaactgctctttcatctctccccgattttgtttctcccccgccccgcccggcttctcctccgcacccaaaaatatcaaagaactcaaaagcggagagaggcgaagaacaggggggacgccatgaacgtggaggaggaggtggggaagctcaaggaggagatccagaggctcggccagaagcagcccgatggatcctacaaggtaactttcggtgttatcttcaacgatgaccgttgtgcaaacatatttgaagcactagtcggcaccttgcgggctgccaagaagagaaaaattgttaagtatgatggtgagctgcttctacagggggctcatgacaatgttgagataaccctgttgcctcctccagcggtcgctgctgcctgaagagggaagcatctgcgagcctctggtgttaaggcgttgatatgcatataatctattgtgtctagattctcatgaaccatttgatattcgaagcggatgcctatcgcgtgatgtatgaactatgggtatgcagtttcttggacatgcttgtattggaactgaaatgataagttcactgctgatatattgtgcagtgtagaatgagccataaaatggccatgaattttttacagtactgcattcatgaaggcctctaaaaaaaaaaaaaaaaaaaccaaaaaaaaaaaaaaaaaaa

SEQ ID NO: 43649 - DNA, 1392 bp, Oryza sativa
  Clone ID: PAT_MRT4530_46786C.1
atggaggcgttcgtgtcgggcggcgcgggcggggtcggggcggcggcggtggtcggagtgttcgtcgccgcggcggtggtcggagggttcgttgccgcggtcgcgctcgccgagagggccggcgtgatcgcgccaaggaaacgccccaacgcgcccccagctgttcctggtttacccataatcggaaatctgcatcaattgaaagaaaagaagcctcatcagaccttcacaaaatgggctgaaatttatggcccaatctacaccataaggattggggcttcttccgtagttgtgctcaattcaactgaagtagccaaggaggcgatggttgcaaaattctcatcaatatctacccgaaagctatccaaagcactgacagtgcttactcgtgataaatccatggttgctaccagcgactatggtgatttccacaaaatggtgaagcgttatgtcatgtcaagcacgctgggtacttctgcacagaaaaaatttcgtgacacaagagatatgatgatcaataacatgttaagcactttccataaactggtgaaagatgacccacatgttcctctgatatttagagatgttttcaaggatgagctattccggttgtccatgatccagagcttaggagaggatgtgagttcagtctacgtggatgaatttgggagggacatttcgaaggaagaaatctacaacgccactgtgaccgacatgatgatgtgcgcaattgaggttgattggagagacttcttctcctacctcagctgggttccaaacaagagcttcgaaacaagagtgtttaccgcagaagctagacgaaccgcggtgatgcgcgccttgatcaagcaacagaaggaaaggattgtgcgtggagaggaacggctttaccaagaaatccgggaggtgtgcggcgacgagacggtcaccgaggagcacctgccgcggctgccgtacctcaacgccgtcttccacgagacgctgcgccgccactcccctgtcccgctcatacccccgaggttcgtccacgaggacaccaagcttgcaggctacgacgtccccgccggcaccgagatggtgatcaacctgtacgggtgcaacatgaacaagaaggagtgggagtcgccggaggagtgggtgccagagaggttcaccggcgggaggttggaggtggcagacatgtacaagacgatggcgttcggcgccgggaggagggcctgcgcagggagcctacaggtgatgcacatcgcgtgcaccgccatcgcgcgcttcgtgcaggagttcgggtggaggctgacggagggcgacgaggagaaggtggacaccgtgcagttcaccgcctacaagctccacccgcttcatgtccacctcacgcccagaggaaggatgtga

SEQ ID NO: 43650 - DNA, 273 bp, Oryza sativa
  unsure (1)..(273): unsure at all n locations
  Clone ID: PAT_MRT4530_46787C.1
gttctcgagacgatcctgacatcgcccgttccggacgccgacgccaagacggccatcgccgacaggtcagagctgttcccggatctggtgcggatcctcaaggacgccgcatccccggcggcaatccgctgcatggcggcggccgtgcaggtgcgaggccggcccgctcgctcgtcgatggtccggagcaggcgccatcccagcgctcgcgctggccgcnccgagagcgcccacggtcgtggcggagctcgccctggggctactggtagaggc

SEQ ID NO: 43651 - DNA, 1527 bp, Oryza sativa
  Clone ID: PAT_MRT4530_46788C.1
atggagtcgctgctcgcagccggtgcgggagggatcggtgtggcggcggcggccgtcggggggtttatcgcggcggcgacactcgccgtggcaccgcccaagaaccgccgcaacccgcctccagctgttcctggtttacccataatcggaaatctgcatcaattgaaagaaaagaagcctcatcagaccttcacaaaatgggctgaaatttatggcccaatctacactataaggaccggggcttcttccgtagttgtgctcaattcaactgaagtagccaaggaggcgatggttgcaaaattctcatccatatctacccgaaagctatccaaagcactaacagtgcttagtcatgataaatccatggttgctaccagcgacagtggtgatttccacaaaatggggaagcgttatatcatgttaagcatgctgggtacttctgcacagaaacaatttcgtgacacaagagatatgatcatcaataacatgttaagcactttccatcaactggtgaaagatgacccacatgctcctctgatattcagagatgttttcaaggatgagctattccggttgtccatgatccagagcttaggagaggatgtgagttcagtctatgtggatgaatttgggagggacatttcgaaggaagaaatctacaatgctactgtgactgacatgatgatgtgcgcaattgaggtcgactggagagatttcttcccctacctcagctgggttccaaacaagagcttcgaaacaagagtgtttactacagaatctagacgaactgcggtgatgcgcgccttgatcaagcagcagaaggaaaggattgtgcgtggagaggcaaggacatgctatctggacttcttgctggcagagaacacactgacagatgagcaactaatgatgctagtgtgggaggcactcatagaggctgcagatactaccttggtcaccacagaatgggccatgtatgagcttgccaagaaccctgacaaacaggcaagaaatattgaacggctttaccaagagatccgggaggtgtgcggcgacgaggcggtcaccgaggagcacctgccgtggctgccgtacctcaatgccgtcttccaggagacgctgcgccgccactcccctgtcccgctcatacctccgaggttcgtcaacgaggacaccatgctcgccggctacgatgtccccgccggcaccgagatggtgatcaacctgtatgggtgcaacatgaacaagaaggagtgggagtcgccggaggagtgggcgccggagaggttcgccggtgggaggttcaaggtggcggacatgtacaagacgatggcgttcggcgccgggaggagggtctgcgcagggagcctgcaggcgactcacatcgcgtgcgccgccatcgcgcgcttcgtgcaggagtttgggtggaggctgagggagggtgacgaggagaaggtggacaccgtgcagctcaccgcctacaagctccacccgcttcatgtccacctcacgcccagaggaaggatgtga

SEQ ID NO: 43652 - DNA, 1608 bp, Oryza sativa
  Clone ID: PAT_MRT4530_46789C.1
atggaggcgttcgtgtcgggcggcgcgggcggggtcggggcggcggcggtggtcggagtgttcgtcgccgcggcggtggtcggagggttcgttgccgcggtcgcgctcgccgagagggccggcgtgatcgcgccaaggaaacgccccaacgcgcccccagctgttcctggtttacccataatcggaaatctgcatcaattgaaagaaaagaagcctcatcagaccttcacaaaatgggctgaaatttatggcccaatctacaccataaggattggggcttcttccgtagttgtgctcaattcaactgaagtagccaaggaggcgatggttgcaaaattctcatcaatatctacccgaaagctatccaaagcactgacagtgcttactcgtgataaatccatggttgctaccagcgactatggtgatttccacaaaatggtgaagcgttatgtcatgtcaagcacgctgggtacttctgcacagaaaaaatttcgtgacacaagagatatgatgatcaataacatgttaagcactttccataaactggtgaaagatgacccacatgttcctctgatatttagagatgttttcaaggatgagctattccggttgtccatgatccagagcttaggagaggatgtgagttcagtctacgtggatgaatttgggagggacatttcgaaggaagaaatctacaacgccactgtgaccgacatgatgatgtgcgcaattgaggttgattggagagacttcttctcctacctcagctgggttccaaacaagagcttcgaaacaagagtgtttaccgcagaagctagacgaaccgcggtgatgcgcgccttgatcaagcaacagaaggaaaggattgtgcgtggagaggcaaagatatgctatctggacttcttgctggcagagaacacactgacagatgagcaactgacgatgctggtgtgggaggaactcatagaggctgcagatactaccttggtcgccacagaatgggccatgcaagaaatatttgttactctgttccagctcattcttggcattatcaacccaaacgttttcttttgggcgtttttctggtcatgccaggaacggctttaccaagaaatccgggaggtgtgcggcgacgagacggtcaccgaggagcacctgccgcggctgccgtacctcaacgccgtcttccacgagacgctgcgccgccactcccctgtcccgctcatacccccgaggttcgtccacgaggacaccaagcttgcaggctacgacgtccccgccggcaccgagatggtgatcaacctgtacgggtgcaacatgaacaagaaggagtgggagtcgccggaggagtgggtgccagagaggttcaccggcgggaggttggaggtggcagacatgtacaagacgatggcgttcggcgccgggaggagggcctgcgcagggagcctacaggtgatgcacatcgcgtgcaccgccatcgcgcgcttcgtgcaggagttcgggtggaggctgacggagggcgacgaggagaaggtggacaccgtgcagttcaccgcctacaagctccacccgcttcatgtccacctcacgcccagaggaaggatgtga

SEQ ID NO: 43653 - DNA, 6084 bp, Oryza sativa
  Clone ID: PAT_MRT4530_4678C.1
atggccgagcgagcaaaggcgcacgacctctctccgagtgtgagcggcgacgacggggagctgaatccacgccgtcgagctcgtactcccccatctcctccgcgcccaagccctaagcagggggaggcgcttgagaaggtcgacaagtccatggcatcaccagtcgcaggtggtgcaggaggacggcaagatggggagcgccgcctcctcgtctacggcgacggcagcacgcctcagggtgcgcttcaggctgctggcgcgctcctacgacatccgcctgtcgtccatgacccggagtctccagcccaacgatggctggaagatgtggccaacttggtcatgacggcacagcagcgcctgggtgctggtggacggtccgccaccaccaagacctccggtgccgctaccaccggctccgtgtcgtcaaggcggagggcgcggcgagcggcggcggctgcacgtcattcggctgctactccctcgtcgacaccttcgactcgggaggatcagcatggggagccggatgcccgcctcaacatcgagcgccggcgtaatagccggcgtaccccccgtgcaacggagggtgcctcctcgtccagagtgtcacctcgacatggacgtgaggaccagccctccgtgcctccggctggtggtgttggctgtagagcctttgtggcgagtcttcggaatgtccgttggcccccaaggttccggcccaccatcaccgagaagtacgatgggagcgtcaaccccaccgagtttctccaggtctatacgaccgggatcgaggccgctgggggtgacgacagggtcatggcgaacttctttcccatggccctaaaaggacaggcgcggggttggctgatgaacctgccacccgcgtcggtccactcctgggaagatttgtgccaacagttcaccatgaacttccaaggcacatatccgcgcccaggcgaagaagcggacttgcatgcagtacagcgaggcgatgatgagtcgcttcgctcgtacattcagcggttttgccaagtccgcaatactataccttgcatccctgcacacgcggtgatctacgcgttcagggggggcgtgcggcacaaccgcatgctcgaaaagatcgcttccaaagagccccagactaccgcggagctttttcagctcgcggaccgagtggctcgtaaagaggaagcgtggacatggaactcctccagttccggagtggcagcttcggccgcccccggatccgccgctcagacagggcggcgtgacaggaggaggaagaagaggtcggaccgttccggcgatgagggtcatgtcctcgccgtcgagggcgctccgcgggccacccgaaaggggaggcctgcgagcgacaaaaagaaagaggctggtactcccagcaaggagcgccccgccggcaggtggtgctccgtccacaacacctccctccacgatctcgcggactgtcgcgcagtcaaaaatttggctgagcgaacgaggaagtgggaggaggacaggaggcaggaacgccgtgagggcaagtccccggcggttccttccggcaaacggcgaagtgaggccaagcagaaggcccccgctgttgacatcgatgatggtgatgatgacctaggtttccaagaacctggggccaccattgccaccgtcgatggaggagcgtgtgctcacgtctctcgccggagcttcaaggctatgaagcgagagcttctggccatggcccctactcatgaggcgacgcgtcgggcgcggtggtcggaggttgctctcactttcgaccagaccgaccacccaccgtgcattgcccggggagggcaggttgcgatggtggtttcccccaccatctgcaacgtgaagttgggacgtgtcctcatcgatggaggagcggccctcaacatcctttcccccgcggcttttgatgccatcaaggccccggggatggtgctccgaccgtcccagccgattatcggtgtgacgccggggcacacgtggccattaggtcacatcgacctaccggtcaccttcggtggacccgccaacttccgcacggagcgggtgagcttcgatgtggcggacctcagtctgccctacaacgcggtcctagggaggcccgcgttggtgaagttcatggcggcggtccactacgcctacctccagatgaagatgccgggccccggtggccccatctctgtccatggcgatcttaaggtcgcgctcgcttgcatggagcagcgtgccgaccgcctcgctgctgcatccaagcccgagggtggtgacgagaggcctggcccctctgcccccaccgccccgaggcagcggatcgctacatgcgacgaggtcccggaagacgcgctcgtctccttcctgcgggcaaacgctgacgtcttcgcatggagaccagcggacatgcccggggttcccagggaggtgattgagcaccgtctcgccgtgcggccgggcgcgaggccggtccggcagaaagtgcggcggcaggccccggaacgtcaagtcttcatccgcgaggaggtggcgagacttctggaggccggattcatccgtgaggtcatccatccggagtggctggcgaacccggtggtcgttcccaaggcgaacggcaagcttcggatgtgcatcgactacaccgaccttaacaaggcatgtcctaaggatccttaccccctgcctcgcatagatcagatcgtcgactccactgcggggtgcgaccttttgtgttttctagatgcatactctggttaccatcagattcgcatggctagggaggatgaggaaaaaactgcgttcattacccccgtaggaacctattgttatacatcaatgcccttcgggttaaagaatgcaggtcctacttttcagcgtactactcgaatttctttgggtagccaaataggacgtaatgttgaggcgtatgtcgatgacttggttgtaaaaacgcgcaaccaagaaactttactttcagatctagcggaaacttttgagaacctccgctctgcccgcataaagctgaaccccgataagtgtgtgtttggtgtacctgcgggcaagcttctcgggttcttggtctctgcccgaggcattgaggccaaccccgagaagattcgagctatcgagcggatgcgcccccccagcaaacttagggatgtgcaatgcgtcaccggttgcatggccgccctaagtcgtttcatatcaaggctgggagagaaggcgctacccttgtttaagctcctcaagcgctcggggccgtttacttggacggaggaagcagaacatgccctcactcggttaaaggcatatctcagctctcccccggttctagtcgctccagagccaaatgagtccctgctactttacttagcagcgaccccccaagtagttagtgcagcgttggttgtggagcgcgatgaggacaatcctcatttcgtgcacccccattctgtgctaacttggcccgggagcaagcagggaggagaggcccccgagtcaaacggtggcctaaggcccctgacgaccggagacggccctctgcccgctcgtcagacggtgctgggtgcccccgaccctcaggaaggccccgaggccactgcgggaaggccgcacttaacgccctctgaccccgaggctaaccctgtgctgactcgacccgggaaagagcagggagaagaggcccccgagccgaacggaggccagaggcccctgacgaccggagttggccctttgcccgcttgtccgacgatgccaggagcccccgacccccaggacggccccgaggccactgagggaaggccgcccctttcatcctccgaccccaaggtcatcggtacagaagacaagtgcgccccgaaaggccacttgaacgaagaacgccccggggatacggcccctagcagagaggatcggccccaccgaagggtgcagcggcctgtctactttgttagtgaggccctccgggacgccaggacccgatacccacaggcccagaagatgctttacgctattctgatggcctcgaggaaactgcgccattatttccaggcgcatcgggtcactgtggttacgtcttaccccctcggtcaaatcttgcataatcgagagggtacaggacgagtggtaaaatgggcaatagagctttctgagttcgatctgcactttgaaccacgccacgctatcaagagccaggccctcgccgattttgtggcagagtggaccccggctccagagaccgtctcaatgcccgaggccagcacgaacccctcacagctgcctcacgccgcccactgggtgatgcaattcgacggttctctgtctcttcagggcgccggtgcaggggtcacgttgacctctccaaacggagacgtcctcagatacttggtccgtctcgactttcgagcgactaacaatatggcagagtacgagggactccttgccggactcagagtggcagctggactggggatccgccgcctcttggtgttaggcgactcccagctagtcgttaaccaggtctgtaaggagtaccggtgctctgacccgcagatggatgcctacgtgcgccaagtacggcgtatggagcgccattttgacgggatagagcttcggcatgtgcccagacgggataatgtgattgccgacgaactctcacggctcgcgtcctcgcgagcccagaccccaccgggcgcctttgaagaaaggcttacccagccgtcggcgcgacccgatcccttaggggagacggatgtgcctgaccggcccccgaggcccgtcggagtccaggcctcgggacccgaagggagcgcttcaagctcccttagattgattgcttggatctctgagatccaaacatacctcacagataagactctacctgaggaccgcgaagggagtgaacgcgtacaacgcatttccaaacgctacgtgctggtagaagggaccctctatcggcgcgcggctaacggaatcctcctgaagtgcattcctcaggaacaaggcgttgagcttcttgcagacatccatgagggcgagtgcggagcccattccgcctcacgtaccctggttggcaaggcctttcgtcaaggattttattggccgacagctctcaatgacgcagtcgatctggtccggcgatgcagagcgtgtcagttccacgccaagcaaatccatcagccggcccaggccctgcagatcataccactgtcatggccatttgctgtctgggggcttgatatcctgggaccgttcaaacgggccccgggcgggtttgagtatctgtatgttgcgatcgacaagttcactaagaggcccgaggcttatccggttgtcaagatcgataagcactctgctcttaaattcattaagggcatcacggcccgttttggagtgcctaaccgtattattacggataatggcacccaattcactagtgaactcttcggcgactactgcgaagacatgggcatcaagctctgcttcgcctcacctgcccaccccagaagcaatggccaagtggagcgcgccaatgcagaaatcctcaaaggccttaaaaccaagaccttcaatattctcaagaagcacggcgattcatggatcgaggagttgccagcggtgctctgggcgaaccgaaccacaccaagccgagcgaccggggaaacgcctttcttcctcgtctacggcgcagaagcggttctcccatctgagctcaccctgaggtctcctcgggccaccatgtactgcgaggctgatcaagatcagcttcgtagagatgacctcgactacttggaagagcgaaggcggcgcgcggccctccgagccgcgcgctaccagcagagcctgcggcgctaccatcagcgccacgtccgggcccgatcactctgcgtcgacgacctcgtcctacgccgcgtccaaacgcgtgctggattgagcaagctctcaccaatgtgggagggtccgtatcgagtgatcggtgtcccccggccgggctcggtacggctggccacgggcgacggcacggagctgccaaacccgtggaacatcgaacaccttcgtcgcttctacccctaa

SEQ ID NO: 43654 - DNA, 1968 bp, Oryza sativa
  Clone ID: PAT_MRT4530_46790C.1
gcacgaggccccccgtcccctcgagccggtgctccgggccggggcggccgcggcgggcgcgcgcgcgcgcgggggccatggaggcgttcgtgccgggtggcgcgggggcggcggcgccggcggtggcggcggtcggagggttcgttgccgcggccgcgctcgccgagagggccggcgtgatcgcgccaaggaaacgcaccaacgcgcccccagctgttcctggtttacccattatcggaaatctgcatcaactgaaagaaaagaagcctcatcagacctttgcaaaatgggctgaaatttacgggccaatctacactataagaaccggggcttcttctgtagttgtgctcaattcaactgaagtagccaaggaggcgatggttgcaaaattctcatccatatctacccgaaagctatccaaagcactgacagtgcttactcgtgataaatccatggttgctaccagcgactattgtgatttccacaaaatggtgaagcgttatgtcatgtcaagcatgttgggtacttctgcacagaaacaatttcgtgacataagagatatgatgatccataacatgttaagcacttttcataaactggtgaaagatgacccacatgctcctctgatattcagagatgttttcaaggatgagctattccggttgtccatgatccagagcttaggagaggatgtgagttcagtctatgtggatgaatttgggagggacatttcgaaggaagaaatctacaatgctactgtgaccgacatgatgatgtgcgcaattgaggtcgactggagagatttcttcccctacctcagctgggttccaaacaagagcttcgaaacaagagtgtttactacagaaactagacgaactgcggtgatgcgcgccttgatcaagcagcagaaggaaaggattgtgcgtggagaggcaaagacatgctatctggacttcttgctggcagagaacacactgacagatgagcaactgatgatgctagtgtgggaggcactcatagaggctgcagatactaccttggtcaccacagaatgggccatgtatgagcttgccaagaaccctgacaaacaggcaagaaatattgttactctgttccagctcattgttggcattcttggcattatcaaccaaagctttttatttttggccttcttcttgttgtcatgccaggaacggctttaccaagagatccgggaggtgtgcggcgacgagacggtcaccgaggagcacctcccacggctgccgtacctcaacgccgtcttccacgagacgctgcgccgccactcccctgtcccgctcatacctccgaggttcgtccacgaggacaccaagctcgctggctacgacgtccccgccggcaccgagatggtgatcaacctgtacgggtgcaacatgaacaggaaggagtgggagtcgccggaggagtgggtgccggagaggttcgccggcgggaggctcgaggtggcggacatgtacaagacgatggcgttcggcgccgggaggagggcctgcgcggggagcctgcaggcgactcacatcgcgtgcgccgccgtcgcgcgcttcgtgcaggagttcgggtggaggctgagggagggtgacgaggagaaggtggacaccgtgcagctcaccgcctacaagctccacccgcttcatgtccacctcacgcgcagaggaaggatgtgatccatttcttgcaggcgggcccggtcctcgttgaatgaggatctttggttgtcttccgcgtggtcgtacttgttgctgtggctccgggccttccgttggaccccagcagtcgtttggtgattgggcgtggaccttgctccgtccagctgattgggtgggatcttgcttgttactggtggacgtggtctgtgcgttcggcgggaggacccttgtattgtggggcgtcgtagactattaattttttatcaaaaaaaaaaaaaaaaaa

SEQ ID NO: 43655 - DNA, 178 bp, Oryza sativa
  Clone ID: PAT_MRT4530_46791C.1
cgcacccgagcgggagcatgccggcggcgggcgggagcgatcagatgggcggtcggtggcggcggggcggcaggtgggcgggcgtctgaggaggcttgctgcgtcgacctattcgcctcttcccaccttgaagcacccatatcacgaccaccagcacgaggagtgcaaccaaccctag

SEQ ID NO: 43656 - DNA, 506 bp, Oryza sativa
  unsure (1)..(506): unsure at all n locations
  Clone ID: PAT_MRT4530_46792C.1
ccttcaattgtgaantgagaaatacctgtaagtgaaggcctaagctcaaggaataatttgttctttttgaaaacaaaaagctcataggtagaatgttcaccaccaggcaagtcaaggagcgaagtatggggacagtgtgggctcggaagatctttgccagcttgtgttttgacttctgaaggcatgcacagatgtgaagatatgaacttctaggggagctttataaaccgagaatagttaaggcaatacttgatttactttggactgcaaattacttgatcggataatcaatatgtggccagctttacacagattggctttgatgaatcattaaagggctatcggcggggtgaatatctagctttgaacatgatttgttttgattcctgttgcaacgcacgggcacacaactagtaagttgtaaattcatcttgcaagcagctgggagaaatgttttgaacaatgaatggaatgcaaaatctttctaataaaaaaaaaaaaaaaaa

SEQ ID NO: 43657 - DNA, 3192 bp, Oryza sativa
  Clone ID: PAT_MRT4530_46793C.1
atggccgccgcctcgccgctcgcgcggctcctcgcggcgctgctcgccgtggcggccgcggcgacggccgccaccgcgctcaccgacgacgtgctcgcgctggtggtcttcaagacgggggtcgccgacccgatgggcaggctcgccgcgtggacggaggacgacgaccgcccttgctcctggcccggggtcgggtgcgacgcgcgggcggggcgggtgacgtcgctgtccctcccgggggcgtcgctctccggccgcctcccgcgcgcgctgctccgcctcgacgcgctcgcctccctctccctgccgcggaacaacctctccggcccggtgctcccgggcctcctcgccgcgctcccccgcctccgctccctcgacctctcctccaaccgcctcgccgcccccgtccccgccgagctcttcgcgcaatgccgctccatccgcgcgctctccctcgcgcgcaacgagctctccggctacatcccgcccgccgtcacgtcgtgcgcgtcgctcgtgtccctcaacctctcctccaaccgcctcgctggccccatccctgatggcctctggtcgttgccttcgctccggtcgcttgacctctcgggcaacgagctctccgggagtgtccccggaggcttccccgggagcagctcgttgcgggcggtggacttgagccggaaccttctcgccggggagataccggcggacgtcggggaggcggcgctcctcaagtcgctggatgtcgggcacaatctcttcaccggcgggttgccggagtcgctgcgtcggctgtccgcgctgcggttcctcggcgtcggcggcaatgcgctcgccggggaggtgccgtcgtggatcggggagatgtgggcgctggagcggctggacttgtccgggaaccgcttctcgggcgccatccctgacgccatcgcgaaatgcaagaagatggtggaggcggacctcagccggaacgcgctcgccggcgagctcccctggtgggtgttcggcctgccgctgcagcgcgtctcggtcgctgggaacaagttgtacgggtgggtcaaggtgccggcggatgccgcgctggcgctgcgcgcgctggacctgtcgagcaacgggttctccggcgggatcccgccgcagatcaccgcttttgcgggtttgcagtatctcaacatgtcctcgaattccttcgcgaggcagctgcccgccggcattggcgggatgaggctgctcgaggtgctcgatgtgagcgccaaccgtctcgacggcggcgtgcccccggagattggcggcgcagtggcgctccgggagctgcggctggggcggaattcattcaccggccacatcccgtcgcagattgggaattgcagttcccttgttgcattggatttgtcacacaataatctcacagggtcaatccctagcaccgtaggcaatctgaccagtcttgaggtggttgatctatcaaagaacaagctgaatgggaccttaccagtggagctatctaatctgcccagcttgcgcatctttgatgtctcccacaacttactatcaggggacctcccaaatagtcgtttcttcgacaacatccctgaaaccttcttgtctgacaatcagggcctctgcagctcgcggaagaacaactcctgcattgctatcatgccaaagcccatagtgctcaatcccaactcctcgacaaacccattgtcgcaggccacaccgactgcccctagcagcatgcaccacaagaagatcatattaagtgtttccaccctcattgccattgcaggtggtggtaccattattatcggggtgatcatcatatctgttctcaaccgtcgtgcccgtgccaccacctctcggtcagctcctgctactgcattatctgatgactatcttagccaatccccagagaatgatgctagctcagggaagcttgttatgtttggaaaaggcagcccagagttcagcgctggtgggcatgccttgttgaataaggattgtgagcttggtcgaggaggttttggtgcagtctacaagacagtgctgagagatggccaaccggtggccatcaagaagctcaccgtttctagcttggtcaagtcgaaggatgactttgagagacaggtgaagttgctcagcaaagtgcgacaccacaatgtcgtcgcactaagaggcttctactggacttcgtcgctgcagctcctcatctatgattacctgcccggaggaaatttgcacaaacacctccatgagtgcacggaggacaactcgctctcttggatggaaaggtttgacattatccttggagttgctaggggtctgacacatctgcaccagcgtgggatcatccattacaatctcaagtccagcaatgttctgctggacagcaatggtgaacccagggtaggtgactatggtcttgccaagctgttgccgatgctggaccggtatgtgctgagcagtaagatccagagtgcactggggtacatggcaccagaatttgcttgcaagactgtgaagattaccgagaagtgcgacgtgtatggctttggagtgctcgtgctggaggtcttgacgggcaggaggccggttgagtacttggaagatgatgtagttgtgctatgtgatttggtgagaagcgcactggaggaaggtaggctggaggactgcatggatcccaggttatgtggtgaattccccatggaagaggccttgccaatcatcaagctgggccttgtttgcacctcgcgggttccatcgaaccggccagacatgggcgaagtggtgaacattcttgagctggtgaggagtcctcaggatagtctagaggacgagctggtttaatgtctcttgccaactctgttctgaacggttctaggcgtttttttttcctttttgttttaatgagatgcatatagtgtaatgctaggtgggaagaaatcagagaaagcaaagagtggtatggatcgtgaaatgcttgtagtttgcttgaagttttagggaggttgcaaggctattttgttgcttctcggcaattctttgatccatttcttggaagagttgttttgccatgtgggcattgcctcggtgccgcatatgacgtctcacaccgtgacacagtcatacaactgaatgaatgatgatgttcttagggtgtgtttaagaataagaggattgaggtgattggaaaga

SEQ ID NO: 43658 - DNA, 380 bp, Oryza sativa
  Clone ID: PAT_MRT4530_46794C.1
gtggatgaagaatctatattgaaggctttgcctgcagatcttcgccgtgacattaagcgtcacctgggcctggatcttgtttgccgggtcccttttttctcccagatggatggtcaacttctggatgccatctgtgagcgtcttgtatcttccttgagcacagtgggcacatacattgtccgtgaaggtgacccagtgacagagatgctttttatcattcgtgggaaactggaaagctccactactgatggtggccggacgggcttcttcaattctataacgctcaaaactggcgatttttgtggtgaagaattgcttggatgggctcttgttcccaagcctactgtcaacctgccatcctccaccaagacggtgaagac

SEQ ID NO: 43659 - DNA, 291 bp, Oryza sativa
  Clone ID: PAT_MRT4530_46795C.1
gttgatcaaacgtcggttacatgtactctagtaataaggcgacgaatactatcgagcgcaaacactaacaagaagaaccatcgactgaacaactatgtcagccaaaaatcagctacaccgacatacccgctgccgcgatgccggacgttcgtgaagcgccagtgcgtcgcccccggcacggtggacgagcaggtccggcgaggctgctgccggcagctcgccgacttcggccgcagctgtgcatgtgcgatgcgctcaaccacatgctgaagatcatctacaggtagagcg

SEQ ID NO: 43660 - DNA, 288 bp, Oryza sativa
  unsure (1)..(288): unsure at all n locations
  Clone ID: PAT_MRT4530_46796C.1
ctggtggacggacacggagcagatagccagcaggagtccgtcgccgttggtgggaacgagacggttgccgcgcccgcngaagnatcggagctccggggaggcgaggcgcaggcgcaggtgggcgcgtnttcttcgtcgggggcacccnttncgcgctctaccgggagggatccgcggggcggggagtngtggggaacgccgcgagnncancggggatgggcgccgaggaggaggaggagccggcntcggccgtcgggagggaggggggagnaggaggaggcggggcga

SEQ ID NO: 43661 - DNA, 2725 bp, Oryza sativa
  Clone ID: PAT_MRT4530_46797C.1
atggagctcaggaagcagaggaccgtgagattccacgaggagagagcaaaaccaactatacccactcaccagaagcaggctgggctagctactagtaagcttggcctggggatttcggagaagaacaagatttttctagcagggaatgagctttggtacaagaaaattattgacccatcaagtgatttcatcttgacatggaactatgtcctccgtattgcatgcttcgtggctctatttatggatccactgtacttctatgtacctaaaatctattatggcactccgaattcatgtatcgggagagatacacgcctagccatcatcgttactgtcttccgatcaattaccgaccttttttatgttcttcaaattataataaagttcaggactgcatatattaatccaagctccacgttaggggttttcagtcgaggagaccttgtcacagatcctggtaatatcgcaaagcattatttgagatctagctttgtggttgatctagtggcttccttgcctctaccgcagttaaaaagggcatctgcacttttgtacctgaagttcgagatcatcatctggtctgtgataccatccgtcaaatattctttgtcagaacatgacgatgatatactgcttctgattgctctttttcagtatgttctaagattatacctcgtattttcattgaactctaaaattgttgaagttaccggagcattttcaaagacggcttggcaaggagctgcttacaatcttctattatacatgattgctagtcatgttttaggagcattatggtacttgctatctgttgatcgccagaccgcgtgttgggaaaaatactgtagcaaagaagcgggctgccaaaacagatacctggcctgtgatatacagtctgattcaaattggaaaatcagcaccgctatcttcaataaatgtgatgccactaacaaaacaattgattttgactttggtatgttcacaccattattatcaaatcaagctcccgatcagggcttcctgaagaagttcttctattgcctttggtggggtttgcagaatctaagttgctatgggcagactctgactgtgagtacttatattggtgagacgctgtatgctatattcttggcagttcttggtctcgtcttgtttgcgcatttgattggaaatgtgcagacctacctgcaatctatcactgcaagagttgaggagtggagaataaagcaaagagatacggaagaatggatgaggcatcggcaacttcctcagaaactaagagaaagagtgagaagatttgttcactacaagtggcttgcgactagaggtgtggatgaagaatctatattgaaggctttgcctgcagatcttcgccgtgacattaagcgtcacctttgcctggatcttgtttgccgggttatttcattgccatttatcaccacatttgaatggacaaaagaagttgacacaagaaaaataaataggagaggaaatgagaaaaatgacaggattggaacatgcaccttttccttcttcccttttttggccagttacacacttgatactggcagttttttagtaacaggacaattgcaattgcctgttaatgtatctcttatggatggtcaacttctggatgccatctgtgagcgtcttgtatcttccttgagcacagtgggcacatacattgtccgtgaaggtgacccagtgacagagatgctttttatcattcgtgggaaactggaaagctccactactgatggtggccggacgggcttcttcaattctataacgctcaaaactggcgatttttgtggtgaagaattgcttggatgggctcttgttcccaagcctactgtcaacctgccatcctccaccaggacggtgaagacaatcgttgaagtggaggcatttgccctccgagctgaagatctcaagtttgttgcgagccaattcaggcggctccacagcaggaagttgcaacacacatttcgctactactctcaccactggaggacatgggccgcttgtttcatccaagcagcttggcgccgctacaagaggaggaggctggccaaggacctaagcataagggagtcattcttttccaggagatcattcgaagatgatggttcccctgagcacagccttgtgttgaatgcagtcaggaaaggagcccatatcattaaagaacttcctaagtttaggaagccttctgagccagacttctcagctgagcatgacgactaagcggagagtagcttacattatttgctactgtgaaatcaccgtttgcgctgcaaatccttctgcctgttgtcgttccatgatcacgcttcagagtttgggttgacaggtaactgattgttgataggtgaaatgctgaagctcaacttaacacggtgaaagcatcattggtggtatgggagttaggatcttggagacagaatgatagatagtaaccacgttaattttcttttcttcttggtgattgtgttgctgtaggcttagcttagtgattattgtttaccctttggtcatgctgttaatccagttgtaaacttgtaattgtgttggatattgttggcaacagcttgggacctcgtagtagcatattgttgtattttgactcgccgagcaaattctagcgtctcggcgagtacaccatgtttctcgtttttgagtgtatatgtaaatcacaggaggaacactgaaattgtttttc

SEQ ID NO: 43662 - DNA, 369 bp, Oryza sativa
  Clone ID: PAT_MRT4530_46798C.1
ggtcgcgtggtcggtcgcgtgggccgacccgtttggttgacagggacggcagggcggaccccggggcgcccgcgggggcggacccccggccccacccggaaataccggaccagaacctggaggcgaccacagcttaccctagggggaggggaataaaagcttggcgcaaccatggacaacaccggacccggggggaaacaaggagccgctgcccaggccacacaaacgacgggccggacgcacaaaagggaaagccgggggcgcccaaggcgcgcgcaaaaacaacttgatgggcgcgcggcaaaagccaattttccaatcgggaaaccgggggggccagctgcataaaagacaggcccacccctctgg

SEQ ID NO: 43663 - DNA, 3116 bp, Oryza sativa
  Clone ID: PAT_MRT4530_46799C.1
atgcttatgttccctctcgcaaggccgccgggtcgccattatgccgacgccacgctccgcagggggcagtggcggctctcccaccacctccgcgccgcagccgcagccacaagcggtggtggtgcgcccgacgtgttcgatgcagtgcctgccctggacgaccgcatgcggtgcagcgcgctgctcagggagcgcgcagtgggaggggaccactacgggtgcacctccctcctccggtggatgctggcccggggacttcgccccaacaggctggcgctcgctgcggcggtcaaatcgtcgtccgcgctccccgactgccgcggcggcgcggcgctcgggaggtgcctccacgggctcgctgtcaaggtcgggtacgcggatggcgcggtggtggcaaaggcggtcatggacatgtacgggaggatcgggtctctcgcggacgcccacacggtgtttgatgagatgagctgctccgacgcggtatgtaggaacatcctgatcactgcctcctcccgtgctggactttacaacgatgtgttccatttgttccgtgcaatgcttgctagtggtgtagatgagagcatgccaactgcagtcacggtcgctgtcgtccttccggtgtgcgcaaagttgagggtgctgagggctggaaggagtatccacggctatgtcatcaagactggtttggagtttgacactctgtctggaaatgctttggtatcaatgtacgcaaaatgtggtgggagcatagctatggatgatgcgcatctagcattttctacaatttgttgcaaggatgtggtttcatggaactcaatcattgcgggatattctgagaatgggttgtttgaagaagcacttgcactgtttggtcagatgatctcagaggaatgccttccaaactattcaacattggctaatgttcttcccttctgttcacttgtggagtatgggaggcactatgggaaagaaattcatggttttgtggtccgacatggtttagaaatggatatatctgttagcaatgcgctgatggcacattattccaaggtttgtgaaatgagggctgtagaatcaatatttagaagttcaaaaatgggagatatcgttacatggaacactgtcattgcgggatatgtgatgaatcggtatccctcaagggcattgaaactgtttcaggggcttttgtttgccggaatggctcctgattctgtttctcttatcagcctacttactgcttgtgcccaagtaggcaatctcagagtgggcatcagggttcatggttatatttttcgacatcctgaacttcttcaagaaacatcattaatgaatgctcttgtcagcttttacagccagtgtgacaggtttgatgctgcttttcgatcttttatcactattcagaacaaagactcagtatcctggaacgcaattctctctgcttgtgcaaacagtgaacaccatattgaacagttctttagactccttggtgaaatgtggcatgacgtaactcagtgggactctgtcacgatcttgaatattatccgcatgagtacgttctgtgggattaagatggttcaagaatctcatggatattccttgcgagtcggttatactggtgattcttcagttgcgaatgctattctagacgcatatgcaaagtgtggctacctgcatgatgcagaaacactcttcagaagccttgcaggacggaacattgttactggcaatacaatgatttcttgctacctaaaaaataattgtgtggaggatgctgagatgaccttcaaccatatggctgagaaagatttaactacatggaatctgatgagccggttgtatgcacagaacgatttgtgtgatcaagctttttgcttgttccatcagttgcaatctgaaggactaaaccctgatactataagcattacaaatattctttcggcttgcatccatctgagctcagtgcaacttgtgaaacaatgccatggttacatgcttagagcatccctagaagatattcatctagaaggagcacttcttgatgcatactctaagtgtgggaacatagccaatgcatacaacctctttcaagttagcctgcataaggaccttgtcatattcacagccatgataggagcttatgcaatgcatggaatggcagaaaaggcggtagaactattctccaaaatgcttacacttgacattaagccagaccatgtagttctgactgctcttctgtcagcctgcagtcatgcagggcttgtcgatgctggaattaagattttcaagtccatcagagagatctatggagttgaaccaacagaagagcactgtgcatgcatggttgaccttcttgcccgttctgggcgtctccaagatgcatacagttttgcgttggatatgcctcctcatgtggtcaatgccaatgcatggggctccttgctaggggcatgcaaggtccatggagaggtcaaaattggtcagcttgcagctgatcgcttgttctccatggaggctgaggacatcgggaactatgtgatcatgtcaaacatctttgcggctgatgataaatgggaaagtgttgagcatgtcaggaaactgatgaaatccaaggatatgaaaaaacctgcaggatgcagctggattgaggttgagaagacacggcatttgtttgtagccagtgatgttcagcaccaagataggttttctatctacgatgtgttgggaagtttgtatcagcaaatcagaggacaacaaatggagacatctgcttacaaccgtgaaccggttggagtgtctttgtcagctcaaaaaaagattggttcctggcgatgcattgttcttcctgagacagagaaaagggttgaagatctatattcagatgtgaaaaaggcgaagatgaacttgatgaaggaatctaaacattcagtagatccagaagctcccttgctcatagcatagacccttgaattttattgaatagttagtttatgaaactttcgttactgaatatatgccagggtgtgcccccaagaatcacgtagggttggaatttgaaatgaaatagtaccaaacaaatttggagagtgatgaacttttttctttagtgactaatgttt

SEQ ID NO: 43664 - DNA, 1560 bp, Oryza sativa
  Clone ID: PAT_MRT4530_4679C.1
atggccatctcctccgccctctccttcctctccgatcgcaagcgccctatcgttgtttccgtcttcctcttcctcctcctctcatccctcttcctcctcttcagccccgcacctgccgcgctccctttcttctccttcccctcctctcacctctcctcctcctcctcctctcctatcgccgccacgccgccacccctgactccagtttccgtccccgccaacgcatcttcaccggagaccccagttgacgcgtccggtgggagcaacgctggcgccaccgcacccaccagggacgctcctcagccagatcgcagtcggagcacgccccctgccgccgtcggagtgcgtggatcggcgggcaccaacggaaccagcaggggcgtctcggccggcggcgatggagcaggagcagcagcggcggcggcggcaggtgtggcggtgccgtcgtgggaggtgtgcgaggtggggaagggagtggtggccgcggactacataccgtgcctggacaacgtgaaggcggtgaaggcgttgaagtcgctgcgtcacatggagcaccgggagcgccactgcccgacggcgccgaggccgaggtgcctcgtgccgctgcccacggggtaccggtcacccttgccgtggccgcgcagccgtgacatggagtacctgacaaagagtctgttgtgtgccgtgtggtttggctgtgccgtgatcggtgatactcaacccaaactagcatgtttaagcatccaaatttggtacaataatgtccctcatccaaagttagtggaatacaagaaggaccagaactgggttaggaagtctggcaattattttgttttccctggaggtggaactcaatttaaagctggtgtgactaaatacattcgatttattcaacagctttggtggatacttgctgacaggaatgtcattactatgtctgttgcacccaaagatgagcatgaagctcagatacagtttgctctcgaacgtggaattccagcattgttggcagtgattggaacacaaaaacttccattccctgataattcatttgatgtgatccattgtgcaaggtgtagggtccactggtatgcaccacttgatagttgcctcttgttacctgctgtgtcaagttcaggtgaaggaaacagctggcccatttcctggccagaaaggcttaacatcaaatactcaactatatctgacaacgcttctactcagttttctcaagaaaaatttgattctgacacaaagcactggaaggaccttgtttcagaagtatatttcaatgagtttgcagttaattggtctaccgttcgcaatgtcatggatatgaatgctggttttggagggtgtgatatcattgaagtagcagcagaaattgataggatacttagacctggaaaatggttcgtgttgcaagatactgagcaagtgattagaaaaatggatccagttcttcgctctttgcactacaggactgcaattgtgaagcaacaatttcttgtcgctacaaagggcttctggcgcccatacagtgcaggttctgagtcaagatga

SEQ ID NO: 43665 - DNA, 1019 bp, Oryza sativa
  unsure (1)..(1019): unsure at all n locations
  Clone ID: PAT_MRT4530_467C.1
gctccaatcccaatctccgatctcccgccgccgccgctgaagaactgaacaatctacttctagtatctcaagagaattctgagatcaagcctgccatggccgcagcgccgccgctcgccgcggggctccggcccgccatggcggcggcacaggcgccggtcgtcgccgcggcgtggggcgtgggcgctaggaggggggcggccttgtcgtcgtcggctcggtgtagggcgcttcggttgtcgagaggaggaggaggagggcgagatgggtgggtgcctcctcccgtggtggggaggatgccgccgcggacgctctccgtcangtgcgccgccagcaatgggaggattacacaacaagagttcactgagatggcatggcaatcgattgtttcgtcgcctgaagtagcgaaagagagtaaacaccagattgtggagactgaacatctgatgtaatcattgctgggagcaaaggaatgggctcgcccgtcgaatcttttctaaagctgggagttgataatacaaggcttcttgatgccacagagaagttcatccagcggcagcctaaggtgttggggtgaagatcctggttccatgttgggacgtgacttggaagctctgatacaaagagcacgagactttaaaaaagagtatggtgattcatttgtttcggttgagcatctggtccttggttttgcggaggataaacgatttggaagacagctgttcaaggatttccagattaccgtacagtccttgaaaactgccattgaatcaataagagggaaacaaaatgtgattgatcaagatcctgagggaaaatatgaagctttggacaagtatggcaaggacctcacagccatggcacgtcaggggaaacttgacccggttataggaagagatgatgaaattcgtagatgcattcaaattttatctcggagaacaaagataatccagttttgattggtgaacctggtgtngggaaaactgctatagctgaagggctttctcagaggatagtnc

SEQ ID NO: 43666 - DNA, 584 bp, Oryza sativa
  Clone ID: PAT_MRT4530_46800C.1
tttctcctgatttggaacaaggttcagtctgtccagctgcaaccgagaatggaggacagactcccttggcggtggtccagcaacaccgccttctcatcctcatcgggttattagtccttcttggtaggctagcacttcgcttcgcctgtgcccaccttctctggtatgtgcaagcgccactgaagtgctggttttttctttggttggcggttcagaagcactgctggactactgatgtaatgctgcgccaaatcatgaatagacattccttctctcccttcaacacacaagaacaagagacgacgaaccacgttatcattgtgtgcatctttgcccactaggtttggctccaggctctctccagtgtggggtggggggctgttgcccgaaaccgccaccacatgctccaggattggtagttacttgtgagatggagccttgcacctgaccattattgtccttttgactcgctcgtgttgttagtctcttggcagctttggaagaagcacaatgcccgcatcttcaacgacatgctgtcctcagttccgcttgttgtagtgagaatcatccaagagagctagcgt

SEQ ID NO: 43667 - DNA, 2003 bp, Oryza sativa
  Clone ID: PAT_MRT4530_46801C.1
gcacagtgcacaccgcaacgagcgacacggtagacatggcgacccgagccagagcaacgatccttctcctcctcgcggctgtcctcttcgccgcggcggcggcggcctcaggtgaggatcgccgccgcgagacatcactgcggcgctgcctgcagcggtgcgagcaggaccggccgccgtacgagcgggcccggtgcgtgcaggagtgcaaagaccagcaacagcagcagcaggaacggcgacgagagcacggcgggcacgacgacgaccgccgcgaccgcgaccggcgcggcgaggggtcgtcggaggaggaggacgagggccgcgagcgcggaagccggcggcggccgtacgtgttcggccggcgcagcttccggcaagtcgtccgcagcgaccagggctccgtcaggctcctcccgccgttccaccaggcgtccagcctcctgcgcggcatcaagaactaccgcgtcgcggtgctcgaggcgaacccgcgctccttcgtcatgccgacccacacggacgcgcactgcatctgctacgtcgcccaaggcgagggagtggtggcgatcatcgagaacggcgagaagtggtcgtacgccatccggcaaggcgacgtcttcgtggcgccggcggggacgatcaattacttggccaacaccgacggccggaggaagctgatcgttaccaagattctccataccatctccgtccctggccagatccagttcttcttcgccccaggcgggaggaacccggagtcattcttgtcgagcttcagcaagggcgtgcagagagctgctttcaagatttcggaggagaagctggagaagctgctggggaagcaggacaagggggtgatcatccgcgcgtcggaggagcaggtgcgggagctgcggcgccacgcgtcggagggcggccacggcccgcactggccgctgccgccgttcggcgagtcgtcgcgcggccccttcaacatcctggagcagaggcccaggttcgccaaccgccacggccgcctctacgaggccgacgcccgcagcttccacgacctcgccgagcacgacatccgcgtcgccgtcgtcaacatcaccgcgggatccatgaacgcgccgttctacaacacccggtcggtcaaggtcgcctacgtcctggacggcgagggggaggccgagatcgtgtgcccgcacctgtcgcgcggcggccgcgcggcgagagcgaggagcgccggcgcgagcgcggcaagggcaagtggcgtgaggaggaagaggaggaggaggagcagcagaaggggcaggaggaggaagaggaagaacaagtcggccaggggtacgagacgatccgtgcgcggctgtcgcgcggcacggtgttcgtcgtcccctccggccacccgatcgtggtgacgtcgtcccgcgacagcaccctccagatcgtctgcttcgacgtccacgccaacaacaacgagaggatgtacctcgccgggatgaacagcgtgctgaagaagctggacccgcaggccaaggagctggcgttcgcggcgagcgcgagggaggtggacgagctgctcaacgcgcagcaggagtccgcgttcctcgccggcccggagaagagcggccgccgcggcgaggaatcggaggacgaagaccgccgccgccgccgcagccaccgtgggcgcggcgacgaggcggtggagacgctcctgaggatggcagccgctgcggtgtgacgcgctccgcggcgacgagcggcgtggcgagtgcgtgagcggtgagccatccaagctgccgggcgagcgagatgcgggagtttggcctcgacgcgtgtgttgtagcttttgtaattaggcgggaacgagtgaaataagtgggtggctccctctgtgcgactatctccatataagtaaatactgctacataagtaagagtttgcaaaaaaaaaaaaaaaaaaaaaaaaaaaaaaaaagaaaaaaaaaaaaaaaaaaaaaaaaaaaggggccggacaatttc

SEQ ID NO: 43668 - DNA, 825 bp, Oryza sativa
  Clone ID: PAT_MRT4530_46802C.1
tgccgacccacacggacgcgcactgcatctgctacgtcgcccaaggcgagggagtggtggcgatcatcgagaacggcgagaagtggtcgtacgccatccggcaaggcgacgtcttcgtggcgccggcggggacgatcaattacttggccaacaccgacggccggaggaagctgatcgttaccaagattctccataccatctccgtccctggccagatccagttcttcttcgccccaggcgggaggaacccggagtcattcttgtcgagcttcagcaagggcgtgcagagagctgctttcaaggcacgtagtagcattaatccgatcaatctgtcacttaagtacttgattaacatattggttatacagcaaggataataagttaataactaattaagttgatatcgacgtacgagttgtgtggtgcaatgtttagatttcggaggagaagctggagaagctgctggggaagcaggacaagggggtgatcatccgcgcgtcggaggagcaggtgcgggagctgcggcgccacgcgtcggagggcggccacggcccgcactggccgctgccgccgttcggcgagtcgtcgcgcggccccttcaacatcctggagcagaggcccaggttcgccaaccgccacggccgcctctacgaggccgacgcccgcagcttccacgacctcgccgagcacgacatccgcgtcgccgtcgtcaacatcaccgcgggatccatgaacgcgccgttctacaacacccggtcggtcaaggtcgcctacgtcctggacggcgagggggaggccgagatcgtgtgcccgcacctgtcgcgc

SEQ ID NO: 43669 - DNA, 204 bp, Oryza sativa
  Clone ID: PAT_MRT4530_46803C.1
atgagcacatatgatcgtcagatcaatactacacccggcggattcaaatcctcaaacaggaatagggtattacctctcatcgagaggatgctgctggacggcgatccgcaggcggcgcggcaccgcagcgtgctggagaagtacagggagaaggcgaagataagcattgagtccatccaatccaaagtagagacaggagaatga

SEQ ID NO: 43670 - DNA, 345 bp, Oryza sativa
  Clone ID: PAT_MRT4530_46804C.1
atggggatatcgcctccccgcgacgcccaagggcaggacgtgagtgttcgggaagaggcactctacgctactgctttgatagcaccggataagcggcacgaacttggacgtgatctcgtcgttgctctatcctatatgcgcgacgcagagtcgcgcatatgcactttgtgggttagtgaggaacacgttgtaaccacgccctccctcccgatggatcaattcgtccccaccgagccctgctccaccgaccacctctctttgccatcttgtccttttcgtgttctcaccaccgtgccacatgtccacacttggggtggaacgaggaggaggaaaggagagaagtag

SEQ ID NO: 43671 - DNA, 150 bp, Oryza sativa
  Clone ID: PAT_MRT4530_46805C.1
atgaaaaccgcaggaagctcggtggttttcgctatgggcatcatccgacagaatgctgtaagtgcaggtcatgccagctcgaaaagtgttacggagaaggcactcgagcagggtaaaattcgtgatcacatccaagacgagcattactga

SEQ ID NO: 43672 - DNA, 373 bp, Oryza sativa
  Clone ID: PAT_MRT4530_46806C.1
ttggttccttcctctgttcctccatgtgagcgggtggcatataggcgatgcgcgggaggtgacccactccctacaccgtcggtagccggttcggcgccctcgggtggcgcctctgccgaccaagaggaagccgaaaccatagcgagtgggaatgcgcggaacacctcctccaccgtcagacgaatccactttcccattcactgcctacttactacactgaccccgccgtcgcttctaataccaggcgcgtcggctcaaccggggttctgcagatctaccacagtggcgagcaacggtcggttcgacgaccttgggctccacctccttcaccgctttgtggcttcaccgtctccatcctgcatggatttggcaa

SEQ ID NO: 43673 - DNA, 585 bp, Oryza sativa
  Clone ID: PAT_MRT4530_46807C.1
gcacgaggggatgttgtgggggatgtgatgtccgtacttcagatgtcctccatcaccctccagcttcccattgtcaaatgtcattggtggagggagcagccacagaaagggcgttacttctctttcgccaggtgttgctggtggatctcgatgcaaataggctgcagagtctgctgcgctagaagcactctctccttggcatgtttcagtggtcggtcatttgcggcagatggcaagtagtagacgattgcaactgccctgcaggaacttttttaccagtctgcaagaagcttaaagtgcttctccgaacagtttgttgtgttgatgcaattttgggatctctgactgacggcacctttaacatagtaatttcacggatgcctctcgtggcacccgtcgttggagtttgacagtgcgggtttgctgtcggggaggctggtccagttgctttgtcttaacttttctttgctacctgctccttccagttccctgacaaagtgacctgcttcagtacaccccgcatttgttttctgacagcacaagtgccgtctgagaggggctgaggtccctcgttggttccttata

SEQ ID NO: 43674 - DNA, 305 bp, Oryza sativa
  Clone ID: PAT_MRT4530_46808C.1
tttttggttttttttttttttttgttttttttttttttttttttttttttttttttttttttttttttttttttttttgggaaaaccaaaattttattgggggggggttcaaaaatgctctggggattaatttacaaggggcccgggggttaggcggggattttggttttacgggccctggtttaccggccccgaaaaaaaaaccggtgggggggggggaccccttgcaacaaccggggggcggggcgaaagaactgttggatgacttcctcggcattacggcgtcccccctcggtggaaacccc

SEQ ID NO: 43675 - DNA, 4992 bp, Oryza sativa
  Clone ID: PAT_MRT4530_46809C.1
atggccggcagcgttacccgtcgtggtttgagcatgactggcttcgtcttggagctgcgaggcatgtgcgtggtcttggggtatccacatggagtggattaccaggccaggccgctcccggagcaggagggtgaggatgcagagcctcacgctggttgggaggtcactgcagtgattctctccggctctcccgagcggacttcgctggcagtcaccgcgggtggggattccttccccgccgcttgccagaacgccgctctcctcgccatcggcacccttcaccagcgctacccggacgagttgcagcactcgccctaccgctaccacccccgtcgcggaggagccagcgaccacgccaccttccgagacgctagctcggaggatgacgctaccgtcgtgcatctggcacgcatggtggaggcgtacgacgcggctcgtatcgacttccaccagatggtgcgtcgtggcatggtggagaacaacatgaagatcctggagctgcgtcaggagaacctgcagctcaagaaggacctcgacgcgttggaggcgcagccgcaccagctcaaggtcgcccagggagagatcagccgtcccaagcgtcgccgcgtctgccgcagccagaagatcaccgcccgcaagagcacctccaggcccgagcttgtccgtcagtccctggcgtggacttgcttcgtcgagacccctcgtgccgagcctgcgcccgtggttccccaggagggggaagcctccggcgttggtagctcggagggtgcgctgttgctcaccttccgtcctggcccgtcgcagcggcaaccacccgagggcagcaaccccaacccccaaggcaatccacctccaccaccaccaccagacaccaacgccattctcacccagatcctcgcccagcaagccaacatgatgaatgctttcctccaccacctccaaaatccaccacaacagaatgctccaccacctcctccccaacactccaaactcgccgaattcctccgcatccgcccacccaccttctctagctccaacaatcctgtagatgcgttggattggttgcatgccgtggggaagaagctagacacggtgcagtgcagcgacgaagagaaagtcatcttcgccgcccatcagctgcaaggacccgcatctctctggtgggaccatttccaggctgcgcagccagaagggcaaccgatcacttggactcgcttcaccgccgctttccggagaacccatgtgcccgctggagtcgtggctcttaagaaaaaggaattccgggagttgaagcaaggcaaccgctccgtgatggagtacttgcatgagttcaacaatctggcccgttacgcccctgaggatgtgcgggaagatgaggagaagcaagagaagttcctggcaggaatggaccccgagctgtccgttcgtctagtctctggggactacccggacttccaacgactggtggacaagagcatccgcttggaagccaagcacaaggagctggagtcgcacaagcgccgcttggcgaacatccgcaatcaacagggtgctaaccagagggtccgctacaccaatccctacccagggggatcctcctcgcagcagcagcagcagcagcagcagcaacctcgctccgcgcctcgacctcaattcgtggtgcgcgtcccacagcagcaaccgcagcagaatcagcaagggactcgtgcaccccgtcctcctacgccagctgggcagcccgttcaaggccgcagggacgcttcaggtccgcagcggctgtgcttcaactgcttcgagcccgggcactttgcggataaatgcccaaagccaaggcgtcagcaaggccaagcgcctccccgccccaacaacggtggcaaggatgtcatccgtggtcgcgtgaaccacgtgacggccgaggacgtgctgacaactccggacgtcatcgttggagtagtggattgcgcgagacgcactgtcactctgtaccgaggtccggaacaaccggttgttttctttgcacccccaacctctgtccgaagttcagaactgcatcagataggactgtcagaaatccccatcgtcagagagttcggagatgtatttccggaagaactacctggtatgccgcccaagcgagagattgagttccggatagatcttgctccaggaaccactcctctgtacaagcgaccctaccgtatggcagcaaatgaactggccgaagtaaagaaacagttggaagagttgaaagaaaaggggtacatacgtccgagtacttccccatggggtgctcctgtgatttttgtggagaagaaagacaaaacgaagaggatgtgcgttgactacagagctctcaatgaagttaccatcaaaaacaagtaccctcttcctcgaatcgatgatctgttcgaccagcttaaaggtgccactgtattctccaagattgatcttcgttccggatatcaccaattacgtattcgtgaagaagatattccgaagaccgcattcaccacgcgatatgggctgtatgaattcacggtgatgtcgttcggtttgaccaatgctcctgccttcttcatgaacttgatgaacaaagtgttcatggaatacttggataagttcgttgtggttttcatcgacgacattctgatatactcacaaacagaagaagaccatcagcaccatctccgtctggtattgggaaagctgcgggaacatcaattgtatgccaagcttagcaagtgtgagttctggttgtccgaagtcaaattcttggggcacgtgatatctgctaaaggagttgctgtggatcccgaaacagtgaccgccgtcaccgaatggaagcaacccaagacagtcactcaaattcgcagtttcttgggtttggcaggatactaccggagattcatcgagaacttctccaagatcgctcgacccatgacacagttgttgaagaaagaagagaaatttgtgtggagcccgcagtgcgagaaggcgttccaaactctcaaggaaaagctggtttcctcgccagtgttaatcttgccggatactcgcaaggatttcatggtgtattgtgatgcttcgcgccaaggattggggtgcgtgctcatgcaggacggtcatgtggtagcctatgcctcacgtcagctacgtcctcatgaaggcaactaccctacgcatgacttggagctagcagcggtggttcatgctctaaaaatttggcggcactatctcattgggaaccgctgtgaaatatatactgaccataagagtttgaaatacatcttcacccagtcggatctgaatcttcggcaaaggagatggttagaactcatcaaggattatgatgtgggaatacactatcatcctggtaaggccaacgtggttgccgacgctctaagtcgaaagagccactgcaacactctcaacgtccgaggcattccacccgagcttaatcaacagatggaagccctgaacctaagcatagttggtcgcggattcttggctgcgttggaagccaagcctaccttgctcgatcaaatccgcgaggctcagaagaatgatccggacatgcatggactcctcaagaatatgaaacagggtaaagccgcaggtttcacagaggatgaacacggaactctatggaacggaaagcgggtgtgcgttcccgataacagagaacttaaacagctgatacttcaggaagctcacgaaagtccttattccattcacccgggcagtaccaagatgtacttagacttgaaggagaaatactggtgggtcagcatgaagcgggaaattgcagagtttgtggctctatgtgatgtgtgccagcgtgtcaaggcagaacaccaacgaccggccggacttctccaacctctccaagtgccggaatggaaatgggatgaaattgggatggatttcatcaccggacttccaaaaacccaaggaggatatgattccatatgggtagttgtggatcgattaaccaaggtagctcgattcattcctgtgaagaccacctatggagggaacaaactagcggagctctacttcgctaggatcgtgagtctccatggtattcccaagaaaatcgtatctgataggggaagccaattcacctctcacttttggaagaagctccaagaagagctgggtactcgattgaatttcagcaccgcgtatcacccgcagacagatggacagaccgagcgtctgaatcagattctagaagatatgctccgcgcatgtgtcctagatttcgggaagacttgggataagagtctcccctatgccgagttctcctacaataacagctatcaagccagcatacaaatggcaccctatgaagcgttgtacgggcgcaaatgccggacaccgctattgtgggaccaagtcggagaaagccaagtgttcgggactgatatcctgagagaagctgaagctaaagtcagaatcattcgggataatctaaaggtggcacaatctcggcagaaaagttatgcagataaccgtcgtcgtgacttggaattcgcagtggatgattttgtgtaccttcgggtcacgccattgcgaggcgtgcacaggtttcagacgaaagggaagctcgcacctcggtatgtgggtcccttccgtatcatcgctcgacgcggagaagttgcttaccagctggagttgcccgcctccttgggcaacgtgcatgatgtgttccatgtgtcgcaactcaagaaatgtctccgagtgccatccgagcaggccaactcagagcaaattgaagtccgcgaagacctgacctatgtggagaggccagtgaaaatcctggacaccatggagcgcaggaccaggaaccgagtaatccgtttttgcaaggtccagtggagcaaccacgccgaagaagaagctacttgggagcgcgaagacgagctgaaggcagcccatcctgatctcttcgccagttcttccgaatctcggggtcgagattccgtttaa

SEQ ID NO: 43676 - DNA, 150 bp, Oryza sativa
  Clone ID: PAT_MRT4530_4680C.1
atggcgcacggccatgaccgtgatacggtggctccgatgtcaagcatccaaatcattcgaagatgcgaaatcttaaatcttatgaagggttcgttgcatagaaccttcggtgaagccagcgccaatccgaaatgcagctggagattataa

SEQ ID NO: 43677 - DNA, 1443 bp, Oryza sativa
  Clone ID: PAT_MRT4530_46810C.1
tcggatctgaatcttcggcaaaggagatggttagaactcatcaaggattatgatgtgggaattcactatcaccctggtaaggctaacgtggttgccgacgctctaagtcggaagagccattgcaatactctcaacgtccgaggcattccacccgagcttaatcaacagatggaagccctgaacctaaacatagttggtcgtggatttttggccgcgctagaagcccagcccaccttgctcgatcaaatccgcgaggctcagaagaatgatccggacatgcatggactcctcaagaatatgaaacagggtaaagccgctggtttcacagaggatgaacacggaaccttatggaacggaaagcgggagaaatactggtgggtcagcatgaagcgggaaattgcagagtttgtggctctatgtgatgtgtgccagcgtgtcaaggcagaacaccaacgaccggccggacttctccaacctctccaagtgccagaatggaaatgggatgaaattgggatggatttcatcaccggccttccaaaaacccaaggtgggtatgattctatatgggtaatagtggatcgattaaccaaggtagctcgatttattcctgtgaagaccacctatggagggaataaactagcggagctctacttcgctaggatcgtgagtctccatggcgttcccaagaaaatcgtatctgataggggaagccaattcacctctcacttttggaagaagctccaagaagagctgggtactcgattgaatttcagcaccgcatatcacccgcagacagatggacagaccgagcgtctaaatcagatcctagaagatatgctccgcgcatgtgtcctggacttcgggaagacttgggataagagtctcccctatgccgagttctcctacaataacagctaccaagccagcatacaaagggcaccctatgaagcgttgtacgggcgcaaatgccggacaccgctattgtgggaccaagtcggagaaagccaagtgttcgggactgatatcctgagagaagctgaagctaaaacaaaagggaagctcgcacctcggtatgtgggtcccatccgtatcactgctcgacgcggagaagtcgcctaccagctggagttgcccgcctccttgggcaacgtgcatgatgtgttccatgtgtcgcaactcaagaaatgtcttcgagtgccatccgagcaggccgactcagagcaaattgaagttcgcgaagacttgacctatgtggagaagccagtgaaaatcctggacgccatggagcgcaggaccaggaaccgagtaatccgtttttgcaaggtccagtggagcaaccacgccgaagaagaagctacttgggagcgcgaagacgagctgaaggcagcccatcccgatctcttcgccagttcttccgaatctcggggtcgagattccgtttaa

SEQ ID NO: 43678 - DNA, 777 bp, Oryza sativa
  Clone ID: PAT_MRT4530_46811C.1
atgttcctggatctggagttgcttggtgttgctgctgcttggagaagattggaagacgaagaggacgactggctacttgactgcttcttgttgcttgttggatttggtgaattggatggacaccacgaggaggcggcggttgtctacggcgtcatcgtctacggtggcgccggtcgtcttttgctgcagccgcgagccgcgccgccgcaccaccaccgtgccggctgcagctctgttttcgcggggccgctgctccaccttcgcgctggccgctgttcttgcacgagtgcgccgcgttgccgcccgccctcatcagactgccccgggcgccgcgtgccgcgccgccgcaccaccaccgcgccggccgctgctcttgcacgagtgcgctgccctacgtcgccggccacctgcatcaggccacacagccaccgcgagttcttgcaccagcaagttctttcatcggactcaaaggagccaagactgggctttcgcccggcaaccacccttgaggggtcacctcctccaccgccggccgcgcctctctgcgccaagccggcctcctccaccggacgtgcctctcgcgccaagccggcctccatctccgccgcccgcgcctctcgcgccaagcctgcctccatctccgccgcccgcgcctctcgcaccgagccggcctccgctgccatcggctgcgcttctctacgccaagccggtctccgacccctccaccaaatgatgccgcgccgaccagatgcagccgtctcccacgccctcggctag

SEQ ID NO: 43679 - DNA, 1743 bp, Oryza sativa
  Clone ID: PAT_MRT4530_46812C.1
atggtcgccggcggtgaccatcggggcgcgggcgcgtcgctcccgtcggccgtgccggcgaggccgccttcgggcgcgccctcgcggctgccaggtgggcccggccgtcagccgcccgcgcccgcgggtgcggctgacgcgcgggacccacggcgccgaccgccgccagccgcgtgcgcccggtccaccgtggaccgtggggctgacgcgtgggccccacttcccgtggacccgatggccggcagcgttacccgtcgtggtttggacatgactggcttcgtcttggagctgcggggcatgtgcgtggtcttgggatatccacatggggtggattaccaggccaggccgctcccggagcaggagggtgaggatgcagagcctcatgctggttgggaggtcactgcagtgatcctctccggctctcccgagcggacttcgctggcagtcaccgcgggtggagattccttccccgccgcttgccagaacgccgctctcctcgccatcggcacccttcaccagcgctacccggacgagttgcagcactcgccctatcgctaccaccctcgtcgcggaggagcccgcgaccacgccaccttccgagatgctagctcggaggatgacgctaccgtcgtgcatctggcacgcatggtggaggcatacgacgcggctcgtatcgacttccatcagatggtgcgccgtggcatggtcgagaacaacctgaagatcctggagctgcgtcaggagaacctgcagctcaagaaggacctcgacgcgttggaggcgcagctgcatcagctcaaggtcgcccaaggagaggacagccgccccaagcgccgccgcgtctgccgcagccagaagatcaccgcccgcaagagcacctccaggcccgagcttgttcgtcagtccctggcgtggacctgcttcgtcgagacccctcgtgccgagcctgcgcccgtggttccccaggggggggaagcatccggcgttggtagcacggaggatgcgctgttgctcaccttccgtcctggcccgtcgcagcggagaaatgttagcaccggtgaaagcaaccaacccgaaggcagcaaccccaacccccaaggcaatccacctccgccaccaccaccagacaccaacgccattctcacccaaatcctcgcccagcaagccaacatgatgaccgctttcctccaccacctccaaaatccgccacaacagaatgctccaccaccacccccacaacactccaagctcgccgaattcctccgcatccgcccacccaccttctctagctccaacaatcccgtggatgcgttggattggttgcatgccgtggggaagaagctggacactgtgcagtgcagtgatgaggagaaggtcatctttgccgcccatcagctgcaggggcctgcatctctatggtgggaccatttccaggctacgcagccagaggggcaacctatcacttgggcccgcttcaccgccgccttccggagaacccatgtgcccgccggagtcgtggctcttaagaagagggagttccgggagttgaagcaaggcaaccgctccgtgatggagtacttgcacgagttcaacaatctggcccggtacgctccggaggatgtgcaggaggacgaggagaaacaagagaagttcctggcaggaatggaccctgagctgtccgttcgcctagtctctggggactacccggacttgcaacgcctgttgggtgatttccggtcgtga

SEQ ID NO: 43680 - DNA, 124 bp, Oryza sativa
  Clone ID: PAT_MRT4530_46813C.1
gaccaacgacagagacggtcctgcgccctggtacggcagcaccgcatcggcctgcgcagtgcagcatcagggcaagtaccataataccacatatgttgcctctaagagtctcatattggattaa

SEQ ID NO: 43681 - DNA, 3384 bp, Oryza sativa
  Clone ID: PAT_MRT4530_46814C.1
atgacgtcaccgacggcggcggcggctcggctaggcagacggctcgggcggcgcacgctcaccggcgaacggcggcgctacggcacgaacggaggacaccaacgggtagcggacggcacggcgaacacaccgacgaccaaaacgacggcggagaagcaacggacggcgacggcgacgagaaggaagcggcggctaccttcgggttgtcgacggcgacgaagctccagcgggttccgacggctgcgaaggggcggacgaggacggcggcgacttggcgatgacgacggcggtcttcccgagcggcggcgacagctggagcgacggcggagcacggctgaagcggcggcggcgacggcgaagctagggcacacggcgctagagctactccggcgacgagaggcgaaggcgagggctgcgacggggtgtgacaatgtcattcggggccgtgtgaatcatgtgacggccgaggacgtgctgacaactccagacgtcatcgttgaacttcatcagatagaactgtcagaaattcccatcgtcagagagttcggagacgtgtttccggaagaactacccggtatgccgcctaagcgagagattgagttccgaatagatcttgctccaggaaccactcctctgcacaagcgaccctaccgtatggcagcaaatgaactagccgaagtaaagaaacagctggaagagttgaaagaaaaggggtacatacgtccgagtacttccccatggggtgctcctgtgatttttgtagagaagaaagacaagacgaagaggatgtgcgttgactacagagctctcaatgaagtcaccatcaaaaacaagtaccctcttccccggatcgatgatctgttcgatcagctcaaaggtgccactgtattctccaagattgatctccgttccggatatcaccaattacgtattcgtgaagaagatattccgaagaccgcattcaccacgcgatacgggctgtatgaattcacggtgatgtcgttcggtttgaccaatgcgcctgccttcttcatgaacttaatgaataaagtgttcatggaatacttggataagtttgttgtggttttcattgatgacattctgatatactcacaaccagaggaagaccatcagcaccatctccgtctggtgttgggaaagttgcgggaacatcaattgtatgccaagcttagcaagtgtgagttctggttgtccgaagtcaaattcttagggcacgtgatatctgctaaaggagttgctgtggatcccgaaacagtgaccgccgtcaccgattggaagcaacccaagacagtcactcaaattcgcagtttcttaggtttggcaggatactaccggaggttcatcgagaacttctccaaaatcgctcgacccatgacacagttgttgaagaaagaagagaaatttgtgtggagcccgcaatgcgagaaggcgtttcaaactctcaaggaaaagctggtttcctcgccagtgttaatcttgccggatacccgcaaggacttcatggtgtattgtgatgcttcgcgccaaggattggggtgcgtgctcatgcaggatggtcatgtggtagcctatgcctcacgtcagctacgacctcatgaaggcaactaccctacacatgacttggaattagccgcagtagttcatgctctaaaaatctggcggcactatctcattgggaatcgctgtgaaatctataccgaccataagagtctgaaatacatcttcactcagtcggacctgaatcttcggcaaaggagatggttagaactcatcaaggattatgatgtgggaattcactatcatcctggtaaggccaacgtggttgccgacgctctaagtcgaaagagtcattgcaacactcttaacgtccgtggcattccacccgaacttagtcaacaaatggaagccctgaacctaagcatagttggtcgtggattcttggctgcgttggaagccaagcctaccttgctcgatcaaatccgcgaggctcagaagaatgatccggacatgcatggactcctcaagaatatgaaacagggtaaagccgctggtttcacagaggatgaacacggaaccctatggaacggaaatcgggtatgcgttccagatagcagagaacttaaacagctgatacttcaggaagctcacgaaagtccttattcaatccaccctggcagtaccaagatgtacttagacttgaaggagaaatactggtgggttagcatgaagcgggaaattgcagagttcgtggctctgtgtgatgtgtgccagcgtgtcaaggcagagcaccagcgaccggccggactcctccaacctctccaagtgccagaatggaaatgggatgaaattgggatggatttcatcaccggacttccaaaaacccaaggcggatatgattctatatgggtagttgtggatcggttaaccaaggtggctcgattcattcctgtgaagaccacctatggagggaacaaactagcggagctctacttcgctaggatcgtgagtctccatggtattcccaagaaaatcgtatctgataggggaagccaattcacctctcacttttggaagaagctccaagaagagctgggtactcgattgaatttcagcaccgcctatcacccgcagacagatggacagaccgagcgtctaaatcagattctagaagatatgcttcgcgcatgtgtcctagacttcgggaagacttgggataagagtctcccctatgccgagttctcctacaataacagctatcaagccagcatacaaatggcaccctatgaagcgttgtatgggcgcaaatgccggacaccgctattgtgggaccaagttggagaaagccaagtgttcgggactgatatcctgagagaagctgaagctaaagtcagaatcattcgggataatctaaaggtggcacagtctcggcagaaaagttatgcagataaccgtcgccgtgatctggaattcgcagtggatgactttgtgtatcttcgggtcacgccattgcgaggtgtacacaggtttcagacaaaggggaagctcgcacctcggtatgtgggtcccttccgtatcattgctcggcgcggagaagtcgcttaccagctggagctgcccgcctccttgggcaacgtgcatgatgtgttccatgtgtcgcaactcaagaaatgtcttcgagtgccatcagagcaggctgactcagagcaaattgaagttcgcgaagacttgacctacgtggagaggccagtgaaaatcctggacaccatggagcgcaggaccaggaaccgagtaatccgttttgcaaggtccagtggagcaaccacgccgaagaagaagccacttgggagcgtgaagacgagctga

SEQ ID NO: 43682 - DNA, 2483 bp, Oryza sativa
  Clone ID: PAT_MRT4530_46815C.1
acaccaagaacttggatgtgatccttgggatgaattggttggctcaattccaaggggtagtggattgcgcgaggcgcactgtcactctgtaccgagggccggaacaaccggttgttttctttgcacccccaacctctgtcagaagttcagaactgcatcagatagggctgtcagaaatccccatagtcagagagttcggagacgtgtttccggaagaactacctggtatgccgcccaagcgagagattgagttccggatagatcttgctccaggaaccactcctctgcacaagcgaccctaccgtatggcagcaaatgaactagccgaagtaaagaaacagttggaagagttgaaagaaaaggggtacatacgtccgagtacttccccatggggtgctcctgtgatttttgtagagaagaaagacaagacgaagaggatgtgcgttgactacagagctctcaatgaagtcaccatcaaaaacaagtaccctcttccccggatcgatgatctgttcgatcagcttaaaggtgccactgtattctccaagattgatctccgttccggatatcaccaattacgtattcgtgaagaagatattccgaagaccgcattcactacgcgatatggactgtatgaattcacggtgatgtcgttcggcttgaccaatgctcctgccttcttcatgaacttgatgaacaaagtgttcatggaatacttggacaagtttgttgtggttttcatcgatgacattctgatatactcacaatcagaggaagaccatcagcaccatctccgtctggtgttgggaaagttgcgggaacatcaattgtatgccaagcttagcaagtgtgagttctggttgtccgaagtcaaattcttagggcacgtgatatctgctaaaggagttgctgtggatcccgaaacagtgaccgccgtcaccgattggaagcaacccaagacggtcactcagattcgcagtttcttgggtttggcaggatactaccggaggttcatcgagaacttctccaaaatcgctcgacccatgacacagttgttgaagaaagaagagaagtttgtgtggagcccgcaatgcgagaaggcgtttcaaactctcaaggaaaagctggtttcctcgccagtgttaatcttgccgaatactcgcaaggacttcatggtgtattgtgacgcttcgcgccaaggattggggtgcgtgctcatgcaggacggtcatgtggtagcctatgcttcacgtcagctacgacctcatgaaggcaactaccctacgcatgacttggagttagcagcggtggttcatgctctaaaaatctggcggcactatctcattgggaatcgctgtgaaatctataccgaccataagagcttgaaatacatcttcacccagtcggatctgaatcttcggcaaaggagatggttagaactcatcaaggattatgatgtgggaatacactatcatcctggtaaggccaacgtggttgccgacgctctaagtcggaagagccactgcaacactctcaacgtccgaggcattccacccgagcttaatcaacagatggaagccctgaacctaagcatagttggtcgcggattcttggctgcgttggaagccaagcctaccttgctcgatcaaatccgcgaggctcagaagaatgatccggacatgcatggactcctcaagaatatgaaacagggtaaagccgcaggtttcacagaggatgaacacggaaccttatggaacggaaagcgggtatgcgttccagatagcagagaacttaaacagctgatacttcaggaagctcacgaaagcccttattccattcacccgggcagtacaaagatgtatttagacttgaaggagaaatactggtgggttagcatgaagcgggaaattgcagagtttgtggccctatgtgatgtagctcgatttattcctgtgaagaccacctatggagggaacaaactagccgagctctacttcgccaggatcgtgagtctccatggcgttcccaagaaaatcgtatctgataggggaagccaattcacctctcatttctggaagaaactccaagaagagttgggaacccgattaaatttcagcaccgcgtatcacccgcagacagatgggcagaccgagcgtctaaatcagatcctagaagatatgcttcgcgcatgtgtcctagatttcgggaagacctgggataagagtctcccctatgccgagttctcctacaataacagttatcaagccagcatacaaatggcaccttataaagcgttgtacgggcgcaaatgccggacaccactattgtgggaccaagttggagaaagccaagtgttcgggactgatatcctgagagaagctgaagctaaagtcagaaccattcgggataatctaaaggggcacagtctcggcagaaaagttatgcagataaccgacgccggatctggaattcgcagtggatga

SEQ ID NO: 43683 - DNA, 1374 bp, Oryza sativa
  Clone ID: PAT_MRT4530_46816C.1
atggcgacaataccggaaggaggaagccttataatggaaggggatatcccaggtacaggactagagaaaatccctcttattccccaaaaaagaagtgagcttttagctcattcaaatagcaccgtgaatcttttggaaatgtctaggaatggcagaatcatagcaattaatgacaccggtaatccagttgttccacagaggatttgggttgaagcaaaatatacctttgtgttgttgctcgtgttgacccgttcgtctgaagcacagaaacggccgttatacaacgtcttggatttcaatgccactggagatggaaacacagatgatacaaaggcgttcctggcggcatgggaagagacctgcaacaatgaaggctggccgatcttgatcatccctggaggaaggacattcttgttgaaacaaattaaattcaacggttcctgcaagtcaccaataaagatacagatggatggtaacattgtggcaccaaactacatttgggcatcagaagcagacaaccttataaccttctacagtgtcaataacttgacattagatggaaatggtcagattgatggcaaaggtgccatctggtggacttgttatactgaaaagaaatgcgtctatcggcctgttatcctggcctttgctgcgtgtaacaatctatcggtgacgaatatacatctgacgaacagcgcagacaaacacatgactgtgtacaggtgcagccaggtacatgtgcacaatgtcaccatagttgcaccaggcgacagccccaatacagacggcataaccatggcaatttctgatcatgtgtacatctcaaattgctctatccaaagtggagacgactgcgtgtcgatgctatcatacaccactgatgttaacatcactgacatcacatgtgggcctggccacggcatcagcgtgggaagccttggacgattcgaaacggcactggtggaacgaattacagtatccaactgtaactttattggaacaaagaatggtgtgaggatcaaatcatggcagggtggaatgggtcaagcaacggggttcatttttgaaaacatcaacatgactgcagtcgaaagtcccattatcatcgaccagttctattgtccccaaggaaactgtccattaaaggatggtggtgtggccataagtgacgcaagatttatcaatatccgtgggacatcctccgagcaagaggccatcaagatattgtgcagtcaaagtgtgcattgccaaggcatctacctcagtaatattaacctctcatgggaaaatcataccgccctagcaaacgccactattttaaatgcaaacggaactgttgagggatcagtggtaccaaaagttgttttttcataa

SEQ ID NO: 43684 - DNA, 5190 bp, Oryza sativa
  Clone ID: PAT_MRT4530_46817C.1
atggagcccgaatcctccgcgcgcgattcctctctctccggccgctctttccttcccccggcgctatttaaaccctccccgagctccgctctttcgtttccgccgctcgccgctcactctcgccgtcgaaatcgtcctcgcgccgtgctccttctccccgccgtcgccgccgtgcttcggttagccgccgccgtcgctccgctcttcctcccgactcggcgacccctccgtcggcttcgccgcatcgtcgccgaccccgtccgccgctccgcttcgcccgtcgaccgccggagcaccgtcgtcatcgtcatcccgaaccgcgccgccgccttcttcctctccgtccgccgttctcgtcgtcgccgttgtctcggggacggtcatgtggtagcctatgcctcacgtcagctacgacctcatgagggcaactaccctacgcatgacttggaattagccgcagtggttcatgctctaaaaatctggcggcactatctcattgggaaccgctgtgaaatatataccgatcataagagtttgaaatacatcttcacacagtcagatctgaatcttcggcaaaggagatggttagaactcatcaaggattatgatgtgggaatacactatcaccctgatggaagccctgaacctaaacatagttggtcgtggattttggccgcgttggaagccaagcccaccttgctcgatcaaatccgcgaggctcagaagaatgatccggacatgcatggactcctcaagaatatgaaacagggtaaagccgcaggtttcacagaggatgaacacggaaccttatggaacggaaagcgggagaaatactggtgggtcagcatgaagcgggaaattgcagagtttgtggctctatgtgatgtgtgccagcgtgtcaaggcagagcaccagcgaccggccggacttctccaacctctccaagtgccggaatggaaatgggatgaaattgggatggatttcatcaccggccttccaaaaacccaaggtggatatgattctatatgggtaattgtggaccgattaaccaaggtagctcgattcattcctgtgaagaccacctatggagggaataaactagcggagctctacttcgctaggatcgtgagtctccatggcattcccaagaaaatcgtatctgataggggaagccaattcacctctcacttttggaagaagctccaagaagagctgggtactcgattgaatttcagcaccgcctatcacccgcagacagatggacagaccgagcgtctaaatcagatcctagaagatatgctccgcgcatgtgtcctagatttcgggaagacttgggataagagtctcccctatgccgagttctcctacaataacagctaccaagccagcatacaaatggcaccctatgaagcgttgtacgggcgcaaatgccggacaccgctactgtgggaccaagtcggagaaagtcaagtgttcgggactgatatcctgagagaagctgaagctaaagtcaggatcattcgggataatctaaaggtggcacagtcccggcagaaaagttatgcagataaccgtcgtcgtgacttggaattcgcagtggatgactttgtgtatcttcgggtcacgccattgcgaggtgtgcacaggtttcagacaaaagggaagctcgcacctcggtatgtgggtcccttccgtatcatcgctcgacgtggagaagttgcttaccagctggagttgcccgcctccttgggcaacgtgcatgatgtgttccatgtgtcgcaactcaagaaatgtctccgagtgccatccgagcaggccaactcagagcaaattgaagttcgcgaagacctgacctacgtggagaggccagtgaaaatcctggacaccatggagcgcaggaccaggaaccgagtaatccgtttttgcaaggggggtaggcgggcccgcccgccactctcgctgacgggtggggcccacctgtcatcttcctcctcctgccgcgcccgccgccgcgcccgtgccctagcgccgccgccgccgcggattgcgccgcatcccgccgtccccgcgcgcattaaagagaggggaatcattccccgtgattccctctcccgtttcccccgatttcccctctctctctccctcggattcgttcgaatcgtggccgcattcgtcgccggcgcaatcaatggcggccgagatcttcgcggccggtttccttcctccccggccgcgctctccccctcccgttgctatatattcgttgcccgagctccgctcttccgtttccgccgctcaccgctcgctctcgccgtcggaatcgtgctagcgccgtgctcctctctctccgccgtcgccgtcgaccttcggttcgccgccgccgccgctccggacttcctccttactcggcgacccctccgtccgcttcgccgtgttgtcgccgaccccgtccgccgctccgcttcgcccgccgaccgccggagcaccgtcgccctcgtcatcccgagccgcgccgccgtcttcctccgctccgtccgccgtttccaccgccttcgccgtctcggggtgagccgaagaccgtcccgttcgtttccccctttcctcctctctctcgggtgccactccgccgcgccgttggtcgccggcggcgaccatcggggcgcgggtgcgcgccgctcccgtcggccgcgccggcgaggccgccctcgggcgcgccctcgcggctgccaagtgggcccggccgtcagccgcccgcgcccgcgggtgcggctgacgcgcgggacccacggcgccgaccgccgccagccgcgtgcgcccggtccaccgtggaccgagcggctgacgcgtgggccccacttcccgtggacccggaacgcctgttgggtgatttccggtcgtgacaaggcgctacccttgtttaagctcctcaagcgctctgggccgttcacttggacggaggaagctgaacatgcccttactcagttaaaggcatatctcagctctcccccggttctagtcgccccggagccaaatgagcccctgctactttacttagcggcgaccccccaagtagttagtgcagcgttggttgtggagcgcgatgaagacaatcctcattccgcgcacccccaccctgtgccgacttggcccgggagcaagcagggaggaaaggtccccgagtcgaacggtggcctaaggcccctgacgaccggagtcggccctctgcccgcttgtcaaacggtgctgggtgcccccgaccctcaggaaggccccgaggccactgagggaaggccgcacttatcgccctttggccccgaggctaaccctgtgctgactcgacccgggagagagcagggagaagaggcccccgagccgaaaggaggcctgaggcccctgacgaccggagctggccctttgcccgcttgtccgatgacgccaggagcccccgacccccaggacggccccgaggccactgtgggaaggccgctcctgtcgtcctccgaccccgaggtcatcggcacagaagacgagtgcgccccgaggggccacctggacgaagaacgccccgggggtacggcccctagcgaagaggatcggccccgccgaaaggtacagcggcctgtctactttgttagtgaggccctccgggacgccaagacccgatacccacaggcccagaagatgctttacgctattctgatggcctcgaggaaactgcgccattatttccaggcgcatcgggtcactgtggttacgtcttaccccctcggtcaaatcttgcataatcgagagggtacaggacgagtggtaaaatgggcaatcgagctttctgagttcgatctgcactttgaaccacgccacgctatcaagagccaggccctcgccgattttgtggcagagtggaccccggctccagagaccgtctcaatacccgaggccagcacgaacccctctcagctgcctcacaccgcccactgggtgatgcagttcgacggttctctgtctctccagggcgccgagtacgagggactccttgccggactcagggtggcagctggactggggatccgccgcctcttggtgttaggcgactcccagctggtcgttaaccaggaacaaggagttgagcttcttgctgacatccatgagggcgagtgcggagcccattccgcctcgcgcaccctggttggcaaggcctttcgtcaaggattttattggccgacagctctcaatgatgcagtcgatctggtccggcgatgcagagcgtgtcagttccacgccaggcaaatccatcagccggcccaggccctgcagatcataccactatcatggccatttgctgtctgggggcttgatatcctgggaccgttcaaacgggccccgggcgggtttgagtatctgtatgttgcgatcgacaagttcactaagtggcccgaggcttatccggttatcaagatcgataagcactctgctcttaaattcattaagggcatcacggcccgttttggagtgcctaaccgtattattacggataatggcacccaattcactagtgaactcttcggcgactactgcgaagacatgggcatcaagctctgcttcgcctcacctgcccaccccagaagcaatggccaagtggagcgtgccaatgcagaaatcctcaaaggccttaaaaccaagaccttcaatattctcaagaagcacggcgattcatggatcgaggagttgccagcggtgctctgggcaaaccgaaccacaccaagccgagcgaccggggaaacgcctttcttcctcgtctacggcgcagaagcggttctcccatccgagctcaccctgaggtctcctcgggccaccatgtactgcgaggctgatcaagatcagcttcgcagagatgacctcgactacttagaagagcgaaggcggcgcgcggccctccgagccgcgcgctaccagcagagcttgcggcgctaccatcagcgccacgtccgggcccgatcactctgcgtcgacgacctcgtcctacgccgcgtccaaacgcgtgctggattgagcaaactctcaccaatgtgggagggtccgtatcgagtgatcggtgtcccccggccgggctcggtacggctggccacgggcgacggcacggagctgcctaacccatggaacatcgaacaccttcgtcgcttctacccctga

SEQ ID NO: 43685 - DNA, 1372 bp, Oryza sativa
  Clone ID: PAT_MRT4530_46818C.1
gcccttaagatggttgaatgatagaaacaataatttaactggttcaataccaggttctattggcaatttacaatttcttgagcaactagatttgtcattcaaccatcttaagggcgagattcccacgaaaggaattttcaagaatgcaacagctttcaggattgatggaaatcagggcctttgtggtgggccacctgagttacacctacaagcatgtcctatcatggctttggtttcatctaagcacaagaaatcaataatactgaaagtagtgatcccaatagccagcattgtgtcaatttctatggtcaaatttactgtgcttatgtggagaagaaaacagaacagaaaatctttatctttgccctcgtttgctaggcatttgccccaagtttcatacaatatgattttcagagcaacaggggggttctcaacatccaatttgataggcaaaggaagatacagttatgtatatcgaggaaaattattcgaagatgataatatggttgctgtcaaagtattcaacctagagacaaggggagcacaaaagagcttcatcgcagaatgtaatactttgagaaatgttcggcatcgcaacctagttcctatcctaactgcatgtgcaagtattgattcaaaaggaaatgattttaaggccttggtttatgagtttatgggacgaggtgacttgcatgcattactacactcagcacaaaatgatgaaaacacttcatatctgaaccacattacattggctcagaggataagcattgtggtcgatgtatctgatgcgttggagtacctgcaccataacaaccaaggaactattgttcactgtgatctgaagcctagcaacatacttcttgatgatgatatgattgctcatgttgcagactttggacttgcaagattcaagaccggttcttcaacaccatctctaggggattcaagctcaacttattccctagcaataaagggaaccattggatatatcgcatcagaatgctcagagggcggtcaagtttcaactgcctcagatgtattcagctttggagttgttctcttggaattatttattcggagaaggccaacagaagacatgtttatggatggattgagcattgcaaagcatgtagagatgaacttccctgacaggatactagagattgttgatccccagctgcaacacgagctggacctttgccaagaaacaccaatggcagtcaaggagaaaggcatacactgcctgcgcagtgtgctaaatattggactctgctgcaccaagacaacaccgattgaacgcatcagcatgcaggaggttgctgccaagctacacggaatcaaagattcatatctcagaggaaactagcta

SEQ ID NO: 43686 - DNA, 6564 bp, Oryza sativa
  Clone ID: PAT_MRT4530_46819C.1
atgggcaacaatagatccaaactgacagactttctgagttctcgtccgccagagttctctcagaccgtcgagcccgtcgaggctgacgattggctgaaagatgttgatagaaaactcaacttagtgcagtgtactcctgttgagaagacgctctacgcctctcaccagctaagaggacctgctgcagattggtgggagaattactgcaatgcacaccctgaacccactaacattgcttgggatgagtttgctacggctttccgtgcagctcatgtgcctgaaagcaccattgatatgaagaaagaagaattcaacagacttaagcaaggcaacaacagtgtcaatgagtacctaagtctgttcaacaagttggctcggtacgcccctgaggaagtggacacagacaagaagaagatcaggaaggaaattcttcccgaggcgcacctcgccctcgctatggagaagaaaggcaccgatttctccatagacgatcaaggcacagtttggtgcggtccacgcatctgtgtaccggccaagaaggagttaagagatctcatcctaaaggaagctcatgagtccgcctactccattcatccaggaagtacgaagatgtaccaggatatcaaggcatacttctggtgggctagaatgaagcgagatgtcgcagaatatgtagccctgtgtgacatttgccaaagagtcaaggcagagcatcagaggccagctggtctgctgcaacctctaccgattcccgagtggaaatgggaagagatcggaatagatttcatcactggtttgccaagaacccctagcggccgccgccgcgtccgtgccctagcgccgccgccgccgcggattgcgccgcatcccgccgtccccgcgcgcattaaagagaggggaatcactccccgtgattccctctcccgtttcccccgttttcccctctctctctccctcggattcgtccggattcgtcccgcgaagttcgccggcgtcttcaatggcgcccgagatctccgcgcgcggtttcctctctccccggccgctctttccttcccccggcgctataaaatcgttgcccgagctccgctcttccgtttccgccgctcgccgctcgctctcgccgtcgatttcgtgcccgcgccgtgctccgccctctccgccatcgccgccgagctccgttccgccgccgccgccgctccggacttcctccttactcggcgacacccccgtccgcttcgccgtgttgccgccgaccccgtccgccgctccgcttcgcccgtcgaccgccggagcaccgtcgtcatcgtcatcccgaaccgcgccgccgtcttcctccgctccgtccgccgtttccaccgccttcgccgtcttggggtgagccgtggaccgctccgttcgtttccccctttcctcctctctctcgggtgccactccgccgcgccgttggtcgccggcggcgaccatcggggcgcgggtgcgcgccgctcccgtcggccgcgccggcgaggccgccctcgggcgcgccctcgcggctgccaagtgggcccggccgtcagccgcccgcgcccgcgggtgcggctgacgcgcgggacccacggcgccgaccgccgccagccgcgtgcgcccggtccaccgtggaccgagcggctgacgcatgggccccacttcccgtggacccgggcaaatgaaggctacacgagctgcggcccgatggccggcagcgttacccgtcgtggtttgggcatgactggcttcgtcttggagctgcgaggcatgtgcgtggtcttggggtatccacatggagtggattaccaggccaggccgctcccggagcaggagggtgaggatgcagagcctcacgctggttgggaggtcactgcagtgatcctctccggctctcccgagcggacttcgctggcagtcaccgcgggtggagactccttccccgccgcttgccagaacgccgctctcctcgccatcggcacccttcaccagcgctacccggacgagttgcagcactcgccctaccgctaccaccctcgtcgcggaggagcccgcgactacgccaccttccgagacgccagctcggaggatgacgccaccgtcgtgcatctggcacgcatggtggaggcgtacgacgcggctcgtatcgacttccaccagatggtgcgtcgtggcatggtggagaacaacatgaagatcctggagctgcgccaggagaacctgcagctcaagaaggacctcgacgcgttggaggcgcagctgcatcagctcaagatcgcccagggagaggacagccgtcccaagcgtcgccgcgtctgccgcagccagaagatcaccgcccgcaagagcacctccaggcccgagcttgttcgtcagtccctggcgtggacctgcttcgtcgagacccctcgtgccgagcctgcgcccgtggttccccaggagggggaagcctccggcgttggtagctcggagggtgcgctgttgctcaccttccgtcctggcccgtcgcagcgctctccttctctgtttgctggttctgtgtggggttttcagatggtgacgaccaggagaaatgttaacaccggtgaaggcaaccaacccgagggcagcaaccccaacccccaaggcaatccacctccaccaccaccaccagacaccaacgccattctcacccaaatcctcgcccagcaagccaacatgatgaatgctttcctccaccacctccaaaatccaccacaacagaatgctccaccaccacctccccaacactccaaactcgccgagttcctccgcatccgcccacctaccttctctagctccaacaatcccgtagatgcgttggattggttgcatgccgtggggaagaagctagacactgtgcagtgcagtgatgaagagaaagtcatcttcgccgcccaccagctgcaggggcccgcatctctatggtgggaccatttccaggccacgcagcccgaggggcagccgattacttgggctcgcttcaccgccgctttccggagaacccatgtgcccgccggagtcgtggctctcaagaaaagggaattccgggagttgaagcaaggcaaccgctccgtgatggagtatttgcatgagttcaacaatctagcccgttacgctccggaggatgtgcgggaagatgaggagaagcaagagaagttcttggcaggaatggaccctgagctgtccgttcgtctagtctctggggactatcctgattttcaacgactggtggacaagagcatccgcttggaagccaagcacaaggagctggagtcgcacaagcgccgcttggcgaacttccgcaatcagcagggtgctaaccagagggtccgctacactaatccctacccagggggatcctcctcgcagcagcaacaacagcagcagccacctcgcccagcgccccgacctcaattcgtggtgcgcgtcccacagccgcagcagcagcagaatcagcaagggactcgtgcgccccgtcctcctacgccagctgtgcagcccgttcaaggccgcagggacgcttcaggtccgcagcggctgtgcttcaactgcttcgagcccgggcactttacggataaatgcccgaagccaaggcgtcagcaaggccaagcgcctccccgctccaacaacggcgggaaggatgtcattcggggtcgtgtgaatcacgtgacggccgaggacgtgctgacaactccagacgtcatcgttgaaatccccatcgtcagagagttcggagacgtgtttccggaagaactacctggtatgccgcccaagcgagagattgagttccggatagatcttgctccaggaaccactcctctgtacaagcgaccctaccgtatggcagcaaatgaactggccgaagtaaagaaacaattggaagagttgaaagaaaaggggtacatacgtccgagtacttccccatggggtgctcctgtgatttttgtagagaagaaagacaagacgaagaggatgtgcgttgactacagagctcttaatgaagtcaccatcaaaaacaagtaccctcttccccggatcgatgatctgttcgaccagcttaaaggtgccactgtattctccaaggttgatcttcgttccggatatcaccaattacgtattcgtgaagaagatatcccgaagaccgcattcactacgcgatatggactgtatgaattcacggtgatgtcgttcggcttaaccaatgctcctgccttcttcatgaacttgatgaacaaagtgttcatggaatacttggacaagtttgttgtggttttcattgatgacattctgatatactcacaatcagaggaagaccatcagcaccatctccgtctggtgttgggaaagttgcgggaacatcaattgtatgccaagcttagcaagtgtgagttctggttgtccgaagtcaaattcttggggcacgtgatatctgctaaaggagttgctgtggaccccgaaacagtgaccgccgtcaccgattggaagcaacccaagacagttactcaagtccgcagtttcttaggtttggcaggatactaccggagattcatcgagaacttctccaaaatcgctcgacccatgacacagttgttgaagaaagaagagaagtttgtgtggagcccgcaatgcgagaaggcgttccaaactctcaaagaaaagctggacggtcatgtggtagcctatgcctcacgccagctacgtcctcatgaaggcaactaccctacgcatgacttggagttagcagcggtggttcatgctctaaaaatctggcggcactatctcattgggaaccgctgtgaaatatataccgaccataagagtttgaaatacatcttcacccagtcggatctgaatcttcggcaaagtagatggttagaacttatcaaagactatgatgtgggaattcactatcatcctggtaaggccaacgtggttgccgacgctctaagtcgaaagagccactgcaacactctcaacgtccgaggcattccacccgagcttaaccaacagatggaagccctgaacctaaacatagttggtcgtggattcttggccgcgttggaagccaagcccaccttgctcgatcaaatccgcgaggctcagaagaatgatccggacatgcatggactcctcaagaatatgaaacagggtaaagccgctggtttcacagaggatgaacacggaaccttatggaacggaaagcgggtgtgcgttcccgataacagagaacttaaacagctgatacttcaggaagctcacgaaagtccttattccattcacccgggcagtaccaagatgtacttagacttgaaggagaaatactggtgggtcagcatgaagcgggaaattgcagagtttgtggctctatgtgatgtgtgccagcgtgtcaaggcagaacaccaacgaccggccggacttctccaacctctccaagtaccggaatggaaatgggatgaaattgggatggatttcatcaccggccttccaaaaacccaaggtggatatgattctatatgggtaatagtggatcgattaaccaaggtagctcgattcattcctgtgaagaccacctatggagggaacaaactagcggagctctacatcgctaggatcgtgagtctccatggtattcccaagaaaatcgtatctgataggggaagccaattcacctctcacttttggaagaagctccaagaagagctgggtactcgattgaatttcagcaccgcctatcacccgcagacagatggacagaccgagcgtctaaatcagatcctagaagatatgcttcgcgcatgtgtcctagatttcgggaagacctgggataagagtctcccctatgccgagttctcctacaataacagctatcaagccagcatacaaatggcaccatatgaagcgttgtacgggcgcaaatgccggacaccgctattgtgggaccaagttggggaaagccaagtgttcgggactgatatcctgagagaagctgaagctaaagtcagaatcattcgggataacttaaaggtggcacagtcccggcagaaaagttatgccgataaccgacgccgtgatctggaattcgcagtggatgattttgtgtaccttcgggtcacgccattgcgaggtgtacacaggtttcagaaaaaagggaagctcgcacctcggtatgtgggtcccttccgtatcatcgctcgacgcggagaagtcgcctaccagctggagttgcccgcctcctggggtaacgtgcatgatgtgttccatgtgtcgcaactcaagaaatgtctccgagtgccatccgagcaggccaactcagagcaaattgaagttcgcgaagatttgacgtatgtggagaagccagtgaaaatcctggacaccatggagcgcaggaccaggaaccgggtaatccgtttttgcaaggtccagtggagcaaccacgccgaagaagaagctacttgggagcgcgaagacgaactgaaggcagcccatcccgatctcttcgccagttcttccgaatctcggggtcgagattccgtttaa

SEQ ID NO: 43687 - DNA, 5337 bp, Oryza sativa
  Clone ID: PAT_MRT4530_4681C.1
atggccgagcaaggaaaagcgcacgacctctctccaagtgtgagcggcgacgacggggagccgaatccacgccgtcgagctcgtactcccccacctcctccgcgccaaagccctaagcagggggaggcgcttgagagggtcgacaaatccgtggcatcaccagtcgcaggtgatgcaggagaacggcgagatggggagcgtcgcctcctcgtctacggcgacggcagcacgcctcagggtgcgcttcaggctgctggcgcgctcctacgacacccgcctgtcgtccatgacccggagtctccagcccaacgatggctggaagacgtggccaacttggtcatgacggcacagcagcgcctgggtgctggtggacggtccgccaccaccaagacctccggcgccgctaccaccggctccgtgtcgtcaaggcggagggcgcggcgagcggcggcggctgcacgtcattcggttgctactccctcgtcgacaccttcgactcgggaggatcagcatggggagccggatgcccgcctcaacatcgagcgccggcgtagtagccggcgtaccccccgtgcaacggagggtgcctcctcgtccagagtgtcacctcgacatggacgtgaggaccagccctccgtgcctccggctggtggtgttggctgtagagcctttgtggcgagtcttcggaatgtccgttggcccccaaggttccggcccaccatcaccgagaagtacgatgggagcgtcaaccccaccgagtttctccaggtctatacgaccgggatcgaggccgctgggggtgacgacagggtcatggcgaacttctttcccatggccctaaaaggacaggcgcggggttggctaatgaacctgccacccgcgtcggtccactcctgggaagatttgtgccaacagttcaccatgaacttccaaggcacatatccgcgcccaggcgaagaagcggacttgcatgcagtacagcgaggcgatgatgagtcgcttcgctcgtacattcagcggttttgccaagtccgcaatactataccatgcatccctgcacacgcggtgatctacgcgttcagggggggcgtgcggcacaaccgcatgctcgaaaagatcgcttccaaagagccccagactaccgcggagctttttcagctcgcggaccgagtggctcgtaaggaggaagcgtggacatggaactcctccggttccggagtggcagcttcggccgcccccggatccgccgctcagacagggcggcgtgacaggaggaggaagaagaggtcggaccgttccggcgacgagggtcatgtcctcgccgtcgagggcgctccgcgggccacccgaaaggggaggcctgcgagcgacaaaaagaaagaggctggtactcccagcaaggagcgccccgccggcaggtggtgctccgtccacaacacctccctccacgatctcgtggactgtcgcgcagtcaaaaatttggctgagcgaacgaggaagtgggaggaggacaggaggcaggaacgccgtgagggcaagtccccggcggttccttccggcaaacggcgaagtgaggctaagcagaaggcccccgctgttgacattgatgatggtgatgatgacctaggtttccaagaacctggggccaccattgccaccgtcgatggaggagcatgtgctcacgtctctcgccggagcttcaaggctatgaagcgagagcttctggccatggcccctacccatgaggcgatgcgtcgggcgcggtggtcggaggtcgctctcactttcgaccagaccgaccacccaccgtgcattgcccggggagggcaggttgcgatggtggtttcccccaccatctgcaacgtcgagttgggacgtgtcctcatagatggaggagcggctctcaacattctttcccccgcggcctttgatgctatcaaggccccggggatggtgctccggccgtcccaaccgattatcggtgtgacgccggggcacacatggccattaggtcacatcgacctaccggtcacctttggtggatcagccaacttccgcacggagcgggtgaacttcgatgtggcggacctcagtctgccctacaacgcggtcctggggagacccgcgttggtgaagttcatggcggcggtccactacgcctacctccagatgaagatgccgggccccggtggccccatctctgtccgtggcgaccttaaagtcacgctcgcttgcatggagcagcgcgcggaccacctcgctgctgcgaccaagcccgagggtggtgacgagagccttggcacctccgcccccatcgccccgaggcagcggattgccacatgcgacgaggtcccggaagacgcgctcgtctccttcctgcgggcaaacgctgacgtcttcgcatggagaccagcggacatgcccggggtccccaggaaggtgattgagcaccgtctcgccgtgcggccgggcgcaaggccggtccggcagaaagtgcggcggaaggccccggaacgtcaagccttcatccgcgaggaggtggcgagacttctggaggccggattcatccgtgaagtcatccatccggagtggctggcgaacccggtggtcgttcccaaggcgaacggcaagcttcggatgtgcatcgactacaccgaccttaacaaggcatgtcctaaggatccttaccccttgcctcgcatagatcagatcgtcgactccactgcggggagcgaccttttgtgttttctagatgcatactctggttaccatcagattcgcatggctagggaggatgaggaaaaaactgcgttcattacccccgtaggaacctattgttatacatcaatgcccttcgggttaaagaatgcaggtcctacttttcagcgtactactcgaatttctttgggtagccaaataggacgtaatgttgaggcgtatgtcgatgacttggttgtaaaaacgcgcaaccaagaaactttactttcagatctagcggaaacttttgagaacctccgctccgcccgcataaagctgaaccccgataagtgtgtgtttggtgtacctgcgggcaagcttctcgggttcttggtctctgcccgaggcattgaggccaaccccgagaagattcgagctatcgagcggatgcgcccccccagcaaacttagggatgtgcaatgcgtcaccggttgcatggccgccctaagtcgtttcatatcaaggctgggagagaaggcgctacccttgtttaagctcctcaagcgctcggggccgtttacttggacggaggaagctgaacatgccctcactcagttaaaggcatatctcagctctcccccggttctagtcgccccggagccaaatgagcccctgctactttacttagcggcgaccccccaagtagttagtgcagcgttggttgtggagcgcgatgaggacaatcctcattctgcgcacccccactctgtgccgactaggcccgggagcaggcagggaggagaggcccccgagtcgaacggtggcctaaggcccccgacgaccggagtcggccctccgcccgcttgtcagacggtgctaggtgcccccgaccctcaggagggccccaaggccactgcgggaaggccgcacttaacgccctttgaccccgaggctaaccctgtgctgactcgacccgggaaagagcagggagaagaggcccccgagccgaacggaggccagaggcccctgacgaccggagttggccctttgcccgcttgtccgacgatgccaggagcccccgacccccaggacggccccgaggccaccgagggaaggccgcccctttcatcctccgaccccgaggtcatcggcacagaagacaagtgcgccccgaaaggccacttgaacgaagaacgccccggggatacggcccctagcagagaggatcggccccaccgaagggtgcagcggcctgtctactttgttagtgaggccctccgggacgctaagacccgataccctcaggcccagaagatgctttacgctattctgatggcctcgaggaaactgcgccattattttcaggcacatagggtcactgtggttacgtcttaccccctcggtcaaatcttgcataatcgagagggtacaggacgggtggtaaaatgggcaatcgagctttctgagttcgatctgcactttgaaccacgccacgctatcaagagccaggccctcgccgattttgtggcagagtggaccccggctccagagaccgtctcaatccccgaggccagcacgaacccctcgcagctgcctcacaccacccactgggtgatgcagttcgatggttctctgtccctccagggtgccgtcgatctggtccggcgatgcagagcgtgtcagttccacgccaagcaaatcaatcagccggcccaggctctgcagatcataccactgtcatggccatttgctgtctgggggcttgatatcctgggaccgttcaaacgggccccgggcgggtttgagtatctgtatgttgcgatcgacaagttcactaagtggcccgaggcttatccggttgtcaagatcgataagcactctgctcttaaattcattaagggcatcacggcccgttttggagtgcctaaccgtattattacggataatggcacccaattcactagtgaactcttcggcgactactgcgaagacatgggcatcaagctctgcttcgcctcacctgcccaccccaaaagcaatggccaagtggagcgcgccaatgcagaaatcctcaaaggccttaaaaccaagaccttcaatattctcaagaagcacggcgattcatggatcgaggagttaccagcggtgctctgggcaaaccgaaccacaccaagccgagcgaccggggaaacgcctttcttcctcgtctacggcgcagaagcagttctcccatccgagctcaccctgaggtctcctcgggccaccatgtactgcgaggctgatcaagatcagcttcgtagagatgacctcgactacttggaagagcgaaggcggcgcgcggccctccgagccgcgcgctaccagcagagcctgcggcgctaccatcagcgccacgtgccgggcccgatcactctgcgtcgacgacctcgtcctacgccgcgtccaaacgcgtgctggattgagcaagctctcaccaatgtgggagggtccgtatcgagtgatcggcgtcccccggccgggctccgtacggctggccacgggcgacggcacggagctgccaaacccgtggaacatcgaacaccttcgtcgcttctacccctgaagggggggggtcgggtgtcaggttttggctcgggctaa

SEQ ID NO: 43688 - DNA, 5049 bp, Oryza sativa
  Clone ID: PAT_MRT4530_46820C.1
atggatgaagtcgggcgtcgatggacattctccagggcaaatgaaggctacacgagctgcggcccgatggccggcagcgtcacccgtcgtggtttggacatgactggcttcgtcttggagctgcgaggcatgtgcgtggtcttggggtatccacatggagtggattaccaggccaggccgctcccggaacaggagggtgaggatgcagagcctcacgctggttgggaggtcactgcagtgatcctctccggctctcccgagcggacttcgctggcagtcactgcggggggagactccttccccgccgcttgccagaacgccgctctcctcgccatcggcacccttcaccagcgctacccggacgagttgcagcactcgccctaccgctaccaccctcgtcgcggaggagcccgcgaccacgccaccttccgagacgccagctcggaggatgacgctaccgtcgtgcatctggcacgcatggtggaggcgtacgacgcggctcgtatcgacttccaccagatggtgcgtcgtggcatggtggagaacaacctgaagatcctggagctgcgtcaggagaacctgcagctcaagaaggacctcgacgcagtggaggcgcagctgcatcagctcaagatcgcccagggtgaggacagccgtcccaagcgtcgccgcgtctgccgcagccagaagatcaccgcccgcaagagcacctccaggcccgagcttgttcgtcagtccctggcgtggacttgcttcgtcgagacccctcgtgccgagcctgcgcccgtggttccccaggagggggaagcctccggcgttggtagctcggagggtgcgctgttgctcaccttccgccctggcccgtcgcagcgctcttcttctctgtttgctggttccgtgtggggtttccagatggtgacgaccaggagaaatgttaacaccggtgaaggcaaccaacccgagggcagcaaccccaacccccaaggcaacccacctccaccaccaccaccagataccaacgccattctcacccagatcctcgcccaacaagccaacatgatgaatgctttcctccaccacctccaaaatccgccacaacagaatgccccaccaccacctccccaacactccaaactcgccgagttcctccgcatccgcccacctaccttctctagctccaacaaccctgtggatgcgttggattggttgcatgccgtggggaagaagctagacacggtgcagtgcagtgatgaggagaaagtcgtcttcgccgcccatcagctgcaggggcccgcatctctatggtgggaccacttccaggctacgcagccacagggacagccgattacttgggcccacttcaccgccgctttccggagaacccatgtgcccgccggagtcgtggctctcaagaagagggaattccgagagttgaagcaaggcaaccgctccgtgatggagtatttgcacgagttcaacaacttggcccgttacgctccggaggatgtgcgggaagatgaggagaagcaagagaagttcttggcaggaatggaccctgagctgtccgttcgtctagtctctggggactatccggatttccaacgactggtggacaagagcatccgcttggaagccaagcacaaggagctggagtcgcacaagcgccgcttggcgaacttccgcaatcagcagggtgctaaccagagggttcgctacaccaatccctacccagggggatcctcctcgcagcagcagcagcagcagcaacctcgcccagcgcctcgacctcaattcgtggtgcgcgtcccacagccgcagcagcagcagaatcagcaagggactcgtgcgccccgtcctcctacgccagctgtgcagcccgttcaaggccgcagggacgctcaaggtcagcagcgtctgtgcttcaactgcttcgagcccgggcactttgcggataaatgcccgaagccaaggcgtcagcaaggccaagcgcctccccgctccaacaacggcgggaaggatgtcattcggggccgtgtgaatcatgtgacggccgaggacgtgctgacaactccagacgtcatcgttggtacgttcctcgttcattccatccctgctacaattttgttcgactctggagcttcccactcgtttatatctgtgccattcgtggggaaaaatcagttgggggtagaaaggcttagaaaccctctgctcatcaccacccctggcggggttatgacagcaaagtattatagccctgccgtccctatagaaattcaggggattccttttccctcggacctgattctgctagacaccaagaacttggatgtgatccttgggatgaattggttggcccaattccaagggataggtctgtcagaaatccccatagtcagagagttcggagacgtgtttccggaagaactacctggtatgccgcccaagcgagagattgagttccggatagatcttgctccaggaaccactcctctgtacaagcgaccctaccgtatggcagcaaatgaactggccgaagttaagaaacagttggaagagttgaaagaaaaggggtacatacgtccgagtacttccccatggggtgctcctgtgatttttgtagagaagaaagacaaaacgaagaggatgtgtgttgactacagagctctcaatgaagtcaccatcaaaaacaagtaccctcttccccggatcgatgatctgttcgatcagcttaaaggtgccactgtattctccaagattgatcttcgttccggatatcaccacttacgtattcgggaagaagatattccgaagaccgcattcaccacgcgatacgggctgtatgaattcacggtgatgtcgttcggtttgaccaatgcacctgccttcttcatgaacttaatgaataaagtgttcatggaatacttggataagttcgttgtggttttcatcgatgacattctgatatactcacaatcagaggaaggccatcagcaccatctccgtctggtgttgggaaagttggggaacatcaattgtatgccaagcttagcaagatattaccggagattcatcgagaacttctccaaaatcgctcgacccatgacacagttgttgaaaaaagaagagaaatttgtgtggagcccgcaatgcgagaaggcgttccaaactctcaaagaaaagctggtttcctcgccagtgttaatcttgccggatactcgcaaggacttcatggtgtattgtgatgcttcgcgccaaggattggggtgcgtgctcatgcaggacggtcatgtggtagcctatgcttcacgccaactacgtcctcatgaaggcaactaccctacacatgacttggagttagcagcggtggttcatgctctaaaaatctggcgacactatctcattgggaaccgctgtgaaatatatactgatcataagagtttgaaatacatcttcacccagtcggatctgaatcttcggcaaaggagatggttagaactcatcaaggattatgatgtgggaatacactatcatcctggtaaggccaacgtggttgccgacgctctaagtcgaaagagccactgcaacactctcaacgtccgaggcattccacccgagcttaatcaacagatggaagccctgaacctaagcatagttggtcgcggattcttggctgcgttggaagccaagcctaccttgctcgatcaaatccgcgaggctcagaagaatgatccggacatgcatggactcctcaagaatatgaaacagggtaaagccgcaggtttcacagaggatgaacacggaactctatggaacggaaagcgggagaaatactggtgggtcagcatgaagcgggaaattgcagagtttgtggctctatgtgatgtgtgccagcgtgtcaaggcagaacaccaacgaccggccggacttctccaacctctccaagtgccggaatggaaatgggatgaaattgggatggatttcgtcaccggccttccaaaaacccaaggtggatatgattctatatgggtaattgtggatcgattaaccaaggtagctcgattcattcctgtgaagaccacctacggagggaacaaactagcggagctctacttcgctaggatcgtgagtctccatggtattcccaagaaaatcgtatctgataggggaagccaattcacctctcacttttggaagaagctccaagaagagctgggtactcgattgaatttcagcaccgcctatcacccgcagacagatggacagaccgagcgtctaaatcagatcctagaagatatgctccgcgcatgtgtcctagatttcgggaagacttgggataagagtctcccctatgccgagttctcctacaataacagctatcaagccagcatacaaatggcaccctatgaagcgttgtacgggcgcaaatgccggacaccgctattgtgggaccaagttggagaaagccaagtgttcgggactgatatcctgagagaagctgaagctaaagtcagaatcattcgggataatctaaaggtggcacagtctcggcagaaaagttatgcagataaccgtcgccgcgatctggaattcgcagtggatgactttgggtatcttcgggtcacgccattgcgaggtgtgcacaggtttcagacaaaagggaagctcgcacctcggtatgtgggtcccttccgtatcatcgctcgacgtggagaagtcgcctaccagctggagttgcccgcctccttgggcaacgtgcatgatgtgttccatgtgtcgcaactcaagaaatgtctccgagtgccatccgagcaggccgactcagagcaaattgaagttcgcgaagatttgacctacgtggagaggccagtgaaaatcctggacaccatggagcgcaggaccaggaaccgggtaatccgtttttgcaaggtccagtggagcaaccacgccgaagaagaagctacttgggagcgcgaagacgagctgaaggcagcccatcccgatctcttcgccagttcttccgaatctcggggtcgagattccgtttaa

SEQ ID NO: 43689 - DNA, 1134 bp, Oryza sativa
  Clone ID: PAT_MRT4530_46821C.1
atgaagcgggaaattgcagagtttgtggccctatgtgatgtgtgccagcgtgtcaaggcagaacaccagcgaccggccggacttctccaacctctccaagtgccagaatggaaatgggatgaaattgggatggatttcatcactggacttccaaaaacccaaggtggatatgattctatatgggtaattgtggatcgactaacaaaggatcgtgagtctccatggcttcccaagaaaatcgtatctgataggggaagccaattcacctctcacttctggaagaagctccaagaagagctgggcactcgattgaatttcagcaccgcgtatcacccgcagacagatggacagaccgagcgtctaaaccagatcctagaagatatgctccgcgcatgtgtactagatttcgggaagacctgggataagagtctcccctatgccgagttctcctacaataacagctatcaagccagcatacaaatggcaccttatgaagcgttgtacgggcgcaaatgccggacaccgctcttgtgggaccaagttggagaaagccaagtgttcgggactgatatcctgagagaagctgaagctaaagtcagaatcattcgggataatctaaaggtggcacagtcccggcagaaaagttatgcagataaccgtcgccgtgacctggaattcgcagtgggtgattttgtatatcttcgggtcatgccattgcgaggtgtgcacaggtttcagacaaaaggtaagctcgcacctcggtatgtgggtccttaccgtatcatcgctcgacgcggagaagtcgcttaccagctagagttgcccgcctccttgggtaacgtgcatgatgtgttccatgtgtctcaactcaagaaatgtcttcgagtgccatccgagcaggccgactcagagcaaattgaagtccgcgaagatttgacctacgtggagaggccagtgaaaatcctggacaccatggagcgcaggaccaggaaccgggtaatccgtttttgcaaggtccagtggagcaaccacgccgaagaagaagctacctgggagcgtgaagacgagctgaaggcagcccatcccgatctcttcgccagttcttccgaatctcggggtcgagattccgtttaa

SEQ ID NO: 43690 - DNA, 550 bp, Oryza sativa
  Clone ID: PAT_MRT4530_46822C.1
ctttgcttgttttagcacctcggttaaactagtacaactagaatcaacatggtgaatggacgtaaatatggtggtagtgtaaccacaaatttgtattggtcatgtagtatccttcccctgaaaacattttcaggggaagtctgaattttctttgtcgatactataactaacttaagaaaaaaatgaagaaatgacagcgagggtgggagccaaatgacaaccaaaatcgaatcttttcggctcgatcatttctcttcttttccaactcttttcgccgccttgaattaaaatatacaggacagtcaatgatccgtcgccaccagaagaaaagagttttgttaggtacacacttttgtcgacggctaattgttgccgggcggcacgcaggtgcagcgatcgatcttatcaccacacaagcgtttttccaatgctttgtcctgaccgacaattttttttgtacaaatccattattagcggcaaaaactccgtccaagatggcatattttcctaagaaaaaaaaaactcttcctattgagtcctctcgatagca

SEQ ID NO: 43691 - DNA, 201 bp, Oryza sativa
  Clone ID: PAT_MRT4530_46823C.1
atgccagagggcaagcaaaaggcgaagctttctggatcgcgtgctgccgatggggtgcgcaaagccccggcgctcactgccctcgggccccacctggcagttttctactactcgcgttggacggcgaaaatgaaaaattccaatcgggcacacagaactacagcaaaaacatacattgggtccggaaaacagcagccctga

SEQ ID NO: 43692 - DNA, 839 bp, Oryza sativa
  Clone ID: PAT_MRT4530_46824C.1
ccacgcgtccggttctagcactctgtaccatgattgatatcttgggagttccttgaaattattaacacaagcatttaattttaagtcagtgttataatctgtttctaaatgtgaactatttggatttatggtgcaccacctcgtgcccttccaccgcgcgcgcctttgtcgccatccaccgcacgcgccgccgcctcctccgccaaatccaccgcgtgcgccccccgccaccgcgcaccacctcctccgccaaatccagcgtgccgcagttgatccaccctcttccctcctccgccgcctccccatcgcctccacctctggtgcctgcctccacctcatcttccgacatcaaggaagtccccttgttcagtttagtttgccactatcgattttgctacaatcgatctatgttgttgagcatctaccaagcaggagatctaaaaaaacatcgtaccacggtcaaaatcgaaagggctactgaaattgttctgctaaagatgtcacttgtcccagaaattgtccattgaagattttttttgctgaagttatttatgaatggagacctgctaaagatgtcacgtgtccaataaagacctgcttaagatgtcacttgtccaatgaagttctctctgtatttatattatctagaagagatgccacttcaatgtagagtaattccataaactttgttgagaagttatgacttaaatttaatgaatgctaagggtgtgtttgcaacccctttttcccgatgcatgtatatattgctatcctagatgcaacagaattgttacttatgaattcgttatttctgaagttctgatttggaattctatggt

SEQ ID NO: 43693 - DNA, 659 bp, Oryza sativa
  Clone ID: PAT_MRT4530_46825C.1
aagtgttccctattggtgctgcatgatcaagtgacctcaataacatacattgattgcatatgtagctattttgtttctttgatcctggccagtttgcatgcatggtgtcttgtcagtttgtgatcaagaatgtatttatattatgatagatagttctttatattctacatgcaatattgctcacagaattcaaactattatttttaggtcaaaatcgaaagggttactgaaattgttctgctaaagatgtcacttgtcccagaaattgtccattgaagatttttttgctaaagttatttatgaatggagacccgctaaagatatcacgtgtccaataaagacctgcttaagatgtcacttgtccaatgaagttctctctgtatttatattatctagaagagatgccacttcaatgtagagtaattcgataaactttgttgagaagttatgacttaaatttaatgaatgctaaaagttgtctgtactcttgtatgcatatgctctatgcagatgcatgtatatattgctatcctagatgcaatagaattgttacttatgaatttgttatttctgaagttctgatttggaattctacagtggaatgttttatacagtgttgatggatgtatgtttaatctgaactattgaatgcatggtgg

SEQ ID NO: 43694 - DNA, 400 bp, Oryza sativa
  unsure (1)..(400): unsure at all n locations
  Clone ID: PAT_MRT4530_46826C.1
gtgnatcgggccccaggacaaanatgtncttggctggtcttgggacnggaaacaacttctgggngggcangtacttcnccacntcctcgctaggnttcntccnggcgtactcgctggcgaacgcgtnntncctgaggcncctcgacgtntncccatngtgncaactgtgcaacttgttcatgctgtgcatngccgccggagacangatnatctgangngantnngaccnctantngcacctgtcctataacctgaacgcngaggancanaggtgggacnccgccgccnnntttttttttttcncacangacngcgaaagaanaancccaccagggggggaacggngcccaatccnnccaaaggngantntnactcccccgcngtgaacaccatttgtanc

SEQ ID NO: 43695 - DNA, 519 bp, Oryza sativa
  Clone ID: PAT_MRT4530_46827C.1
atgtcgagctcgatgagcgacggctcgtcgtctacccgtgagtcgaaggcatctcccgtgccttatcgggttggtccgctagaatatcagcccgcggtgatgtgccgatgccgtccaccagccaaggcggcgaggtggatctcgtggagcacggacaaccctgggcgccggtattacaagtgccaaaacgctcggcaaggggggtgtgatttctgggcatggtacgacgggccgacgtcaagcttcatcagggagctcttgaatgatttgcgggacagggtgaattcgttgaggagggagaacgaagtgatgcgaaaggaggtcgaacagagtcgggataaggtggaagtacagagtaaagcgatagatgatgctcgtggtgtggttgctgtgaagaatgcagaaattatgtgcttgaaggccaggaatcataagttagagaaggaaagaaaagtctttgtaatatgtgtggtgtcatgtatgtttgtgctatttgtggtgttctttggcaagaagtga

SEQ ID NO: 43696 - DNA, 627 bp, Oryza sativa
  Clone ID: PAT_MRT4530_46828C.1
atggcgcgggctcgattccgatggggagaaggggcggctagtggcgaaaacggtggtggggagctcggggtagatgtcgacgatgtccagcagtgcggacagcctgatacgccagtagttgtcctggcgctcacgcttgaggcgcacgcgctagaagtcgaagttgatcaaggcccgtccgcgggggcgaacacggcgatgacgttcttagatttcgagaacgcgttggctgaccgagttcatcaaatccagtattggaagacgaagctcgaggtggccgaactcgaaagggccatcgtggaggcgaagaaggaccaagccgtggaaactctacaggtcgcgaggtgtggctcaactcgtacctcaagagttgctgcacggccatggcggaagtttgcggggagcacccgaggagatcccgaggagtccacggctggttatatctcatggatgaagggggcctgcgcacagctcgaagggattggcaagcgcattgaagaggccctgaagcaggagtgccgtcgagcgagccgctatgccgggggtcacgtgttagcttgcatccgagatcaccgcccgcagctgcacctcgagttcctttgcgaagggttctcttgttctcggtga

SEQ ID NO: 43697 - DNA, 924 bp, Oryza sativa
  unsure (1)..(924): unsure at all n locations
  Clone ID: PAT_MRT4530_46829C.1
tttttttttttttttttttttttttttttttttttttttttttttttttttttttttttttttttttttttttttttttttttttgagnncnnaaaaaaatnacnacnanagnggagttgnacgcccanaagccanaaacaagcaattttaatttttttttttttttttttttttttttttttttttttttttacattgaatccagttcgattcaagggctgcaatctttttgcagccaaagacaaagttgcaggttcaatcagggaatcaaactggaacacatacacaaatagcacatctgacatctcctggggatgaccggaattgagaacttcactagctacagagcccctaggttatgctacagttggcattacattagagggcacctttctttggggggaatttattaacaggattgctaccgtaaaaatctggagaagactttgtcatcttactgatcagacaatggttgattacttgattgtgcaagtatcacaaacaagccaatacaatacatcgtgtattcacgtggcagttctgaacaaaaaatgtggatttgtggaaaatcacagctcatgtcagtgctggtccaggctacttaggagcaatcaaatgacgccaaacctatgtctccctcgaatggcaatataaaatagcaaatggtgctcaatagcacacggatcctcctccatcaggaactatgaaaatgattgattggtacagtgcaacatggcgattggcacgtacacaacagggaccaaaaccggatactgctcccagtcatctcacatgcaaaaccagcaagccaagtacagcaagggcaattagtagtactgttgctaaacggacttgaagatgcttgtgatgtgtagagcatttaaatttacttaatctcctcttgataagctcaggccagaaat

SEQ ID NO: 43698 - DNA, 389 bp, Oryza sativa
  Clone ID: PAT_MRT4530_4682C.1
gggggagaggaactcagggttcatcaggtggtatcagagctttcgttgctcgcgtttagttcgtttagagtttcgagttctggtcacgtttcataccactgtcatcgcccccgccgtgtttttgttgtcgtcgggacctaggaaaacggaatcatcttgttgtcggggtttcgtttttctagttttcagaagtttttgtcggtcggttttggagttgctgagttacatcaagggtttgtcgtctgtattcggccgtgcttgtttctcttgcgcgaggaagaggagagagaaaagataacagatctgtttttggaggaagttttgcagactagatcaatcaggttggttagtttccatctaaggccaaactttccaaactctccccacgc

SEQ ID NO: 43699 - DNA, 279 bp, Oryza sativa
  Clone ID: PAT_MRT4530_46830C.1
atggcagccaaaagtgtggtgtgccgatgttgtagtttaagtctaagtgatgagcagttagcagatcttgcatttcaaggattgtcagcacttatcaatgacaaattctttcgccatgagtttgacagtctggttcatctaatgcagacagtattggtttatgagagccaagacaagaagcaacaaaggatcaattttgaagtaatcaaggcaaggcagaagagatttttgaagcatgagttcccatactccaaaatacctgggagtggattcagttaa

SEQ ID NO: 43700 - DNA, 2148 bp, Oryza sativa
  Clone ID: PAT_MRT4530_46831C.1
atgatagcgcgggcgttggggcgggcccgccaaggacggaggagatagcggcggcgggagagagctgcggcggccggcggcgatgctggcgccgcggagcctccggaaggcggccgtgccgccgtccctgctctccgaaccctcgcccggcagcctccagcccacccgcctcgccgtccacgtcaatgccgccggctcctcctgctccgcctacctcgcctccggctgccgcgtctacaagattgagatagccatggagggtgagatgttgtccaagggcaaggagagcctcttgattcctatcaatgcagaggtcataagctcgtcagttgtggatcgctgcccacatcgttcagagatccagagtgtagttcttgcagagggtgaaggtgatggctgtttgattcttggaacagttgactcttatggtcatcttattgtatctcggttatatacggtggctgatgacattgacagggcctcctattcagtaccacctcgtgattgtggtgtcggagaaggaagttgggctgggttatgttttagtccaatgcaccaatccacggtagctgttgctcgagaattgtggaagtgtatttattgctaagaccaggacattcatgttcgcagtttacgtgagatatggtatccatcttcatttagctttgcccagtgcatgccacaagtgaatgaaagtagacattagctgctttatattgtttactggctgatgtttgtctcagggaatcattggtttttgtgattgatagttttacaaatgagtctgttcaatatacgtttagtgtattgcaggttgatatcagtagaaaaataaaacatgctttctgccctccaaaattagcagaaggcaatccatgtttggagtacataaaatatatcatcttaccatggtatggaaagtttgaggtggttcgggagaaagaggatggtggtaacaagacgttcctgagcatggaggagcttactgctgattatgtaagtggggtttgtggactttggaacgggaaacgagcgagctttctcatttcgaggggactccagctgcttgggtttttcaaaagtgtgcgaatacagatgttgtggactggatggtacgaatctggaagtgtcttcgttgctgatgttagtgcaggattgtctatcagtaatcgggtaatgtctgacggctggaagctagcaagaatccattattcgtttttagaggtgctttttagcgtctcctgcccaaactgaatcaaaggatggacagtgattacttaccctttcatctgcattagaatttctgtagctaatgtttggtgtgttgatgcaactgatcatgttcttatccgcccccagtttttatataaaaaatctggtcacaccaaaacccggcaaaccagaaaggggcaagtcaatgccgccggctcctcctgctccgcctacctcgcctccggctgccgcgtctacaagattgagatagccatggagggtgagatgttgtccaagggcaaggagagcctcttgattcctatcaatgcagaggtagctgttgctcgtgaattgtgtaagtgcattgatatctacgaccaggacattcatgttcgcagtttacgtacgttatggtatccatcttcatttagctttgcccagtgcatgccacaagtgaatgaaagtggttcaatgctagcaatcgctgaaggttctcagctgagcatatgggacttgagaacgagcaataatggtggatgcatacaccgcatttctggccctattggaggcatcatatactctctctgtagttctccttctggaccaattgctgttggtggaacagatcgtactgtaaccatctatgatcctcgcaggtggtcagccttgtcaagatgggttgggtgctccaagtatgagattacaggcctttcattttcatcagttgatgaatctttcatttatgtccaaggtgttgattatgagattacatgtggactttggaagggaaacgagcgagctttctcatttcgaggggactccaactggttgggtttttcaaagtgtgcgaatacagatgttgtggctggatggtgcgaatctggaagtgtcttcgttgctgatgttaggcaggattgtctatcagtaatcgggtaa

SEQ ID NO: 43701 - DNA, 432 bp, Oryza sativa
  Clone ID: PAT_MRT4530_46832C.1
ttcctcttccccattgacgtcggcatcattgtttctccactgcgcctgcacccgtcaacattggcggctcggcgccgttccgcctcatctgccgttctacctcggccgccgccctctcccttcgtcgttgtcgcctcttcgcttcttccaccgccacgaggagtccttccggcggctccgccttctcccgtcgaagctctgcctcccccgccgccactgctccacttcctccaccagcgccattggctctgcctcctctatcgccaccttgcctcctcctccgccaccgccgtcgccgctccacctcctccatcgtcgctgctctgcctcattcgttgccactctacctccgctgccactctgcgtcctccacccaccatgaggagtctgttcggcggttccgcctcctccgtcactgctcactggcgttga

SEQ ID NO: 43702 - DNA, 168 bp, Oryza sativa
  Clone ID: PAT_MRT4530_46833C.1
atgggtggcaacaggcggcctgtcgcgcgcctcgccctgtcccgtcagaatgatgagagcttcctggctctcgtctctagccggagctggcgtgctgactcctggagttggcagctagaggcccatgtggtgacccctaaccagataaaaaaggaggcccaggcctaa

SEQ ID NO: 43703 - DNA, 1884 bp, Oryza sativa
  Clone ID: PAT_MRT4530_46834C.1
tttttttttttttttcgtgatagctctgcgtacccacccccacacgagcttatttttttttttttggggtacaactctaaacttgatgatgtctttaatcatatataaacacactgtccaatctcattgaccactatcattacaaaatgatcaccacaaacccaataaacaaaagaaaatgaaaaactctagaatcacacctctaattaagtttcttcttttttgtttcaattttttccctgggaactgcagcgataaatataaaaaataaatagcccttcttattttttgcaccaacgagggacacgaattggacaaaagaagaagagggagaggagctgaagaactcaacacaaaatgcactaagctcaaaccaccacctcaagctgccaacgccaacgccgcggcgaccgtggcggcggcggtaacccacctggcgagcacggacggcgcggcggcggccttgtccgcgacgtcgtccgcgggggtgccgtcgggcgagtcggcggcggaggagtcgtcggagggggcggcagcggcggaggtggtggacggcttcttcttcttggtcttcttcttggggccctccggcgcgggcgccggtgccaggtcctcggtgaccttgaagagctccttgggctgcaggaacttggagatggcgtagacggcgagcgggtcggcgtccttgacggtggcggtgacggaggccgagttgaccttggtgtcgagcaggacgctgtcgcggtcgttggagacgtcgtagctgtagtccttcttggcgacgctggcggtggcgagcgtgctgaccttgccgctgttggacttgagcagctggagcgagtagtagtccggcacggcgtggtagaggaggatggccgccttccccttggccgtcaggttcttgtacttgggcaggaaggcgtcgacggcggcgtccacggggcagaagagcgtgagcccgttgtccttggtcgcgttgatgttgctgtacacgtcggcgttcgaggcgaggaggccggcgaagttcttgcagtacttcttggacaggagctcggtgaggttcaccggcgccggcggggccacgggcgcctccgcctcaggggaggacagcggcttgctgatctggagcacggcgaggtcgtaggggatctccttcacggacttgacgaagctcgacggcgtcgcgctgtccgccgcgtcctccgccgtgaacgacacgcgcccgccgcggtgctgcgtgatgttcacgtaccccgtcgtgccgggggccgacccggactcctggaacatggaggaggaggcggtgtcgccgcgggcgagctggtggagcttcttggcgccgtagtagtcgacgaggatgtgcatctcgaggatgtggcggagcgtggggagggtgtagtggccgccggagagcgcgcccatgtcgccgttggccaccaccagcaccgtgatggtgcggcggcggttgatgtcgccggccagccgcgtctctgtcagcagcttgttgaactgcgagtactccgggtggtccccgaggatcttggtgatgttgtacccctccgccgccgtcgccgccgtcaacgccaccaccgccaccaccaccgccagccgccgcagcagcagctccatatctacagagagagagagagggccgcggatgcgctctgcgccggccgccgcgatgcgtggggcgatgcccggggttcacgcggcggcggccgggctggagggggcaaggggcggtaccgatgcgcagtcgcgcttcttctcccccaccgactggcctcgagctcgccggatccgcacggcagcgatgacctcgaccttgactgtgatggcaatggcgcgggagcttgagttgatggcgagctgaagcgacggcat

SEQ ID NO: 43704 - DNA, 412 bp, Oryza sativa
  Clone ID: PAT_MRT4530_46835C.1
atggcttccattggagagaacagtggcatagcaggtgctggagggaacggcggcgtttcaggagaaggagggaacggcagtgctccaggagataacaccaacggaggcaatactaatgcctcaacctcctctgcaccattttcctgcttgccgggtcaagctaactggaggccgaggaacacgggaccggccgcctccaaccccaccaccccacatatctctgctgccaattgccccctcaatgtccatgccaagaagaagctctcaatcgcctacaccactctcaggggctgccacaagctccccatgcccagacctggccactcgatgttcggggcccaccatgagcttgggcgtggtggcatctggccagtgtggcttgaaggagatgatggatgcagcagcaacttga

SEQ ID NO: 43705 - DNA, 486 bp, Oryza sativa
  unsure (1)..(486): unsure at all n locations
  Clone ID: PAT_MRT4530_46836C.1
gttcacaggttcttgaaattcaagatttccaacctgcttcacttgatgatattgcactagttcattcaagatcatacataactggacttgaaaaggctatgagtagggcttcagatgaaggtttgatattcattgaaggaactggacctacatatgctacccagactactttccaagaatgtctcctttctgctggtgctggaattacattggttgattcagtggttgcagcatcaaagttgggcccgaagccaccgctcggctttgccttagtaaggccaccaggacatcatgctgttcctgaaggtcccatgggcttctgtgtctttgggaacaatgcagtggcagctcggtatgctcagaatcaacatggtttaaagcgggtcatgataatagattttgatgttcaccacggtaacggcacatgtgacgccttttatgaggatccggacatattcttnctctcaactcatcaacttggaagct

SEQ ID NO: 43706 - DNA, 234 bp, Oryza sativa
  Clone ID: PAT_MRT4530_46837C.1
atggaggatatccctaatggcccaacaagtacccctaacccaaaatgcccgtggagcgagcgttcacgagcgagcccggtgtgcctcgccccgttcccgtgccgactcctccccaacgccgaccccgtcctgctgccgtcgctgatctggccccaccacgaccaaatcggggaggatacggtggcagcactggcggtggcgggcgcggtgtcgacggaggaagccgaggcgcag

SEQ ID NO: 43707 - DNA, 1584 bp, Oryza sativa
  Clone ID: PAT_MRT4530_46838C.1
gggaaaaaaatgtcagcttttgtattataaaacaaaatgctgatagctcgacaggttccactggacactaactggagtagaaagatgcaagtaatcgcagtagtactggtattaatctacacaactggtattgaactattgacaagcttgcgatcgaatgtatctgattcacagcaactaagatgtaaatgactatgccgtgcttttccgatgtacaatgctacactggaaagtgcaaaagctaacaagacatgaatatgatcttgagttgttgaccagcatcagcaagcagtttcagcagccaagtatagatactgttgcaatcttctgggcgccgcgcttagagcgagtggaggtgcttggccttgtcgatggcctccctgatcttccgcgtgggctcctcgtagagcatcgccgggtcgtcgaaccgcgcggcgaggctgggctcgccgaggaacgcacggaaggtgtcggccactgagctggacagcgactccaggttgtagccgccctccaggaagaagacgcaccgcccgccgcacagctccgccgccacctcccggatcctcgccgccagcatgtagaacgtccccgtcgtgaactgcagccccgccagcgggtccagcgcgtgcgcgtcgtacccggctgaaacgaggatgatgtcaggtttgaaccgctgggcagctggggcaataacctcatcaaacgcgcacctcatcgcgtaatcgcctgagccaccgggtagtggcaggttgagcgtcgtgccctcgccgttgccctggccaacttggtggatcttaccggtgccaggatagcttccaagctgatgagttgagaggaagaatatgtccggatcctcataaaaggcgtcacatgtgccgttaccgtggtgaacatcaaaatctattatcatgacccgctttaaaccatgttgattctgagcataccgagctgccactgcaatgttcccaaagacacagaagcccatgggaccttcaggaacagcatgatgtcctggtggccttactaaggcaaagccgagcggtggcttcgggcccaactttgatgctgcaaccactgaatcaaccaatgtaattccagcaccagcagaaaggagacattcttggaaagtcttccaacgagaaaagcattgggggaataaaaacaagagggaatgtgcatagatcattacagtctgggtagcatatgtaggtccagttccttcaatgaatatcaaaccttcatctgaagccctactcatagccttttcaagtccagttatgtatgatcttgaatgaactagtgcaatatcatcaagtgaagcaggttggaaatcttgaatttcaagaacctgtgaaccacgatgcttcgaagtaagctccagtttttcgagagcatcaactattgcaggaactcttttgttagtttctggatgcgcttccttgttatgacccatggcaggagatgtacaatagagaatatgagcatcccgcagcaaattgtcaggcaaagctaagtcttttcgaacaccatttgtgtctgaaatagaagttccattatcgcctgcagcccggggatccacta

SEQ ID NO: 43708 - DNA, 255 bp, Oryza sativa
  Clone ID: PAT_MRT4530_46839C.1
atggcgcaaaaagcatacacatacatgggatcaatggggagggagggagggagagagcgcgagcaggtcgatcgatggcgaggtctgagccgggcggggtggggggtgggtggtggttgccgcgtcaagctttcgcctcgcgccctgtacatgcgcgcgcaggagcagctgcgcgctacttcttaccagcaacttctccttctgccgctgccgctgcaactgctacatcccatccaaatatctgcaggagactag

SEQ ID NO: 43709 - DNA, 398 bp, Oryza sativa
  Clone ID: PAT_MRT4530_4683C.1
tcgtccacgcgtccggccacgcgtgcggagaaggagctgtcccctatcggtgaggagagacaaggacatctagggaaggagagaaggtgccagcgacgcatcatcaggggtgctatactggccctcggcttctccgccgggaggagccctcgtgctacccttgggcttggcagacagcgcggaggaggagggtaattgcgttttgtctgccagacacattttgttgtccccaccgcactcggggaggtgctcgtggcgattccggcgatcgtcggcgaggcttacatggagccattcgcgcacagtggccatccctgcgtcggtggttgatatgaccaattgttctcaaccgattctcatcatgaatcccaggatttctcaacttgcggcaggcaaca

SEQ ID NO: 43710 - DNA, 300 bp, Oryza sativa
  Clone ID: PAT_MRT4530_46840C.1
ccggccgtggtggtgggcggggggcgggtggggcaggcgctgctctccatgggcccgccgggagcggacgtgctcgtcggccgcggcgagaaggtgccggaggacgcgcccggcccgatccttgtctgcacccgcaacgacgacctcgacgccgtgctcgacgccaccccgaggtcgcggtggcgcgaatggaatgttggacccttggtttgagagcaagggactagtggatgcgaaccaggtgttggcctactttgccgtgtcgaagcttggtgagccaccagtggatgggattactga

SEQ ID NO: 43711 - DNA, 231 bp, Oryza sativa
  Clone ID: PAT_MRT4530_46841C.1
ttatctcggcgttggctagccgctgctgaccgtgttgccctacgagcgcgcgcggggcaggatctgggatctctacatggacaggcagctggcgccgtgcgccgggagggtgtggcaggtcgccggcgggcgccgcggtcgctggtgctggagaggatggtaggggccagctggtggctgcgatgcggacgctggaagccgagctcggcggcaggaggtactttggcggcg

SEQ ID NO: 43712 - DNA, 1500 bp, Oryza sativa
  Clone ID: PAT_MRT4530_46842C.1
atggacgtactcgaccacgccccgccgtccccgctctcctccgacattttgccccacttccctccctccctcgccgacgccggcgccggcgcgctggacctgtccttcacctccaccgcctccgcctccacctcctccttcaccaccgccaccaccttcagcgcgcggaagctcgcatctccctgccgatccttctcgtcctccacctcgctctccccgcggccgcactcgtcctcctcgtccccgcactgggcgctcctcgcggccgcgcgggccgccacgcccgacggcgtcctccgcctcgcgcacctccacctcatccgcgagctgggccacggccacctcgcgcgggtgttcctgtgccgcctcaagagctcgccgcccgcctccccgctcttcgcgctcaaggtcgtcgacctccgcgacgacgacccgtcacgtgtcacccacgtgctggcggagtcccgcgtcctctcctcgctcgaccaccccttcgtgcccaccctctacgcgcgcctcgacgccggccgctacgcgtgcttcctcatggactactgctccggtggcgacctccacgcggtgctccggcgccgccccgggggacgcctgcccgtcgccgcggcgaggttctacgccgcagaggtgctcctcgcgctcgagtacctgcacgcgctcggcttcgtgtaccgcgacctcaagccggagaacgtcctgctccgcggcgacggccacgtcgtgctctctgacttcgacctcgcgctcccggcgtccgtggagcccgccgtccgccgccgccaggttcggaaactgagccggcgcaagaatagaatcgtgccgtcctgcttctccgccaatggcggcagcggcgacgacggcgacgaggttaacgcgaaggaacagttcgagttcgtcgccgagccgacgacggcgaactcaaaggactgtgtgggcacgcacgagtacctcgcgccggagctcgtgagcgggagcggccacggcaacggcgtcgactggtgggccttcggcgtcttcctctacgagctcgtgtacggtcgcacgccgttcaaggggcacgccaaggacgccacgctcaagaacatcctcgccaagcaggtcacgtacccgcagctcgacggcgaggccgacgccgcgcagctgcgcgacctcatcggcaggctgctcgagagggacccgcggcggcgcatgggctccgcgcgcggcgccgccgagatcaagaggcacccgttcttcgccggcgtggactgggcgctcatacggtgcgtggcgccgccggtggtgcccgacaaggactcggcggccgccggcgccggcgacaagaaggcgaagctggggagctggaacagcatgggaggcaagaagcgcagcagcttcgggaggaaatcgaattacgaggaaaggcagggggttttccgcaaactgatgagctggagtcaagacagccgatccaagaaggcaaagacgaacaaagtcaagctataa

SEQ ID NO: 43713 - DNA, 378 bp, Oryza sativa
  Clone ID: PAT_MRT4530_46843C.1
atgccgcagccgccgccgtcggtgtgcacgaggagcgtcacctccgtcgcgctcccgacgcatggagatggcggcggctgctgccgcgtgctgctctccccattcgacgcggactccctcgaggcgttgctcccggcgttctaccgcttcgccggtgcgctggtctactcgccggaggaggaggaggaggaggaggaggggtcgctgtccatcgtcgtggaggccggcggcggcgtggcattcgtggaggccgaggcgttcgtggcatcggtggtgcgctcgccgcgggggatgatggcggcgaggctagggccgcgctttgccatgcagcagcagccgatggtcttcgcgtcccctccgccgccgccgccgcagtag

SEQ ID NO: 43714 - DNA, 1188 bp, Oryza sativa
  Clone ID: PAT_MRT4530_46844C.1
atgcagcagcgccagggcctgaggccgggggggaggagtcatcatgggctcatggtcactcgccggataaatgcgccgcggcagtggaaaaggcttgttgacgtgagcgtgtcgcggcagtggtggtgggggctcggtggcggcatcggcgagcgggtgccggagtggtggctgcgatgggcggtggacctcgggcgacaagcgcgggagcagctactccttgaaatgggcggtggacctcgggcgacgtgcgacaaaatgcgtcgggggagatgggagcacgctcccagccgccgctccttgtccccactctgtgtcgtgggcagtgaggtgggcggcggccgcggcatcgacggcaaggtgggcggtggccgcggtggaaagggagcaatagctcgcgcgccccaacgcgtggcggtggactggcctcgagcgctccggcgtcgacctggccatgatgcgaagcagcgactggagctcctcctcctccttcgacacgggccccctccccgaccacgtccgccgcgagaccgcccctttttcctcttggacttgctgccggccgcgcccgtggcagcctcgcagagacttgggaagttggcggcaggagcagggggctcgatggccgctggggcggcagcgttccccatctcccgtggcgctagcaccgctccagtcccggacccgccgaagccaaatccttgctactgcggcggcggtggcggaggcaacgcgaagaccgtcggctgctgctgcatggcaaagcgcggccctagccccgccaccatcatcccccgcggcgagcgcaccaccgatgccacgaacgcctcggcctccacgaatgccacgccgcctccggcctccacgacgatggacagcgacccctcctcctcttcctcctccggcgacgcgacccagtatgcgtcgaatggggagagcggcacgcggcagcagccaccgccatctccatgcgtcgggagcgcgacggaggtgacgctccttgtgcacaccgacggcggcggctgcggcatctcggcgacggcaaactcctccgccgtgtttcgaatctcgccaaagcttgtggggtggtttgacccccactatacgccgtcgccgctctgtccgccgtcgctgcttcgtccatcgcccgccgtcgccgccgccgttccggacaccgctctcgcatga

SEQ ID NO: 43715 - DNA, 198 bp, Oryza sativa
  Clone ID: PAT_MRT4530_46845C.1
tctcagtcaagaaaaaaggaagattacaccagcaaacaaactagctagccaagggcctctttgtcctctttccggctcgccgaggcggtggcggcactgttggttgttggctcctattccactgagctcaccgacaaggtcgactctgacctctagcaaccggacgtgtatgaggcaataggtaatgtatgccagctc

SEQ ID NO: 43716 - DNA, 1809 bp, Oryza sativa
  Clone ID: PAT_MRT4530_46846C.1
tcaacttctcacgcgcaggcgggcatatgcgtgtgtgcggccgacggcggagcgggcctggcggtcgcgcgctgcggggagagatgcaccagtccccgtggcggcgaggggccggaccggcggcggcggagagcagagtcggcagcgggctagcgcggctgcgaagcaggcaggacgggcggcggcgggcgagcgtggctgcgagtgccggcggtggacatgcaggcaggcgaagcggtggagagcggagcaggcggcgggcggcgatgggggagcgcggctaccagcggcgacggtgggcgagcaggcaggcggagcgacggagagctgagcctgcagcggcaacccgacgccgtccgaccacatcgtcaacgcgttccgctgcttcgagcagcaggcgccgctgggcgcggtgacggtgagcccgtacgtggtggtgtcgctgtacagcagcatgcaccacgacgtgtgcctcctgatgcacagctgcaaggccaacctcatcccgctccccttccacaagtcgtcggacggcgcccggagcacggccaacaacgccatccgcgccatcaaccggtcggcgatgcagtacgcgctgtgctcggtgggcatcctgatcgaccacggcctggcggcggggtcggcgtgcgcgacggcgtcgaacagcacgctgcagcgggtggcgttgtacttcttgggcggcgccgatgaccggccgggagacagccgcccgtcctgcctgcttcgcagccgcgctcgccctccaccgactccgccctccgccgccgcagctctggccgctcgccgccgcggcgactgctgcatctctccccgctgcgccggccgccgcgcccgctccgccatcggccgcacactcgcatctgcccgcccacctcgggcgacaagcgcgggagcagctcctccttgaaatgggcggtggacctcgggcgacgtgcgacgaaatgcgtcgggggagatgggagcacgctcccagccgccgctcctcgtccccactctgtgtcgtgggcagtgaggtgggcggcggccgcggcgtcgacggcaaggtgtgcggtggccgcggtggaaagggagcaatagcttgcgcgccccaacgcatggcggcagactggcctcgagcgctccggcgtcgacctggccatgatgcggagcagcgactggaactcctcctcctcctccgacacgggccccctccccgaccacgtccgccgcgagaccgcccctttttcctcttggacttgccgtcggccgcgcccgcggcggcctcgcaaagactcgggaagttggcggcaggagcaggaggctcggtggccactgggcaccaccatccccatctcccgtggcactagcaccgctccagtcccggacccgctgaagccaaatccttgctactgcggcggcggcagcggaggcgacgcgaagaccgtcggctgctgctggatggcaaagtgcagccctagccccgccgccatcatcccccgcggcaagcgcaccaccgatgccacgaacgcctcggcctccacgacgatggacagcgacccctcctcctcctccggcgagtagactagcgcaccggcgaagcggtagaacgccgggagcaacgcctcgagggagtccctgagtgcacggacgacgtctccgaacagtggtggtggcggacgagcagcagcgcgcccagtacgcgtcgaatggggagagcggcacgcggcagcagccgccgccatctccatgcgtcgggagcgcgacggaggtgacgctcctcgtgcacaccgacggcggcggttgcggcat

SEQ ID NO: 43717 - DNA, 291 bp, Oryza sativa
  Clone ID: PAT_MRT4530_46847C.1
atggccgccaccgacgaccataggggcgcgggcgccgcctcccgccggccgcgccgacgtggccgcctccaggcgtgccgtgtggccgccgcgtggggcccggccgtcagccgcccgtgccctcgggtgcggctgatgcgtggggcccacggcgccgggcggtgtgagcccgggtgcacctggtccaccgtggaccggccggtgtcctgctgctacgggctcacccttggttacctgtctcgggattccgaccgtagccaaggttgggtcggtactcttgtttatggctag

SEQ ID NO: 43718 - DNA, 324 bp, Oryza sativa
  Clone ID: PAT_MRT4530_46848C.1
atggcggacgaggagaagaggagagaggcgagggagttagtgagctcgagctatgcgatccgatctgcttcgcggatgctctccgcctctgccgtcagccctcgacgcacgcgtgagcccccaccacatcaacgctaccactcgtcgtcctgctgttctccgcctccgcccttcgatctcggcctctgctaccccgacttcttcctccaccagctcctcccccgcctcctatttacgccgacaccaccggcctcgccagcattggtacccggccctgagctcccgccatcgttgacgtctggaacccaccccgacctcctttga

SEQ ID NO: 43719 - DNA, 861 bp, Oryza sativa
  Clone ID: PAT_MRT4530_46849C.1
ctactccttgaaatgggcggtggacctcgggcgacgtgcgacaaaatgcgtcgggggagatgggagcacgctcccagccgccgctccttgtccccactctgtgtcgtgggcagtgaggtgggcggcggccgcggcatcgacggcaaggtgggcggtggccgcggtggaaagggagcaatagctcgcgcgccccaacgcgtggcggtggactggcctcgagcgctccggcgtcgacctggccatgatgcgaagcagcgactggagctcctcctcctccttcgacacgggccccctccccgaccacgtccgccgcgagaccgcccctttttcctcttggacttgctgccggccgcgcccgtggcagcctcgcagagacttgggaagttggcggcaggagcagggggctcgatggccgctggggcggcagcgttccccatctcccgtggcgctagcaccgctccagtcccggacccgccgaagccaaatccttgctactgcggcggcggtggcggaggcaacgcgaagaccgtcggctgctgctgcatggcaaagcgcggccctagccccgccaccatcatcccccgcggcgagcgcaccaccgatgccacgaacgcctcggcctccacgaatgccacgccgcctccggcctccacgacgatggacagcgacccctcctcctcttcctcctccggcgagtagaccagcgcactggcgaagcggtagaacgctgggagcaacgccttgagggagtccctgagtgcgtggacgacgtctccgaacggtggtggtggcggacgaacagcagcgcgacccagtatgcgtcgaatggggagagcggcacgcggcagcagccaccgccat

SEQ ID NO: 43720 - DNA, 359 bp, Oryza sativa
  Clone ID: PAT_MRT4530_4684C.1
atgtttctctgacccagcacgcaagagcgtgggggcaccttaaccacgaactggaatacggtgctctgctgctgctggtgcaacagctgcgcttcgagcgtgactacagcgtttgctactcctactactctgctctgccatgacctggccgacatgaagtggcgccgagggagagtgtgaggagccagcagagggagagcgactggggtgcacctcctgatgggtgaagagcttccccagttgcgggccgtctagaacgtcctccttatcactaccatgacacaggatgtgtcaggtcaagaagcacattacgtggccaaggatgtcagggatgatcaggacaccgcatgtaccgcatt

SEQ ID NO: 43721 - DNA, 573 bp, Oryza sativa
  Clone ID: PAT_MRT4530_46850C.1
tcgcgctgttcatacaaccccgtgctgggaggattaaggaaacggcgaaggtcctatcttaacctctccaatgagtgctaccagagcaacctatactcagaacgcattctgtcaccattctggaatgtcattgctcatagattggtctatatgattcacggactatcttcagttcaagacgttagtaactatgtaaagactgcgttcgatggcgtcctcttcacctgtacaacgtatgtgatcattccacagcattatgctgccattagaataaagcaaagcgtgaacgatgccaatatatctgatttaagacaaaccctaacaccttcgatagacaccttgcaagaaaaaactcaatattccccgccttaccagatgatgtgggcgctaatgcttaccagatctaacgtaagcaagcccgaagcatcaagatcaattggggagaagagcacggtgccttcactcctagatttcaacagcaatactacccaggattctctaatgagtccgaacgtgagacttatgagaaatgtaactgagaactagttctggcctatagcaaaatcaaacacc

SEQ ID NO: 43722 - DNA, 363 bp, Oryza sativa
  Clone ID: PAT_MRT4530_46851C.1
actagtggatcccccgggctgcacggggagaggccgcctcaccgtggagcctggccggcgcgggcgcggccgtggcgctgctgtggctgtgcgcctggacgctgcagtgggcgtggtggacgccgcggcggctggagcgggccctgcgggcgcagggcctccggggcaccaggtaccgcctcttcatcggcgacgtggccgagaacggccggctcaacagagaggccgcgtcaaggccgctgccgctcggctcgcacgacgtcgtcccgcgcgtcatgcccttcttctgcaacgtcctgaaagagcacgggaaactgtcgttcgtttggactggcccaaagccattcggtgattatcagagac

SEQ ID NO: 43723 - DNA, 593 bp, Oryza sativa
  Clone ID: PAT_MRT4530_46852C.1
catcacacgagccggccggcgccgacgccgccgcctcctcgagagagagagagagattgagagagagctccgcgggagagcgcgtcgaagatggtgcagcggctgacctaccggaagcggcacagctacgccacgaaatccaaccagacccgcgtcgtcaagacccccggtgggaggcttgtgtaccagtacaccaagaagcgggcgagcgggccgaaatgcccagtcaccgggaagaagatccaaggaattccacacctgagacctgctgagtacaagaggtccagattgtcagtcagagagaggatcatccgggcttttttggtcgaggagcagaagattgtgaagaaggtgttgaagatccagaagaccaaggacaagtcagctaaatgattgcaagatagagacattgccgcgatgtttaagcttctccaaatttgtttttaagcaatcaagagaatttttcttctggatttgggggaaatcccgcttcctagtgctgctagtatgcgagatctaattcgcatgattgtttaaattttagagcgctagttcccctaaagtactactaccacccttgcggcgcttccttt

SEQ ID NO: 43724 - DNA, 809 bp, Oryza sativa
  Clone ID: PAT_MRT4530_46853C.1
gcgattggcgacctcgaggccggccgggcccccttcgccgacgccgccgcctcctcgagagagagagagagattgagagagagctccgcgggagagcgcgtcgaagatggtgcagcggctgacctaccggaagcggcacagctacgccacgaaatccaaccagacccgcgtcgtcaagacccccggtgggaggcttgtgtaccagtacaccaagaagcgggcgagcgggccgaaatgcccagtcaccgggaagaagatccaaggaattccacacctgagacctgctgagtacaagaggtccagattgtcaaggaatcgcaggaccgtgaaccgtccttacggtggtgtcctgtctggtactgcagtcagagagaggatcatccgggcttttttggtcgaggagcagaagattgtgaagaaggtgttgaagatccagaagaccaaggacaagtcagctaaatgattgcaagatagagacattgccgcgatgtttaagcttctccaaatttgtttttaagcaatcaagagaatttttcttctggatttgggggaaatcccgtttcctagtgctgctagtatgtgagatcaaatcgacatgattgtttaaattttgagcgctagttctctagagtactactacaaccttgtgtggatcctttgatgcaagttttgaaactcccaagtcccaagtttgcgcaaaaaaaaaaaaaaaaaaaacaaaatatagatgctttcccttactaggttcctgcgattagcatgaactgcgaatgggtctattttgaatattcatcagttgtgtaccgatc

SEQ ID NO: 43725 - DNA, 336 bp, Oryza sativa
  Clone ID: PAT_MRT4530_46854C.1
atggggcaggcggcgactgtggcgcagctggtcggcgcagacgtcggcaggctcatctccatgatcatgcaggcggcgttgccggctcagcggaacaagaaggagtgcgagcagctcgcccgccgacccggaggtgatgcggcggccggaggtccggcggtcgctggccgggctcggcgacacgctccggcggtgactaagtacaaactgctagatgtgaacactcgcacctcccctgctgctcttatggatcttgcggcggcatgcgatctgggcgaacgtgatttcgatcagctctccaaggtgctagctgatgctgctcatgctgtcaactga

SEQ ID NO: 43726 - DNA, 1752 bp, Oryza sativa
  Clone ID: PAT_MRT4530_46855C.1
atggcggctccgctgcttctggtggtggtggtggtgtgggccaaattctgtggtcggcctaattcattcaaggctgtgagtgggccacaatttgattatgggtcgtttttgttgcaaggaaagatgaatgcgaatgtgttgggcggcgatgtggtggcggacgatttcaactacttctccggtgtgagcaccatctttgtggccaacatccaggaggtgaaggaccgggtttcccagatcgagctcctcttctgcagccagctcttccctcatgtccaggccatgtggaaggcggccaaggatgcgtggatggagagggaggccgccctattgagccaattggaggagctgagcagcgggaagcggcacgcggaggagaaggcgctgcagctggggtgctcccttgatgagatgaaggggaagcttgcggatgccgagcgatcggtcgcggggcatgaggttgagaagaagcggcttctggggagattggaggaggaaattgggaacaaagatgaggttattcgccggctagagagggagattgcggagaaggctgctgatttttccagggagagagatgcccatcagaggcttttgcagctggttgagttgaaggacaagaatttgcttctcgagcagaataaacggagggatgcggaggagatggcactgcagctggggaactctcttgaggatatgaaggggaactttgagcgattgatcgcgaggcatgaggttgagaaggagcgaattccggggaggttggaggaggaaatggggaaaaaggatgaggttattgggcggctagagagcgagattgcggagaaggctgctgatgtctctagggaaagagatgcccatcagaggatgctgcagcaggttgagttgaaggataaggatctgcttctcgagcagaataagcggaaggacctgatcgaggattacactaagctgaagacactctacaaggatttgaagtctcagtacaactttcttgttggaaagattggccagaatgaaggctccaagtctcctgtagtcaatgtggtggatcggaaaacctccggaagccctccaagcaagagaaagctcaaagatctggtggacactaaaaaggagaacaatcaggcagtatctaagactgtagatgagaaaaatggtcctgcttcaagtgcaaaggcacaaggtacccaccatgctagctcagtcaggagtccattcagtaactcgcgcctttgtctaccgtctcgtacaaccaatcctccaccaaagaatgctactagcaattcaaaaacagaggcagcatctagtttcaccgcccaagtctacactggagggagactcgcgcgcgctgtcaaaaatatgatcaggaatcctaaaacgccagaagaagcacaagcccttgctgcctctcctcctaaagatatggacttcaataactctgatgatgagactcaagatgtcaatattgccacccagggccagaaaaacatgccagttcccaagcagcaaagtacaatttcaatccaaccaccaaataaaggtttcaaatacacagaacctgtaagaaaaaaagctgaccgggagaatctgaaaggcgttgagtgcaagcagtgcaagaaattctatgatgctgttcttccagatggccgcacaaatggtgacggtgtggactctacaagcatgaggtgtgagcatcatgatggcgtatccagacatcgctacaggtacgcgcgcgccgctgacacctga

SEQ ID NO: 43727 - DNA, 423 bp, Oryza sativa
  Clone ID: PAT_MRT4530_46856C.1
atgggcggatgtgagccggaactggttcggggcgtgacactgctcggcctcaagcgagctccgcccaagctcccaggcgtactactggtgccgcgcccgacgctccttcccgagcgtccagtagagccgccgatacatgtcgacgagacgccggtgttgcgcctacagctcttccgccgacgcaacatctcctcttgggtgagtgtctctgaagtggcctccatctgcggcgctgccctccccttctcccccatcgccggccgtcagacctcctacggcccacgggaggaggacatggcggcgcggcagcaggattcgtaccggcaggcgccgctatcgccaaccgttggacctcctcccccgccttaccccggcgacctcctccccacccaccagcctgcctacctgagaggagaaaagtga

SEQ ID NO: 43728 - DNA, 2019 bp, Oryza sativa
  Clone ID: PAT_MRT4530_46857C.1
atgaatgcgaatgtgttgggcggcgatgtggtggcggacgatttcaactacttctccggtgtgagcaccatctttgtggccaacatccaggaggtgaaggaccgggtttcccagatcgagctcctcttctgcagccagctcttccctcatgtccaggccatgtggaaggcggccaaggatgcgtggatggagagggaggccgccctattgagccaattggaggagctgagcagcgggaagcggcacgcggaggagaaggcgctgcagctggggtgctcccttgatgagatgaaggggaagcttgcggatgccgagcgatcggtcgcggggcatgaggttgagaagaagcggcttctggggagattggaggaggaaattgggaacaaagatgaggttattcgccggctagagagggagattgcggagaaggctgctgatttttccagggagagagatgcccatcagaggcttttgcagctggttgagttgaaggacaagaatttgcttctcgagcagaataaacggagggatgcggaggagatggcactgcagctggggaactctcttgaggatatgaaggggaactttgagcgattgatcgcgaggcatgaggttgagaaggagcgaattccggggaggttggaggaggaaatggggaaaaaggatgaggttattgggcggctagagagcgagattgcggagaaggctgctgatgtctctagggaaagagatgcccatcagaggatgctgcagcaggttgagttgaaggataaggatctgcttctcgagcagaataagcggaaggacctgatcgaggattacactaagctgaagacactctacaaggatttgaagtctcagtacaactttcttgttggaaagattggccagaatgaaggctccaagtctcctgtagtcaatgtggtggatcggaaaacctccggaagccctccaagcaagagaaagctcaaagatctggtggacactaaaaaggagaacaatcaggcagtatctaagactgtagatgagaaaaatggtcctgcttcaagtgcaaaggcacaaggtacccaccatgctagctcagtcaggagtccattcagtaactcgcgcctttgtctaccgtctcgtacaaccaatcctccaccaaagaatgctactagcaattcaaaaacagaggcagcatctagtttcacccgcccaagtctacactggagggagactcgcgcgcgtaaagaaccaggcgttgtagatccacatgatgatttccttgacacacctctggaggctgtcaaaaatatgatcaggaatcctaaaacgccagaagaagcacaagcccttgctgcctctcctcctaaagatatggacttcaataactctgatgatgagactcaagatgtcaatattgccacccagggccagaaaaacatgccagttcccaagcagcaaagtacaatttcaatccaaccaccaaataaaggtttcaaatacacagaacctgtaagaaaaaaggctgaccgggagaatctgaaaggcgttgagtgcaagcagtgcaagaaattctatgatgctgttcttccagatggccgcacaaatggtgacggtgtggactctacaagcatgaggtgtgagcatcatgatggcgtatccagacatcgctacagcctttctcctttccattgtccatttgatcacgagattcaggtcaagatcgatcaggacgatttcacgtcagatctgctaagaaacaggatgcataacaacaaagcagagtcctgtgtgcagaataacacgttggcaaacgataagttccagaactatcttccgttatggcaactgtacatttgctcagttgcacgtgctaattgtcttcctagtcctgtcccttcgcacccatgtgctcatgtcagtctttccacctcagcgatacaaattactctccagttttctgttaaaaataaagtgcatactaaggcaagtataaaggtagagaccggtctctacgttaattacgttaattag

SEQ ID NO: 43729 - DNA, 1497 bp, Oryza sativa
  unsure (1)..(1497): unsure at all n locations
  Clone ID: PAT_MRT4530_46858C.1
cccccatccgtttccctcgccgccgacgagtccccgccgccggctgcagcccaggtatggaggaatccgacgcggcggccgcaagcgccaaggcccccaacggcgaggcctccggtggcggcggccgaccggtggaggtggaggacacgctccccggcgtgctccgcagcttcgtcgacggcgtctgctcgcagggcggcggcggcggcggaggggagccgctgctgcggaggatcagggcggcgtcctgcgagaccgccccgcggctgcgcgaggcgtcgaggaactcggcgcgggacctgctcgagtggaccagaaggggcagcggcctccgcgccatcctcgtcatctcggttggaacgatcacacttattgcattgactggccttctaatcttcatgttcttcctgctggttgcaaccaccaatgctgttgttgtttccgtcctgatgtcgctggcagctgctggaggattcctggctatgttctttgcttgcttggttgcagtgtatattggagtagtatcagttgctgtttttgtcatttccgccacagtcatctcagcaattgtcggcgtcatgattgctactggttggcttggattcttttggatgatttggtttgctgcaaggaagagcatggacctcacgaagcactcgatcggcgtgacaaattcggctatccagtcatactctgcttctcgccatgcaaagcagaagcctatcgactgaggcgatctgtgattcggttgtgagctatgtggctgccatatcgtctacgagttatgtgctgttgtctatgcctctatgtgaattacggcttgtctagtttttgggagtgtatagaacatgcattgtagcagagtacagctatggatgatctctctgtatattggtactttttagtgtgaggcactctctgaaacctctctagtttgtatgatttggcaccgtagttggtatatggaataagctgtgctgcaaagcacttgttcgttctccacaaacttactctctctttctgtcatgaaaaccataaaatcccttagaggtgtccatatttacaaactagtttttaggtgtgttagttaatctaatctgtaatcatacatcttctgttagcacattaatagccaccaatatatcatgttttgcaacattaacacagttatcctttgttgcccataccactttaacatatctggttggtcatgtttattaatactataaatataaatatgtcattattaactatcctgtcccaataagtccagtgagaaaaagtatttaaaacattctgtcttcagttcacttagtcattttgtaatgtactaacatgttattgggtaagcaccgccaagataacagctagccagtggctgctgctttaggggagagaagagtgactagacagtccaagtttgcctattcttttccaaataacattangtgctcctgacgtagagcatgataagtaacaatagaggcatttttttgc

SEQ ID NO: 43730 - DNA, 359 bp, Oryza sativa
  unsure (1)..(359): unsure at all n locations
  Clone ID: PAT_MRT4530_46859C.1
ggataaaagagaagagtagaagatgttcagagaaattncacagnaccctnacaagcctcattataagcgcaaaggncactgtnnnattnatcgaacaaacagctatggagagcgatgatacttctcagaaaaaaaaaactaatggccagaaatctcagaaacaatnatgatgncgcgaacactgaagntaggctcatggntcaggtcgaccttcgacattcttctcttatcgactgaaaaaggatagatgaaaggtacctntnaccaaagctcgnaaacacagccactaccaactttncagnattnnnctggnctttttgcaactttaatggcagctgctgctgctgccccaaatgaaa

SEQ ID NO: 43731 - DNA, 204 bp, Oryza sativa
  Clone ID: PAT_MRT4530_4685C.1
atggggtggccgatcagaccggactacattgtaacgggtggccggacagaccggccatggctgcggctctggcggctctgggtcgccaatcgcgaggccaaccataggcattcaacccgctggtcaggccgacttgggatcatcggtcagaccggcataatgtcctcggtcattaccccttttgatagtatgacaaagctataa

SEQ ID NO: 43732 - DNA, 852 bp, Oryza sativa
  Clone ID: PAT_MRT4530_46860C.1
atgtggaggttggcccatgaggaagaagactggatgctagttggatttgagattgccttgccctcgctcctagacatggctaaggacctggatcttgacatcccttacgatgagccagccttgaaagcaatatatgccgagagagaaaggaagcttgccaagattccaagagacgtgctacactctatgccaacaactttacttcatagccttgagggaatggttgacttggactgggaaaagctcctcaagctccggtgtctcgatgggtccttccattgctcccctgcttcgacggctactgctttccagcaaacaggagaccagaaatgctttgaatacctcgatggaatcgtcaaaaagttcaatggaggagttccctgtatctaccctttggatgtgtacgaacgcttatgggccgtcgataggctgacgaggctgggcatatcaaggcacttcacaagtgaaattgaggattgcttagactacattttcaggaactggactccagatggattagctcacacaaagaactgcccggtaaaggatatcgatgacacggccatgggtttccgtctcctccgactttacggataccaagtcgacccatgtgtgttgaagaagttcgaaaaggatggcaagttcttctgcttgcacggggagtccaacccatcctctgtcaccccaatgtacaacacttaccgggcctcccagctcaaatttcctggcgatgacggtgtccttgggcgagctgaggtgttttgccgctcattcctccaagacaggagaggctcaaacagaatgaaggacaagtgggccatcgccaaggatatcccaggcgaggtatgttaa

SEQ ID NO: 43733 - DNA, 1134 bp, Oryza sativa
  Clone ID: PAT_MRT4530_46861C.1
gagcatgatgagtatgattttgtcgccccagtcttaggatccgaattacggatctgtgctgattgacatgttatcaaatctgactccatgaggaaaaagaaaactttccatttatcccttttcctacctcgcctcgccgcccgcaccgagcaaactcaaaccctcgccgcaagaaagaaaaacaaatcgagagaaaaaaccctcgctgctcgccgccccaagcgaagccagccatggtggtgtacacgcaggagcacgtgtaccggcacccgtgggaccgcgtcacggcggcggcgtggcggaagttcaccgacccggcgtcgcgcacggcgctctcccacgtcgccgacgtccacaccctccaccgccgcgtcgacccggaggcggggcggctgcaggctgcgcgctccatcacggtgcgctccccgccgctccccttcatcctccgccgcctcctccccgccgcggcgtcgtccccgtccggcgcggcgctctgccactgcgtcgagacctcgctcgtcgacgcgccgcgccgcgccatggacgtcgtcgtccgcaacgtctccctccgcggcctcatcgaggtcgaggagcggtccacctaccggccgcacccggagcggcccgaggagtggacgcagttcaggcaggagaccacgatccggtgccgaccgctctcggccctcgccgccgtcgcggagaaggtcgagacccgctgcgccgagagattcctgcagaacagcgccaaggggagggaggtcgtcgagcggatctgccggtatctcgaggccgaggccgccggtgctgcatcctccgccatctgagttggcctggtttgcgcctcctcacttggccttccttgatctgatcggatcgaaggattcgctcgatctgtgctgcgtgcgcgcggcgggacctcgcctcttggccaggtcccttgcagttttccatttttttttatgaaatgatgagctgaatcctgaatggaataaagcttctggacatatacttaatttcttcttgaccgtggaaccatgttaaccccaaaaaaaaaaaaaaaatgttaagcatattcagatatgctatgacatttctagttgttattgtgctgatttgacgaaaaaaaaaaaaaaa

SEQ ID NO: 43734 - DNA, 238 bp, Oryza sativa
  unsure (1)..(238): unsure at all n locations
  Clone ID: PAT_MRT4530_46862C.1
atgaagatgtgttcacaactacataggtggtgacggttgctgatttcgggaatcaaattcctcaggctggcanaaatggagagctttcatgctaaaccttaatattcttcaacaagcagattaaagggaacaagagggagatcattcaggttggcctcccactatttcagcccaccacagaggaatctaattgctacatagaagcactccccctagacctccaggctgccattgaaca

SEQ ID NO: 43735 - DNA, 720 bp, Oryza sativa
  unsure (1)..(720): unsure at all n locations
  Clone ID: PAT_MRT4530_46863C.1
tttttttttttttttttttttttttttccctaaaaaaaaagtagcacaacgcatcattcattccttattatcaactttttgggacaattatctgtaccatgttcaattatagacatataatacaaagaatttgaaagaaatttgcaatctatttgtgaaccatatctctttattgtgctataaataaaaagcaaactttacattccatcggtaggcaatgagttggcacaaggcttcattttatctgtacgagtagaaccaaagtaactcagcaaaattttcacaccagctgtctttgacactagattcatggtctaatgtactcaataatgcagttctccttgagccattcgagcaccttcgctgcctctagaacatcctgaacctgctgcttgatgctcccctcatcatagtcttgattatagtgtttgaactcttctatagagttctcaacttcctttaccagttgctcgggcgaaaactgcagattttcagccttgaatatttcaccaacagccaacattggtttaatgattctattaatattttctctctcactttctaggtattcctgaactgactttgggcttgaaagggatgccagctggtctttatctagcttcctttctgcctggagttgtagaagtttggctccatacagctgctggccttgtttctntgcccgaaagtgtgacgagctcgtgccgctcgtgccgaatt

SEQ ID NO: 43736 - DNA, 189 bp, Oryza sativa
  Clone ID: PAT_MRT4530_46864C.1
atgtcggaggcggcggatgtgcggcgcatcttgcacgcagctgcgcgactcccgtcgcgtggcgacgcggcctctgcgaggtacggctcgtgtcgtgtgtgcggccgatggagcgctcgcccttggtgcgtgcgtgggcgcgtggcggagaagatgggccggttgatcggccagaaacagcaggcataa

SEQ ID NO: 43737 - DNA, 573 bp, Oryza sativa
  Clone ID: PAT_MRT4530_46865C.1
ggagtggtgggctccacatggcaacacctcggtccacggtggaccgggtgcacccgcggctcaccagccggcgccgtgggccccacgcgtcagccgcacccgagggcacgggtggctgacggccgggccccacgcggcggccacacggcgcgcccggaggtggccacgtcggcgcggccgacgggaggcggcgcccgcgccccgatggtcgccgccggtgaccaccggcgcggcagagcggcggccgagagaggggagggaagggggaaaggaggcggcagtccaatgctcaccccgaggcgatggtggcgacggaggaggcggccggagcggaagtaggcggtggtgcggctcgggtccagggggtcggcggtgttccggcggtcggcgaccgaaacggaggggtggacgaggtcagcgccaaggaaggaggaggtccggggcgacgacagcggcgaaccggagctcggcagtggcggcggagagagaggagagcggcgcgggctcgattccggtggggagagagggcggcgagtggcggaaacggtggtgggagctcggggagggtttata

SEQ ID NO: 43738 - DNA, 243 bp, Oryza sativa
  Clone ID: PAT_MRT4530_46866C.1
gaggcgtgcgtcatacactttagttaaattacaacatagacattttctggatattgccgcctgctactataacggctggggcatcttcatgaccatggtggttcttcaccctctgcaatttcacaaagtaaaatcactaatcactcgaacacctctgcttctggcgaggtacctacctataattagctcacaattaaaacctcccatatgagtgttgttcctgtcacatctaattattgctga

SEQ ID NO: 43739 - DNA, 431 bp, Oryza sativa
  unsure (1)..(431): unsure at all n locations
  Clone ID: PAT_MRT4530_46867C.1
tgttcccaccccggaaagcgtttatcctctcttgtccccgtgatcagtgtattttatccttcatctttgagtgttgtgtcttcaagaaatattatcaaaaatgtctggcgagctgaaaggcctaccgatgcattcgtacaacacgttagtcttgctatcacagtgcangngggccaattggtgatccatggcctggatcgattcttatacactatcgagggaatcaactactttgcagtaccaaaagagcagcgtcgtggcggcggcgaaggtatcacccgtatcgacttttatccaatgttacgtcgcattccttggatgttcctggtggttgtcctcttctggttccgtgtggcgcgcatcggtttgagcattgtttcctggttngtgggcggcgaacctatcacggccgaaactgcagtaaaatgtat

SEQ ID NO: 43740 - DNA, 591 bp, Oryza sativa
  Clone ID: PAT_MRT4530_46868C.1
atgtcggggtgccacgtcagcaccattatctttccccctcttctctttctttttttctttcgttccttcctccctctcgctccctgctctcgcacgggcggcgtcccgcgcggccggagggtggtgtggccggcgacggcggctcccgagtggcggcgcgagctcgccagcctcctcatccccttcgtgcggtcggcgatggcggcgcacggctgtcgccatcttcgactcaacgccgccgccatcaagtcactgccatcggcgatggcggcacgcggcagcggccggcgtgggaggcggaggagggacctcctcacccgcgtcaactcccaccctcaggtgctcgcccagtgcgagctcaccctcaacgccatggtgctcgccgacggcatccaggacgacgccggcgacgtgacgcggttcgtgaccaagatcgagagggaggggacgtcggtgatgttcaaggtgttgccggccttcgcgttccgggacatcagcctgaccaagatcgagagttggccacaccgccaccgtcccatccggctcatcgatgacaccaacgtgggccctttcctctgccgcgccacctga

SEQ ID NO: 43741 - DNA, 601 bp, Oryza sativa
  unsure (1)..(601): unsure at all n locations
  Clone ID: PAT_MRT4530_46869C.1
atgggctttgtgcaaaatttgacacaagttctagccgctgaacttgatttcacagccgagttgaggaccatggcgttgagggaggaggtccggcgtggcgacgtcgatgacgagggcgagggcctccgcgcgtacctcctccgcctcccacgccggccgctgccgcgtgccgccatcgccgatggcagtgacttgatggcggcggcgttgagtcgaagatggcgacagccgtgcgccgccatcgccgaccgcacgaaggggatgaggaggctggcgagctcgcgccgccactcgggagccgccgtcgccggccacaccaccctccggccgcgcgggacgccgcccgtgcgagagcagggagcgagagggaggaaggaacgaaagaaaaaaagaaagagaagagggggaaagataatggtgctgacgtggcaccccgacatcccacgtggctacggtcgcctggaacttggaggcggcggcggcacccccccccacccnnnncnnantaccaccggcgaggcggcgacggcggcggcggcggcaagcccccccgcgccgaggccccgggccggcgcaggcccggcccgcggcccatttgatg

SEQ ID NO: 43742 - DNA, 774 bp, Oryza sativa
  Clone ID: PAT_MRT4530_4686C.1
atgttcgccgccacgatctactccgccgcggtgctcggccacgccgtcgcggagctccggcaccacgcggcgggccggcgcccgcggtcggacgccgccgccgacgcgacgccggtgtacgagaccaaggcggagagggaccgccgcgagcacggcaaggagggcatcctcgtcgccgtcgtcttggtgaaggtcaccgtcgccgcgtccctcgtcctcacgtcatgggtggtggggaaggaggcaccggcggagggcggcggcggcggcatgccgacggcggcggacgcgctgtgcttggcggcgtcggtgtcggggccgtacctcgccggctggacgctgttcgtgacgagcacgctgatgcgcgggtccttcatctccggcgacaccatgtggatcgtcatggcgtgcctgggcgcgtcatggctgatcgtcccggccatcgccggcgccgccctccacctcttcgtcgccttcatctacggccactggctcttcggcatcgccatggccggcttcctcggctacaccatcgccgtcaacgaccactaccaggagctcatgcgcatcataagctgtgattttacaggagccaacctcggacggcgtctgacgcttccggcttgctcgtcggacgagaagcttgcgattcttgttcagctgagatcgatgaaagtgccagcgttagactctctcatcaacacggctgcttcagcgtttctggccattgcccatcttgtcattgttctagaaattaatgtgccggatccatga

SEQ ID NO: 43743 - DNA, 2535 bp, Oryza sativa
  Clone ID: PAT_MRT4530_46870C.1
atggggtcagcaacggggggtaggctagtgttggcagtggaggcaaacatcttcaacgagttgcagtcgcaggacatcctgacagtcagcgtttggaacataagaaatatggtactcgttactgcctccgacttgttgacgttgccattgttgccctcatacattcgtgttggggagggggcgattgctcacgcatttactgcaatactagcaagcccagtccttccgatgttcaatattctactcctattcaacttttttggtcctatcgtgtgcatcggcctctcgtcatggcgcctgaggcaccgtgattaccagggccattgggacaaatcctcatcctcctccattattactggtgaagcgagcagcttagcgaacctgacgccaggactggacttcttctacgtcctggttctgtgccagtgtgtgctctactgcttcttgatatgtcttctcatttgcgagatcagcctcgccgttaatttctccaagcaatgcaagttcccagaagagtggcgcatgaggtcagttagaaaataccttcagtacacccggaagaaatgcgtgcgggaccctgctcctcttgctgagaaaaggacctttctcagctacgcagcagggctgctggaatctgagtcgcaggaagaatgcctctggggagcaaggatcctagacaggctcatcacggccggggaagatgcgagtagcattattcttcgctccaagaccaagatacagatactcgtagataagctggggagcacacaaacaggaacaggatcatcagagtcagaatcagatggcaacaacaacaaagagatgagagtcctcgccgcgaggattgtggcgcatctcgccggcggcatccagcttgcgcacttccctggagcaatccggtccgtgtcatcattgctcgaaacaaccgtccagccactctggaacaataatcagcgcgacgatgatcagctcttaccatctgaaagaagagatcgggaatgggctcgtagaaaagcagaaatggagaagaagcggcgtgagaggaagcagcggcggcgtgagaggaagaagccaggtgttggcatgcgacaaaacgagaacgatggcagggaagaagaagaagaacaagtaggctgcaacgagctgatcctgcagggactcaggattctcgaggggctcacctgcgacccacacaattgcacggacatccgcgccgctccgggcctcctcgacaagatcaccgtgccgctctactctgccacgctcatccaagacatcggcaggagcgagccgtgggccaacatagcaaacagctcgctcaaggtggtgcaccacctcataacccatgccgctcctggaacaaggctgcgccacgagatctcctcaaataaacaggcggtcaccaacctgcaaagtattcttgatctgggaacagaggagcagcaggtgcgaaccatggagatcttcactgaacttgttttggattcttctctcgacatcaccttggaaaccagagaaaacctcgtcaggaagcaattgcagaccttcctcctcgctaatggaggggaagatgaaatacaactaccaccagttcctcctgctgcaaccaatcccatcaagaagaggaagaagaagaagctgagagcccctatacctatcaagaagaagaagaagatgaacaagaccatcaaagctacagctggggaaacactgtcaatcttatcatcaaagagtgaagctatctctaagttcatcgtgagggagcataatgacatcgttgatcgtctcattggaatgcttgatgccaagtacaacaccagacacaggacaatatcagccgagatcttggagaatctttgcacccactgtaaggaacacgtcgatcaaactttcctccaaaaggtcctcgatgaaatacagaaaacacatgaaacaaaagcatctgcaagaacaacttctgcacggggagccaatgaagagaactggggaattttttcacaggtagatgatgaagagatgcaacgtccaaagcagaattgctggaaggcgcatggaaaggcatcaaagcagaaaggccggagggcccatgacaaggcatccgatcaagaaaacgatcacgaagaagctgacatgaaggaactgcaagaagcgttgctatccctgaccttggtgatgcgtgacaaactgatcgaaccagagaactttgctcttatcatcgaagagaaaatctcaggtggtggaggcgcttttctgaatatgctcaaggctatcgtagacgacaactgccaacgtcaggcgacgcctgtctctctgaggatcatcaagctctgcggccagattgctgaaccaattatgcgccgcaaccgctgcagtgatcagaagaaggaattcgtgaagttactaaccaaggccacgaataccatggctaaccttgaaagctgcatgcttttcactggaaccgactgtggaatggagaagaccgccaggcctctcctctctgatattgagaaacaactgaaagagttggttacctag

SEQ ID NO: 43744 - DNA, 508 bp, Oryza sativa
  Clone ID: PAT_MRT4530_46871C.1
cccacgcgtccgcccacgcgtccggatcttcaatgatcgtaggtgtatgagtaaattcagtttagccatatggttggattttgtatgtgcaagaagaaattgaaacttagactaagttcagagaaattttgctttgttattgtctagagctagcaacttgaattttcaaaacagagagccagtagccgcatgaattgatttcttctggataagcacgagttaatctgccaagtaggatcagagcacgcactaatagtcgtttctttaattaaaaaaaaggaagaaaggactaatggtttccttggataagtgaaactgtccaaattgataacgtcttctgcgttattagtgacaactagtactagcaagtactcctgcctttgtttttctttcgagatagtagtgtactgttatgtctaactaaagccatgtattaattatatgtttgctatgttatatagtcggataattagagcaaaacaattaacaaaccgtatatagtacaact

SEQ ID NO: 43745 - DNA, 634 bp, Oryza sativa
  Clone ID: PAT_MRT4530_46872C.1
aaaagataaaacccaacttgatgtccagtacttttacattatctctaacggtattatattccacttttaatattgctaccagtagaagtaatctaagctgttgatttattagttttattcagatcgatggtagtataaataaatataatgtatgggataagaaaaagatgacaaatgtagattaattactatactaccaatattatagtatagatcattatggaagttgtccacgtacattaatcaagccctcaaacaggccttacatagtcacttcgaatcccacatggggtcagaccactattgaacagattaatggacaatgtttgtttcgttctcggagttggtagatgaattgaatctaatttgacagttgagagacgaaacataaaccagaccagagttaagggatatgagaaatataccttttcctttgatgttttctcctaactttctgtcgatttagttttccagtacatatatatttttttctcattgacagtgaaatacgacgcatgcctgatggatggaacttcagtgtccaaatctgaaggtgttgaattcagccttaccgacggcttcttctgtcctgcatttgcacatgctgtgcatactatgaaagaaggagaggaag

SEQ ID NO: 43746 - DNA, 1459 bp, Oryza sativa
  Clone ID: PAT_MRT4530_46873C.1
aatattcaggcaattttgcgctctcatctcacatgatcatatcaagatttcatcccatcgacgagagatcgatcttcgatggcgagatgctaagctagcttagctttgctcaattcgcctccaccaccttgcactgcctcggccggaaattctcctccgacagcagcgacgccaccagccgctgcagccgctcggcgccaggccccggccgcaccgcctcgccgccgccgccggcaacgccgcaggggtcgacggcgccgccggtagtagtactgttgctgtcgccatcggcggcggcggcggcgccgcaccaggcgccgggggcgaccatgccggggcggcgggagaggaggtcggcgtcgatgcggtcgagaacggagtcgtcgcggcggaacttgcgggcgaagggggcgccgctggcgagcatggggccccagtcagcgtcggcgaggtagtgcgggtgctgcatgggcgggttgtcccaggagatgaagtggaggtcgctgttcaccgtggtgttcctgaactcgccggcgttgcaggcgacggtgtggaagtagccctccggcgacgagatgaagttggcgtagtacatgagcaccgtccgcgggaggttgtcccacccccagatcaggtactccacgaacggcctcgatagcaccatccacgctgacccagtgaagagcttgaatgctgtcggcaagctcctcctctcgggaatccagaacaattcaccctttgtcttcatgtacagcgctgggtccacgatcattggcatcgcccttgcaaatgctttccatccgatgtcgcttgtgtgatcgatgaagttgagatcgcgtggcagcttggagaacacgtgcatcaaatcatcctgtgtgacgagggggtagtcggaggcggagaggttgatgaaccagtcccagtcggcgccgcggccgccgccgcggccccagaggaaggcggcggcggcgtggagcgtggtggtgaccatggtcgggccgcggtaggtgacgaggttggccttgcggatgacgcggacgttggcggccgcggagagggccgggtgcgcggcgacgaaggcggcgaggccggcgcggtcgtcgtcgggcgcctccgcgtcgaggtggaggatgtagctgttgcgggggtggtagagcgcgaggaggcagcgccgcatcatgggcgcgtccccggccgagccggagatgaggtaggcgaaccgcggcggcgagggtggcggtgtcggcggcggcgccgagagcgtggaggaggactcgacgaagagcggcggcagcgcgcggcgcggggaggtggtggtgaagagggaggcggggcggagcgggaagggcggggaggcggcgaggaggaggaggagcgcgaagacggcccccgccgcgacggagagcagccagcggaggtcgacggtggcggcggcgcggggcacggcgtgggtgtccat

SEQ ID NO: 43747 - DNA, 756 bp, Oryza sativa
  Clone ID: PAT_MRT4530_46874C.1
tggagcttgccaccggcaagagtgtgcacaaagagaaaatggcatatgatgccaattatcaagaggaattccctgaagaggaattacagcgagcaacaaacattgctctcaaaattctccgtgctgcagatagatgggttgctacacggacactaaaggcagttacatcccatccaattggttcgccacagctggtcgattactgcgtcaagacccttggtggtacaagaaccgacgatgggatggttgttgcaattcgatgcaacagtgagatgaacactgtagagtacaggcttacgactgaaaccctcttcccaccaaacaacgtgtgcaccctaacccaagaccacctattccgtgacatcaagttcttgtatgatgcgcttctctacccatacacaatgcatccttatatgccagaagaaaattatcagcatgccaagaggtctgcaatgatccttttggactgcaagcaattcatcaagcattatgatctggaagaagacttcttacctcaaaacccatcccagttgcacatttggtgccaagtggaactagctgaccaggttgatgatccaccttgtatcccagcagagctcataactcttccacaggcagcaactatcgctgatctcaaaggggaggctgcgagagcatttcgagacatctacctaatgttacagagttttgtagctgaccagcttcttgattgtgcaactgcaagcgacacaacacaaatcaagctcttgtttggag

SEQ ID NO: 43748 - DNA, 934 bp, Oryza sativa
  Clone ID: PAT_MRT4530_46875C.1
gcacgagggccgtcgccgccgtcgtcgccgccgcaatggatctcgtgtcgccgtccgagcacctgtgctacgtgcgctgcacctactgcaacaccgtgctcgcggttggagtcccatgcaagaggctgatggacaccgtgaccgtgaaatgtggccactgcaacaacctctccttcctcagcccgcggccgccgatggtgcagccgctctccccaactgatcaccccttgggcccgtttcagggaccttgcactgactgcaggaggaaccagccgctgccgctggtctcgccgacatcaaatgagggtagcccaagagcacccttcgttgtgaagcccccagagaagaaacaccgcctcccatctgcttacaaccgcttcatgagggaggaaatacagcgtatcaaagctgccaagccagatatccctcacagggaggccttcagcatggctgccaagaactgggcgaagtgcgacccccgctgctcatcgacggtttccacctccaacagcaaccccgagcccagagtagtagctgctcccattcctcatcaggagagggccaacgagcaggtggtcgagagcttcgacatcttcaagcagatggagcgcagcggctagggcggcggcggcggccggagccggcggcgatctatatcggcggtgaagctcgtatgaagctagctagcctgcaggccggccactggggagagtaccaaatttcagatcccccttattatcaccgtcgtcagctcagctcatgcatgcatgctcatcgttcccctttagcatatatctgtgctcgtttggtgtttattagttaattatgtttgatcttgttaatttgttgttgcatggagtatgtaccccctataagaccagctgctgctaccgtacgatatacgtacgtatgctatatatatatatatatatat

SEQ ID NO: 43749 - DNA, 359 bp, Oryza sativa
  Clone ID: PAT_MRT4530_46876C.1
tcggctttcttgatcaatggctttatggtggtggaggggaagacaccccactcccttggcaagtcctgatgatcatgcttcttggaactcctaaaggcccggcctatatctatgatgggctctctccgaaggctgcgcatggctacatgctgactaccagttgccttcttgaccaccaatgaaaggttccagcgtggaatcttggtgctgtgaagccatcgggctaagaaagcagtgatgttactacccgtgatacttgcaacctgaggttacatggcacctgagtaccccagcacggtgatgttaaatgagaggaggatggccaatagacgtggaggtctgattagggctactatagc

SEQ ID NO: 43750 - DNA, 1103 bp, Oryza sativa
  Clone ID: PAT_MRT4530_46877C.1
attttggaatctggaacattgggtccaaaatatgatgcatctgtggtaattcctctccttactgaaaactatggagcatcccgagaccctcctgagaaacaggcaccaatgtgcacagtccactctttcccacacaatattgaccactgtctgacatgggctcgttcagagtttgagggtttgctagagaaaactccaaatgaagtgaactcttttatttccaatccagctcaatatgctgctgctatgagaaaggcaggtgatgctcaagcaagggaattgctcgagcgtgtttgtgaatgccttgacaaggagcgatgtgatggatttgaagattgcattgcctgcgctagactgaaatttgaagactacttcgctactcgtgcgtggcagctaacattcacatttcctgaagatgcggtcactagcacgggtgcttttttctggtctgcccccaaacggtttcctcgcccactgcaattctctactgtgaattcatctcacattcacttcatactggctgcttccatattgagagcagtgtcattcgggatctccatacccgactgggcaaagaacacaagtaatctggtcgatgctgttagtaaggttgtagtgcctgaatttgaaccgaagagtggggttaagattgagacagatgagaaagcttctaacatctctagtgcttctgttgatgatgcttctgttattgaagatcttttaaccaagctggaagcatctgcaaaaaaattacctcctggattccagatgaaggctattcagtttgagaaggatgatgacacaaacttccacatggatttaattgctgggcttgcaaatatgcgtgcaaggaactatggtattcaagaggtcgacaagctgaaggcgaagttcattgcaggaagaatcattccggcgatcgcaacttcgacagccatggcaacaggacttgtgtgccttgagctttacaaggttctggctggtgggcaccccgtcgaagactaccgcaattcgtttgctaacttggcaataccaatgttctccatggctgaacctcttccacttgaggagttctgcgacagtgatgttgccctcgatagacc

SEQ ID NO: 43751 - DNA, 623 bp, Oryza sativa
  Clone ID: PAT_MRT4530_46878C.1
cttttcatccccaatccgacggccagtccgaggtgacaaataagatcattgccatgtacctacattgtctcactggcgatcgtcctcgacagtggcttcgatggctgccatgggcagagtactgctacaacacgtcgtaccaatcgtcactccggacgtctctgtttcgtgttgtcgacgagcgcgagccgccgacgcttcgagcttacgagccgggctccacaaggttgccggcggtacaacaggcgctccaagaacgggatgattttctgcgcgccatccgtgatcgtttggaacaagctcaacaaacctacaagacagcatatgatggcaagcaccgagtgttggagttggcagtaggcgcttcgtttgcttcactgaccagcgcatcggatcagtggcctatcgcctgcggctgcctccaggtgctggcttacatgatgccggcggctgaggcgtcctgggtcggattggatgattttcatgctcagtatccagattttcagctcgcggacgagctgcttctccaggggggagagatgtcatgtggggattgcattatgcacggcgccgtctcagagttccgccgacacagccgtaatgaggaacagtcatcggtttag

SEQ ID NO: 43752 - DNA, 475 bp, Oryza sativa
  Clone ID: PAT_MRT4530_46879C.1
acactaccatcttctgaagctttattatttgctgccaattgtcacccagatgacaaatctattcggttattcatctgggccatcggtgattttcaaatacatcagaaattctgaccctgttcttgattcttgaatccacagagctactattgtacaaacacacaccggggaacatgaactattctgaacagtctaggatacaaatacatatgtctgtatacgagatgtagctaccagctacctctacatcatgggccagaactgcatgtagctcacccaagccggcgctgcgcctgctcttgcagctgcaggagcatccctatccctgatcctgcttgcttcatcagaggagcaggaaggtgatggagcatgaacagcagctgaagattttgggcagaggaagaagctcctggaacccagttccatcaccttttcccttgggtccaaactctctaagctgaactgggagtagtgg

SEQ ID NO: 43753 - DNA, 404 bp, Oryza sativa
  Clone ID: PAT_MRT4530_4687C.1
agctggttgatcacccataaccgtgggctcggctattcaaatacttttactctggctagaggtgcacaactatacccacaagacacaacccaccggcatgttactgcgcccggccggacaagtcaccatgtcgattgattgtgacaagacccttcgcataactccccctaaccaatagcacccacttcaagtttcccccccccccctccttttagccaagtcgagcagccccctcttgcgcctttggtgaatccagaagcaacatagaccacagcatggcccatccatactccatcacgccaacccttgccttggtacgttagaaaggggaaagttatactacaagtccagcagttgcccattcttgcttatggtaagtgcggtaagtcttccagggattcccg

SEQ ID NO: 43754 - DNA, 558 bp, Oryza sativa
  Clone ID: PAT_MRT4530_46880C.1
atggactctttgcctttggactggcccggcatggtccaagtcttattgggccgtgcctgggccgtgggtgtagcccatgagcaagcacggtcccgcccggtgtgtaggtcaggtcatgctggcacgattgaccttggcccaggccctattgtgcctgggccatgcccgggccagagtgcaaaaggaggaaataggacggagaaattaacggatgagaatttcttgactccaattgtccaaacgaaccgtgtttttagttttacctttgagaggattatttttactttccctttatttcctggaggcccagtaaccaacagaggcatgacaaaaccccacgagattcccatcggtttcattgtttcaaactccgccgtaataagtcagtggatcaaagagcagagaaggaactttgatggcctattcatctacacgacatggggtatttggctccaaaggaatgcaagaattttcaacaatgactatggtacagtgtcacatgtagtggactccatcatcaacatgtgcaaagctttcgatgaagcgcaaactgtttag

SEQ ID NO: 43755 - DNA, 487 bp, Oryza sativa
  Clone ID: PAT_MRT4530_46881C.1
gataaaaatactacatataataataatcaagcggtaccattcatccctagatacaatatttctagagctttgcttaacactaacacacagctatataacctagctagcttcatgatgacttcaatatttctcgaccttacttaatactaacacacagctataacctagctatagcttcatgacttgatctaccaagctaggcatgcatatgcaagaacaagaaacagattagtcacaccataatgactaactaattatagattcatatcagctagtaatatagttcttctaggccctgatcagatcatgcaaaattaaattacttacctagtttggttccatgcatgcatgatacacacaacatatataacactcttctagttctaggattctagattgatttttcttcttcttttccccatgaagccatgcaccatccatgcattgacccattctgcatatgcctcatgacttgagtcatcacagt

SEQ ID NO: 43756 - DNA, 1002 bp, Oryza sativa
  unsure (1)..(1002): unsure at all n locations
  Clone ID: PAT_MRT4530_46882C.1
ggtaagatggctcgtcgtttgcccattcctcttgacgccggatctcctcttcctcgcaaccttcgtgctcaccatctacgttgtctcatgcatcaacagctcaacaagcttctcgggtcctgtgtgccgtcctcgacgtggtaggggctgtggtgctagctttgctagccgtggcccccggtctcctccctctggcttcgccagacgtggaggacgacgccgcgacgacgatgccactgcccgcaaaaccaccaaagctgatagcactaactccagcaccctcacgactcgtcgcgggcctctagtgatgcccgaaaactacacggcgccacaatgcattctagtggagtcaccgcaccactgcaagtcccatggatggatggcaagggtgcggctgcaacccggcgggctgccgcaggaggtgccatacgtggtgacattgtactgtccttaccacggctggacgaaccatgctcgctgtgtcatatcaccatcaccttcaccagagtactcaccagcaacaccgctgtacactccaacaccgactgaaccgccgttgttccttctcagtggcaccatcgtgatgtgccgtggagccccgcccttctacatggcagtaggtggctccaacggctccgtgctctcccctccatctccaccaccggccccttcgttccccagccgtccgactgnnnnnnnnnnnnnnnnnnnnnccccggggcggcaaacgcgtgccccggcctttgccgcatgtcctggcagagacgggcggtggcgacagatcgacaatgacggtggactgtcggctgcgactgtttgaagggagggtggtgcggtgccagctgatggcccctgtgcgcccgcgcttcccatcccgccttcctggaccgaaagcggcggtgggttgaaaccgagattgtatcggcccactgcccagttataatgtaggtgagatagcaaccaaagagtttgatatcctcgctcttgatagttccaatgtcc

SEQ ID NO: 43757 - DNA, 124 bp, Oryza sativa
  Clone ID: PAT_MRT4530_46883C.1
gaccgggccggaattgctgggccgacgcgcgctgtagttttataccgagagcggccgttctagaggtgctattgtttcatacgcgggcctgcgacctcttaggactgttattgactgacctgta

SEQ ID NO: 43758 - DNA, 549 bp, Oryza sativa
  unsure (1)..(549): unsure at all n locations
  Clone ID: PAT_MRT4530_46884C.1
gtttaaaattaaggcggcttaaaggtgaactctctatcgttaatatcctctaggatggcagctaccgtttggtcgatttggtgggtattcgggggatggcctttaaaaattttctcatttcgcattagccaaatgtgtcaccaagtcgtaactagggctcccatacttcttcttgcttgtgccttgtttgaggaggagcagatgttcgaggtccattcttgtatgttatcctgcatagaatggccggggattccttttattttgaaactcggtttgtttcgattatttggttttgtttccagtttttcttgtcggtctcctggaaattgttctgctgctgccggtgcattgctgctgcggctgattgatgcttaattcttttgcgcattccaaaacaaaaaaaaaatctgctgcggctggagagaacaccacaatgggcttgtttcttgaaaaaaaaataaatttctttttattgtttggngctggtttctgctgccgctggagggagcacagttaattttgattcttaccatagcacgatttgtttga

SEQ ID NO: 43759 - DNA, 1320 bp, Oryza sativa
  Clone ID: PAT_MRT4530_46885C.1
atggccggtgagctggagaggctgcgggcggagagggaagagctcgatagccgcatacgcctgctagagtcgcagctcggggctagccctacgcccgcgggagagggcgacgcggcggggacaggggcaggaggcggaggcggcggtggcggcgccaccgcgtgccccatacgccgccgtgggaagggcgacgcggcggggacagggccaggaggcggagtcggcggtggcggcgccaccgagcgccccatacgccgccgtgggaatgggttcgccgccgccgatggcctcccggccgatatgatctaccggtacagccgccacctcctcctcccggacttcggggtcgaaggccagcgtaagctctcgcagtcatcgattttggtggtgggcgctggaggattgggctcgcccgtggcactgtacctagcagcttgtggtgttggttgcttgggcattgttgatggagatgatgttgagcttaataaccttcaccgacagataatccacaaagtaagcattggttgggaaatcaaaggtgaagtcagcggctgacgcctgccgtgagattaattcgtctatcaacgtgatggagtaccatataatggaagtccatgctatcgatgccttttcccaaatccaccaccagtggcagcctgccagagatgctcagacagtggagttcttggggttgttcccggagtgattggctgcctgcaagctctagaggctataaaggttgctactgatgttggtgaacccctaagtggaagaatgctactctttgacgctctatctgctcgtatcagaattgtcaagattcgaggaagctcgactgtttgcacggtttgtggagaaaattcagcttttactcaagatgattttcagaagtttgattatgagaacttcacgcagtctccaatgtctgataagtcagctccaagtttggacatacttccaggaagtgcccgtgtcacttgtaaagaatacaaaaggcttgttgataatggtgaacgccatcttctgttggatgtacgacctgcacatcacttccaaattgcttctgtttctcaatctctgaacatcccgctctccgagttggaggagaagcttcagatgctcgagacctcgttgaaggacacgacggacgcctcctcatcagacaaaccgccttccctttatgttgtttgccgaagaggcaatgactcgcaaatagccgttcagcttctacgggagaaggggtttctttctgcaaaggacataatcggtggcttgcagtcctgggcacaagatgtagaccctgatttccccgtgtactag

SEQ ID NO: 43760 - DNA, 317 bp, Oryza sativa
  Clone ID: PAT_MRT4530_46886C.1
atgtcgacctctgctggtccatcaagcgccccatcggctgagttccctgagcaatcctctcatcaaatcgcaatcccgagtttaacttaccccaatcagtacttcctcggtcccatcggcaatctagatccaacatagttcatcaatgccgaacccaagaaaatcccttttaggctagccagccccaatctaggaatctggaaaaacaccatcaagtcatggccatcaactgtgaaaagttggacggcttggtataagagggtatcggctagcaagcaaggccattgggaagaaattgggatagcacaagctttagc

SEQ ID NO: 43761 - DNA, 347 bp, Oryza sativa
  unsure (1)..(347): unsure at all n locations
  Clone ID: PAT_MRT4530_46887C.1
ttttttctggttttcttctgtttttaccctaaaatcaaacatctcctagcaattacacttaacgagagttctgctggaaacttgcagtttcgttatacttagctcatacagtggagagtgattccagagagtaagcacttgcattacagacagagacaggttaccttgtataactaacaaaaaggcttttcctgctcgtgccgcattcctgctgccggggctccaccactgctagggccgccgccacggctgggcccggcgtcgtccggggtgaggccaaaaagaatcgatatgngcaacaaagaaacgacngcaattgccgaaaaacccncgctatttcgatcacg

SEQ ID NO: 43762 - DNA, 1139 bp, Oryza sativa
  Clone ID: PAT_MRT4530_46888C.1
cgccactcgttccccttccttcctctcctcctctcgcggaaccttctcgaagcttccacacccccaacctcgcctccaccaccaaccccccatggcggaccagctcaccgacgagcagatcgccgagttcaaggaggcgttcagcctcttcgacaaggacggcgacggttgcatcactactaaggagcttggaaccgtgatgcggtcccttggtcagaacccaactgaggcggagctgcaggacatgatcaacgaggttgatgctgatggcaatgggaccattgacttcccagagttcctgaacctgatggcgaagaagatgaaggataccgactctgaggaggagctcaaggaggccttccgtgtgtttgacaaggaccagaacggtttcatctcggctgctgagctccgccacgtcatgaccaaccttggtgagaagctgaccgacgaggaagtcgacgagatgatccgtgaggctgacgtcgatggcgatggccagatcaactacgaggagttcgttaaggtcatgatggccaagtgaggagggttcccattaaataagttctgtctgaagtgaactaaaactgtcagggcctacaacaaagctgtactttgtgatgttccttttaagtacctatctttgctggtggtaatgttgagtagcgatcgggttaggtggtctagtcatgcgaaacaacatcagatgcctggtttcttttgattgtgatgcttatcttgcgcctgccggagcataggatttgttggggtttcatcatttttcttggatcgttgtgcagatatgcattgcctggttcctttctccgcgaagccgacgtcgacggtgacggccagatcaactacgaggagttcgtcaaggtcatgatggccaagtgaggcaccacttcccctgccgatgatggcatagtaccctgggaggaggaaaccgtgcattgccgtattagtaaggggatgcaaacactggtttcagtcgtcttccctgatgaagaaaaccgaaccgtactagttgtagttgctgaacatttttctatctctccagtctctccggtgtgccatggaacttcttgcttgatttttctgtgtgaatctgttaaggcttgctctgatctctccgaaccctg

SEQ ID NO: 43763 - DNA, 2744 bp, Oryza sativa
  Clone ID: PAT_MRT4530_46889C.1
atgaaactcgagatccccagacttctagagggcccgaggatgaggtggtcgaggtacgactacgactggtctttgaccagcaacgtagcgatcctcacaccacgacttctaacggtcgagcgtatctcccactacctctacgatttgttgagtacaactatacacctggtcttcaccagtgcctacggaagccggcaagagggatctagcaccatctccgatctcgacgagttcgtattcaaggagaaaggctaccctgtcgtcgactacagcaggcgcgccgccgaccgctggccacgcaccgcccatgcgccgtcccgggcgcaccgcccgtcgttgtcccggccgccgccgatgctgccgtcgcccgccgccgccgatgtagccgtcgctcgccgtcgccccgctgacgttgtctttgctactgtcgcccgctgccgctgtcgcccgtgccgcagacgctgtcgtcacccgccactcgtcgtcaccgctgccgcccacgctgtcgtcgcccgccactcgccgtcgacgctcgcccgctgccgctggctcctgccaacgctgccgacgcagtcgcgttgcgccaagacgagtcgcggctgaacaggggaggggaggggacgaggagagcagagcaggggaggggaggggatcctggctgactattcaatatccatggcgcggtgcatctccttcctgtctacctcctcgtccttgccatgtgccacaaaaccgccctgctgctcagtgtcctctgtcttaccctcgtctccgtcctctcatcaatgccgaggtaggaaaacgagttgcgggtcaattagggcgctgcgggaggattggagggagagatccaaggccatccctcctggtggcgtctacccagccaaggaccactgcagccaatgtgggctttgtgacacctactacattgcgcatgtcaagaatgcctgcgcattcctaggagatggcatgtcccgtgtcgaggatttggagccattggtccatgggaggggcaggaagcaagacatggatgagatgtacttcggagtgtatgagcaactcctatatgccaggaagatgaaacctgttgaaggagcccaatggacaggaatagtgacaacgattgcggttgagatgctaaaggcaaatatggttgatgctgtggtgacccagatgacaggcttgctccaatgcctgttttagccaggacgccagatgaagttattgcagccaaaggtgtgaagccaacattatcacctaatctcaatacgcttgcgttggttgaggcagctggtgtgaagcgtcttctcttctgtggtgtgggttgtcaagtgcaagctttgagatcagttgagaagtatcttggtttggaaaagctttatgtgctcgggacaaactgtgtggacaatggtacccgtgaaggacttgacaagtttttgaaggctgcaagcagtgaaccagagactgtactgcattatgaatttatgcaggactacaaggttctcttacagcacttggatggacatattgaaggcgctccctatttttgcctgccagcaaaggaccttgttgatgttattgccccatcatgctacagctgctttgactacacaaatggcttggctgtaaggtttccatcgttttaaagttgatatttgtactcttgctatagcagatattcatattttggaaaggaaccatctggtatctggctgtattattccttctgctcattgtcacttcctagtacttagttgtgctcgtagggttggtgtttattttcgttggtctgatcaaatctgaatggccattatatgtcccttctatacagttgcccttccattctcggtttgctcccagagataattaatatacgtttgataaagaagtgcaggatttagtggtgggctatatgggtgtaccaaagtaccctggagtttccatgacacagcaccctcaatacattacagtcaggaatgatcgtggaagggagatgctcagcctagtagagggcctcctggagagtacacctacagttagcagtggcgtcaggcaaccatttgttatcgagacggttaaagctgatgatgaagcaaaacaggggagaggaccttctcagccagctccgacatttgtcggcaatgttatagccttcctactgaatctgattgggccgaaggggctagagtttgctcgctactctctggattatcacacgataaggaattacctccatgtgaatcgggcatggggcaagcaaagagcggagcagcacattccttcctatgccaagaagattgtggaggcgtacgacaaggacggacgcatcgagtcgatgctccagtagcatgggacgctagtctgcattctagattattattatttttcctcatatcgacttgttcattctagtcagtatatcccgtagttatgtacattcctgagcacacagccagggtttaggggaatttcctctttactaattttttacatgtcttatctgactgtcttcctgggagaatctcccgataaaacagtcgggggctaggggaactatacatattacgtgtacattgatcaaatatgaaatttcttgtatagaattggaaaatggtaaaaaatatagacccaaaaagcctgacatgctatatatagttcaaaaaattaaaaattatactagtcagatggggtaatagacaacagataaccttattctaatgagaggagaaagtaaggttttgacc

SEQ ID NO: 43764 - DNA, 1941 bp, Oryza sativa
  Clone ID: PAT_MRT4530_4688C.1
atggatcacatattctccaccaacgcatggctcaccatagccctcgtcttcatcattacactagctgcgaaggtggccgtgatccgcgagcagcacagggcgctgggcagcgtgtttacgctcaggtcacttgggcttgcggtgacgttcctcgtcgggccggagtgctccgaccacttcttccacgcgccagagttggagatagctatcgatggcttgtacgaggtcaccgtgcccatctttggcaaagaagttggctacgacatcgacttggacacaaggaacgagcagcatcgcttcttcgccaagatgctgaggcctgccaaactgaggggccatgttcttcccatggaatattttgggaaatggggagagtgtggcgtggttgatctgatgcaagaggtggatcacgtgctgatgctgatcgcgagccggtgcctgctcgggaaggaggtccgggagaacatgttcgacgaggttgcctcactgtttcacgagctcatgggaggtatgcacctgatcagcatgttcttcccttacctcccgacgccggggcaccgccggcgtgacaaggcacgcgcgaagctcggggagatattctcccagatcgtcaagacgcgcaagatgtctggacgtgttgaggacgacatgctgcaggacctgatagactcgacgtacggggacggccgtgccacgacggacacggaggtcaccgggctgctagtggcgctgctcttcgccggccaccacacgagctccacggtcgccgtctggacggcactgcgcctgctcacccaccccgagcacctgcgcgccgtcagggcggagcaggagcggctcgtggcggcggcggagcagcagcgcagccaccatggcggcggcggcggcggtggcatcgactacggggtgctgctgcagatggacgtcctgcaccgctgcatcaaggaggcgttgaggctccacccggtcacgccgatgatcctccggcgcgcgcgccggggcttcaccgtgcgcgacaaggaaggcggcgagtacagcgtccctgccgggcggttgctggcgagccccctggtggtcaacaccctcctcccgaacatctacaaggaccctcacgtgttcgacccggaccggttcgccgccgggagggcggaggacaaggccgttgccggcgcccgtgatcttgcctacttgtcgttcggcgccgggaagcatgcatgcatgggcgagggctacgcctaccagcagataaaagtgattttgagccacctggtgagcaatttcgagctcaaattagaatcacctttccccgaaactgaggacatgctttccatgaggcccaaagccgcggtcgcgccctccccttcgccaaatccggcgggaggggagccagtgggagtctggccgatggaggcggcagggcgatctagccagaggggaggcggtggacctcggcggctgtcgggcggcggccagcggcatgggaaggccatcggcactcggggcagccagatccggcggtggtggtggaggaggccgagcacagtgggcaacgcgcaggcttccacctcctcccccaactcccctcgcttcgccatggtgtccagtttacaaccagcaccgatgatggaactcatcaatgccaccttcgtgcctctcctcccctctctgtcggttgagacaacggtgacggtggggcggagctgcatccggcgtcggcggcaatcgactcccgttgaggatcagagccccgacctatttgacctcatcgaggactacttcgatggcaccctccacaccctcaacttcatcaccgcgctcgacaagtccctccaccgcgcccatgactccaagctcatcctccacctcgtgctccagcgccgctaccaccaccacgccgaagcgtcggagctgtacgctagcatgctcggtgagctgcactag

SEQ ID NO: 43765 - DNA, 429 bp, Oryza sativa
  Clone ID: PAT_MRT4530_46890C.1
atggaccttgctgagtggtggtctcgaggaccgctagatctgattcacaagagtttgaggaccactaaatctgacagccatgagctcgagggccgccggatccaaccggtgcagacagctcaagagcagcaccctcccctagtcatcagcgtggggtgtagccacaatgacgactacagaaccatggaaagtaccttcgagaatggtgccatcatgagggattggagatttatctccaccattttcccctcggcaatgatggcggcagatggcggccctctccttggagaatggatgagtgccacggcctccgccccacctcgaggccctaggtacctcaccgtgttcccctctcttttcccagttatcgctgctgatcctgtcgacaatgagaagaagtacaagaagttccacatgttggatttgtga

SEQ ID NO: 43766 - DNA, 1542 bp, Oryza sativa
  Clone ID: PAT_MRT4530_46891C.1
atggcgcggtgcatctccttcctgtctacctcctcgtccttgccatgtgccacaaaaccgccctgctgctcagtgtcctctgtcttaccctcgtctccgtcctctcatcaatgccgaggtaggaaaacgagttgcgggtcaattagggcgctgcgggaggattggagggagagatccaaggccatccctcctggtggcgtctacccagccaaggaccactgcagccaatgtgggctttgtgacacctactacattgcgcatgtcaagaatgcctgcgcattcctaggagatggcatgtcccgtgtcgaggatttggagccattggtccatgggaggggcaggaagcaagacatggatgagatgtacttcggagtgtatgagcaactcctatatgccaggaagatgaaacctgttgaaggagcccaatggacaggaatagtgacaacgattgcggttgagatgctaaaggcaaatatggttgatgctgtggtttgtgtacaaaggcacctaaacaacaatcaaatattacataattgctttccgttgcaaaaggatttttttcatggtcttgagaaaactgttgtttgtctcctctgcagtgacccagatgacaggcttgctccaatgcctgttttagccaggacgccagatgaagttattgcagccaaaggtgtgaagccaacattatcacctaatctcaatacgcttgcgttggttgaggcagctggtgtgaagcgtcttctcttctgtggtgtgggttgtcaagtgcaagctttgagatcagttgagaagtatcttggtttggaaaagctttatgtgctcgggacaaactgtgtggacaatggtacccgtgaaggacttgacaagtttttgaaggctgcaagcagtgaaccagagactgtactgcattatgaatttatgcaggactacaaggttccctatttttgcctgccagcaaaggaccttgttgatgttattgccccatcatgctacagattttctccagaatttccagtcatcattcacaacgagcttatgttcttactactaccatcctgcagctgctttgactacacaaatggcttggctgatttagtggtgggctatatgggtgtaccaaagtaccctggagtttccatgacacagcaccctcaatacattacagtcaggaatgatcgtggaagggagatgctcagcctagtagagggcctcctggagagtacacctacagttagcagtggcgtcaggcaaccatttgttatcgagacggttaaagctgatgatgaagcaaaacaggggagaggaccttctcagccagctccgacatttgtcggcaatgttatagccttcctactgaatctgattgggccgaaggggctagagtttgctcgctactctctggattatcacacgataaggaattacctccatgtgaatcgggcatggggcaagcaaagagcggagcagcacattccttcctatgccaagaagattgtggaggcgtacgacaaggacggacgcatcgagtcgatgctccagtag

SEQ ID NO: 43767 - DNA, 344 bp, Oryza sativa
  Clone ID: PAT_MRT4530_46892C.1
cgttgctccaagacgagtcgcggctgaacaggggaggggaggtgacgagcagagcagagcaggggaggggaggggatcctggctgactattcaatatccatggcgcggtgcatctccttcctgtctacctcctcgtccttgccatgtgccacaaaaccgccctgctgatcagtgttctctgtcttaccctcgtctacgtactctcatcaatgccgaggtacgaaaacgagatcgcgggtcaattagggcgctgcgggaggattggagggagagaaccaaggccatgcctcatggtggggtctaccccaccaaggaccactgctgccaatgagggctttgtgaca

SEQ ID NO: 43768 - DNA, 192 bp, Oryza sativa
  Clone ID: PAT_MRT4530_46893C.1
atggcggatttgccgaatcgattaccggacgcggctcttgtggctgagcggcgcaaggatgacagggggaggtcgcgaaggggattggtgtcgccaatcttgatcaggatagcgatgcgtcaggccgcaagcggagacagggagcacgcgaagaagagaactggggtcgccgactttgattcagaagcgtag

SEQ ID NO: 43769 - DNA, 471 bp, Oryza sativa
  Clone ID: PAT_MRT4530_46894C.1
agttgttagggccgtggcatggaaaggtcgtcaggggcttgttgtagttagctccctgctaaatcaaccatgggtaaggataggacacccataaagattgcggtcattggccacgatgactactgcaaggcgaccaccacgggccatttgatctacaagcttggaggtatctacaagcgtaagatctggaggttcgaaaatgaattcgttaatatgaacaaaacgatcttaaagttcggaagggggctccataagattgaagacttcccgcgagagactgatcaccattgatatcgccctgtggaagttcgagaccaccaacaactactgcacggacatggatgcctctggccaccgtgacttcatcaagaacatgatcacggatacctcccatggtgactgtgccttgctcataattgacttgaatagtgatgaatttgatgctggactctacaagatagaaaaacccca

SEQ ID NO: 43770 - DNA, 303 bp, Oryza sativa
  Clone ID: PAT_MRT4530_46895C.1
atggcacttatattgcaccgacggtcgggaacctctcgccctctcgcgctctcgggcgccgccgcgtcctactggaacggcagcaaagaggacaacgatgacacaggggaggaggaggacgacgacggagacgaggaccgcagcctggacctcctggtccggttcctgcactcggtgttcaggaaggtctcccgtcgcgcgcgccgcgccgccaggtccatgctgccgctttccgtccctgctgagcgggttaagttctcggtcaatgcggcgttcttgttctcacgtttctgtggatcctaa

SEQ ID NO: 43771 - DNA, 726 bp, Oryza sativa
  Clone ID: PAT_MRT4530_46896C.1
atggaaacgtcacaatacagagggagcaaggaagagggcaaattcaaagaccaatcaatcttcaacagagatgcattagaatggttgtgtaaaagcttctgtcttgctgggaggacgatgatggttgatgaagagctggtctgcagattgaaattagaagattttggacagtgcatgcatccattaaaggtctcaaaagttttagacaagagaggattgacaatgtggaacctgcttggatttgatacaaaagccggaattgccactgataggcctttgatcgtcaggactaccatcggaagggcatccaaaagaggaaccaacgacaacaaaggccataaaagcagatcataccagagcactgccataggagagcagtatcggaaatcgtcaacaacagcaatgcagggtcggcgagccatcatccaaggaagattcttcagcttgagaacgaacagggattatttggcgcatcatggcaaaagaagtctgcggttgtggtgctgtggccccaacttcaatatctacgtaggggaaagcatagagaggctagaggccattgccaccatgaggacaggcggcctcgtctccaccgcccccatctccatcgccagggaaggagaaggcacagagaggcctaaggccactgcccccaggagatttggcgaccccgtctccaccgctgacaggagcgactccaacattgccgagatcgccgccacctag

SEQ ID NO: 43772 - DNA, 674 bp, Oryza sativa
  Clone ID: PAT_MRT4530_46897C.1
tgaatgtcctctcaatacaattagaattgattcccaattaatttcttgattgtgatccaacccttctgtaaagtaagtcagatttgcagaccatacaaagatgaaggtctcgacggtggcggtgctcgttatggtggcgatgctgatgatgtcggtggctgtttattctgacgatgcaagttctcatggagttactgaaaaacaagttgcagctgctgcaaacgctcatggaagtaatggaggaagcgtcgtcacagaggcagctagtactgattcaacagctggtgcctctggtacttcatcagctggtgcctccggtactaatattgattcaaactattacgtgactatgaaagggtacatggagtacatgaggaagtatggcggtaaacaaccctgagttcgtgtttcttctggggcctgcatatatatgtgtgtgctttctatgtgtgtaaaccttggtacctaaatgtgcaaacaaaatgcgcatagatgtatgcatttcagtatggggatgcgttgaagagtgaggtaccaagttttactggttgaaatcgtaaaacaacctaagtatttctcacatctaaataatctccagcagccaactgtcatcatgtaataatgcagtgtaatggtattctatgttgttgaattaatattatgcttattatgtc

SEQ ID NO: 43773 - DNA, 310 bp, Oryza sativa
  Clone ID: PAT_MRT4530_46898C.1
ggaggcgttcgccgcgctcgtcctccacccccgcctcatgctcccgcgttggctcgccgctgccgccgacgtcgtcgagtggcgagagccacattggctggatctggccattaatgaagagctcgcctccaccgccgcaccttcgccgccagggaagagggcgtcgtgggcgaggctggacagcgcgttgacaaacgggttggagctctgcatgcgctatcgcatccgccgcgccgccgcccactctgacctcaccgctgtcccgagcactggtggctgcgcgcgccctcttcgccgccgcccactctga

SEQ ID NO: 43774 - DNA, 1251 bp, Oryza sativa
  Clone ID: PAT_MRT4530_46899C.1
caatatgatatgatgggcctcctgagcttgctgctcgtcgtcgtgtcctgcctcgccgcgccggcgacggccgactggtacggcccgctcgccgtctactggggtcgccacaaggactacgagggctccctgagagaggcctgcgacaccggccgctacaacaccgtcatcatcaccttctacagcgtcttcggctacgtcaagggcaggtacggcctcgacatctccggccacccggtcgccgccgtcggcgccgacatcaagcactgccagtccaagggcgtccaggtcctcctctccatcggcggccagggcggcgggtactcgctcccgtcatcccagtcggccgccgacgtcgccgacaacctctggaacgcctacctcggcggccgccgcgccggcgtgccacggcccttcggcgacgcggcggtggacggcatcgacttcttcatcgaccagggcggcgccgaccactacgacgagctcgcccggcagctgcacggccgcggcgtggcgctgacggcgacggtgaggtgctcgtacccggacagccggctgcagaaggcgctggcgacggggctgttcgcgcggatccatgtccggatcttcggcgacaaccagtgcaccatgttgccgttggacgcgtgggagaagtgggcggcggcgtacccgcggtgcaaggtgtggctggcgctggtggcgtcgtgggagcaggacgaggtcgggtacatgttccaaaaggacctctactacggcgtgctgcagttcatcctcaacaagcccaactatggagggatcgccatctgggacaggtactacgacaagaaggccaattacagtgctgcggccgcggcggcccagcagcgggaggggagatggtggcggtgccctaccctatgctccatccggccgtccagcagctgcggcggcaccctcacctctgctagatctggcgggaaagggaggccgtccagcagttgcggcagcaccctcatctccgccagatctggagggaagggaggcggtggggccctcccctccgctagatctggcgggaagggaggcggcggtggcctggtgatgacggcttcccacggcaacgacagcggtggtggttatcttcatgtcttcctactggctccacttttggtctacaatgctaccacaggagaagcaggatactgtgtgcaatggtgctacactcttgaaatcggtagccaagggtctcttattccactatgggtggcgtag

SEQ ID NO: 43775 - DNA, 435 bp, Oryza sativa
  Clone ID: PAT_MRT4530_4689C.1
tttctttcttgtccgacaaggactagtatttccccatgggtataaatatgtacacctggagtcattgtaaaatatatctctcgatcaatacaactactctcagagcatcgccaccctctttaccgaggtttttactaatcttctcatggaatttggcacctgacgcggggctgcatcggttcagtttgatctccggcgaaggggtaagtcctacgttccgctggccctggtgaatctaccggctacgttggtattgttctaggctgcaatgcttcgatctcttggatcgctctgttttggttgatatatttgcctatctgatatctcatttctatctctaattacactgtgtttagatacacatcggtttagttgggactcagatctcccagggcagtgtgtgtttttcgcatcaacagatatacatgattaacc

SEQ ID NO: 43776 - DNA, 150 bp, Oryza sativa
  Clone ID: PAT_MRT4530_468C.1
cccactcgtgggctgaagtattcttggcgctcggagcacaaattactcagattttaaaagatgatgataagtaccagtgtgctgaccctggacctattcgaggtttacttaaccactattcccagtttgtgtcattccccatatatacat

SEQ ID NO: 43777 - DNA, 198 bp, Oryza sativa
  Clone ID: PAT_MRT4530_46900C.1
tgttggtcctaggtagatttcttgttcttgatctgctttgtttgagttccaatcgtaatcgagtataaatgtgtactttcgtgtaaagaaaaggggattagagagggccatcataatgtaaagatggctgctttgttcctgtgctcttttttgttctcctgcatttggtatatatatctcatcaattttttgttcgtc

SEQ ID NO: 43778 - DNA, 1497 bp, Oryza sativa
  Clone ID: PAT_MRT4530_46901C.1
atggcagtcgtcgccgtcgccgtcgtcatcgcgctcctcgccgccttcctgacgccgctggccgtgtacctggcgaggagggcgtcgccgccgccgccgccgcggcgcaacctgccgccgggctccctcggcctgccgctcatcgggcagagcctttccctgctgcgcgccatgcggcgcaacaccgccgaccggtggctgcaggacaggatcgacaggtacggcccggtgtccaagctgtcgctgttcggcgcgccgacggtgctcgtcgccggcccggcggcgaacaaggtggtgttccaccacgaggcgctggcgcccaagcagccccggagcctggcggcgatcatcgggaggaggaacatactggagctcgtcggcgacgaccaccggcgcgtccgcggcgccatcctgcagttcctcaggccggacatggtgcggcggtacgtcggcaagatcgacagcgaggtgaggcgccacctcgccgccaggtgggccggccgccgcaccgtcgccgtgttcccgctgatgaagacgctggcgttcgacgtcatcgccaccctgctgttcggcctcgaccgcggcgccatccgggagcagctcgccgacgcgttcgacggcatgcacgagggcttgtggacggtgccggtggacctgccgttcaccccgttccgcagaggcctcatggcgagcgcgagggctcgccggctggtcgaggcgaccgtgagagagaaggcggcgaagctggagcacggcgagtcttccccatccgacgatctcatcagctgcctcctcagcctccgagacggcggccggcagctgctcaccgaggaggagatcgtcgacaactccgtgctcgccctcgttgccggccacgacacctccgccgtcctcctcaccttcatgctccgccacctcgccaacgacccggccaccctcgccgccatggcccaaggcaaaaacccaactctcccctcccctgacgaacactcagagcatgaggagatcgccaggggcaagcgagacggcgaggcgctgacatgcgaggacgttgccaagatgaagctgtcgtggcgcgtcgcgcaggagacgctgcgcatggtgcctccggtgttgggcagcttcaggagagcgcccgtcgacgtcgagttcgagggctacacgatcccgagagggtggcagatcttctggtcgccgagcgtgacgcacatggatccggccatcttccacgagccgaccaagttcgagccgtcgcggttcgacggcgcggcggcggcggcggcgtactcgttcgtgccgttcggcggcgggccgcggatctgccccgggatggagctcgcgagggtggagacgctggtgacggcgcactacctggtgaggcatttcaggtggaagctctgcctcggggaggagaagaacacgtttctcagggacccgatgccgacgccgcacgacggcctccccgtcgagctcgaccacatcgctcctctctgctaa

SEQ ID NO: 43779 - DNA, 285 bp, Oryza sativa
  Clone ID: PAT_MRT4530_46902C.1
atgacaaaatcacctgtgacggatgaaacacccgtcacagataacccatctctgaccgatgagtcatcagtgacgtgtcgtaactacctgaccgtcactgatgactcatctctgacgggtgaggggataccagtgacgggtgaggggatacctgtgacggtccgcggccggatggctcaccggtatcccgtcagaggtgtgaggatctggcgtagtgacgtcacccacaaggccacaactcaaagagtaattagccgtaaatttgagtacatacgtcaaatttaa

SEQ ID NO: 43780 - DNA, 882 bp, Oryza sativa
  Clone ID: PAT_MRT4530_46903C.1
atggcttcttctctttcagtggccgtgctcctgtgcctcgccgccgccgcggcggcgcagctgtcgccgacgttctacgacacgtcgtgccccagggcgctggccaccatcaagagcgccgtgacggccgccgggtgcgatgcgtccgtactgctggcggacacggccacgttcaccggcgagcagaatgctcttcctaacaagaattctctcagaggcttcaacgtcgtcgacagcatcaagacgcagctcgagggcatctgcagccagaccgtctcctgcgccgacatcctcgccgtcgccgcccgcgactccgtcgtcgcactgggagggccgtcatggacggttggtctcgggaggagggactcaaccacggcgagcatggacagcgctaacaacgacctgcctcctcctttcttcgacctcgagaacctcatcaaggcgttcggcgacaagggtttcagtgtcaccgacatggttgctctctcaggtgcgcacacgatcgggcaggcgcagtgcaccaacttcaggggaaggatctacaacgagaccaacatcgacgccggctacgcggcgtcgctcagggccaactgcccgccgacggccggcaccggcgacagcaacctggcggcgctggacacgacgacgccctactccttcgacaacgcctactacagcaacctgctgtccaacaaggggctcctgcactccgaccaggtgctcttcaacggcaacagcacggacaacacggtcaggaacttcgcctccaacagggcggcgttcagcagcgccttctcgtcggccatggtgaagatggccaacctcggaccactcaccgggagccagggacagatcaggcttagctgctccaaagtgaactaa

SEQ ID NO: 43781 - DNA, 1246 bp, Oryza sativa
  Clone ID: PAT_MRT4530_46904C.1
gcatttgcaagagtagtagtagtggtgctctggtagtctactgctgcttgatcgatcgatcgatcgccatggcttcttctctgtcagtggccgtgctcctgtgcctcgccgccgccgccgcggcgcagctgtcgccgacgttctacgacacgtcgtgccccagggcgctggccaccatcaagagcgccgtgacggccgccgtgaacaacgagcctcgcatgggggcgtcactgctcaggctgcacttccatgactgctttgtccaagggtgcgatgcgtccgtactgctggcggacacggccacgttcaccggcgagcagaatgctcttcctaacaagaattctctcagaggcttcaacgtcgtcgacagcatcaagacgcagctcgagggcatctgcagccagaccgtctcctgcgccgacatcctcgccgtcgccgcccgcgactccgtcgtcgcactgggagggccgtcatggacggttggtctcgggaggagggactcaaccacggcgagcatggacagcgctaacaacgacctgcctcctcctttcttcgacctcgagaacctcatcaaggcgttcggcgacaagggtttcagtgtcaccgacatggttgctctctcaggtgcgcacacgatcgggcaggcgcagtgcaccaacttcaggggaaggatctacaacgagaccaacatcgacgccggctacgcggcgtcgctcagggccaactgcccgccgacggccggcaccggcgacagcaacctggcggcgctggacacgacgacgccctactcctttgacaccgcctactacagcaacctgctgtccaacaaggggctcctgcactccgaccaggtgctcttcaacggcaacagcacggacaacacggtcaggaacttcgcctccaacagggcggcgttcagcagcgccttctcgtcggccatggtgaagatggccaacctcggaccactcatcgggagccagggacagatcaggcttagctgctccaaagtgaactaataattaagtaaagaatcaaactggatacaaaagcaaacacaaatttgggaataaggctgggccatatatgtcacagtagtagtattttactagtctgaaatgtttgctaagagtgttttctctgatcagcacaaagtgtttgaaacagatcaggaagcccatgttatgtaccgatcagtatggttttgaagttatcaaggaatgcatgaatgataaaaaaaaaaaaaaaa

SEQ ID NO: 43782 - DNA, 1218 bp, Oryza sativa
  Clone ID: PAT_MRT4530_46905C.1
cggacgcgtgggttcgtgtacaacatcctcacagattccatcgctatagttgagcgcaggtgttcctaaggaagcagagcaaatggctcccatctctcgccgcattgcgcccctcctcttcctgatgctcctcatcctcgtcgcctcagagatggggacgacgagggtggcggaggcgaggcattgcgtgtcgcagagccacaggttcgtgggcgcgtgcatgaggaagagcaactgcgagcacgtctgcatgaccgagggcttcccgtggggggagtgcaggttccacggcatcgagcgcaagtgcttctgcaagaagcgctgctagcctgcttagccggagaggcccagccccaggccacccgctgatcgatcgatgatccaccaagccaagccaaggcgccattccccccatctcgctggtcacagtcgtcgctcacctactctcgtgtagtagcccttctcttttgatgttatcgtgcacgcgaactgctgtcgacttgcctggtcttgtagtaagtttgcaacgtgtctttacttacctggaacaataaaaactttggtcgttgctcacaaaacttggctgaaaaaaaaaaaaaaaaaaaaaaaaaaaaactccagggggggcgcgggacccaattaggccttataggagtgggtttacgcggggctattggccttcggggggcgccctcccacccagggacaaccctgggggggcctaactaaagccgctacggggccaggctgttaaagccggtggggggaaaaacccgggggggcccccctatagaccgttgcaaaaacagcccacctttaaggggtagtggaaaatgcccaaggggcccccccattcccgcctgcgaaaggggcgacacccccaagggagacgggtcccccccctgtgaccgaatataactcgggggggtgggggggtacccgtggagcgacgacacctgtgttagacccctagcccgatcatgcggttggtggtcgttgcgctacagatgggtagggcgtctctcactaaaaattaattggagggcttgttgttaaaaatcaatttctggggcgttcccgccatatgctgatgaggtggtccacagcgcgcacttaggtacaacgggagcagagtcagcgacgcttcgcgtgaggttccagagtcgaggcccacgaacacgtctgcaatgtagggggcggatgcgcggcaatccccgg

SEQ ID NO: 43783 - DNA, 378 bp, Oryza sativa
  Clone ID: PAT_MRT4530_46906C.1
atggctctatgtaaacccgggagggaaatggattaggactcacatagcgccacatacgctagcacgcgcatctgtaggacgcatgccatcaccactaattaccccgtggcacgcttttttcacgtacaacccttgagaatgaagattggccccaagctgcccaaatgttaagagcacagagactgaccctggaaaaaaaggaaggagcgatgaacattgacgcgaacagtggttagtgctttggtcaactgtgtcatttgagctattccagcgcttacaagctattgggtgttttgcatgactggagggttcttaagatgcttctgagacgccctagggtttttctgcaaatcgaccagtacctgacacatgatggga

SEQ ID NO: 43784 - DNA, 453 bp, Oryza sativa
  Clone ID: PAT_MRT4530_46907C.1
gaacatttttgtaagtcaattttttgggagcagccttttgggaacacaaaaaggcaagtgaaccggaatatgcggtaagactacaccaagcggggaagagaacagaactcgaggaaagggagcaatagttaaatgcccaggccagggcgttctagccgaaaacagaggcctggacaatgacagcgtgcaacagtaggctattgtgagtccaaacagagcctggcgtgtatatgtgcaggaagagattcccgtgagaaaaaatgctaccttaacaaaccaaacgatggtaccttcggtaaaaaaaaacatacaaggaaggggtgctttaacactgaactgactctcattcagtgggtgctcaaagcagtcagatattcatggggcaaaccggtcgaaacaactctagcaatgataagggcaaccagcggggggtggggcaccgggtacccagca

SEQ ID NO: 43785 - DNA, 444 bp, Oryza sativa
  Clone ID: PAT_MRT4530_46908C.1
aatatttttttttttttttttttttttttgttggtttttttttttttttggggggttttttttttttttttttttttttttttccctaaaaaaaaaaaaaaaccgcccaaaggggaaaaatttttaaaaccccccccaacccttaagttataaaaaaaaaaggggaaaagggtacaattttaaaaaaaaaaggggtggcccaaaggaaaaaaaaaacttgtttaccaccttaaaaattgggaattgggcaaaaaaaaaaaaattccttttaaaaaaatttttttcaaaaaacttttccaaaaaggcaggggcattttaaacccttgcaaaaaaatgggccctttattttttaacccttaagggaaaatcctccttgggaccccttaaaattttaaacgggtcccgggaatcaccccccaaatctgaaaactttgatgccccaaa

SEQ ID NO: 43786 - DNA, 336 bp, Oryza sativa
  Clone ID: PAT_MRT4530_46909C.1
atggcgtcggcggccggctcgaagcagcagcaggcgatgatgtcgttgccgtcgtcccgcggcggcggcggcggcgggtggacgcagcggcagaacaagcagttcgagtgcgcgctggcggtgtacgacaaggagacgccggaccggtggcacaacatcgcccgctacatgggcggcgccaagtccgccgacgaggtccgccgccacttcgaccacctcgtcgaggacgtctcccgcatcgagtccggccgcgtccccttcccccgctactcctcctcctcctcctcccgcggagccgacgacggaaacagatctaggtacctgaagtatcagtga

SEQ ID NO: 43787 - DNA, 252 bp, Oryza sativa
  Clone ID: PAT_MRT4530_4690C.1
atgcgaggtctgggagggtgtggcaaaggtggtagcctggtagggggcgcggcgaatctggcagcggcggagggggagggcgggtcgatgagtgagcgaatgaatgggacgatgggatttgccgggttcgaccacggaaagcgacctgaatcgctcgcgagggggagggagaccaccgacacgggcactgccgtggagtggagtggagtgcagtgcagcgctgcggcgtcgcactcgcatgcaaaacaccgt

SEQ ID NO: 43788 - DNA, 4886 bp, Oryza sativa
  Clone ID: PAT_MRT4530_46910C.1
gacacgggacggcgcacgcggcccctcttcccaacactagtaggataaagccacagagagagcagtagtagtagcgagctcgccggagaacggacgatcaccggagaagggggagagagatgagcggcggtcaggacctgcagctgccgccggggttccggttccacccgacggacgaggagctggtgatgcactacctctgccgccgctgcgccggcctccccatcgccgtccccatcatcgccgagatcgacctctacaagttcgatccatggcagcttccccggatggcgctgtacggagagaaggagtggtacttcttctccccgcgagaccgcaagtacccgaacgggtcgcggccgaaccgcgccgccgggtcggggtactggaaggcgaccggcgccgacaagccggtgggctcgccgaagccggtggcgatcaagaaggccctcgtcttctacgccggcaaggcgcccaagggcgagaagaccaactggatcatgcacgagtaccgcctcgccgacgtcgaccgctccgcccgcaagaagaacagcctcaggttggatgattgggtgctgtgccggatttacaacaagaagggcgggctggagaagccgccggccgcggcggtggcggcggcggggatggtgagcagcggcggcggcgtccagaggaagccgatggtgggggtgaacgcggcggtgagctccccgccggagcagaagccggtggtggcggggccggcgttcccggacctggcggcgtactacgaccggccgtcggactcgatgccgcggctgcacgccgactcgagctgctcggagcaggtgctgtcgccggagttcgcgtgcgaggtgcagagccagcccaagatcagcgagtgggagcgcaccttcgccaccgtcgggcccatcaaccccgccgcctccatcctcgaccccgccggctccggcggcctcggcggcctcggcggcggcggcagcgaccccctcctccaggacatcctcatgtactggggcaagccattctagacgaccaaaaaaaaaaaaaaaccaaccgcattggcagcaatggggtcactgaacacacccgtgcaggctagctagcttcatggccggtgaactttgactcaggcgagccgccggagttgactcaaagataattaaaagaagtgtcttaagtggattggattggattagacagaggagatgaggactcgagaaaggcggcgatgagaccgtggttggggggaccctggcctggactgaacgacgacgaggcagcagcagaaagatggtgcaattgcatcgggtggcatgtcagtgtgtgtgtatagtggcatgtacatagtacatggtgattgattcggtatacagggggctagctttcctgtttctgtttcttcattggttaattattactcccattataaggtcttcttcagggttgctagcttaattaattaattaattagcccagtggttgaagtgtaagtcaaaattcatcaagtcagagactggaataatacaatacagtactgtagatatcgtagaagaaaatgtattttagttcacgtcagattaatagaaaataaaaataatatgatggaaccatgcgaggaaaaagcgtggaattaaaattaaaaaatttttagtcgattgggtatgtattttgagggtggctagggcatggtaacgtgtgtcataaaaagtcgctttctggaggtgtctctcgcttgacctgtaaagccaaattttgtaatgctattatcggctctaataataataacacccctgatagtaatggagctcagccaaacagtttcggctcaactaaaattaggagtggagctgggtggagctctctcacaaaataaactagagttgtggagctgggtttaggcagctccacaactccactccagccccaactcctggagctaaatttaagagttggagctgtaccaaacaagccattcacaagtaataccttttttaagcctataccaaaggaacaccagtatgcatgaagcctctatcgaccagagtggctaaagaaaccagacctggtcaaagttgtatgcaaatggagactagacctcctatgcaaagtgatccccatcacctcactcatgtcgagtgatttggggctcaccccatcaggaagtgcccagtcaaagtggtaaaggaggttcgctaatgtgagctcaagtgtggtggtcgcgagcaacgctccagggcattgcctgcatccagctccgaatgggatgaaccctaagtgtgcgatagatgtcctgatatctgcgccgctattctcgaatctctctggcttgaactcctccgcattgtcccagtactttgggtcccttgctacggcgaatgtgtttattagaacaggtgtcgcttgtggtatgtcatagcccataacacgacagttctccctgctctgtcgtagaattagtgcagaagcgggatgcagccgtaaggtctccttgatgaccatacataagtagtgtagctcactaatgtcgatgccaatcaatttgcctttttcatggccaagcgtgtttcgaacttcctgttgtgccttatccattgctcttggattcctcataagctccaccataatccattcaagtgtggaagctgtggtatcagtagcagctccaaaaatatcggtaacaagggcggcgatgacctccgccgtgagaggggaggtgaggccgtcttcctcctgcagtctcagcagcacgccgagcagatcatcgtcttcgtctttcgcgccgacgccggcgtcactccccttcttctccttgcgctcctcgatgatcgagccgacgatcctcgccatctccgcgtggctcctcctcaggcggcgctcggtgcggcggctcagccaccgcaccacgcgcgacgacgggaacaggtccaccatgctgtacccggccaccagcgtcgtcagcacgccgagctcccggcggtactcctcctgccgcgcgcacttgccgccgaacaccgccctcgcgatcacgtcgttcgtcagcgccgccagcgcccgggtcatgtcgacggcggcggcgttgctgctgccggcgatgatggagtcgacgaggcgcgacacctcctcctgacggatggactcgaggcggcgcacctggcgcgcgctgaggagctccgcgaggcagaccctgcgcgcatggcgccagtgctcgccgtagggcgcgaagatgacgcccttcccgccgaagctgacggcgtcgaccgtcgtgctccgggcgcggtcggcgaacgccgggtcgcgcgccttgagcacctccatggcggcgtccgacccagagacgatcacggtgggcacctcgccgagcctcaccagcatcagcgggccgtgccgccgcgacaggcggagcagcgcgcggtgtggcggcgacgcgccgaggaggtggtggaggctgccgatgacggggaggttccatggccccggaggaaggttcttggctccggtggttgctcccttctcgccgccgcggcgatgagctcccatgaccatgagcgccaacgcgagggcgagagtggccatagcgaccatgcacaagcttccgaaggagagctcatccatggagattggagaatggttttcgatcgacagctcatccatcggctcgcggcttgagccgggagggatgaatgatctgatattctatcggggtggctcgggcgagccgctggaatcgatcggtggccgttggatggcggccgagttattggtagccgtcagatgggagatggaatggcattagttagttactagtatccgtatggacggcggcgatgaaacaggggagccccgaaatgcgtgtaggaaggagatgcatggtactgtactcgagaattataagccgtgtgtatatgcgaaattggttggctagatcgatctgggcgtatttctctctcgaggctcttgctatgtttttcatcttttttaaagaagactggacactttgtcgcatgcaacaaagcatgctgcatttttacaaggtgtcggcaatcatataattatgcacttgtatcagcattcaacatttaagcaaagtaattcttttaagtctagggtacagccaaaaaaccaaaaattaaccgtgctcgatcgatcgatcgatccatggatcgatgatcgcctccaccggcagatcaaaatcgaagcaaaaaatcagggagaattcttggtacttccagtacctctcgtcgacaccacgtgtcgggttttctgcaccgcggatcctcgctggccgcatcgtaacggcgagcgaggttaaaaatagtggagaattcaagaacacatccctgatttttgtttctgccggatggggagtaccgtgagcatggtagaaatgactggtaaaattttcgttgatgataggtagccagagtcgatgtaaccagtcgattttttttttttttttggttttagttgacatgccttcctgatagattcagaacaaacaatagagaagagaggagaaaaaaacacagaggagaaattcagagaccaaagttcaaagttttggaattttcaggggcgccagcagctgatggtattgtcagtcgtgtctaggttcgtagaggaaattaaaatgtagaagaacgggtacttcagttcacttcaggttcgttcgtgccaaacaggtctctgacactttagttaggttttgatttttttttctctttttttctggttttttgtcgtttggtaatgtaatgtaagggtgattgcgacatggtatttatgtgattagagtcgctttcagttgggtctctcgcgtgacctggaaagccaaattttgtaatgcaattatcggtaataataataataataataataataataat

SEQ ID NO: 43789 - DNA, 1944 bp, Oryza sativa
  Clone ID: PAT_MRT4530_46911C.1
atgcccacacagcacctgacctctcgccgccacgctgagctactccgccatctcctcctagatggcggcgccgccgtgaaggacctccgtctccgccgtgtcgtcccgctcacctccgcgccccttgacgactcctcccccgacccggccggccctgctgccaaatctggatctgcagagacgacgccgccggaggcccaagacggccgggagcgaaagccggtcgtccagcggtcgaagctcgtgcacgccccggcctccttcggctaccgccgcttactgcctttcctcaaccaactgaccaacaccaaccaagaatcagaatgccctagtggcaaggacaactccaagattgatgcatatgccgaatctgaatctgaagctcaacctgatcctgtgcattgctctatcagcaccaccaaggaagaaatcaacatttcctcttctcatctttcaagcaccaagatgtgcctttcccggtgtcagaggtccaggtttgttcaccaccccagctcatttagctacaagaggatgctgccatttgttacggagaacgggtatcacatcgccaatttatctcatcatgtgctactgtctactttctcagagatcacttctcaggaaggtcacaggaccaaaattccaagactcgtacaagaaaagcaatcttcaacggatgagaatcttatcttgaccactggacagcatcactttgttatgtcaggagactctgctgaggaatgcaaaacagctcaagtcgaaagattagtagaagaaaacgaatcaaaatcagacaggattcatcctcttggtggaaggctgcttcagcctgctgtttctgaagccgctcatctagaactacaagtcagtacagttgaagggcaaaatctcacacaggaaagagtgctagcttcagatgcacaccttctatcttcagacaagggtgagtgcacattgaaatggaatgatgtcctgcctgctggacagcatcagcctgctgcctcagaagacttctctgaagaaagcaacaaagcaggagttgaagcagtattagaagagaggaaatcagttccagacggaaattctgttcttgatggcagacagcttcagacttttgtttcaaaagcttctcctccagaaggcacagctgaaatgcagaaggccacacaaaaacaagcagtgacttcagatggtgatgacgaccctctagactcctgcaagggtggatctcttgccaaagagcagcctctactgcatgctacagagttgtcagtaaaagataatgctgaaggtgatgaggtacatcaatgccaaagcccagagttgggaacttctgatgtttgttttggtggtcctaccaaggttgtaataccatcagtgaattcccacaatgcactagagcaatgtgattctatggcttctctagatgaaccgttgcttgatgtggagatgacatgcattcctttggacccttgtgctactggtgtgccctactcagtgaaggaaacgcctgctggtgttctgtgcacgtctgatcattgttccactggcacacccttaacagtggaagaaacctccagttccgtttctgttgtgcacattgagccaatgtcaagcaaagtcagcccagtacggcaaagaggttccccttgtttggaaaaacgaggcctttcccctaagaaactatctccaaagaaaggaatacttaagagacatacaagggggtgcaagggaatctgcatgtgcttggactgcagcacattccgtttacgtgctgaccgagcttttgagttctctaggaagcagatgcaagaggcagatgatataatagataacttactaaaggaggtgtcaagtcttaggaatctcatggagaaatctgctggccaattcttcctgcatattactgatggacactttcactgcttgaagtatgttgattga

SEQ ID NO: 43790 - DNA, 261 bp, Oryza sativa
  Clone ID: PAT_MRT4530_46912C.1
atggcggtggccaccgacgacgatgaagatgttgaagagatgcagggctaccggatcggaaggattggtagcgcctcatgcaaggaagacagactagaccagatgggatctgcagctggaacacggtcttctctggcagcactcctgatgatatttggtttgataggcccggcgaccggcacgggccgcgcctctcaggtcttcgttgatggggatggaggccttcgacacagctgcagcatccccttcgtccatgtatga

SEQ ID NO: 43791 - DNA, 391 bp, Oryza sativa
  Clone ID: PAT_MRT4530_46913C.1
gaagatttactcgatccgtgaattgaggccaagtcaggcgagccctcaggaggcactcaagcagtcctcctattggtgccttgggagtactcaatgatgaaaccggagattagttcatgttgtttatgttcttggttaatgataaagattgggacccaagttatgttctgagttggtggcgacccccacgtggtgataaagctggctgttggtcatatggcatgttgatccaattgatgcgtgagataattgaaccctgtgcattcaaaaaaaattggtaagcttgggatggtgttgcaggagataaaaaattggtaaagtggtggagggaagtgtcattttctgttgaacaccccctgtttgttgcttggtataaaaaaaaaaaaaaaaa

SEQ ID NO: 43792 - DNA, 1281 bp, Oryza sativa
  Clone ID: PAT_MRT4530_46914C.1
ccccgggctgcaggattcgcgggcatagattcttggagaactgggcaaattttggcatggattctggtgctgctgccgtctgcgcggagaaggcgagtgagatcatcaagatcggtcaggttgatgacgtgcaggagctgcagcgacgactgtgctccgccaccaccgtgccggagcggtacatcagggacggcgacgaccggccggatcacgccgtcgtcgacgacgagcgcgcgcaggagcggattccggtgatcgacgtcggcgagctgcagcgcggcagcgaggacgagctcgacaacctcaggctcgcctgcgagcagtggggcttcttccaggttgtgaaccatggagtggaggaggagacgatggaggagatggagaaggcggcgagggagttcttcatgctgccgctggaggagaaggagaagtaccccatggagcccggcggcatccagggctacggccacgccttcgtcttctccgacgaccagaagctcgactggtgcaacatgctcgccctcggcgtcgagcccgccttcatccgccgccccaacctctggccgacaactccggccaactttagtaagacgctggagaagtactcggtggagatcagggagctgtgcgtgcggctgctggagcacatcgcggcggcgctggggctggcgccggcgaggctgaacgggatgttcggggaggcggtgcaggcggtgaggatgaacttctacccgccgtgcccgcggccggagctggtgctggggctgagcccgcactccgacggcagcgcggtcaccgtgctccagcaggacgcggcgttcgccgggctgcaggtgctccggggcggcggcggctgggtggccgtccatcccgtccccggcgccctcgtcgtcaacgtcggcgacacgctcgaggtgctcaccaatggcaggtacaagagcgtggagcaccgggcggtggccagcggcgagcacgaccgcatgtccgtcgtcaccttctacgcgccggcgtacgacgtcgagctcggcccgctgccggagctcgtcgccgacggggagccgcgcaggtaccggacgtacaaccacggcgagtacagccggcactacgtcaccagccggctccagggcaagaagacgcttgaatttgcaaagatttaagttgatcgattgatcaccgagtaattcagtataattaatcaacctaaaaagatcaattatgttgacacaatacttgcgtttgagttattgtttatgataatctgaagtatactaatgttactat

SEQ ID NO: 43793 - DNA, 161 bp, Oryza sativa
  Clone ID: PAT_MRT4530_46915C.1
ttcctaccccccactccgggtccggactgggggggagctcgtcactctggaggattgctaagaaaccctgtagggacatagctacacacctcttggcgcaagagcaaggagaggatagggcgttctaccccctagtacggaaggacgatcgcaggtgtgtc

SEQ ID NO: 43794 - DNA, 954 bp, Oryza sativa
  Clone ID: PAT_MRT4530_46916C.1
atggagaaagaggtaccaaaaaatttattgcgaatttccgtagcttctagtacccaagataccgagaggtatcatacgattttctaccacgtatcgcgtgatactcgcaaggtatcatatgatttcaaccacgtatcgcgtgatactcacgaggtatcatgcgatacctgccgtgtatcagacgatttctaccacgtatcacgtgatactcgcaaggtatcagacgatttctaccatgtatcacgtgatacttgcgaggtatcggatgatacctaccaggtatcagacgaggacggcgacggcggcggcaggggacaggtacgggacggcggcggtgggggatgggcgcggcagtggcgacggggaacgggcacggcggcggtgggggacggcgacggcggcgacggcaccggcgccggcttggcaggggcggcggcgccatctcgtcagatccggcaggggcgagaggggaggcgcgggaagggaggcgtggtggcggcggacggcgtggaggtgcaacggcgtggatggtgggagcgccttccctccgccagatctggaggcccgactgagggaagggaggcggtggcgccctcccctccgccagatccggcgggaggggaggcggcggcggctcgggcggcagcagatctgcccgtctccgccctcggaagcggcggcggtgggcttaggcgggcaggagcgagcggccatggcggcggtagctgcgacaacgacgacgacgattttgacggcggctgcgatgaagacgacaagcgaccgcctccatcgacggcgccaccagcttctacgcccacaaacctcggatctgcccgcgtcgccttccaacgcccacccaacagccgccgctggatccggcctccacggggttctgacctgtcagaggtgtatgtcacctttgacgggctggaaagagtcacccgttacaagtga

SEQ ID NO: 43795 - DNA, 261 bp, Oryza sativa
  Clone ID: PAT_MRT4530_46917C.1
ttttatttttttaaccgcacatatttgtggtttattttgaattgcttttagtgtaaatcacgggcccataagctgaaaaccgccatacaaaaagctcaatttctcgagcaaggttctcacacaagtcacttagaggatgcatctggtccactgggccagccagaaaaaccgtctaccctcaaaaccaccatctggaacaatttatccgagaggggaaacagcttggcacatatttaaacaaaccccggtactgcggaaccc

SEQ ID NO: 43796 - DNA, 485 bp, Oryza sativa
  Clone ID: PAT_MRT4530_46918C.1
acattcgaaacaaaggctctttttgttccaaaaagaaaagatcatcggttatttacagctcgagtacggccatatagctccaaaataaaaatatttaactatttaaagtggcaattaaagattacccatatgttatagattgcggttggtaaatccttaattgccacatttaaaagttagatgctctgaaatgtccaatatgcgtactgctagtacagcatgctgatactactatcactttcaactcgcacatctgatcgatgcccaagtagtcttcgactcttcgttgcacggacggttcaaagggaaggagaaacctgtcgctacatctaaccatcacctcgttactgtacagaaaacggccaacctgtccgtgatgctgctgctgtgctggtagtagcaatgcactagcatttcgcttctgattttttttttacctgcccttcaccgctgctgtgtttcagagcagcagaagaattttactc

SEQ ID NO: 43797 - DNA, 310 bp, Oryza sativa
  Clone ID: PAT_MRT4530_46919C.1
aattcggcacgagagcttgtgtacacatacaatgcgtgtgaattccgagagcccttgttgtatthvtacgtvacgtgtgccagcataggtgtgtgagacgatcgatcgatcgagaggccatcgcgatcccgcmcattgttgcttgcgcgagaggttgaagttgaaccctaacatttgatgctataggggagccagggagcagctctggaatggtaacaaatgttccaacgaagctgactagcagtgccaacgaytccaatgcatcgagcaaaacacaaacattgctcattgttgtgttgtgataaaaaaa

SEQ ID NO: 43798 - DNA, 416 bp, Oryza sativa
  unsure (1)..(416): unsure at all n locations
  Clone ID: PAT_MRT4530_4691C.1
ctaagctcaagctaagacctaccccagctcagtgctgctcaagttttgctcggtgccgtgcatcgcgccgccgccgccggccaccaccatcgtcgccgccgctgaccgccacctcgcgaggtgccgacggccgtcgcgggctcgcggcgtcacgtcgatagcagagcaagcaggtggcaaggttgaagggcacatctagctgcttcttgttctacccccaagaaaggtatcgtgtcctaggctcctggctactcccccactattttggccttttgggtaagcacagacccggncataaaaagtaaagcagccgatcgagcagcggtgcagcgccattcgtgcacaggcatcatggcgaacctccctgaccctgatcgncacaccatgcacgggttctagatcatctcgtccttcgn

SEQ ID NO: 43799 - DNA, 549 bp, Oryza sativa
  Clone ID: PAT_MRT4530_46920C.1
cctgagcactggtatatgctttcgataactcataacagatacatttttgtaattcatatttacttgaaatttgttttttttaaaaaaaaaaaaaaaaaaaaaaaaaaaaaaaaaaaaaaaaaaaaaaaaaaaaaaaaaaaaaaaaaaaaaaaaaaaaaaaaaaaaaaaaaaaaaaaaaaaaaaaaaaaaaaaaaaaaaaaaaaaaaaaaaaaaaaaaaaaaaaaaaaaaaaaaaaaaagggggggcccctttaaaaggacaaaattttcactcggcatatggcgaacaaaagatttttttaaagggggcccaaaaaaaaaaaaacgggccgggttttaaaaaagtgaagaggggaaaaacccggggggacccaaactaaaaccccttgcaaaaaaacccctttttaccacctggggaaaaaccaaaaaggcccgcccccgtgccccttaccaaaaatgggccccccaaaatgggaaaggggcccccccctttgcgggcaaaaaaaggcgggggggggggggggttacccccagggttacctttaaaatt

SEQ ID NO: 43800 - DNA, 279 bp, Oryza sativa
  unsure (1)..(279): unsure at all n locations
  Clone ID: PAT_MRT4530_46921C.1
agtagtgtgaaggcaggacacaagttgatagagaccttgagtccttgaagaaagacaaagtattgcgtgtattcaaactcaatactgggcaggatgatcatgcaatcatgttcatggatgattatctgaaacagatggcgttggcagtcaagaggtcaaggggtaaggaccaagatggtactgaagtttttgggtggtttgagagatatgttattnatttgaagcttgaagttagnattgatcagngngatntgttttntntgntatnanttggaggtg

SEQ ID NO: 43801 - DNA, 336 bp, Oryza sativa
  Clone ID: PAT_MRT4530_46922C.1
atggccttcctctgcctccacgctcgccacgccatcgccttcggcttccgcttctgggtcggcggcagcctcccctcccacgtcgcaaccaccgccgcctctccgccaccgtgctcgcccgccgatgccgcctcgccctgccgctaccctccccttctcccgtgtctccgccgccgcgtcgccggccggccgtcggacctccttgccccagcgacctcctccctaccgctggccggcctgcccagtctagagagaagaaatgttaagaagtttgacaagttccatagcaagttgaagagccatcaattcagcatgcaaaggagattgggccactaa

SEQ ID NO: 43802 - DNA, 780 bp, Oryza sativa
  Clone ID: PAT_MRT4530_46923C.1
gcacgaggcctcgtgccgaattcggcacgaggtcggatcggtgtgggtttttttatggtcgtcgcctgatccctcctccgtgcgacagatcgatgacggaaggaagagaaggggaggggaggagaggaatctcgtcgtgtctgtcagtctgtcagtacaggagctcagtacaggagcaggagcgacgagagtttctgatttgagggagggaggcgcacagattttctcttctttctttcttcgtttttgttttgttttgttttgccagactttttaccaccctccccctcgcatcgcagaggagggaggagcagaggacatgcagtacctttttcgccttttgtggcgcgcgcagataatctcatgccgtcgtccgtcaacgcaaaatcgcagtgcctccgatccggtccaacgctacgctgccatggatatgcgactgtataggagctgtacatccctaggagctctactgatcctgtaaatttttgatatgatataccacatgctctagcgacatgcgttaatacgctacgttttcttcttctttccccccccaaacaaatagtatatttttaagagagataccctggttctattttccccccatcattaaaatacttagtgctactgcctatatttgttgttggcttgtaagcactgctcgatccttctccaacttatttatacaaattgtggggcatcttttattttgttaaaaaaaaaaaaaaaaaaaaaaaaaaaaaaaaaaaaaaaaaaaaaaaaaaaaaaaaaaaaaaaaaa

SEQ ID NO: 43803 - DNA, 1223 bp, Oryza sativa
  Clone ID: PAT_MRT4530_46924C.1
atggatgtggctgaatcgcgcgacgttaggatgaggcgacaaggacaggggcagtacggtggaggagcagacataaactccatggtggctgctcagttgcatcactaccagacacaacaaagggttcagcaacaccctgataataactaccctggaagagatcctgggaaagctgctgaggagcagcagtatagcgccccaaaggtgaggcagagtcaatgggatcgaggtggtccaaatgccccgaatcagattccagcgtatgcatacaatgaaggtcaaagtgctcagggtgcacaaaccttttatgatggacagagatctgatttaaaggttggtctagaaaagcagcccaataaagaatcgagggatcggcctcgtaatgataggtttgaagcaaggcgcgaggattataatctccctcgtacatttgaaggtctagagcagaattttcatgaagacattgtgatcctatccaaggaactacatgatgcagaggatgctgaaaacgccaggcacagggagagattgaatgaaataaatgcacaataccaggagaaactgttggcacttcgagctcgccaagcaacctatagagaagaattcttacgcaaggagtctcaggcacgccagcagcaataccaacaggctagcatgagcagttatgcaaacaatgtaaggcccggggagactcacggctatactccaattgcagcaaaaccgccgccgcctccacctgctgctgctgctacagctggtggtacttatggagaagctcatcggggttatacttctgcccagtatgacaacttcagggagcgtccagactacccagagttccgtggtcgtggccgaggtgaaggtcatgttcttgagcaccgtggtcaattccctggtggtcgtgcttataattctggtggccgaagattctagagatggcttcttcaaacacagccaattggctcatctttcttgatctcagcttggtgcgaaatgcgaattgcattagatgcttggttgcagtctcgtttaaacctatatacatggaaaagctgtttacaatttaaactgctggtatgcaaccatcaaacaacaccagatgtcaccggcactgttgtgcttgttgtttccacctacaaccctgtaattctgcttctttgtaacttggtagagaaagatgagaataatttaaccatactcccaaaaaaaaaaccaacaaacac

SEQ ID NO: 43804 - DNA, 455 bp, Oryza sativa
  Clone ID: PAT_MRT4530_46925C.1
atggcggcggtggcggctacatctccggcgctaaccctcgctgtcgcggccgcggtgatagcggccgcgtgcctcctcctctgcgcggaggcggtgtggctggacttgccgcagtcggggaccaagtgcgtgtccgaggagatccagtccaacgtggtggtgctcgccgactacgccctcatgtacgagtcccacccctcctcccaccccaccatcgccgtcaaggttacatcaccatatgggaacaccttacatcacaatgaaaatgctacggttgatagcgcagagaaagggtcaggaatatctattaatcttgattggaagattggaattgcagcaaaggattgggatgttatcgctaagaaggaaaaaattgagggtgtagaactagagcttagaaaacttgaagtggcagtacaatccatccatcagaacatgatatatctcaaagcaag

SEQ ID NO: 43805 - DNA, 1044 bp, Oryza sativa
  Clone ID: PAT_MRT4530_46926C.1
ccgggctgcaggttttcggctcgtttttttttttttttttttttttttttttttgcttccctttttaagacgatgaatttcttgtaatctatgtcctgaaggcatcaaatattccagggagatttaagttatcacctatttgcaatcataatgcacaacacatctaaactgaaccatggttaaattacataaagtacaagcagctcctcgctagcgtgaagttcgaactaacatgacaaaactgttttccccaatgtaacaacatttgcaattttggagtcacggtacagctcaagcgagctaacctagatgagcttcttcttctggaagtacccttgaaggtgccacaattgcaaaattgaaaccacaatgcagacgcttagtgacaaaatactgaaccaggctaccctagcgtttgttttctcgctcactgttcgcatctctgcttcccttgctttgagatatatcatgttctgatggatggattgtactgccacttcaagttttctaagctctagttctacaccctcaattttttccttcttagcgataacatcccaatcctttgctgcaattccaatcttccaatcaagattaatagatattcctgaccctttctctgcgctatctatccagaagcatgcaagatagtttcctgcttctgaagttgtgaatgcgaactgaccaaccgtagcattttcattgtgatgtaaggtgttcccatatggtgatgtaaccttgacggcgatggtggggtgggaggaggggtgggactcgtacatgagggcgtagtcggcgagcaccaccacgttggactggatctcctcggacacgcacttggtccccgactgcggcaagtccagccacaccgcctccgcgcagaggaggaggcacgcggccgctatcaccgcggccgcgacagcgagggttagcgccggagatgtagccgccaccgccgccatcccccgacgaccttgggatctccgccgccttgcggggagggggagctggagcagtgccccggtgggagagagcgcctcgtgc

SEQ ID NO: 43806 - DNA, 548 bp, Oryza sativa
  Clone ID: PAT_MRT4530_46927C.1
gagcaggtgagcagcggtgctggcaagcaaagagagggacggcagtgggcgccagcgtatggaggagcagcggcggcggcttctgccgcacagagagaggaagggaggggcagcgccggcgcgcggacaggcggcggcgcctgttcgcggaggagcagcgcgccggcttttgccgcgctgagggagggacggctccagcacgtggcaggaggagcagcggagctggcgccggctgttgccgcgtggagggaggagggatgggcggcgacggctgctgccgtgtggagggaggaagggagggagggccagctccggcgcgcggaaggaggagcggcgacgccggcgcacagagggaagaggagcagcggcgcgggcgcgtgtagaggcggtggtggcgatgcgtggataagcagcggatggtgcggcgctgatggggaaacgcgcgggccggcgcttgctgtgtggatggagtgcgtggccgtgtggacggaagcgtgcaacgcttgcctggctcagccggaggcacaggtcctgcgtgaggcgctcat

SEQ ID NO: 43807 - DNA, 1275 bp, Oryza sativa
  Clone ID: PAT_MRT4530_46928C.1
atggctgagaatagcgtggtggagagggttctggtggtggcgcaacagagagcacatggcgcaggatccttggcggtggcggcgtcgcggtacagaaggcatcccggtggcggctcaagatccttcgtggtggcgtcggaggcgtctcgcgacgcggtcggcaggagggaccgcgcgccggctgcgtggtcagcgtccctatactttatgtaccgggcctggcctgccggcccatcgtgccgggccggcccgaccgtgccgggccagcccagcgtgccggtggggaggcccaggcacggcccgacggtcgggccgggccagcacgggcccgacccaagtcgggccgtgccaattaatattccatggcaatgccgtgttccggtgagccggtgccgccgcgtgtggtggtcggcggcggcggcggtggtggcgttcttcttcgtcgtctttgtggcggcggcggcggcggcggctacggcgtcaatgtacaacgacgtggaggtggtgtggggcggcgaccacagcttcttcttcatggacggcgacggcgacgccctcgcgctctgcctcgacgagacccacggctcgggcttccgctccagggacgcctacctctacgcccgcttcgacgtcgacatgatgctcgtcgccaacaactccgccggcaccgtcaccaccctctacttgatgccggacgacgtgccgtgggagtaccacgacgaggtggacctggagttcctcgggaacgtcaccggcgagccctacaccctgcacaccaacatcttcgccaatggcgtcggcggccgcgagcagcagttccgcctctggttcgaccccaccgccgacttccacacctactccatcgtctggaaccccaagcacatcataattctggtggacggcgtgccgatcagggactaccggaacacggcggcgcgcggcgggccggcgttcccgacgtggcagaagatgcgggcccacggcagcctgtggaacgccgacgactgggcgacgcagggcgggagggtgaagacggactggtcggaggcacccttcttcgcctactaccgggggctccgggtgacgccgtgcgcgccgtcccccggcgtggcgtggtgcggcgatgagccgccggagtcgccgtggttcgatcagcaggagatggacgcggcggcgctgagcaaggcgaggcaggagcacctgctctacgactactgcgaggacaccaaacggttcaaggacacgggcctccccgtcgagtgcaccatcaactag

SEQ ID NO: 43808 - DNA, 426 bp, Oryza sativa
  Clone ID: PAT_MRT4530_46929C.1
atggtatcagagccgactctcgtggtttcacgggcgcgtgtatcgcagttgcgcaggcatggtgtgcatggctggtgtggacccggagtggtcacacagcatggcacatgtgctggcactggacaagcgtgcttggcctggagtaatttgggatgggtgaccgaccgggaaattcttcccgggtgcacacgactacaaattgaaattccatattggcatctcattgttcatttcaggccccaatattgggccctccagccagccagtacgtatgtcctagtcaacaatgacaggacattgctcaatgcccgtgaaaatcctgcaaaatccgtatgttgcaagagagacctaaatcctctgctagctcgatcggcagaagcaagcaagcgaaagacaccaaacaacttaaacaatcgaattgttaat

SEQ ID NO: 43809 - DNA, 183 bp, Oryza sativa
  Clone ID: PAT_MRT4530_4692C.1
gcgaatgggaccctcgagccggccgggagaaagataaggacacgagctgggggcagtgatcgtcgatcgctcgcccaaatgcgggggaagccctgacagatgcagacgcgggatggttcgatggcccggcgccgcggggaggggcgagagcccaaggatctcatggacgaagaggcccccagc

SEQ ID NO: 43810 - DNA, 167 bp, Oryza sativa
  unsure (1)..(167): unsure at all n locations
  Clone ID: PAT_MRT4530_46930C.1
accccgtatttgtgaaacccggaaaaaaatcatgggccttancaaattctctgatcgacccgtgaanaaagattcacacaaagacngaacaaatccacctattggttttacgtcaacatacgtagagtaactccccatataggagtaaaacnagacgtaataaaaaa

SEQ ID NO: 43811 - DNA, 618 bp, Oryza sativa
  unsure (1)..(618): unsure at all n locations
  Clone ID: PAT_MRT4530_46931C.1
aattngtnatacgantcactatagggngaattgggtnccnggncccccccccaattttttttttttttttttgtcntctgaattcngcctacttatatttancttanccaaattnaaacanannggttttgaaatnacagtnncnatatttattgaacntgcacnaaaatatntncctacacgcntgcgggaaannaacccnaactgaaaaactaagggntcnccnantcctccgatnnccatggggggnnttatgccgccnctgngaanccaaccttcnggntgccanantcaaatntcgnatggnatgntcccataaacanttctcccnagatncncaaangancactaagaagaagaatnttccnaacnnttaatccnctgannctnngggtnacgnttccccccccaaccntccagatgttttgttctngtttnaacaccnactgttnccncccattgttaaaggnaatnttcngcttggatccagnnnctncaatcnaccaataatcccctcggacaanaanaagnccctccccgatcanttctgcnncaaanccaatttattgtccattggttgccccactncttncccacntgcnttcctgctangacttt

SEQ ID NO: 43812 - DNA, 1040 bp, Oryza sativa
  unsure (1)..(1040): unsure at all n locations
  Clone ID: PAT_MRT4530_46932C.1
tgctcgtggttttttctgaaagagaatagtagttcagttttttcacacttcagtatcgaccccgagtctgaactctgaagatcagcttcaagtatacatacatacagtacatctaaataaaattgtaaatgtatagtaattctagttcatggtattttgagcacttatacaggttacatctacacaaccattttttcttttcagacaacacgcattagagtgtagtgacatctacacaaagcaagacctgaacacaccgtaaacagctgaacacagtaaaagtaccatctaactgaaagttcagacttgggagagccactaactagcctgaaactacaggcttgccttgctcctgcgacagctgctgcttggagttggattgagatggtgggttgaacttggtgaagaccctgaaggcggagatgagggagagcgccatgaagcagaggagggcggcggcgttgagcgccacggacacggtggcggcgccgcagaagcggccgaagtaggagcacacctccccccacgacacctcccggtcgccctcccgcgccaggtacaccacctccgccgccgccgacgccgacgtcagcagcaggtacgccgacgcctgatccaggaggaaaatgagccaatcaaagcgagtgatgaacctgcaggatgacagcaggatggaggccaccgagtaggcagccgtgatggcgttgatccagaccaaatacctgaagccggagaggtcggagaacctgacctccccgtaggtctcgtccacctgcttgttggtggccatctcccacaccgacgccacggcgagcggcaccgcgcacacccggagccccagctccgccagcctgaacggcgccgccaccttcaccttctcctcctccgccgccgccgccgccgcggtgctcccctcgccgctcctcatcttctccggcgacgacgacggaaatttccttcgcctattctttctccgacctgtctcggtgtgcgaggaggagaaaatcggtgaactgtgaccgcggtgcgcgcaanagtcc

SEQ ID NO: 43813 - DNA, 1416 bp, Oryza sativa
  Clone ID: PAT_MRT4530_46933C.1
atggaagccgcggcgccggcttcccacgccgccgcggcgcgcggccgcctccggtcgcgccagtacgcggtgttggggctcaccttcgcggcgtacgcctcgttccacgcgtcccgcaagccgcccagcatcgtcaaggcggtgctctccgccgactgggcgcccttctcgggcccccgcggcccgcaccgcctcggcgagctggacgtcgccttcctctccgcctacgccgccgccatgttcgccgcgggccacctcgccgaccgcgccgacctccgcggcctcctcgccgccgccatgctcgcctccggggccacgtcggcggcgctcggcgcggcatacttcctcggcgtgcatagcctcgccttcttcctcgccgcgcaggtcgccagcggcgtcgtccagtccgccgggtggccctgcgtcgtcgccgtcgtcgggaactggttcggccacgcgtccagccgcgggaccatcatgggggtgtggaactcgcacacctccgtcggcaacatcgccggctcggtcctctccgccgccgtgctcgagttcgggtgggggtggtcgttcttggtgcccgcgtttgtcattgccgcgctcggcgtcgtggtgctagtgttcttgatcgctcacccaatggatgccgggttggacattgaagcaattgaggttgagatgaatggggggagtggagaggaggtggagcttcttggggaggacaagaaggaggatgaagatgtgttggaggtggaggcggtagcagaattgccgagggcaattgggttcttggaggcatggagattgcccggtgttgcgccatttgcattctgcctcttcttctccaagcttgtggcttataccttcctttactggttgccgttctatatccggcacaatgctgtggcaggtcagttcttatcacacaaggcttcaggaattttgtctgttgttttcgatattggaggagttttgggaggcatttcggctggtttgctctcagacaaaataggtgctcgtgctgtaacatcagctctgttcctttttctttcaatccccgcgcttatcctttaccggacatatggaagcatatccatgcaccacaacattgggctcatgttcctcgccggctactttgtgaatggcccatactcactcatcaccacagctgttgctactgatcttggtactcaggatgcaatcaagggaaactcgagagctttggctacagtgtctgcgataatcgatggcacgggttctgttggggcggctttgggacccttgttaactgggtatatttcaacaagaggatggaacagcgtatttttcatgctgattgtttccatatcacttgccctggtgtttttgatacggctggcaaaagatgagattgttagcaagatcagtgcgaggcattag

SEQ ID NO: 43814 - DNA, 237 bp, Oryza sativa
  Clone ID: PAT_MRT4530_46934C.1
atggtggcggtggggcacgtcgtgggggtggcggtggcagggcgggtggagggggagcacggcgtgggggcggtggggcttgagaaggcggtggcggtgcacgaccgggtggtggtggagcgcggcctggaggtgacgggggtcggatgggcggggcagaagggaaaggggaagccgaagccaggagagccagggttgaaagtcattgctatggaaatggaatgctggttgctgtag

SEQ ID NO: 43815 - DNA, 917 bp, Oryza sativa
  unsure (1)..(917): unsure at all n locations
  Clone ID: PAT_MRT4530_46935C.1
cttctataaaaggcctacaacccccaacactgcatcctctcccctatccgtcttcatactaacaagagtacgtncaagatttcgtatcgatcgtatagagagatcgaagtcaganagagagaagagattataagtnaatttcgccatgagcagcagaaggactagcgcagctaatcttcttgcggttgccctgctgatcatctccttgctgttgttgcctcttcttcaccttcccgttgcccatgctcgccatgttgctgtgctgaaggctactgacagttctagtgccatcagcatcagatcgggacatgtggagcccaccccggcgagcggagcagtgcagaggaggccagctagctccggtgcaagtaaccgcggcggcggcgggcggcggcggcgagcggcggcaagcagcaggagtacggtggagatgcgcgcgtcggcgtgggcgaagcaccaccgcgacgaggtcgccaggatgcacgagatgctgaagagggactacgcgtccaaggcgcgccgccgctcgccgatcaacaacggcgagccgtcgctggaggaggaggacctgccctaactaagcttcagctgcatattcgtagtgtagtgtagcgtagcttagctatagctcctctgaaagatctgaactgacacacataggtagtacatacagttattactagagctgctcttttagttagcaaattagcaggcaggatagtgtagttactcctatggaataacagcctttggtttagtatagcatccaagctgggnngtcatttgttagccctgagagtcagagagccatgaacaaacagtctgaaactgggcagttttgtccctgatgatgctcatgcttggtgctanntaaagcttttagctannttcaccctgaacataaaaaaaaaaaaaaa

SEQ ID NO: 43816 - DNA, 745 bp, Oryza sativa
  unsure (1)..(745): unsure at all n locations
  Clone ID: PAT_MRT4530_46936C.1
gttggcgaggtccgggccggaagggaggaggcaggtgatggagtccggcgacgtgggggtgctcctgcggcacgcggcgggcggggatgaagtggcggcgagggcgctgctgcacctgagcctcgacggggacgacgcgcgggtcgggttggtggcgaacggcaccgtggacgcgctctccaccacgatgtcgtccggtggcncgacancgacggtggccgccacggcgctcaccagcctcgccacggtggacgtcaacaagtgcaccatcggggcgcacccctcggccgtcccggcgctggtcggcctcctccgccgcggcggcggcgcgcgggagcggcgcgaggccgccacggcgctgtacgagctctgcaagctgccggagaacaggcgccgcgccgtgcgcgccggggcggcgcccgcgctcgtcgacctcgccgccgcgggctccgcgcgcgccgccgaggtgctcggcctcttcgccaagtcccgcgaggggcgccacgagctgtccaggatcccccgcgtcgtcgccgtgctcgtcggcgtcgccggcagcggcaacgcgcgcgccatcgagcaggcgctcgtcgtcctcaacttgatctgcggcgagagcaaccaattggcgagggaggcgatcaagctcggagcattccatctctgcgaggctctcgtcaacgacgacaactgcaagattgccaagaacgcggtggaattagctcggacgctcgagaagctttga

SEQ ID NO: 43817 - DNA, 366 bp, Oryza sativa
  Clone ID: PAT_MRT4530_46937C.1
gtcatcttgaagaagaccagcgcggggcaacgcgaaactggtggagggctcccagacctaaccggcggcggtggcggcggccatgggaggagcctacaacctcaagctgctcgccgacctctccgagctcgtgctccttctcggcgcctcgcgcccctttctcccggggctcctggaggcggcccttcgcgcccccgtcctcccgcgcgacctcctccctctgctgccctggccggtgggccagtcgatgctcctgcgcctcgcgctggcgcggcgccgtcgacctgctcccgtgcttagttggcgtcgcgcgggagccagggattgggcggcgccccgcccgtccagtggaagggcgcctgcttt

SEQ ID NO: 43818 - DNA, 686 bp, Oryza sativa
  Clone ID: PAT_MRT4530_46938C.1
ggaatttggatgacattgaaactccaacggttccaaatgtgtcctaccaggagcctaaaccggattcaaagaccgaggagcggctaccaggaattgctggattcaaccgatacttcccttggcagtaatcaagagcatcggtatcacccatttttttggaggcaaaccctatgtgggagagagagcttacaaaccgagggctttgaatgtaagggaatcctgaaaagccatggattggagaagaccatgagcagtggacatgaccatttaaagtctcttctacgcgtcgaggccacctatcattttggatgcatgtatggtgatccaagtgcgttgcactggcggccgatttcgacctgtcgcctatctatggcttgtcgtctcggtcaaatactaaactgttcagtattttgatactagctacctccatccaaaaagagttcatttttcattcgtgcacaaaagtgaatccttttaggacggaggtagtactaaacttcaaggctaggtggtgcggtgcgccttcttcagaggtagtagtaatagtaccattatcatgtggtgttcccctgcgccaccatatttttttgccgtctgttggtcaactctgccgcccccaatcccatgttaagaacttaagactacccaaaaggctctcgtgttcatctaaagagagctctcttttt

SEQ ID NO: 43819 - DNA, 3133 bp, Oryza sativa
  Clone ID: PAT_MRT4530_46939C.1
atgtcgggcagatcctctcagttagatccgtccgcgggtgccgccgacgtcgccaccgccggatccaagggagaagcttggggcggagggggaggggctcctggtttggaatggtacattcctggtttggagatagaactgtgcagccggggtggttgttcagaatggttgggcctatacaacaggatgccgcgttacaagcctgagtacctgtttggtgttgagggttttgtccaggagttgcgcacgatgtcctttgtcattggatttgggactgcccctttttatgcccagattcctcatgatcgtcatgaagagaagtgccgagtcaaagtcactttgaacagtaatagtgaagaggtcccctcagtgatgtttgaagctggaggaagaaactacatccatgcatgtcaggaggtggcaaggatcgccataggagagctccgtgatcgctacaggaaggaccgtggcagttaccttgagactgaaggaattgagaatgatgttaccacgaaacatttggttgagatgttgtgggctatggatgaaagtcgtgcggagactgtattagcagctcaagatcgtgaagaccggaatcgtggtaagatttgcaagttagaagacaaggtggatcgtttggagaaggaattagccgcattgaagggagaagcaccgccgcagaaggccaggattcgtcttaccgcaaggaagagagctctatttgtccctcgctatcaattggcgccaaagatggtgaacactcgtagcaatgggaatggtcccaacaaccccaataacaacaacaatggagagaatcccactctggcccaagttcttgctcaacagacacagcttatgaacatgatgatgcagcaatttcagaatcagcaaaaccaaggaaataatcaagcactctctttgcaacgtagcccctctgtcagaatagaaattcaaggagtaccatttctggccaatcttatcttgttaaaatccaaagaccttgatgtcatcctagggatggactggttagccagacataaaggtgtgatagactgtgccaacagaaaagtaactctcaacagctatgatggtcgagttgtaactgttcatgcattgtcatctgagtctttaaggtcaagactgaaccagataactttggaagagattcctatagtccgggagtatcctgatgtgttcccagatgatttacctggtatgccgcctaaaagggatatagagttcagaatagatttggtacctggaacaactccgatccataagagaccttatcgaatggcagccaatgagttggcagaagttaagaggcaagtagatgatttgctacagaaaggatacatcagaccgagttcatcaccatggggagctccggttatttttgtggaaaagaaagatcatactcagagaatgtgtgtggactatcgtgcactaaacgatgtgactatcaagaataagtatccactacccaggattgatgatttgtttgatcagcttaaaggtgccactgttttctccaagatagatcttcgatcagggtatcatcagttgagaatcaaagaggaagatatacctaagacagcttttaccactaggtatgggttgttcgaatgtactgttatgtcttttggacttaccaatgcccctgctttcttcatgaacttgatgaataaggtgtttatggaatacttagacaagttcgtggtggtctttattgatgatattcttatctactctcgaaccaaagaagagcatgaggaacatcttcgccttgcattggagaagctacgagaacatcaactgtatgctaagtttagcaagtgtgaattttggttgtccgaagtgaaattcttggtcacgtcatctcagccggaggagttgccgtcgatcctaaaagatgtgaagtacaagtggtcggaagaatgtgaacagagttttcaagaattgaaaagtcgcttaatatcagctcctattttgattttgcctgatccaaagaagggtttccaagtgtattgtgatgcatccaaacttgggttaggttgtgttctgatgcaagatgggaaggtggttgcctatgcctctcgacagttacgtccgcatgagaagaactaccctactcatgatattgagttagctgcagtcgttcatgcattgaagatttggcgtcattatcttttcggtactcgtacagaagtgtacaccgatcacaagagtttaaagtatatctttactcagccggatctgaacatgagacaacggagatggttggaattaattaaggattatgacatgggaattcattatcatccggggaaggctaatgttgtagcagacgctcttagcagaaaaggctattgcaatgctacagaaggacgacagttgccattggaattatgcaaggaatttgaaagattaaatttgggaattgtcggtagaggtttcgttgctgtcggtgatatgggaccgggagtattgcgcccggaggcttgaggcagatggaatcgcccacgtggcctggcaccttcggggacgtcgggcccgagggtgaggtgtccgccctcctcctgatttccccgagggggggtcgggttgctcctgccccgaccccgagggccgaggtgccccgaccccctgtggagaccggtcggatcaacggttaggtggcgactggtggtctgacgcacgcctcgccccgtcccgtcaagacgagagcctctaggcacacgtctccagccggagctagcgtgttacctcttagagatggcacgttagccctggttagatgaataccaggcttcatcccaaccattacaggcaagatgcgatctgtgaccggtctgacactggtcgcgtcagcaacagacagccacgatcccacgttgcgcctgtctccgccgggagtggaggtaggtgtggggcttcccagcggcccgaacctgtatacatcgtccgtgtctcgcgtttcttcctggcacgcgatctttccacatacagagagagcttgagatctcaccctaagcccccggccgaactggcaaaggggggcctgtgcggtctcccggtgaggagccacgagctccgtcaaaccgggaatgtatgtgtaaacagtggtgaacat

SEQ ID NO: 43820 - DNA, 271 bp, Oryza sativa
  unsure (1)..(271): unsure at all n locations
  Clone ID: PAT_MRT4530_4693C.1
aattacgaacatttggacctgatacccgggggactcaaatactcacgtgaatgaaaacaatatacaatatatctgtatgaaatgaatttatcaatgcttcttggttcaaccatttcttacccaacactcaatggtacatttctcaatggattcactcgtcaaaggtttgaatttaactttaaccattgaatgtatgatctagccacnccatccgngcataacctaaatgtaatatgcttatatattgtgtcgcatgtttgaatctttcatc

SEQ ID NO: 43821 - DNA, 5232 bp, Oryza sativa
  Clone ID: PAT_MRT4530_46940C.1
cgaaagtcggcccaaaacctcctctctctttcccccggcccaattccgacgtttccggagagtccgttttcgcaggagaagaatttgaagagttccaaggccagcaaggcaactcctggtttggaatggtatattcctggtttggagatagaactgtacagccgggatggttgttcagaatggttgggcctatacaacaggatgccgtgctacaagcctgagtacttgtttggtgttgagggatttgtccaggagttgcgtacgatgtcctttgccataggatttgggactacccctttttatgcccagattcctcatgatcgtcacgaagagaagtgccgagtcaaagtcaccttgaacagtaatagtgaagatatcccctcagtgatgttcgaagctggaggaagaaactacatccatgcatgtcaggaggtggcaaggatcgccataggagagctccgcgatcgctacagtgatcagttggccgacactgagtatctctaccatcctcgcaaccacagggaagtgaccgtggcagctaccttgagactgaaggaattgagaatgatgctaccacaaagcatttggttgagatgctgtgggctatggatgaaacccgtgcagagactgtgttagcagctcaagatcgtgaagaccggaatcatggtaagatttgcaagctataggacaaagtggatcgtttagagaaggaactagccgcattgaagggagaagcaccaccgcagaaggccaggattcgtcttaccgcaaggaagagagctctatttgtccctcgctaccaattggcgccaaagatggtgctcactcgcagcaacgggaatggccccaacaacaacaataacaacaacaatggagagaatcccacacttgcccaagtcctggctcaacaggtacagcttatgaacataatgatgcagcaacttcagaaccagcagaaccagggaaataatcatgcacctcctcagaacaagttagcagaatttcttcatgtgaggccgcctactttctctagtaccactaatcctgttgaagctggcgattggctgcatgccatagaaaagaagttggatttgcttcagtgcaccgatcaggagaaggtctcatttgcatcacatcagttgcatggccttgcctctgaatggtgggatcacttccgcctgaacaggactactactgaacctatcacttggcttgaattcaccgctgctttccggaagacgcatataccatcgggagtggtgtctctcaagaagaaggaattcaggtcgctcactcaggggtctcgctctgttactgagtatctgcacgaattcaatcgtctggctcgttatgctccggaagatgtgcgcactgatgaagagcgacatgagaggttcttggaaggacttaatgatgagctttcttacccactcatgactggggattatcatgatttccagaagttagtggataaggctattcgccaggagggcaagtacaaccgcatggagcagaagaaacgccggattgctcaattcaaggcacaacaagggaatagtcagaggccgcgtcttactttaggaccccagtccatgcgacagggaggttcttcgtctgttgttcgtccgcagcgtcagttcttcaacaacaatgcgggcaacaacatccgcaatcaagctccacgccctgttgcagcttcgacacagcaacagcctgccaagaaggagcaaggcagcaagcccgtggtgtgcttcaactgtggagacccaggacattacgctgacaagtgtccgaagccccgacgcgtgaaggttgtccctgcccagagcaactctactgtaccagcatcaaaggcccgtgtcaatcatgttgctgctgcagaagcccaaggtgctccggatgtgattttgggtacgttccttgttaacttagttcctgcaacagtgcttttcgattctggtgctacacattcattcttatctatgagttttgcgggaaatcatgggatggaagtagaagatcttagacgtcctttgatggttagtaccccaagtaatcaagcactctctttgcaacgtagcccctctgtcagaatagaaattcaaggagtaccatttctggccaatcttatcctgttagaatccaaagaccttgatgtcatcttagggatggactggttagccagatataaaggtgtgatagactgtgccaacagaaaagtaactatcaccagtaatgatggtcgagttgtaactgttcatgcattgtcttctgagcctttaaggtcaagactgaaccaaataactttggaagagattcctatagtccgggagtatcccgatgtgttcccagacgatttacctggtatgccgcctaaaagggatatagagttcagaatagatttggtaccaggaacgactccgatccataagagaccttatagaatggcagccaatgagttggcagaagtcaagaggcaagtagacgatttgcttcagaaaggatacatcagaccgagttcatctccatggggagctccggttatttttgtggaaaagaaagatcatacccagaggatgtgtgtagactatcgtgcactaaatgatgtgactatcaagaataagtatccgctgcccagaattgatgatttgtttgatcagcttaaaggtgccatcgttttctccaagatagatcttcgatcagggtatcaccagttgaggatcaaagaggaagatatacctaagacagcttttaccactaggtatggattgttcgaatgtactgttatgtcttttggacttaccaatgcccccgctttcttcataaacttgatgaataaggtgtttatggaatacctagacaagttcgtggtggtctttattgatgacattcttatctactcccgaaccaaagaagagcatgaagaacatcttcgccttgcactagagaagctacgagaacatcaactgtatgctaagtttagcaagtgtgaattttggttgtctgaagtgaagttccttggtcacgtcatctcagcaggaggagttgccgtcgatcctagtaatgtggaatccataaccaattggaaccaaccaaagacagtttcaaagattcgcagtttcttaggcctgcaggaatataatggaggtttatagagaatttttccaagattgctaagcccatgacacgattgcttcaaaaggatgtgaagtacaagtggtcagaaaatgtaagcagagttttcaagagttgaagaatcgcttaatatcagctcctattttgattttacctgatccaaagaagggtttccaagtgtattgtgatgcatcccaacttgggttaggttgtgttctgatgcaagatgggaaggtggttgcatatgcatctcgtcagttacgtccgcatgagaagaactaccctactcatgatcttgagttagctgcagtaattcatgcgttgaagatttggcgccattatcttttcggtacttgtatagaggtgtataccgatcacaagagtttaaagtatatttttactcagccggatctgaacatgagacaacggagatggttggaattaattaaggattatgacatgggaattcagtatcacccgggaaaggctaatgttgtagcagatgctcttagcaggaaaggctattgcaatgctacggaaggacgacagttgccattggaattatgcaaggaatttgaaagattaaatttgggaattgtcagaagaggtttcgttgcagccttagaagcaaagcccactctaattgatcaagttagagaagcccaaattaatgatcctgatattcaagaaatcaagaagaatatgagaagagggaaagctatcggtttcttggaggatgagcaaggaactgtatggttgggtgagagaatctgcgtccccgacaacaaagatttaaaagatgcaattctgaaagaagctcatgatactttatactccattcaccctggtagtaccaaaatgtaccaggatctcgaggaaagattttggtgggcaagtatgaagcgtgaaatcgcagaatacgtagcagtatgtgatgtttgtcagcgagtcaaggcagaacatcagaaacccgccggtttgctgcagcctttgaagattcctgaatggaaatgggaggaaatcggtatggatttcatcactggtctacccagaacgtcatcaggccatgactctatttgggtggtagtcgacagacttaccaaagtggctcatttcatcccagtaaagacaacctattccggaagttggttggcggaattgtatatggcaaggattgtgtgtttgcatggcgtccctaagaaaatagtgtctgatcgaggcagtcagtttacttcaaatttttggaagaagcttcaggaagagatgggttctaagctgaactttagtactgcttatcatccgtagacagacggacaaaccgaaagggtgaatcagattttggaagatatgttgagagcttgtgctttagacttcggtggaagttgggataggaatctaccttatgcagaattttcgtacaacaacagttatcaagctagtcttcagatggctccttacgaagcactgtatggtcggaagtgccgcactccgcttttgtgggatcaaacaggagaacgtcaggttttcgggacggacatcctaagggaagcagaagagaaggtgaaaatcattcaagaaaggttgcgtgtggcccagtctcgtcataagagttatgccgacaatcgtcgtagagatctaagttttgacgaaggagattatgtgtatcttcgtgtcacgcctcttcgaggagttcatcgttttcacaccaaaggaaaattggtaccgcattttgtgggaccttataagattgtcaatagaagaggagaggttgcttatcagttggagttacctcaatctttggcaggagttcataatgtgttccatgtgtcgcaattgaaaaagtgtttaagggtacctaccgaagaagctaatcttgaacagatagaagtccaagaggatctgacctatgttcagaaaccaatccgtatcttggaaatagaagagagaagaaccagaaatcgagttatccgtttttacaaagtccaatggagtaatcactcggaagaagaatcaacttgggaacgagaagatgaattgaagtcagctcatccgcatctgttcgccagttcttccgaatctcgaggacgagattctgtt

SEQ ID NO: 43822 - DNA, 1714 bp, Oryza sativa
  unsure (1)..(1714): unsure at all n locations
  Clone ID: PAT_MRT4530_46941C.1
ccacgagtgaaaccctgagagcgctttgaganggcaatgnngagagcttgtgctctagatttcagtggaagttgggataagaatctaccctatgcagattttttatacaacaacagggatcaagctagtctacagatggctccgtacgaagcactgcttggtcgaaagtgccccactgcggtcttgtgggatcaaacgggagaacgtcaggttttcggaacggatatcctaagggaagcagaagaaaaggttaagatcattcaagaaagattgcgagtggctcaatctcgacataagagttatgcccgacaatcgccgtagagatttgagttttgaagaaggagactatgtgtatcttcgtgtcacgccttttcgaggagttcattctttttcataccaaagaaaaaattggcaccgcgttttggtgggaccttataagattgtcagtaaaagaggagaggttgcttatcagttggagttacctcaatctttgcaggaatccataatgtgtccatgtgtcacaattgaaaaagtgtttaagggtacctaccaaagaagctaatattgagcagatagaagtccaagaggatttgacttatgttgagaaaccaatccgtatcctggaaacaagtgagagaagaaccaggaatcgagttatccgtttttgcaaagtcccgtggagtaatcactcggaagaagaatcaacttgggaacgagaagatgaattgaacgatggattcgagttcgaatcggatcggctttcctctctccaagccgcgagtttccttcgccgttgccgtcgccgtgggccttcgccgccgcctccgagcccctttaaaaggacccccggtgtctcctctacccgtcgcagctctcgccttcgcctctcgtcgccggaagagctctagcgccccgtgctccgccgtcgctccagctgtcgccgtcgctcgggaagaccgccgccgtcatcgccaagtcgccgccgtcctcgtccgccccttcgcagccgtcggaacccgccggagcttcgtcgccgtcgacaacccgaaggtagccgccgcttccttctcgtcgccgtcgccgtccgttgcttctccgccgtcgttttggtcgtcgcgccgccgttcgccggtgagcgtgcgccgcccgagccgtctgcctcgccgagccgccgccgccgtcggtgacgtcatcgctggcgtcatcaaggccgtccgccgtgaaccgccgtggacccgatcgatctcggccnnnnnnnnnnnnnnnnnnnnnnnnnnnnnnnnnnnnnnnnnnnnnnnnnnnnnnnnnnnnnnnnnnnnnnnnnnnnnnnnnnnnnnnnnnnnnnnnnnnnnnnnnnnnnnnnnnnnnnnnnnnnnnnnnnnnnnnnnnnnnnnnnnnnnnnnnnnnnnnnnnnnnnnnnnnnnnnnnnnnnnnnnnnnnnnnnnnnnnnnnnnnnnnnnnnnnnnnnnnnnnnnnnnnnnnnnnnnnnnnnnnnnnnnnnnnnnnnnnnnnnnnnnnnnnnnnnnnnnnnnnnnnnnnnnnnnnnnnnnnnnnnnnnnnnnnnnnnnnnnnnnnnnnnnnnnnnnnnnnnnnnnnnnnnnnnnnnnnnnnnnnnnnnnnnnnnnnnnnnnnnnnnnnnnnnnnnnnaagccttacgccgatctttcgtttatttccttcttttttgcacagttgccggtttcccgttaaattt

SEQ ID NO: 43823 - DNA, 1053 bp, Oryza sativa
  Clone ID: PAT_MRT4530_46942C.1
atggcgcataaagagcccgacgcgcccggtgtcagtggcatcagcagcggcagcacggtgaagctcaaagacctcgccccggcggccaccaacaacgtgaacacgacgttcatcgtgctcgacaaggcggccagggcgccgccgccgccgccgcacggccgcgccgacgcgagggaggagacgtgcctggcgctcgtggccgacgagacggcggcggcgcacttcctcctgtggggcgccgagcgcgacgcgttcgagccgggcgacatcgtgcggctgaccggcggcatcttctcctaccacaggagcaacagcctcgtgctgcgggccgggcggcgcggccgcgccgagaaggtgggcgagttcacgatgctgttcgtcgagacgcccaacatgagcgaggtgaagtgggtgcgcgaccccggcgaccccaggaggatggtgcaggaggccgtcgtcatggcgcataaagagcccgacgtgcctgttgtcagtggcatcaacagcggcagcacggtgaagctcaaagacctcgccccggcggccaccaacaacgtgaacacgacgttcatcgtgctcgacaaggcggccagggcgccgccgccgccgccgcacggccgcgccgacgcgagggaggagacgtgcctggcgctcgtggccgacgagacggcggcggcgcacttcctcctgtggggcgccgagcgcgacgcgttcgagccgggcgacatcgtgcggctgaccggcggcatcttctcctaccacaggagcaacagcctcgtgctgcgggccgggcggcgcggccgcgccgagaaggtgggcgagttcacgatgctgttcgtcgagacgcccaacatgagcgaggtgaagtgggtgcgcgaccccggcgaccccaggaggatggtgcaggaggccgtcgtctcgccgcactctcaggtcttcaagccgctgcagtgaatttcttctccgtaccccgtcgaaacatacgcattcgccgttgtggtgccctcgtatcgtattaccggacacctacgaggaaccatcttcgctgtgtga

SEQ ID NO: 43824 - DNA, 3601 bp, Oryza sativa
  Clone ID: PAT_MRT4530_46943C.1
agcgtgccccgccgaagccgtccgttccgccgagccgccgccgccgcggtgacgtcatcgctgacgtcatcggggtcgtccgccgtgagccggtcgtggacccgatcgatctcggccgtccatcttggatcgattccgtcgtttccggagagtccgttttcgccggagaagagtttgaagagttccaaggccagcaaggcaactcctggtttggaatggtatattcctggtttggagatagaactgtgcagccgggatggttgttcagaatggttgggcctatgcaacaggatgccgcgctacaagcctgagtacttgtttggtgttgagggttttgtccaggagttgcgtacaatgtcctttgtcattggatttgggactgcccctttttatgctcagattcctcatgatcgtcatgaagagaggtgccgagtcaaagtcaccttgaacagtaatagtgaagacattctatcagtgatgttcgaagctggaggaagaaactacatccatgcatgtcaggaagtggcaaggatcgccataggagagctccgcgatcgctacagtgatcaattggccgacactgagtatcgttaccatcctcgtcaaccacagggaagtgaccgtggcagttaccttgagactgaaggaattgagaatgatgctaccacaagacatttggttgagatgctatgggctatggatgaaagtcatgcagagactgtgttagcagcccaagatcgtgaagattggaatcgtggtaagatttgcaagctagaagacaaggtggatcgtttggagaaggaactagctgcgttgaagggagaagcaccgccgcagaaggccaggattcgtcttaccgcaaggaagagagctctatttgtccctcgttatcaattggcgccaaagatggtgaacactcgcagcaacgggaatggtcccaacctcaacaaccccaacaacaacaataacaatgaagggaacccaacccttgctcaagttcttgctcaacagactcagctaatgcacatgatgatgcaacaacttcagaatcagcagaaccaaggaaataaccatgcacctcctcagaataagttagcagaatttcttcgtgtgaggccgcctattttctctagtaccactaaccctgttgaagctggtgattggctgcatgccatagagaagaagttggatttgcttcagtgcactgatcaggagaaggtctcatttgcatcacaccagttgcttggccctgcctctgaatggtgggatcacttccgcctgaataggactactgctgaacctatcacttggcttgaattgaccgctgctttccggaagacgcatataccatcgggagtggtgtctctcaagaagaaggagttcaggtcgctcacccagggatctcgctctgttacggagtatctacacgagttcaatcgtctagctcgttatgctccagaagatgtgcgcaatgatgaagagcgtcaggagaagttcttggaaggacttaatgatgagctttcttacccactcatgactggagattattctaatttccagaaattagtggataaggctattcgtcaggaggacaagtataatcgcatggagcagaagaaacgccggattgctcaattcaagatacaacaggggaataatcagaagccgcgtcttacttttgtaccccagtccatgccacatggaggttcttcatctgttgttcgtccgcagcgtcagttcttcaacaacaatgctggcaacaacatccgtaatcaagctccacgtcctgttgcagctccaacacaacaaccgcctgccaagagggagcaaggcagcaagcccgtggtgtgtttcaactatggagacccaggacattatgctgacaagtgtccaaagccccgacgcgtgaaggttgtccctgcctagagcaactctactataccagcatcaaaggcccgtgtcaatcatgttgcagctgcagaagctcaagacgctccagatgtgattttgggtacgttccctgttaactcagttcatgcaacagtgcttttcgattctggtgctacacattcatttctatctatgagttttgcgggaaatcatgggatggaagtagaagatcttagacgtcctttgatggttagtaccccaagtaatcaagcactctctttgcaacgtagcccctctgtcagaatagaaattaagggagtaccatttctggccaatcttatcttgttagaatccaaagaccttgatgtcatcctagggatggactggttaaccagacataaaggtgttatagactgtgctaacagaaaagtaactctcaccagtagtgatggtcgagttgtaactgttcatgcattatcttctgagtctttaaggtcaagactgaaccagataactttggaagagattcctatagtccgggagtatcccgatgtgttcccagatgatttacctggtatgccgcccaaaagggatatagagttcagaatagatttggtacctggaacaactccgattcataagaggccttatagaatggcagccaatgagttggcagaagtcaagaggcaagtggatgatttgcttcagaagggatacatcagaccgagttcatctccatggggagctccggttatttttgtggaaaagaaagatcatacccagaggatgtgtgtggactatcgtgcattaaatgatgtgactatcaagaataagtatccactacccagaattgatgatttgtttgatcagcttaaaggtgccactgttttctctaagatcgatcttcgatcagggtatcaccagttgagaatcaaagaggaagatatacctaagacagcttttaccactaggtatggattgttcgaatgtactgttatgtcttttggacttaccaatgcccctgctttcttcatgaacttgatgaataaggtgtttatggaatacctagataagtttgtggtggtctttattgatgacattcttatctactctcgaacaagagaagagcatgaagaacatcttcgccttgcactagagaagctacgagaacatcaactgtatgctaagtttagcaagtgtgaattttggttgtctgaagtgaagttccttggtcacgtcatctcagcaggaggagttgccgttgatcccagtaatgtggaatccgtaaccaactgcaaacaactaaagacagtttcagagattcgcagtttcttaggcctcgcaggatattaccggaggtttatagagaatttttccaagattactaagcccatgacacgactgctacagaaagatgtgaagtataagtggtcggaagaatgtgagcagagttttcaagagttgaagaatcgcttaatatcagctcctatcttgattttacctgatccaaaaaagggtttccaggtgtattgtgatgcatccaaacttgggttaggttgtgttctgatgcaagatgggaaggtggttacctatgcatctcgtcagttacgtccgcatgagaagaactaccctactcatgatattgagttagctgcagtagttcatgcgttgaaaatttggcgtcattattatttagacactcggtctgtcc

SEQ ID NO: 43825 - DNA, 316 bp, Oryza sativa
  Clone ID: PAT_MRT4530_46944C.1
gtcgtttatacattcgtagtaagtaaatcaccatgctcgaggactgtactggtggatcagaaagcccttcttttgctattggcatgaccgatgcaatgatcactgagacaaaataagttgcaggacaaggatggcgacggaaactcaacgagaccgcacgaagggtatggaacaggaagtgacatacctgcccaatggattttcgttgagacttaatattaccgttctgtatcagaggttctgaatcaaattggactgacggttgctgaaagatattgtcaactcgataatgatggcctgtcggcttttgagaaca

SEQ ID NO: 43826 - DNA, 4587 bp, Oryza sativa
  Clone ID: PAT_MRT4530_46945C.1
atggatgaagtcgggcgtcgatggacattctccagggcaaatgaaggctacacgagctgcggcccgggaagtgatcgtggcagttaccttgagactgaaggaattgagaatgatgctaccacaagatatttggttgagatgctgtgggctatggatgaaagtcgtgcagagagtgtgctagcagctcaagatcgggaagatcggaatcgtggtaagatttgcaagctcgaagataaggtggatcgtttggagaaggaactagccgcattgaagggagaagcaccaccgcagaaggccaggattcgtctcaccgcaaggaagagagctctatttgtccctcgctatcaattggcgccaaagatggtgaatactcgcagcaacgggaatggtcccaacaaccccaataacaataacaatggagagaatcccactcttgctcaagttcttgctcaacagacacagctaatgaacatgatgatgcaacaatttcagaatcagcagaaccaaggaaataaccatgcacctcctcagaataagttagcagaatttcttcgtgtaaggccgcctgttttctctagtaccactaatcctgttgaagctggtgactggctgcatgccatagagaagaagttggatttgcttcagtgcactgatcaggagaaggtctcatttgcatcataccagttacatggccctgcctctgaatggtgggatcacttccgcctgaataggactactgctgaacctatcacttggcttgaattcactgctgctttccgaaagacgcatataccatcgggagtggtgtctctcaagaagaaggagttcaggtcgcttactcagggatctcgctctgttacggagtatctgcacgagttcaatcgtcttgctcgttatgctccggaagatgtgcgcactgatgaagaacgtcaagagaagttcttggaaggacttaatgatgagctttcttacccactcatgactggagattattctgatttccagaaattggtggataaggctattcgtcaggaggacaagtataatcgcatggagcagaagaaacgccggattgctcacttcaaggcacaacaggggagtaatcagaagccgcgtcttgctttaggaccccagcctatgccacagggaggttcttcgtctgttgttcgtccgcagcgtcagttcttcaacaacaatgctggcaataacatccgcaatcaagctccacgccctgttgcagctccagcacagcaacaacctgccaagagggagcaaggtagcaagcccgtggtgtgtttcaactgtggagacccaggacattatgctgacaagtgtccgaagcctcgacgcgtgaaggttgtccctgctcagagcaactctactgtaccagcatcaaaggcccgtgtcaatcatgttgctgctgcagaagctcaagatgctccagatatgattttgggtacgttccctgttaactcagttcctgcaacagtacttttcgattctggtgctacacattcattcttatctatgagttttgcgggaaatcatgggatggaagtagaagatcttagacgtcctttgatggttagtaccccaggtaatcaagcactttctttgcaacgtagcccctcggtcagaatagaaattaaaggagtaccatttctggccaatcttatcttgttagaatccaaagaccttgatgtcattctagggatggactggttagccagacataaaggtgtgatagactgtgccaacagaaaagtaactctcaccagcaatgatggtcgagttgtaactgttaatgcattgtcttctgagtctttaaggtcaagactgaaccagataactttggaagagattcctatagttcgggagtattccgatgtgttcccagatgatttacctggaatgccgcccaaaagggatatagagttcagaatagatttggtacctggaacaactccgatccataagagaccttatagaatggcagccaatgagttggctgaagtcaagaggcaagtagatgatttgctacagaaaggatacatcagaccgagttcgtcactatggggagctccagttattttttgggaaaagaaagaccatacccagagaatgtgtgtggattatcgtgcattaaatgatgtgactatcaagaataagtacccgctacccagaattgatgatttgtttgatcagcttaaaggtgccactgttttctccaagatagatcttcgatcagggtatcaccagttaagaatcaaagaggaagatatacctaagacagcttttaccactaggtatgggttgttcgaatgtactgttatgtcttttggacttaccaatgcccctgctttcttcatgaacttgatgaataaggtgtttatggaatacctagacaagtttgtggtggtctttattgatgatattcttatctactctcgaaccaaagaagagcatgaagaacatcttcgccttgcattggagaagctacgagagcatcaattgtatgccaagtttagcaagtgtgaattttggttgtctgaagtgaaattccttggtcacgtcatctcagccggaggagttgccgttgatcctagtaatgtggaatccgtaaccaattggaagcaaccgaagacagtttcagagatccgcagtttcctaggcctcgcaggatattaccggaggtttatagagaatttttctaagattgctaagcccatgacacgactgcttcagaaagatgtgaagtacaagtggtcggaagaatgtgaacagagttttcaagagttgaaaagtcgcttaatatcagctcctattttgattttgcctgatccaaagaagggtttccaagtgtattgcgatgcatccaaacttgggttaggttgtgttctgatgcaagatgggaaggtggttgcctatgcatctcgtcagttacgtccgcatgagaagaactaccctactcatgatcttgagttagctgcagtagttcatgcgttgaaaatttggcgtcattatcttttcggtactcgtacagaggtgtacaccgatcacaagagtttaaagtatatctttactcagccggatctgaacatgagacaacggagatggttggaattaagtaaggattatgacatgggaattcattatcacccaggaaaggctaatgttgtagccgacgctcttagcaggaaaggctattgcaatgctacagaaggacgacagttgccattggaattatgcaaggaatttgaaagattaaatttgggaattgtcagtagaggttttgttgcagccttagaagcgaagcccactctaattgatcaagttagagaagcccaaattaatgatcctgatattcaagaaatcaagaagaatatgagaagaggaaaagctatcggtttcttggaggatgagcacggaactcgagtcaaggcagaacatcagaaacctgccggtttgttgcagcctttgaagattcctgaatggaaatgggaagaaattggtatggattttatcactggtttgcccagaacgtcatcaggccatgactctatttgggtaatagtcgacagacttaccaaagtggctcattttattccggtaaaaacaacctattccggaagtcgcttagcaaaattgtatatggcaaggattgtgtgtttgcatggcgtccctaagaaaatagtgtctgatcgaggcagtcagtttacttcaaatttttggaagaaacttcaggaagagatgggttctaagttgaactttagcactgcttatcatccgcagacagacggacagaccgaaagagtgaatcagattttggaagacatgttgagagcttgtgctttagacttcggtggaagttgggataagaatctaccctatgcagaattctcgtacaacaacagttatcaagctagtctgcagatggctccttacgaagcactgtatggtcggaagtgccgcactccgcttttgtgggatcaaacgggagaacgtcaggttttcgggacggatatcctaagggaagcagaagaaaaggtgaaaatcattcaagaaagattgcgagtggctcagtctcgacataagagttatgccgacaatcgccgcagagatttgagttttgaagaaggagattatgtgtatcttcgtgtcacgcctcttcgaggtgttcatcgttttcacaccaaaggaaaattggcaccgcgttttgtgggaccttataagattgtcagtagaagaggagaggttgcttatcagttggagttacctcaatccttggcaggagtccataatgtgttccatgtgtcgcaattgaaaaagtgtttaagggtacctaccgaagaagctaatcttgaacagatagaagtccaagaggatctgacctatgttgagaaaccaatccgtatcttggaaacaaatgagagaaaaaccaggaatcgagttatccgtttttgtaaagtccagtggagtaatcactcggaagaagaatcaacttgggaacgagaagatgaattgaagtcagctcatccgcatctgttcgccagttcttccgaatctcgaggacgagattctgtttaa

SEQ ID NO: 43827 - DNA, 444 bp, Oryza sativa
  Clone ID: PAT_MRT4530_46946C.1
atggcgctccgcgacccccactctcgcctctcgccatgtccaaggccggctaacggggaccctggtggcaccgcgtccttcagcgtgaggccgttctgcctcagcttgagctccggcttgccgcaagcgccgtcgagggaccatctccgcacgggccacggggtcacctccgcgtcggcaagcctcctcgtccacgcgcggcttcgtcgcctccgcggccacgcgcgaatccgccaacgccgcagggcttcggccgtcgtggttgtccgcctcggcgttgagccacggcaccgtcgcctccgcggccacgcgcaactcctctgctgtcgacgttgcgacctcgcgcggctcgccgccgccgccgccacgtgcaactccgccggccgcgcgcggctacgtcgcctccccgcccaggcgcgacacgccaaacccctccacgcgtga

SEQ ID NO: 43828 - DNA, 5205 bp, Oryza sativa
  Clone ID: PAT_MRT4530_46947C.1
cccttctctctctcctcggcccagattccgtcgtttccggagagtccgttttcgccggagaagagtttgaagagttccaaggccagcaaggcaactcctggtttggaatggtacattcctggtttggagatagaactgtgcagccgggatggttgtttagaatggttgggcctatacaacaggatgccgcgctacaagcctgagtacctgtttggtgttgagggttttgtccaggagttgcgtacgatgtcctttgtcattggatttgggactgcccctttttatgcccagattcctcatgatcgtcatgaagagaagtgccgagtcaaagtcaccttgaacagtaatagtgaagatatcccctcagtgatgttcgaagctgtaggaagaaactacatccatgcatgtcaggaggtggcaaggatcgccataggagagctacagtgatcagttggccgacacggagtatcgctaccatcctcgtcaaccacagggaagtgaccgtggcgttaccttgagactgaaggaattgagaatgatgctaccacaaggcatttggtcgagatgctgtgggctatggatgaaagtcgtgcggagactgtgttagcagctcaagatcgtgaagaccggaatcgtggtaagatttgcaagctagaagacaaggtggattgtttggagaaggaactagccgcattaaagggagaagcaccgccgcagaaggccaggattcgtctcaccgcaaggaagagagctctatttgtccctcgctatcaattggcgccaaagatggtgaacactcgcagcaacgggaatggccccaacaaccccaataacaacaacaatggagagaatcccactcttgctcaagttcttgctcaacagactcagttaatgaacatgatgatgcagcaacttcagaatcagcagaaccagggaaataaccatgcacctccccagaacaagttagcagaatttcttcgtgtgaggccgcctattttctctagtaccactaatcttgttgaagctggtgattggttgcatgccatagagaagaagttggatttgcttcagtgcactgatcaggagaaggtctcatttgcatcacatcagttgcatggccctgcctctgaatggtgggatcacttccgtctgaacaggactactgctgaacctatcacttggcttgaattcactgctgctttccggaagacgcatataccatcgggagtggtgtctctcaagaagaaggaattcaggtcgctcactcagggatctcgctctgttacggagtatttgcacgagttcaatcgtctggctcgttatgctccggaagatgtgcgcaatgatgaagagcgccaggagaagttcttggaaggacttaatgatgagctttcttacccactcatgactggagattattctgatttccagaagttagtggataaggctattcgtcaggaagacaagtacaaccgcatggagcagaagaaacgccggattgctcaattcaagacacaacaggggaataatcagaagccgcgtcttactttaggaccccagtccgtgccacagggaggttcttcgtctgttgttcgtccgcagcgtcagttcttcaacaacaatgctggcaacaacatccgcaatcaagctccacgtcctgttgcagctccaacacagcaacaacctgccaagagggagcaaggcagcaagcccgtggtgtgtttcaactgtggagacccaggacattatgctgacaagtgtccgaagccccgacgcgtgaaggttgtccctgctcagagcaactctactgtaccagcatcaaaggcccgtgttaatcatgttgctgctgcagaagctcaagatgctccagatgtgattttgggtacgtttcttgttaactccgttcctgcaacagtgcttttcgattctggtgctacacattcattcttatctatgagttttgtgggaaatcatgggatggaagtagaagatcttagacgtcctttgatggttagtaccccaagtaatcaagcactctctttgcaacgtagcccctcggtcagaatagaaattcaaggaataccatttctggccaatcttatcttgttagaatccaaagaccttgatgtcatcctagggatggactggttagccagacataaaggtgtgatagactgtgctaacagaaaagtaactctcaccagcaatgatggtcaagttgtaactgttcatgcattgtcttctgagtttttaaggtcaagactgaaccaaataactttggaagagattcctatagtccgggagtatcccgatgtgttcccagatgatttacctggtatgccacctaaaagggatatagagttcagaatagatttggtaccaggaacaactctgatccataagagaccttatagaatggcagccaatgagttggcagaagtcaagaggcaagtagatgatttgcttcagaaaggatacatcagaccaagttcatcaccatggggagctccggttatttttgtggaaaagaaagaccatacccagagaatgtgtgtggactatcgtgcactaaatgatgtgactatcaagaataagtatccactacccagaattgatgatttgtttgatcagcttaaaggtgctactattttctccaagatagatcttcgatcagggtatcaccagttaagaatcaaagaggaagatatacctaagacagcttttaccactaggtatggattgttcgaatgtactgttatgtcttttggacttaccaatgcccccgctttcttcatgaacttgatgaataaggtgtttatggaatacctagacaagttcgtggtggtctttattgatgacattcttatctactcccgaaccaaagaagagcatgaagaacatcttcgccttgcactagagaagctacgagaacatcaactgtatgctaagtttagcaagtgtgaattttggttgtctgaagtgaagttccttggtcacgtcatctcagccgggggagttgccgttgatcccagtaatgtggaatccataaccaactggaaacaaccgaagacagtttcagagatccgcagtttcctaggcctcgcagggtattatcggaggtttatagagaatttttccaagattgctaagcccatgacacgactgcttcagaaagatgtaaagtacaagtggtcagaagaatgtgagcagagttttcaagagttgaagaatcgcttgatatcagctcctattttgattttgcctgatccaaagaagggtttccaagtgtattgcgatgcatccaaacttgggttaggttgtgttctgatgcaagatgggaaggtggttgcctatgcatctcgtcagttacgtccgcatgagaagaactaccctactcatgatcttgagttagctgcagtagttcatgcattgaaaatttggcgtcattatcttttcggtactcgtacagaggtatataccgatcacaagagtttaaagtatatctttactcagccggatctgaacatgagacaaaggagatggttggaattaattaaggactatgacatgagaattcattatcacccgggaaaggctaatgttgtagcagatgctcttagcagaaaaggcaattgcaatgctacggaaggacgacagttgccattggaattatgcaaggaatttgaaagattaaatttgggaattgtcagtagaggtttcgttacagccttagaagcgaagcccactctaattgatcaagttagaaaagcccaaattaatgatcctgatattcaagagatcaagaagaatatgagaagaggaaaagctatcggtttcttggaggatgagcacggaactgtatggttgggtgagaaaatctgtgtccccgacaacaaagatttaaaagatgcaattctgaaagaagctcatgatactttatactccattcaccctggtagtactaagatgtaccaggatctcaaggaaagattttggtgggcaagtatgaagcgtgaaatcgcagaatacgtagcagtatgtgatgtttgtcagcgagtcaaggcagaacatcagaaacctgccggtttgctgcagcctttgaagattcctgaatggaagtgggaagaaatcggtatggattttatcactggtttacccagaacgtcatcgggtcatgactctatttgggtgatagtcgacagacttaccaaagtggctcatttcattccggtaaagacaacttattccggaagtcgcttagcggaattgtatatggcaaggattgtgtgtttgcatggcgtccctaagaaaatagtgtctgatcgaggcagtcagtttacttcaaatttttggaagaaacttcaggaagagatgggttctaaattgaactttagtactgcttatcatccgcagacagacggacagaccgaaagggtgaatcagattttgaaagacatgttgagagcttgtgctttagacttcggtggaagttgggataagaatctaccttatgcagaattctcgtataacaacagttatcaagctagtctacagatggctccttacgaagcactgtatggtcgaaagtgccgcactccgcttttgtgggatcaaacgggagaatgtcaggttttcgggacggatatcctaagggaagcagaagaaaaggtgaaaatcatccaagaaagattgcgtgtggctcagtctcgacataagagttatgccgacaatcgccgcagagatttgagttttgaagaaggagattatgtgtatcttcgtgtcacgcctcttcgaggagttcatcgtttccacaccaaaggaaaattggcaccgcgttttgtgggaccttataagattgtcagtagaagaggagaggttgcttatcagttggagttacctcaatctttggcaggagtccataatgtgttccatgtttcgcaattgaaaaagtgtttaagggtacctaccgaagaagctaatcttgaacagatagaggtccaagaggatctgacctatgttgagaaaccaatccgtatcttggaaatagatgagagaagaaccagaaatcgagttatccgtttttgcaaagtccaatggagcaatcactcggaagaagaatcaacttgggaacgagaagatgaattgaagtcagctcatccgcatctgttcgccagttcttccgaatctcgaggatgagattctgtt

SEQ ID NO: 43829 - DNA, 5128 bp, Oryza sativa
  Clone ID: PAT_MRT4530_46948C.1
ctcctggtttggaatggtatattcctggtttggagatagaactgtgcagccgggatggttgttcagaatggttgggcctatgcaacaggatgccgcgctacaagcctgagtacttgtttggtgttgagggttttgtccaggagttgcgtacgatgtcctttgtcattggatttgggactgcccctttttatgcccagattcctcatgatcgtcatgaagagaagtgccgagtcaaagtcaccttgaacagtaatagtgaagatatcccctcagtgatgtttgaagctggaggaagaaactacatccatgcatgtcaggaggtggcaaggatcgccataggagagctccgtgatcgctacagtgatcagttggccgacactgagtatcgctaccatcctcgccaaccccagggaagtgaccgtggcagttaccttgagactgaaggaattgagaatgatgctaccacaaggcatttggttgagatgctgtgggctatggatgaaagccgcgcggagactgtgttagcagctcaagatcgtgaagattggaatcgtggtaagatttgcaagttagaagacaaggtggatcgtttggagaaggaactagccgcattgaagggagaagcaccacctcaaaaggccaggattcgtcttaccgcaaggaagagagctctatttgtccctcgctatcaattggcgccaaagatggtgaacactcgcagcaacgggaatggccccaacaacaacaacaacaataacaacaacaatgaagggaacccaacccttgctcaagttcttgctcaacagactcagttaatgaacatgatgatgcagcaacttcagaatcagcaaaaccagggaaataaccatgcacctccccagaacaagttagcagaatttcttcgtgtgaggccgcctattttctctagtaccactaatcctgttgaagctggtgattggttgcatgccatagagaagaagttggatttgcttcagtgcactgatcaggagaaggtctcatttgcatcacaccagttgcatggccctgcctctgaatggtgggatcacttccgcctgaataggactactgctgaacctatcacttggcttgaattcaccgctgctttccggaagacgcatataccatcgggagtggtgtctctcaagaagaaggagttcaggtcgctcacccagggatctcgctctgttacggagtatttgcacgagttcaatcgtctggctcgttatgctccggaagatgttcgcaatgatgaagagcgccaggagaagttcttggaaggacttaatgatgagctttcttacccactcatgactggagattattctgatttccagaagttggtggataaggctattcgtcaggaggacaaatacaatcgcatggagcagaagaaacgccggattgctcaattcaagacacaacaggggaataatcagaagccgcgtcttactttaggaccccagtctgtgccacaggggggttcttcgtctgttgttcgtccgcagcgtcagttcttcaacaacaatgctggcaacaacatccgcaatcaagctccacgtcctgttgcagctccaacacagcaacagcctgccaagagggagcaaggcaacaagcccgtggtgtgtttcaactgtggagacccaggacattatgctgacaagtgtccgaagccccgacgtgtgaaggttgtccctgtccagagcagctctaccgcactagcattaaaggcccgtgtcaatcatgttgctgctgcagaagctcaagatgctccagatgtgattttgggtacgtttcctgttaacttagttcctgcaacagtgcttttcgattctggtgctacacattcattcttatctatgagttttgcgggaaatcatgggatggaagtagaagatcttagacgtcctttgatggttagtaccccaagtaatcaagcactctccttgcaacgtagcccctctgtcagaatagaaattcaaggagtaccatttctggccaatcttatactgttagaatccaaagaccttgatgtcatcctagggatggactggttagccagacataaaggtgtgatagactgtgccaacagaaaagtaactctcaccagcaatgatggtcgagttgtaactgttcatgtattgtcttctgagtctttaaggtcaagactgaaccaaataactttggaagagattcctatagtccgggagtatcccgatgtgttcccagatgatttacctggtatgccgccgaaaagggatatagagttcagaatagatttggtacctggaacaactccgatccataagagaccttatagaatggcagccaatgagttggcagaagttaagaggcaagtagacgatttgcttcagaaaggatacatcagaccgagttcatctccatggggagctccagttatttttgtggaaaagaaagaccatacccagaggatgtgtgtggactatcgtgccctaaatgatgtgactatcaagaataagtacccgctacccagaattgatgatttgtttgatcagcttaaaggtgccaccgttttctccaagatcgatcttcgatcagggtatcaccagttgagaatcaaagaggaagatatacctaagacagcttttaccactaggtatggattgttcgaatgtactgttatgtcttttggacttaccaatgcccctgctttcttcatgaacttgatgaataaggtgtttatggaatacctagacaagttcgtggtggtatttattgatgacattcttatctactctcgaaccaaagaagagcatgaagaacatcttcgccttgcattggagaagctacgagaacatcaactgtatgctaagtttagcaagtgtgaattttggttgtctgaagtgaagttccttggtcacgtcatctcagcaggaggagttgccgttgacctagtaatgtggaatccgtaaccaactggaaacaaccgaagacagtttcagagatccgcagtttcttaggcctcgcaggttattatcggaggtttatagagaatttttccaagattgctaagcccatgacacgactgcttcagaaagatgtgaagtacaagtggtcggaataatgtgagcagagttttcaagagttgaagaatcgcttgatatcagctcctatcttgattttacctgatccaaagaagggttttcaagagtattgcgatgcatccaaacttgggttaggttgtgttctgatgcaagatgggaaggtggttgcctatgcatctcgtcagttacgtccgcatgagaagaactaccctactcatgatcttgagttagctgcagtagttcatgcgttgaagatttggcgtcattatcttttcggtactcgtacagaggtgtataccgatcacaagagtttaaagtatatctttactcagccggatctgaacatgagacagaggagatggttggaattaattaaggattatgacatgggaattcattatcacccgggaaaggctaatgttgtagcagatgctcttagcaggaaaggctattgcaatgctacggaaggacgacagttgccattggaattatgcaaggaatttgaaagattaaatttgggaattgtcagtagaggtttcgttgcagccttagaagcgaagcccactctaattgatcaagttagagaagcccaaattaatgatcctgatattcaagagatcaagaagaatatgagaagaggaaaagctatcggtttcatggaggatgagcaaggaactgtatggttgggcgagagaatctgtgtccccgacaacaaagatttaaaagatgcaattctgaaagaagctcatgatactttatattccattcaccctggtagtactaagatgtaccaggatctcaaggaaagattttggtgggcaagtatgaagcgtgaaatcgcagaatacgtagcagtatgtgatgtctgtcagcgagtcaaggcagaacatcaaaaacctgccggtttgttgcagcctttgaagattcctgaatggaaatgggaagaaatcggtatggattttatcactggtctacccagaacgtcatcaggccatgactctatttgggtgatagtcgacagacttaccaaagtggctcatttcatcccagtgaagacaacatattccggaagtcggttggcggaattgtatatggcaaggattgtgtgtttgcatggcgttcctaagaagatagtgtctgatcgaggcagtcagtttacttcaaatttttggaagaagcttcaggaagagatgggttctaagctgaactttagtactgcttatcatccgcaaacagatggacaaactgaaagggtgaatcagattttggaagacatgttgagagcttgtgctttagatttcggtggaagttgggataagaatctaccttatgcagaatttccgtataacaacagttatcaagctagtcttcagatggctccttacgaagcactgtatggtcggaagtgccgcactccgcttttgtgggatcaaacgggagaacgtcaggttttcgggacggatatcctaagggaagcagaagaaaaggtgaaaatcattcaagaaagattgcgagtggcccagtctcgacataagagttatgccgacaatcgccgcagagatttgagttttgaagaaggagattatgtgtatcttcgtgtcacgcctcttcgaggagttcatcgtttccacaccaaaggaaaattggcaccgcgttttgtgggaccttataagattgtcagtagaagaggagaggttgcttatcagttagagttacctcaatctttggcaggagtccataatgtgttccatgtgtcgcaattgaaaaagtgtttaagggtacctaccgaagaagctaatcttgaacagatagaagtccaagaggatctgacctatgttgagaaaccaatccgtattttggaaatagatgagagaaggaccaggaatcgagttatccgcttttgcaaagtccagtggagtaatcactcggaagaagaatcaacttgggaacgagaagatgaattgaagtcagctcatccgcatctgttcgccagttcttctgaatctcgaggacgagattctgtt

SEQ ID NO: 43830 - DNA, 567 bp, Oryza sativa
  Clone ID: PAT_MRT4530_46949C.1
tttttgtttttttgaagttaaccaccatttttcgcactaacataaattagccaaaataattatttctgacaaggatagatatctcaacaatcagatcatagtccagctagttctatccagaaattgaattttacagtaatgttacaacccttcatcttagtgaagtatttgggcttaaagattgcatcctccttgcagttctatggaagagcagccgatgtcaccaccaagtataagaaagctctgagaacctagatgtgtccagcaaatttacatactcctagctaggaaagtagcaaggcctcagaaagatagcagtgctaccagaacacatactaggctcctgctaatctacacaatacaaatcactaagctagacataagccaagaagaagctaggaaatgattctaaaccccaggaggcaaaacttacaagcaagagcacttcaaaaactataaaataaaatactgcgggcatgatcagaaatctgcggagcttgttctcctgagttgatacttgggttctggtacaggcacagcgcaaattaattcatccaactccttttg

SEQ ID NO: 43831 - DNA, 469 bp, Oryza sativa
  Clone ID: PAT_MRT4530_4694C.1
ctaatccatgacccatgggacagcgatgccgatgtacaacgccctggcgagggacgccgcgttgcgccactctgcctcgatcgtgccgaccattcccgccaccatgagcaacccaaacaccacacccctgctcgtgccgtcgaaggagtcggcgacgaaggtgtatattgtcgggatttgcagtgccagcccgagtccgttcaacgccgccgtcaccgccatctgcatcgcaccatgtacgcaaaagcatgtcaaccatggaggagcatggaaagtcccggtttttaatacaatcgggactattgtaaaatctggtcgaccgaccaaagatggtttctccaccagtgtgttcatgctcatgaccggcatgcttgactccgccatcccaacgatgagcagcggaaagaagtggacggaggtgatcaaccagttcctcaacgcgctcttcaccatcatgtgcctgtactag

SEQ ID NO: 43832 - DNA, 3854 bp, Oryza sativa
  Clone ID: PAT_MRT4530_46950C.1
ctcctggtttggaatggtatattcctggtttggagatagaactgtgcagccgggatggttgttcagaacggttgggcctatgcaacaggatgccgcgctacaagcctgagtacttgtttggtgttgagggatttgtccaagagttgtgtacgatgtcctttgccataggatttgggactgcccctttttatgcccagattcctcatgatcgtcatgaagagaagtgccgagtcaaagtcactttgaacagtaatagtgatgaaatcccctcagtgatgttcgaagctggaggaagaaactacatccatgcgtgtcaggaggtggcaaggatcgccataggagagctccgcgatcgctattgtgatcagttggccgacactgagtatcgctaccatcctcgccaaccacagggaagtgatcgtggcagctaccttgagactgaaggaattgagaatgatgctaccacaaggcatttggttgagatgctgtgggctatggatgaaacccgtgcggagactgtgttagcagctcaagatcgtgaagaccggaatcgtggtaagatttgcaagctagaggacaaagtggatcgtttggagaaggaactagccgcattgaagggagaagcaccaccgcagaaggccagggttcgtcttaccgcaaggaagagagctctatttgtccctcgttaccaattggcgccaaagatggtgctcactcgtagcaacgggaatggccccaacaacaacaacaataacaacaacaacaatggagagaatcccacacttgcccaagtcctggctcaacagacacagcttatgaacataatgatgcagcaactccagaaccagcagaaccagggaaataaccatgcacctccccagaacaagttagcagaatttcttcgtgtgaggccgcccactttctctagcaccactaatcctgttgaagctggtgactggctgcacgccatagaaaagaagttggatttgcttcagtgcactgatcaggagaaggtctcatttgcatcacaccagctgcatggccctgcctctgaatggtgggatcatttccgccttaacaggactactactgaacctatcacttggcttgagttcaccgctgctttccggaagacgcatataccatcgggagtggtgtctctcaagaagaaggaattcaggtcgctcactcaagggtctcgctctgttacggagtatctgcacgagttcaatcgtctggctcgttatgctccggaagatgtgcgcactgatgaagagcgccaggagaagttcttggaaggacttaatgatgagctttcttacccactcatgactggggattatcctgatttccagaagttagtggataaggctattcgtcaggaggacaagtacaaccgcatggaacagaagaaacgtcagattgctcaattcatggcacaacaggggaatagtcagaggccgcgtcttactttaggaccccagtccatgcctcagggaggttcttcgtctgttgttcgtccgcagcgtcagttcttcaacaacaatgctggcaacaacctccgtaatcaagctccacgccctgttgcagctccaacacagcaacagcctgccaagagggagcaaggcagcaagcccgtggtgtgtttcaactgtggagacccaggacattacgctgacaagtgtccgaagccccgacgcgtgaaggttgtccctgcccagagcaactctaccgcaccagcatcaaaggcccgtgtcaaccatgttgctgctgcagaagctcaagatgctccagatgtgattttgggtacgttccttgttaacctagttcctgcaacagtgcttttcgattctggtgctacacattcattcttatctatgagttttgcgggaaatcatgggatggaagtagaagatcttagacgtcctttgatggttagtaccccaagtaatcaagcactctctttgcaacgtagcccctctgtcagaatagaaattcagggagtaccatttctggccaatcttatcctgttagaatccaaagaccttgatgtcatcctagggatggactggttagccagatataagggtgtgatagactgtgctaacagaaaagtaactctcaccagcaatgatggtcgagttgtaactgttcatgcattgtcttctgagtctttaaggtcaagactgaaccaaataactttggaagaaattcttgtagtccgggagtatcctgatgtgttcccagacgatttacgtggtatgccgcctaaaagggatatagagttcagaatagatttggtaccaggaacaattccgatccataagagaccttatagaatggcagccaatgaattggcaaaagtcaagaggcaagtagacgaaagaacgacagttgccattggagttattagaggttttgttgcggctttagaagcgaagctcactctaattgatcaagttagagaagcccaaattaatgatcctgatattctagaaatcaaaaagaatatgagaagaggaaaagctatcggtttcttggaggatgagcaaggaactgtatggttgggcgagagaatctgtgtccccgataacaaagatttaaaagatgcaattctgaaagaagctcatgatactttatattccattcaccctggtagtaccaaaatgtaccaggatctcaaggaaagattttggtggcgagtcaaggaagaacatcagaaacctgccggtttgttgcagtctttgaagattcctgaatggaaatgggaggaaatcggtatggatttcatcactggtctacccagaacgtcatcaggccatgactctatttgggtgatagtcgatagacttaccaacgtggctcatttcatcccagtaaagacaacatattccggaagtcggttggcggaattgtatatggcaaggattgtgtgtttgcatggcgtccctaagaaaatagtgtctgatcgaggcagtcagtttacttcaaatttttggaagaaacttcaggaagagatgggttctaagctgaactttagtactgcttatcatccgcagacagacggacaaaccgaaagggtgaatcagattttggaagacatgttgagagcttgtactttagacttcggtggaagttgggataagaatttaccttatgcggaattctcgtataacaacagttatcaagctagtcttcagatggctccttacgaagcactgtatattcggaagtgccgcactccgcttttgtgggatcaaacgggagaacgtcaggttttcgggacggatatcctgagggaagtagaagaaaaggtgaaaatcattcaagaaagattgcgagtggcccagtctcgtcataagagttatgccgacaatcgccgcagagatttgagttttgaagaaggagattatgtgtaccttcgtgtcacgcctcttcgaggtgttcatcgttttcacaccaaaggaaaattggcaccgcgttttgtgggaccttataagattgtcagtagaagaggagaggttgcttatcagttggagttacctcaatctttggcaggagtccataatgtgttccatgtgtcgcaattgaaaaagtgtttaagggtacctatcgaagaagctaatcttgaacagatagaagtccaagaggatctgacctatgttgagagaccaatccgtattttggaaatagatgagagaagaactagaaatcgagttattcgtttttgtaaagtccaatggagtaatcattcggaagaagaatcaacttgggaacgagaagatgaattgaagtcagctcatccgcatctgttcgccagttcttccgaatctcgaggacgagattctgtttaa

SEQ ID NO: 43833 - DNA, 6953 bp, Oryza sativa
  Clone ID: PAT_MRT4530_46951C.1
acaagttcgtggtggtctttattgatgatattcttatctactctcgaaccaaagaagagcatgaggaacatcttcgccttgcattggagaagctacgagaacatcaactgtatgctaagtttagcaagtgtgaattttggttgtctgaagtgaaattccttggtcacgtcatctcagccggaggagttgccgtcgatcctagtaacgtggaatccgtaaccaattggaagcaaccaaagacagtttcagagattcgcagtttcctaggcctcgcaggatattatcggaggtttatagagaatttttccaagattgctaagcccatgacacgactgcttcagaaagatgtgaagtacaagtggtcggaagaatgtgaacagagttttcaagaattgaaaagtcgcttaatatcagctcctattttgattttgcctgatccaaagaagggttttcaagtgtattgtgatgcatccaaacttgggttaggttgtgttctgatgcaagatggaaaggtggttgcctatgcctctcgacagttacgtccgcatgagaagaactaccctactcatgatattgagttagctgcagtcgttcatgcattgaagatttggcgtcattatcttttcggtactcgtacagaagtgtacaccgatcacaagagtttaaagtatatctttactcagccggatctgaacatgagacaacggagatggttggaattaattaaggattatgacatgggaattcattatcatccgggaaaggctaatgttgtagcagacgctcttagcagaaaaggctattgcaatgctacagaaggacgacagttgccattggaattatgcaaggaatttgaaagattaaatttgggaattgtcggtagaggtttcgttgcagccttagaagcgaagcccactctaattgatcaagttagagaagcccaaattaatgatcctgatattcaagagatcaagaagaatatgagaagaggaaaagctattggtttcttggaggatgagcacggaactcgagtcaaggcagaacatcagaaacccgccggtttgttgcaacctttgaagattcctgaatggaaatgggaagaaattggtatggattttattactggtttacccagaacgtcatcaggccatgactctatttgggtgatagtcgacagacttaccaaagtggctcatttcattccggtaaagacaacttattccggaagtcgcttagcggaattgtatatggcaaggattgtgtgtttgcatggcgtccctaagaagatagtgtctgatcgaggcagtcagtttacttcaaatttttggaagaaacttcaggaagagatgggttctaagctgaactttagtactgcttatcatccgcagacagacggacaaaccgaaagggtgaatcaaattttggaagacatgttgagagcttgtgctctagatttcggtggaagttgggataagaatctaccctatgcagaattttcgtacaacaacagttatcaagctagtctacagatggctccgtacgaagcactgtatggtcggaagtgccgcactccgcttttgtgggatcaaacgggagaacgtcaggttttcagaacggatatcctaagggaagcagaagaaaaggtaaagatcattcaagaaagattgcgtgtggctcagtctcgtcataagagttatgccgacaatcgccgcagagatttaagttttgaagagggagattatgtgtatcttcgtgtcacgcctctacgaggagttcatcgttttcataccaagggaaaattggcaccgcgttttgtgggaccttataagattgtcagtagaagaggagaggttgcttatcagttggagttacctcaatctttggcaggagttcataatgtgttccatgtttcgcaattgaaaaagtgtttaagggtacctaccgaacaagctaatcttgaccagatagaagtccaagaggatttgacttatgttgagaaaccaatccgtatcctggaaacaactcctggtttggaatggtacattcctggtttggagatagaactgtgcagccggggtggttgttcagaatggttgggcctatacaacaggatgccgcgttacaagcctgagtacctgtttggtgttgagggttttgtccaggagttgcgtacaatgtcctttgtcattggatttgggactgcccctttttatgcccagattcctcatgatagtcatgaagagaagtgccgagtcaaagtcaccttgaacagtaatagtgaagatatcccctcagtgatgtttgaagctggaggaagaaactacatccatgcatgtcaggaggtggcaaggatcgccataggagagctccgtgatcgctacagtgatcaattggccgacactgagtatcgctaccatcctcgccaaccccagggaagtgaccgtggcagttaccttgagactgaaggaattgagaatgatgttaccacgaaacatttggttgagatgttgtgggctatggatgaaagtcgtgcggagactgtgttagcagctcaagatcgtgaagatcggaatcgtggtaagatttgcaagctagaagacaaggtggatcgtttggagaaggaattagccgcattgaagggagaagcaccgccgcagaaggccaggattcgtcttaccgcaaggaagagagctctatttgtccctcgctatcaactggcgccaaagatggtgaatactcgcagcaacgggaatggtcccaacaaccccaataataacaacaatggagagaatcccactctggcccaagttcttgctcaacagacacagcttatgaacatgatgatgcagcaatttcagaatcagcaaaaccaaggaaataaccatgcacctcctcagaataagttagcagaatttcttcgtgtgaggccgcctgttttctctagtaccactaatcctgttgaagctagtgattggctgcatgccatagagaagaagttggatttacttcagtgtactgatcaggagaaggtctcatttgcatcacatcagttgcatggccctgcctctgaatggtgggatcacttccgccttaacaggactactgctgaacctatcacttggcttgaattcaccgctgctttccggaagacgcatataccatcgggagtagtgtctctcaagaagaaggagttcaggtcgctttcccagggatctcgctctgttacggagtatctgcacgagttcaatcgtcttgctcgttatgctccggaagatgtgcgcaatgatgaagagcgccaggagaagtttttgggaggacttaatgatgagctttcttacccactcatggttggagattaccctgatttccagaaattagtggataaggctattcgtcaggaggacaagtacaattgcatggagcagaggaaacgtcggattgctcacttcaaggcacaacaggggagtaatcagaagccgcgtcttactttaggaccccagtctatgccacagggaggttcttcgtctgttgttcgtccgcaacgtcagttcttcaacaacaatgttggcaacaacatccgtaatcaagctccacgtcctgttgcagctccagcacagcaacaacctgccaagagggagcaaggcaacaagcccgtggtgtgtttcaactgtggagacccaggacattatgctgacaagtgtccgaagccccgacgcgtgaaggttgtccctgcccagaataactctgctgtatcagcatccaaggctcgtgtaaatcatgttgctgctgcagaagctcaagatgctccagatgtgattttgggtacgttccttgttaactcagttcctgcaacagtacttttcgattctggtgctacacattcattcttatctatgagttttgcgggaaatcatgggatggaagtagaagatcttagacgtcctttgatggtcagtaccccaagtaatcaagcactctctttgcaacgtagcccctctgtcagaatagaaattcaaggagtaccatttctggccaatcttatcttgttagaatccaaagaccttgatgtcatcctagggatggactggttagccagacataaaggtgtgatagactgtgccaacagaaaagtaactctcaacagctatgatggtcgagttgtaactgttcatgcattgtcatctgagtctttaaggtcaagactgaaccagataactttggaagagattcctatagtccgggagtatcctgatgtgttcccagatgatttacctggtatgccgcctaaaagggatatagagttcagaatagatttggtaccaggaacaactccgatccataagagaccttatcgaatggcagccaatgagttggcagaagttaagaggcaagtagatgatttgctacagaaaggatacatcagaccgagttcatcaccatggggagctccggttatttttgtggaaaagaaagaccatactcagagaatgtgtgtggactatcgtgcactaaacgatgtgactattaagaataagtatccactacccaggattgatgatttgtttgatcagcttaaaggtgccactgttttctccaagatagatcttcgatcagggtatcatcagttgagaatcaaagaggaagatatacctaagacagcttttaccactaggtatgggttgttcgaatgtactgttatgtcttttggacttaccaatgcccctgctttcttcatgaacttgatgaataaggtgtttatggaatacttagacaagttcgtggtggtctttattgatgatattcttatctactctcgaaccaaagaagagcatgaggaacatcttcgccttgcattggagaagctacgagaacatcaactgtatgctaagtttagcaagtgtgaattttggttgtctgaagtgaaattccttggtcacgtcatctcagccggaggagttgccgtcgatcctagtaacgtggaatccgtaaccaattggaagcaaccaaagacagtttcagagattcgcagtttcctaggcctcgcaggatattatcggaggtttatagagaatttttccaagattgctaagcccatgacacgactgcttcagaaagatgtgaagtacaagtggtcggaagaatgtgaacagagttttcaagaattgaaaagtcgcttaatatcagctcctattttgattttgcctgatccaaagaagggttttcaagtgtattgtgatgcatccaaacttgggttaggttgtgttctgatgcaagatggaaaggtggttgcctatgcctctcgacagttacgtccgcatgagaagaactaccctactcatgatattgagttagctgcagtcgttcatgcattgaagatttggcgtcattatcttttcggtactcgtacagaagtgtacaccgatcacaagagtttaaagtatatctttactcagccggatctgaacatgagacaacggagatggttggaattaattaaggattatgacatgggaattcattatcatccgggaaaggctaatgttgtagcagacgctcttagcagaaaaggctattgcaatgctacagaaggacgacagttgccattggaattatgcaaggaatttgaaagattaaatttgggaattgtcggtagaggtttcgttgcagccttagaagcgaagcccactctaattgatcaagttagagaagcccaaattaatgatcctgatattcaagagatcaagaagaatatgagaagaggaaaagctattggtttcttggaggatgagcacggaactcgagtcaaggcagaacatcagaaacccgccggtttgttgcaacctttgaagattcctgaatggaaatgggaagaaattggtatggattttattactggtttacccagaacgtcatcaggccatgactctatttgggtgatagtcgacagacttaccaaagtggctcatttcattccggtaaagacaacttattccggaagtcgcttagcggaattgtatatggcaaggattgtgtgtttgcatggcgtccctaagaagatagtgtctgatcgaggcagtcagtttacttcaaatttttggaagaaacttcaggaagagatgggttctaagctgaactttagtactgcttatcatccgcagacagacggacaaaccgaaagggtgaatcaaattttggaagacatgttgagagcttgtgctctagatttcggtggaagttgggataagaatctaccctatgcagaattttcgtacaacaacagttatcaagctagtctacagatggctccgtacgaagcactgtatggtcggaagtgccgcactccgcttttgtgggatcaaacgggagaacgtcaggttttcagaacggatatcctaagggaagcagaagaaaaggtaaagatcattcaagaaagattgcgtgtggctcagtctcgtcataagagttatgccgacaatcgccgcagagatttaagttttgaagagggagattatgtgtatcttcgtgtcacgcctctacgaggagttcatcgttttcataccaagggaaaattggcaccgcgttttgtgggaccttataagattgtcagtagaagaggagaggttgcttatcagttggagttacctcaatctttggcaggagttcataatgtgttccatgtttcgcaattgaaaaagtgtttaagggtacctaccgaacaagctaatcttgaccagatagaagtccaagaggatttgacttatgttgagaaaccaatccgtatcctggaaacaagtgagagaagaaccaggaatcgagttatccgtttttgcaaagtccagtggagtaatcactcggaagaagaatcaacttgggaacgagaagatgaattgaagtcagctcatccgcacctgttcgccagttcttccgaatctcgaggacgagattctgtttaa

SEQ ID NO: 43834 - DNA, 430 bp, Oryza sativa
  Clone ID: PAT_MRT4530_46952C.1
gcgttcgggcgagcgccgtagtaacctctgtcggtgggtgccctcgttcctgaccggcagacggcgcgcgtgactcgcgtctccgggcgacagactaagcaaaccatctagtatctggttccctacgaaggtttcctcaggatagatcgcagcccattacgcagttattagcctctaacagtgcaagactagcaggcagtgacagacgccaccgcgcactcgacctattgtgaaacgttaagaaggtaggaccgccctgttgctccggacgagccgtgccaaagcaagcgccagctgctgtggtccatttttggaaccacaactggcgatgcgggatgaaccggagacctgctacggcgctcgaactgtgcgctaacctacaacccacaagggggttggtcgactaatacagcccgtacggcagctacat

SEQ ID NO: 43835 - DNA, 16929 bp, Oryza sativa
  Clone ID: PAT_MRT4530_46953C.1
atggtgaacacgcgcactggcaccggaagtggaagcggaagtggaagtggaagtggagctactaacaatggaggagatcccacgctagctcagattctggcccaacaaacacaactgatcaatctgttagtgcagcaggcacagaatcagcaggcaaacaatcagaatcagaatccacccccacctccccaaaacaagttggcagatttcttacgtgtgagaccccctaccttttcaagcaccaccaatccagtagaagcaggagattggttgcatgcggtggagaagaagttggatttgatccagtgtactgagcaggagaaagtttcttttgcttcgcatcagttgcatggacctgctgctgaatggtgggatcattttcgccaaggcagggctgaaggagaacttatcacttggcaggagttcacgactgcttttaagaagacgcatataccgtcaggtgttgtagctctaaagaagagagaatttagagcactcaatcagggatctcgttcggtcaccgagtacctccatgatgtcaaccgtttagctcgttatgctccggaagatgttcgcaccgatgaagagcgtcaggagaagttcttggagggactgaatgatgagttgtcttatgccttgatgtctacggatttccgggatttccagcagttggtggacaaggcgattcgtcaggaagacaagtataaccggatggagcagaagaagcgcagggctgcccaattcaaggcacaacagggcagtaaccagaggccgcgtctcgttactggacctcaagctccatcgtaccctcaaggaggatcttcatcagttgtccgtccccaacgccagttctacaataacaatactggtaatcgtggcaatgacaaccgcaacatggttgctcgtcctgcagcaactccagctcagaatcagcccgttaggaaggaacagggaagcaagccagtgatatgcttcaattgtggtgatccaggacattatgctgataagtgtcctaagcctcggcatgtgaagaacgctccagccccgaacaactccaatgttctagcaccgaaggcacgtgttaatcatgttgcagcagcagaagctcagaatgcaccagatgttgttttggaaatagaagaagttcttttcccatcctcgcttatcttgctagaatccaaagatctagatgttatcttagggatggactggttatctcgtcacagaggagttatagattgtgccaaccgtaaggtgactttaaccagtagcaattgggaaaccgtttctttctttgtgtcctcccctaaatatcatggtgtgaacttaaaccaagttgctctacaagagattcctatagtacaagactacccagacgtgtttcccgaggatttgccagctcctggtttggaatggtacattcctggtttggagatagaactgtgcagccggggtggttgttcagaatggttgggcctatacaacaggatgccgcgttacaagcctgagtacctgtttggtgttgagggttttgtccaggagttgcgcacgatgtcctttgtcattggatttgggactgcccctttttatgcccagattcctcatgatcgtcatgaagagaagtgccgagtcagagtcaccttgaacagcaatagtgaagaggtcccctcagtgatgtttgaagctggaggaagaaactacatccatgcatgtcaggaggtggcaaggatcgccataggagagctccgtgatcgctacagtgatcaattggccgacactgagtatcgctaccatcctcgccaacctcagggaagtgaccgtggcagttaccttgagactgaaggaattgagaatgatgttaccacgaaacatttggttgagatgttgtgggctatggatgaaagtcgtgcggagactgtgttagcagctcaagatcgtgaagatcggaatcgtggtaagatttgcaagttagaagacaaggtggatcgtttggagaaggaattagccgcattgaagggagaagcaccgccgcagaaggccaggattcgtcttaccgcaaggaagagagctctatttgtccctcgctatcaactggcgccaaagatggtgaacactcgtagcaatgggaatggtcccaacaaccccaataacaacaacaatggagagaatcccactctggcccaagttcttgctcaacagacacagcttatgaacatgatgatgcagcaatttcagaatcagcaaaaccaagggaataatcatgcacctccccaaaacaagttagcagaatttcttcgtgtgaggccgcctgttttctctagtaccactaatcctgttgaagctagtgattggctgcatgccatagagaagaagttggatttacttcagtgtactgatcaggagaaggtctcatttgcatcacatcagttgcatggccctgcctctgaatggtgggatcacttccgccttaacaggactactgctgaacctatcacttggcttgaattcaccgctgctttccggaagacgcatataccatcgggagtagtgtctctcaagaagaaggagttcaggtcgctttcccagggatctcgctctgttacggagtatctgcacgagttcaatcgtcttgctcgttatgctccggaagatgtgcgcaatgatgaagagcgccaggagaagtttttgggaggacttaatgatgagctttcttacccactcatggttggagattatcctgatttccagaaattagtggataaggctattcgtcaggaggacaagtacaatcgcatggagcagaagaaacgtcggattgctcaattcaagacacaacagggaaataatcagaagccgcgtcttactttaggaccccagcccatgccacagggaggttcttcgtctgttgttcgtccgcaacgtcagttcttcaacaacaatgctggcaacaacatccgtaatcaagctccacgtcctgttgcagctccagcacagcaacaacctgccaagagggagcaaggcaacaagcccgtggtgtgtttcaactgtggagatccaggacattatgctgacaagtgtccgaagccccgacgtgtgaaggttgtccctgcccagaataactctgctgtaccagcatccaaggctcgtgtaaatcatgtcgctgctgcagaagctcaagatgctccagatgtgattttgggtacgttccttgttaactcagttcctgcaacagtacttttcgattctggtgctacacattcattcttatctacgagttttgcgggaaatcatgggatggaagtagaagatcttagacgtcctttgatggttagtaccccaagtaatcaagcactctctttgcaacgtagcccctctgtcagaatagaaattcaaggagtaccatttctggccaatcttatcttgttaaaatccaaagaccttgatgtcatcctagggatggactggttagccagacataaaggtgtgatagactgtgccaacagaaaagtaactctcaacagctatgatggtcgagttgtaactgttcatgcattgtcatctgagtctttaaggtcaagactgaaccagataactttggaagagattcctatagtccgggagtatcctgatgtgttcccagatgatttacctggtatgccgcctaaaagggatatagagttcagaatagatttggtacctggaacaactccgatccataagagaccttatcgaatggcagccaatgagttggcagaagttaagaggcaagtagatgatttgctacagaaaggatacatcagaccgagttcatcaccatggggagctccggttatttttgtggaaaagaaagaccatactcagagaatgtgtgtggactatcgtgcactaaacgatgtgactattaagaataagtatccactacccaggattgatgatttgtttgatcaacttaaaggtgccactgttttctccaagatagatcttcgatcagggtatcatcagttgagaatcaaagaggaggatatacctaagacaacttttaccactaggtatgggttgtttgaatgtactgttatgtcttttggacttaccaatgcccctgctttcttcatgaacttgatgaataaggtgtttatggaatacctagacaagttcgtggtggtctttattgatgatattcttatctactctcgaaccaaagaagagcatgaagaacatcttcgccttgcattggagaagctacgagaacatcaactgtatgctaagtttagcaagtgtgaattttggttgtctgaagtgaaattccttggtcacgtcatctcagccggaggagttgccgtcgatcctagtaacgtggaatccgtaaccaattggaagcaaccaaagacagtttcagagattcgcagtttcctaggccttgcaggatattatcggaggtttatagagaatttttccaagattgctaagcccatgacacgactgcttcagaaagatgtgaagtacaagtggtcggaagaatgtgaacagagttttcaagaattgaaaagtcgcttaatatcagctcctattttgattttgcctgatccaaagaagggttttcaagtgtattgcgatgcatccaaacttgggttaggttgtgttttgatgcaagatgggaaggtggttgcctatgcctctcgacagttacgtccgcatgagaagaactaccctactcatgatattgagttagctgcagtcgttcatgcattgaagatttggcgtcattatcttttcggtactcgtacagaagtgtacaccgatcacaagagtttaaagtatatctttactcagccggatctgaacatgagacaacggagatggttggaattaattaaggattatgacatgggaattcattatcatccgggaaaggctaatgttgtagcagacgctcttagcagaaaaggctattgcaatgctacagaaggacgacagttgccattggaattatgcaaggaatttgaaagattaaatttgggaattgtcggtagaggtttcgttgcagctttagaagcgaagcccactctaattgatcaagttagagaagcccaaaataatgatcctgatattcaagagatcaagaagaatatgagaagaggaaaagctattggtttcttggaggatgagcacggaacggtatggttgggtgagagaatctgtgtccccgacaacaaagatttaaaggatgcaattctgaaagaagctcacgatactttatactccattcaccctggtagtactaagatgtaccaggatctcaaggaaagattttggtgggcaagtatgaagcgtgaaatcgcagaatacgtagcagtatgtgatgtttgtcagcgagtcaaggcagaacatcagaaacccgccggtttgttgcaacctttgaagattcctgaatggaaatgggaagaaattggtatggattttattactggtttacccagaacgtcatcaggccatgactctatttgggtaatagttgacagacttaccaaagtggctcatttcattccgacagacggacaaaccgaaagggtgaatcaaattttggaagacatgttgagagcttgtgctctagatttcggtggaagttgggataagaatctaccttatgcagaattttcatacaacaacagttatcaagctagtttacagatggctccttacgaagcactgtatggtcggaagtgccgcactccgcttttgtgggatcaaacgggagaacgtcaggttttcggaacggatatcctaagggaagcagaagaaaaggtaaagatcattcaagaaagattgcgtgtggctcagtctcgtcataagagttatgccgacaatcgccgcagagatttgagttttgaagagggagattatgtgtatcttcgtgtcacgcctcttcgaggagttcatcgttttcataccaaaggaaaattggcaccgcgttttgtgggaccttataagattgtcagtagaagaggagaggttgcttatcagttggagttacctcaatctttggcaggagtacataatgtgttccatgtgtcgcaattgaaaaagtgtttaagggtacctaccgaagaagctaatattgagcagatagaagtccaagaggatttgacttatgttgagaaaccaatccgtatcctggaaacaactcctggtttggaatggtacattcctggtttggagatagaactgtgcagccggggtggttgttcagaatggttgggcctatacaacaggatgccgcgttacaagcctgagtacctgtttggtgttgagggttttgtccaggagttgcgtacgatgtcctttgtcattggatttgggactgcccctttttatacccagattcctcatgatcgtcatgaagagaagtgccgagtcaaagtcaccttgaacagcaatagtgaagatattccctcagtgatgttcgaagctggaggaagaaactacatccatgcatgtcaggaggtggcaaggatcgccataggagagctccgtgatcgctacagtgatcaattggccgacactgagtatcgttaccatcctcgccaaccccagggaagtgaccgtggcagttatcttgagactgaaggaattgagaattatgttaccacaagacatttggttgagatgttgtgggctatggatgaaagtcgtgcggagactgtgttagcagctcaagatcgtgaagaccggaatcatggtaagatttgcaagttagaagacaaggtggatcgtttggagaaggaattagccgcattgaagggagaagcaccgccgcagaaggccaggattcgtcttaccgcaaggaagagagctctatttgtccctcgctatcaactggcgccaaagatggtgaacactcgtagcaatgggaatggtcccaacaaccccaataacaacaatggagagaatcccactcttgctcaagttcttgctcaacaaacacagcttatgaacatgatgatgcagcaatttcagaatcagcaaaaccaagggaataatcatgcacctccccagaacaagttagcagaatttcttcgtgtgaggccgcctgttttctctagtaccactaatcctgttgaagctagtgattggctgcatgccatagagaagaagttggatttacttcagtgcactgatcaggagaaggtatcttttgcatcacatcagttgcatggccctgcctctgaatggtgggatcacttccgccttaacaggactactgctgaacctatcacttggcttgaattcaccgctgctttccgaaagacgcatataccatcgggagtagtgtctctcaagaagaaggagttcaggtcgcttactcagggatctcgctctgttacggagtatctgcacgagttcaatcgtcttgctcgttatgctccggaagatgtgcgcaatgatgaagagcgccaggagaagtttttgggaggacttaatgatgagctttcttacccactcatggttggagattatcctgatttccagaaattagtggataaggctattcgtcaggaggacaagtataatcgcatggagcagaagaaacgtcggattgctcaattcaagacacaacagggaaataatcagaagccgcgtcttactttaggaccccagtctatgccacagggaggttcttcgtctgttgttcgtccgcaacgtcagttcttcaacaacaatgctggcaacaacatccgtaataaagctccacgtcctgttgcagctccagtacagcaacaacctgccaagagggagcaaggcagcaagcccgtggtgtgtttcaactgtggagacccaggacattatgctgacaagtgtccgaagccccgtcgcgtgaaggttgtccctgcccagagtaactctgctgtaccagtatccaaggctcgtgtaaatcatgtcgctgctgcagaagctcaagatgctccagatgtaattttgggtacgttccttgttaactcagttcctgcaacagtacttttcgattctggtgctacacattcattcttatctatgagttttgcgggaaatcatgggatggaagtagaagatcttagacgtcctttgatggttagtaccccaagtaatcaagcactctctttgcaacgtagcccctcggtcagaatagaaattaaaggagtaccatttctggccaatcttatcttgttagaatccaaagaccttgatgtcatcctagggatggactggttagccagacataaaggtgtgatagactgtgccaacagaaaagtaactctcaacagctatgatggtcgagttgtaactgttcatgcattgtcatctgagtctttaaggtcaagactgaaccagataactttggaagagattcctatagtccgggagtattctgatgtgttcccagatgatttacctggtatgccgcctaaaagggatatagagttcagaatagatttggtacctggaacaactccgatccataagagaccttatcgaatggcagctaatgagttggcagaagttaagaggcaagtagatgatttgctacagaaaggatacatcagaccgagttcatcaccatggggagctccggttatttttgtggaaaagaaagaccatactcagagaatgtgtgtggactatcgtgcactaaacgatgtgactatcaagaataagtatccactacccaggattgatgatttgtttgatcagcttaaaggtgccactgttttctccaagatagatcttcgatcagggtatcatcagttgagaatcaaagaggaagatatacctaagacagcttttaccactaggtatgggttgttcgaatgtactgttatgtcttttggacttaccaatgcccctgctttcttcatgaacttgatgaataaggtgtttatggaatacttagacaagttcgtggtggtctttattgatgatattcttatctactctcgaaccaaagaagagcatgaggaacatcttcgccttgcattggagaagctacgagaacatcaactgtatgctaagtttagcaagtgtgaattttggttgtccgaagtgaaattccttggtcacgtcatctcagccggaggagttgccgtcgatcctagtaacgtggaatccgtaaccaattggaagcaaccaaagacagtttcagagattcgcagtttcctaggcctcgcaggatattatcggaggtttatagagaatttttccaagattgctaagcccatgacacgactgcttcagaaagatgtgaagtacaagtggtcggaagaatgtgaacagagttttcaagaattgaaaagtcgcttaatatcagctcctattttgattttgcctgatccaaagaagggttttcaagtgtattgcgatgcatccaaacttgggttaggttgtgttttgatgcaagatgggaaggtggttgcctatgcctctcgacagttacgtccgcatgagaagaactaccctactcatgatattgagttagctgcagtcgttcatgcattgaagatttggcgtcattatcttttcggtactcgtacagaagtgtacaccgatcacaagagtttaaagtatatctttactcagccggatctgaacatgagacaacggagatggttggaattaattaaggattatgacatgggaattcattatcatccgggaaaggctaatgttgtagcagacgctcttagcagaaaaggctattgcaatgctacagaaggacgacagttgccattggaattatgcaaggaatttgaaagattaaatttgggaattgtcggtagaggtttcgttgcagctttagaagcgaagcccactctaattgatcaagttagagaagcccaaaataatgatcctgatattcaagagatcaagaagaatatgagaagaggaaaagctattggtttcttggaggatgagcacggaacggtatggttgggtgagagaatctgtgtccccgacaacaaagatttaaaggatgcaattctgaaagaagctcacgatactttatactccattcaccctggtagtactaagatgtaccaggatctcaaggaaagattttggtgggcaagtatgaagcgtgaaatcgcagaatacgtagcagtatgtgatgtttgtcagcgagtcaaggcagaacatcagaaacccgccggtttgttgcaacctttgaagattcctgaatggaaatgggaagaaattggtatggattttattactggtttacccagaacgtcatcaggccatgactctatttgggtaatagttgacagacttaccaaagtggctcatttcattccggtaaagacaacttattccggaagtcgcttagcggaattgtatatggcaaggattgtgtgtttgcatggcgtccctaagaagatagtgtctgatcgaggcagtcagtttacttcaaatttttggaagaaacttcaggaagagatgggttctaagctgaactttagtactgcttatcatccgcagacagacggacaaaccgaaagggtgaatcaaattttggaagacatgttgagagcttgtgctctagatttcggtggaagttgggataagaatctaccttatgcagaattttcatacaacaacagttatcaagctagtcttcagatggctccttacgaagcactgtatggtcggaagtgccgcactccgcttttgtgggatcaaacgggagaacgtcaggttttcggaacggatatcctaagggaagcagaagaaaaggtaaagatcattcaagaaagattgcgtgtggctcagtctcgtcataagagttatgccgacaatcgccgcagagatttgagttttgaagagggagattatgtgtatcttcgtgtcacgcctttacgaggagttcatcgttttcataccaagggaaaattggcaccgcgttttgtgggaccttataagattgtcagtagaagaggagaggttgcttatcagttggagttacctcaatctttggcaggagtccataatgtgttccatgtgtcgcaattgaaaaagtgtttaagggtacctaccgaagaagctaatattgagcggatagaagtccaagaggatttgacttatgttgagaaaccaatccgtatactggaaacaaatgagagaagaaccaggaatcgagttatccgtttctgcaaagttcaatggagtaatcactcggaagaagaatcaacttgggaacgagaagatgaattgaactttggaatcgagttcgattcggatcggttttccctctctccaagccgaaggtttccttcgccgttgccgtcgccgtgggccttcgccgtcgcctccgagcccctttaaaaggacccccggtgtctcctctacccgtcgcagccctcgccttcgcctctcgtcgccggaagagccttagcgccccatgctccgccgtcgctccagctgtcgccgccgctcgggaagaccgccgacgtcatcgccaagtcgccgccgtcctcgtccgccccttcgcagccgttggaacccgccggagcttcgtcgccgtcgacaacccgaaggtagccgccgcttccttctcgtcgccgtcgccgtccgttgcttctccgccgtcgttttggtcgtcgcgccgccgttcgccggtgagcgtgcgccgcccgagccgtccgctccgccgagccgccgccgccgtcggtgacgtcatcgctgacgccatcggggtcgtccgccattccgtcgtttctggagagtccgttttcgcggaagaagagtttgaagagttccaaggccagcaaggcagctcctggtttggaatggtacattcctggtttggagatagaactgtgcagccggggtggttgttcagaatggttgggcctatacaacaggatgccgcgttacaagcctgagtacctgtttggtgttgagggttttgtccaggagttgcgtacgatgtcctttgtcattggatttgggactgcccctttttatgcccagattcctcatgatcgtcatgaagagaagtgccgagtcaaagtcaccttaaacagcaatagtgaagatgtcccctcagtgatgtttgaagctggaggaagaaactacatccatgcatgtcaggaagtggcaaggatcgccataggagagctccgtgatcgctacagtgatcaattggccgacactgagtatcgctaccatcctcgccaacctcagggaagtgaccgtggcagttaccttgagactgaaggaattgagaatgatgttaccacgaaacatttggttgagatgttgtgggctatggatgaaagtcgtgcggggactgtgttagcagctcaagatcgtgaagatcggaatcgtggtaagatttgcaagctagaagacaaggtggatcgtttggagaaggaattagccgcattgaagggagaagcaccgccgcagaaggccaggattcgtcttaccgcaaggaagagagccctatttgtccctcgctatcaattggcgccaaagatggtgaatactcgcagcaatgggaatggccctaacaaccccaataacaacaacaatggagagaatcctactctggcccaagttcttgctcaacagacacagcttatgaacatgatgatgcagcaatttcagaatcagcaaaaccaagggaataatcatgcacctccacagaacaagttagcagaatttcttcgtgtgaggccgcctgttttctctagtaccactaatcctgttgaagctagtgattggctgcatgccatagagaagaagttggatttacttcagtgtactgatcaggagaaggtctcatttgcatcacatcagttgcatggccctgcctctgaatggtgggatcacttccgccttaacaggactactgctgaacctatcacttggcttgaattcaccgctgctttccggaagacgcatataccatcaggagtagtgtctctcaagaagaaggagttcaggtcgctttcccagggatctcgctctgttacggagtacctacacgagttcaatcgtcttgctcgttatgctccggaagatgtgcgcaatgatgaagagcgccaggagaagtttttgggaggacttaatgatgagctttcttacccactcatggttggagattatcctgatttccagaaattagtggataaggctattcgtcaggaggacaagtacaatcgcatggagcagaagaaacgtcggattgctcaattcaagacacaacagggaaataatcagaagccgcgtcttactttaggaccccagcccatgccacagggaggttcatcgtctgttgttcgtccgcaacgtcagttcttcaacaacaatgctggcaacaacatccgtaatcaagctccacgtcctgttgcagctccaacacagcaacaacctgccaagagagagcaaggcaacaagcccgtggtgtgtttcaactgtggagacccaggacattacgctgacaagtgtccgaagccccgacgcgtgaaggttgtccctgcccagagcaattctaccgtatcagcatcaaaggcccgtgtaaatcatgtcgctgctgcagaagctcaagatgctccagatgtgattttgggtacgttccttgttaactcagttcctgcaacagtacttttcgattctggtgctacacattcattcttatctatgagttttgcgggaaatcatgggatggaagtagaagatcttagacgtcctttgatggttagtaccccaagtaatcaagcactctctttgcaacgtagcccctctgtcagaatagaaattcaaggagtaccatttctggccaatcttatcttgttagaatccaaagaccttgatgtcatcctagggatggactggttagccagacataaaggtgtgatagactgtgccaacagaaaagtaactctcaacagctatgatggtcgagttgtaactgttcatgcattgtcatctgagtttttaaggtcaagactgaaccagataactttggaagagattcctatagtccgggagtatcctgatgtgttcccagatgatttacctggtatgccgcctaaaagggatatagagttcagaatagatttggtacctggaacaactccgatccatacgagaccttatcgaatggcagccaatgagttggcagaagttaagaggcaagtagatgatttgctacagaaaggatacatcagaccgagttcatcaccatggggagctccggttatttttgtggaaaagaaagaccatactcagagaatgtgtgtggactatcgtgcactaaacgatgtgactatcaagaatgagtatccactacccaggattgatgatttgtttgatcaacttaaaggtgccactgttttctccaagatagatcttcgatcagggtatcatcagttgagaatcaaagaggaagatatacctaagacagctttcaccactaggtatgggttgttcgaatgtactgttatgtcttttggacttaccaatgcccctgctttcttcatgaacttgatgaataaggtgtttatggaatacttagacaagttcgtggtggtctttattgatgatattcttatctactctcgaaccaaagaagagcatgaggaacatcttcgccttgcattggagaagctacgagaacatcaactatatgctaagtttagcaagtgtgaattttggttgtccgaagtgaaattccttggtcacgtcatctcagccggaggagttgccgtcgatcctagtaacgtggaatccgtaaccaattggaagcaaccaaagacagtttcagagattcgcagtttcctaggccttgcaggatattatcggaggtttatagagaatttttccaagattgctaagcccatgacacgactgcttcagaaagatgtaaagtacaagtggtcggaagaatgtgaacagagttttcaagaattgaaaagtcgcttaatatcagctccaattttgattttgcctgatccaaagaagggttttcaagtgtattgtgatgcatccaaatttgggttaggttgtgttctgatgcaagaagggaaggtggttgcctatgcatctcgtcagttacgtccgcatgagaagaactaccctactcatgatattgagttagctgcagtcgttcatgcattgaagatttggcgtcattatcttttcggtactcgtacagaagtgtacaccgatcacaagagtttaaagtatatctttactcagccggatctgaacatgagacagcggagatggttggaattaattaaggattatgacatgggaattcattatcatccgggaaaggctaatgtggtagcagacgctcttagcagaaaaggctattgcaatgctacagaaggacgacagttgccattggaattatgcaaggaatttgaaagattaaatttgggaattgtcggtagaggtttcgttgcagccttagaagcgaagcccactctaattgatcaagttagagaagcccaaattaatgatcctgatattcaagagatcaagaagaaaatgagaagaggaaaagctattggtttcttggaggatgagcacggaactgtatggttgggtgagagaatctgtgtccccgacaacaaagatttaaaggatgcaattctgaaagaagctcatgatactttatactccattcaccctggtagtactaagatgtaccaggatcttaaggaaagattttggtgggcaagtatgaagcgtgaaatcgcagaatacgtagcagtatgtgatgtttgtcaacgagtcaaggcagaacatcagaaacccgccggtttgttgcaacctttgaagattcctgaatggaaatgggaagaaattggtatggattttattactggtttacccagaacgtcatcaggccatgactctatttgggtgatagtcgacagacttaccaaagtggctcatttcattccggtaaagacaacttattccggaagtcgcttagcggaattgtatatggcaaggattgtgtgtttgcatggcgtccctaagaagatagtgtctgatcgaggcagtcagtttacttcaaatttttggaagaaacttcaggaagagatgggttctaagctgaactttagtactgcttatcatccgcagacagacggacaaaccgaaagggtgaatcagattttggaagacatgttgagagcttgtgctctagatttcggtggaagttgggataagaatctaccctatgcagaatttttgtacaacaacagttatcaagctagtctacagatggctccgtacgaagcactgtatggtcggaagtgccgcactccgcttttgtgggatcaaacgggagaacgtcaggttttcggaacggatatcctaagggaagcagaagaaaaggtaaagatcattcaagaaagattgcgtgtggctcagtctcgtcataagagttatgccgacaatcgccgcagagatttgagttttgaagagggagattatgtgtatcttcgtgtcacgcctcttcgaggagttcatcgttttcataccaagggaaaattggcaccgcgttttgtgggaccttataagattgtcagtagaagaggagaggttgcttatcagttggagttacctcaatctttggcaggagtacataatgtgttccatgtgtcgcaattgaaaaagtgtttaagggtacctaccgaagaagctaatattgagcagatagaagtccaagaggatttgacttatgttgagaaaccaatccgtatcctagaaacaagtgagagaagaaccaggaatcgagttatccgtttttgcaaagtccagtggagtaatcactcggaagaagaatcaacttgggaacgagaagatgaattgaaatcagctcatccgtacctgttcgccagttcttccgaatctcgaggacgagattctgtttaa

SEQ ID NO: 43836 - DNA, 588 bp, Oryza sativa
  Clone ID: PAT_MRT4530_46954C.1
atgcagtggcagtttccggcgtccaaggtaagcgttcatgtccttcaggtcatcgtcgtcgttggcggcggcgagggaggaggattccaaggaggcggcggtgttcgaccgcttctccctcttcgggttccgcccaccgccgcgcctgtctcgcccggtgacgccttcgacggcgccgccgccgcctccaccatgaagcagcggcagtttggattcgacggccggcagcagtacgcagccgccgagcagcacggccaccgtgagcagggcgtggactcctacggcgtcgcggcgccgcaccatttcccatcgccgtcgccgcgccacgccgtgcagttcagccaggcgaacccgagcaccctccgcggcagcgtcgacgagcggttcccagtgttcgtgctgctcgccgtctcggcggtgccggaagcagatggtggccgtcggcgcgtgcggcttcctgcagggtctcctcgccgtggaggtcgacggcgccaagaagctcaccgattgcctcgtcagaccgggatgatacgtgccatcatccagtgcatgccacgtaagcaaaaccacggtaaaacgagactttag

SEQ ID NO: 43837 - DNA, 391 bp, Oryza sativa
  Clone ID: PAT_MRT4530_46955C.1
ttaggggcggtgcttgtcttcctcttctctagcgcggtggacggcggggcagggacggcgctcggccttcctcttctctagcagcgaacggcgggggtagggtggactgtggcggatgttgcacgatcttctcacgtggttccccttcggcgccagcagcaatgcgtcgcagccggtgacgcagtccgtggtgtggttcgcgaagcagtcgttgtccggcgagacaaccgttggcactatgcattccgtgctcagcgtcacggtagacggccagctcgcgctcaccgaagtagatggccgcatgctatggcgggcaccggtctcccggctgatgcgcggctccatcctcgtgctccgtgactctgatagcctccggccggttcgtcggtga

SEQ ID NO: 43838 - DNA, 450 bp, Oryza sativa
  unsure (1)..(450): unsure at all n locations
  Clone ID: PAT_MRT4530_46956C.1
aaccacataaacacagcatactgcagttttctttttcattttgcattttgcattcttgctttaacagtggtgagtggtgacaaatgcaagtactcgacaaagcaaatgataatctaatacagcacacacatggcttgcttgatgacacaggatcatatactgtaattcataanttactattaccatacaaggcttattataaaaccataaaaccaactataaaaaatattctatccatccattctaaatatacaaaagtaatcttactttcagataataacatactccatcactcttaacacaaataacaaatctacagctgaaatagaaaccaataccatccgtataattcatctaagcagtacttaataacttacttcacactcaantaattatcgaaaccccactatcctagctcccaaccaaaaccactgcagttattccctgccc

SEQ ID NO: 43839 - DNA, 945 bp, Oryza sativa
  Clone ID: PAT_MRT4530_46957C.1
ccgccaggccagaccgaaaaaccccccatctcattggctttgggttagaacaaaagttagaacacgtttttaccaaggagcatggaaatgaaacgtgaaaacactgtagaagccgaatatcctcagcacttatcagatactagataatacaacattccgtccatggctgctgtgcttttgtgccttgctctattctacttaatctacattacacgaacaaaaccttcttctactgtaagctacaagaggaagctcttgatctgaatcgctagacagtttatgaacagaggctctaagtgctgaatcgagaagttatgtaatcttgtgcttcttctgtaagcttgtagcttgtgttacatacaaagaaaaagggcaactcccagcagcggatgtgaacccgctgcaacatggcagcccgcacaacggtatttctaccaaagaatcgcctatatgtttactccgttgaaccactccaaattatagcggttggagctcttgctcaggaactgctgaatccacaggtctatatgccgcttgacctctaaatttctttctccagacaatcagtactaaaagggccgataaagtcagcaaaacaactagcaaaattccaagcagtatagagactacatgatctcggaaccatgacctcttggataaaggctgcacattccattcaagtaactgataactgccaagattttcaggcaactggacgtgatgttgggtcaaccgataaatgataccctgacgggagtcaatgtccagctctttagctataagctcagccagctcatggaggtgaggtttcaggtttggataagtaacatttatggacatatcaacagtgattaggccaacatcaaattcgtcgggctgtgccggaccggcccgaaggcgcaggtagcccatttgactgaacaaatctcctgtttcgcctcgtgc

SEQ ID NO: 43840 - DNA, 363 bp, Oryza sativa
  Clone ID: PAT_MRT4530_46958C.1
tttttttttttttttttttttttttttttttttttttttttggttttttttttttttttttttggaaccgaaaattaattgggatgggtttacttaaatataggataccacacgtatttttattatatctatatatacaagactcaaccaagactggttgagatttccaagattttttttacaagtttttgacaaataaaaaatgcattgaagcatcaaggggtgaacaattttcctgaactgttcatgaaaccatgcatttttgatgaagattgggaaacatttttgatggccttttacttttttagcatccgggcaaagcaggttttaaagcttggacagtgcaaagtccattacggggac

SEQ ID NO: 43841 - DNA, 396 bp, Oryza sativa
  Clone ID: PAT_MRT4530_4695C.1
gttggggtgtttttttttttttttttttttttttttttttttttttttttatgggaaaacttgcatgacatttttattcaaatttgtatcaccccgatggttcaacttggcacacacttttttttttgactttatttttctctccttttgggggagtggggggcaattcaataccaaataccacccaccgtgggaaggggggggggggcaatgttttaccttgggtagataccccatattgaccgcatgtttagggccaacataacttgggcttgagcttgactcttatccaagtagaccctagcaaactgttttagccataactgctggacaatagcctgaacacttcttatggcctggcagtaaaactgttgggcgatcatcctgagctgttgg

SEQ ID NO: 43842 - DNA, 996 bp, Oryza sativa
  Clone ID: PAT_MRT4530_46960C.1
atggagcagcccctctacctccagaggttggtccaggaggattggagaatgacatgcaggcgaaacaggttctgcttctactgctggctctccttctgcgaccactgctgcaaagaacattgggatcatcaccacccggaagagggccttccccgtgtcgctacggtcggttcgaaagaagacttcttcttcttcttcttcttcttcttcttcttcttcttcttcttcgtcttcttcttcttcttcttcttcttcttcgatcgagcctcttgtgtctcatcttattctcgctcgcaggttgagttgctcgctgaaaaccccgctgtgctcgccaggtacccagtgggcaccgagtacgattgggaaggtatacaaagattgagaggcgacgaacagacgaactggatcctgttgagaccatgggtgccaccaatgtacgggcggaagaaggatttctcgagctgcgtggactgccaccaacgaatcaagaagccaacaaacgcgctctactgctgtacaatgtgcaagcttaaccaagtccaagaagaggaccaagggagggacatggtcgaggcacttgcaacaggagattacagtacccaggctctactccatgataatttctgcgtcctatgcacgtcgtcattctcttcagactgctgcacttatcacatggagctacaccatccagatgttgaggatattggtgtatggctggtactgatagaggtggtttacgtcgacggctgggcagcggttgcgccgtctgagctagtctctgaaaatgtccttgccggtgttcaggtcctgcaagtgcaagctgatgatgaaactgtactttacccgctcaggaggacagtagctgctgcggttgatcgtttgggccatgtccctgggtggcatggctgcggcgctcctggttgccatgagatgattccggcgcaagcactgttctgttgtttgcgctgcaaggctgcagttcattgggcagcttag

SEQ ID NO: 43843 - DNA, 322 bp, Oryza sativa
  Clone ID: PAT_MRT4530_46961C.1
atgtccctgttcacccctcaactgacgctcctgccgtggctgcaatatgtcaagagcgacaactcctcgtccatcaggtcggctattggagttggttcatccttcatcggtggctacgcagcagtctcggctatgcaacagctccccaacagcttagtacatgaaaaggatcacaatggatggagtttgatgaagccgagcagccttggcgcctcgatcaccaacgtacgattcgcaggtgtcagtgtcgaggcgtgcaggcatcgcctagatgcaggttgcagcccaacgattaggccatgcaagggaggagatgggcgtg

SEQ ID NO: 43844 - DNA, 614 bp, Oryza sativa
  Clone ID: PAT_MRT4530_46962C.1
tggatccccgggctgcaggctcgcctgctactcctcgcgccaagtcaatctccccgtcctctcggtctcggctcccgcatcctcgcgagtcgccagccgccgccgcctgcgccgatctccgtcccgcgagcagcggtgcgtcgtcctgctgcttccgcctcagttaggtccgcccctttggggagtacgctgagatgaccggcgcgggcgacgccgccaaggagtacgccgccggatgtgctgccggcatcgcacaggtggcggtcggccaccctttcgacaccgtcaaggtcaaattgcaagctcacaataccacagctcatgggaaggtatacaggaatgctttccactgtactagaaggatactggttgaggaaggaatgagaggactgtataaaggtgcatcatcttcatttatcggtatcgcacttgaaagctcccttttctttggcacatattcacaagccaagcaattactaaagggaaaatctgaggatggtaggccacagctacaggtaataataccttctgctgcctgtagtggagctttaatcagttgcattctcactccaactgagctaatgaagaatgcaagttcaagggaagcatgcatt

SEQ ID NO: 43845 - DNA, 393 bp, Oryza sativa
  Clone ID: PAT_MRT4530_46963C.1
gttttggaacgttgatgcccatagcctggtgtttatagttcaagcggcatgctctagtacacagacccggcacaccttggaacgaccgttgttgaatggctgttttacgatacagcctatactgatgatcattgcacatcactacgtggccttgaagaacgcctaatatgaaagatgccagtacatttgattcaagaccaatgcagactacatgccgagccactttgcacgtatagatactcaatagcttcgtgccatgctacctgatgttaccgctaatgcttaccgtatattgcggtggcatgcaccaagccttaggaataatacgtgagaggagcttgacgccttcactcgtatatatcatcaacagacctacctaggcattctaaatga

SEQ ID NO: 43846 - DNA, 501 bp, Oryza sativa
  Clone ID: PAT_MRT4530_46964C.1
atggctgccgcgggctcacggacgccattctcgctgtcctcgcggcgcggtgaggccctcgaaagcctccagatcaggcctgacccacttgaacacatctctagcgatgccctccaccaagtcgccttctactgcttgcgcctccaccacctgcacctctcgggtctccacgacgccgacgcggaggtcgccatcggagcgctcatgcgctactgcctcctcctagaaggtgtcgccttccttgactgcggatctgtagataaggccgccaatgcgggcatccaatctggcaatccctccgcttcctctccgtcgctgggtgccgacaccggggatgacatgcgggtgtcgccgctggcggtggcgacattgtggtggagctgggaggaggaggagtcggcgagtcgagccgccgtgcacttgcggaagacgggggagatatttgagagacttaattacatgtgggctccacatatatttttatatctccttgctaactag

SEQ ID NO: 43847 - DNA, 1627 bp, Oryza sativa
  Clone ID: PAT_MRT4530_46965C.1
ccacgcgtccgcgccgttcaaaaccctaaaccctgaggcgaacctcgaggaatcgcagcggcgcgtcgtgtcggcacccatggcggcgtccccgtccgctcctcctccccccgccgccgccgctggagtcggagtctggagccctgctccgcaatcgccgtcgcccaacctcgctaacttcttcgtatggagggaatttgtatggggagcaattgcaggcgcattcggtgaaggcatgatgcatccagtcgatactctgaaaacacggcttcagagtcaggctataatcacaggggctaaggctcagaaaaatatattccagatgatcaggacagtctgggtctctgatggtctgaaaggtttttacagaggaatcagtccaggtgttactggatcacttgctacaggggcaacatattttggtgttattgaatcaaccaagacatggctggagcattctaatcctaatctaagtggccattggtctcactttattgctggaggaattggagatacacttgggtcttttatctatgtgccatgtgaagtcatgaaacagcgaatgcaagtccaaggcaccaagaaatcttgggccttaactgccacaaaaggaaatatttctcaaactccaggggctccgatgtataactactataatggaatgttccatgctggttgttctatctggagagatcatggtctgaagggactttatgcaggatactggtctacacttgccagggatgtaccttttgctggtcttatggtcactttctatgaggcaatgaaagaactgactgagtatgggaagaggaagtatttgccagagagtaatttgcatgctagcagctccttcgaagggcttcttctaggaggcttggcaggcggttttagtgcatacttgacaacccccttggatgtgatcaagacaaggctgcaagtacagggatcaacaactagttacaatgggtggctggatgctattacgaagacatgggctaatgagggaatgagtggcttgttcaaggggagcattcctagaataatatggtacatacctgcatctgcattcacgttcatggcagtggagttcctcagggatcatttcaacgaaaagatcgatacagatgcccgtgaactaaccggcctgtcaatggacacaagatcagaagttgaggaagctgcatgaagccctgaaggcctgaagtagttccctgttttgtaggactgatccaaaggaatttttgatttctccgtcaagtaaagttcatttcccgaatataagtgtgaaaaatgcaatgtcagccaagtttcaacgtttacaagcgtagaagagataaggaaactgatcatccttcatctactcagtatttttttgggggtgttggaaaccaggattgttggtgggcagtagttcttctgggtcttcaaagcccatgtttggacctaactgatgccccccaaattccataccatatgtaccttccaacattttgttctatccaaatgcaattacaacgtagttcttttttttattattatttttaatgaacgagccggcactagaatgtatcaattccattgaataaaaaaaaaacaaaaaactcaagactagttctcctcgtgg

SEQ ID NO: 43848 - DNA, 1922 bp, Oryza sativa
  Clone ID: PAT_MRT4530_46966C.1
atggccggagaggaaggtggttggtggtgtgagcttgctgctgcggcggaggccactcgcttcaagacgtgtttctctctgcttcgttccttctttatcatctctagaatcctggctcactatgcaaaatcccatcttgaccacttgctcctgagtcctgatagagcttggcttggtatggagattctgatttctgctgtggcaggtgaacttatcagccggttcatctcttcgctacaacaatattacagcaaccacacaagcgaggaagatgatcgtacaaggttgcagcggatcttgctcaggatgcactctgttgttgaggaggcagaaggacgccacatcacaaaccaggggatgctcctacagctaaagggacttatcgagggattctaccatggttaccacattctcgacaaggtcaccttccaacccccagaagaagagagcatcaaagatgaggtgattcacgagataaattcatctgccttgattacttcgaattcggccaagcggtttcgttttgctgatgctctaaggaaacacacaccaatttcctttgctagcaggagcacaacaaacctgaaaggtgttgttgaagatttagaaactaagatcgcggatatgagagagtttgtcatgctcctaggcagctaccctcgcctacctcgccagccttacagtacatatctgttcatggataagtgtatgtttggtcgccgtgttgagaaagagaaagtcatcgacttcttgctttgcagtgatcttcctgatacatatgtcagcattcttccaattattggtccacacagaattggaaagaaaactcttgtgcagcatgcttgccaggatgacagggtgaagagctgcttctcccatatatttttctttaaagaagatgatctgaagatgggagagctgttgcttaactccaaggcttctccagggaagtatttgtttgttattgagttcatttgtgatgtgaatgaggcagcatggaccaaattccaatcatatttgcagaatatgcccagtactgaaattaaggttgtaatcattggtagaacagatgatgttactaagtttgggacaacccaacccatcaggatgaagaggctgtctgaagaagagtactggtactacttcaaggcactttcttttggaagcatgaatcctgatgagcatccaaagctagcatctctgggcatgcagttagctactgagatgaatggatcatttcttggtgcaaatatactaggtgaactcttaagagctaatcctaacactcaattctggcagagtatcttattaagcttaagagggtttgtacaaaagaacttgtgttggtttggtgtacaccctgaagatcttcttgaaagaaatacccctgttgatttcaccaggatggcctttcttggtgctcaagttcatggttgcctggtttatgatcttagggtcgctggccctgcacaaaatcagctaccaaaactaacgtcaagagaagtgttattgggaggtaatattcccgtcgaacagaagtttgatgtgctggtatggaaatctggcattccaccatactgtgattacatagctacttttgagaaacagaaaccacggcgtgtggttgggaagaggaataccatctaccactgagaatagacagacacaatcttaatctgggggaaaaatttctagaaagaaattaccttgtctacgcttcgaccatatagtttagaaggctgggtatgcctttcacagattctagctactactgattatttagtcagtttaggtgaaaggagtatatgtgatgctattgtaggttcggatgccttctttcttagagaactgctattgtatctgtttttactagtttgggtatgtaaaattctgttagttactaaaaaaaaaaaaaaaaaaaa

SEQ ID NO: 43849 - DNA, 285 bp, Oryza sativa
  Clone ID: PAT_MRT4530_46967C.1
atggcgccggccaagccgctgctcttggattttgtctctgccgtgctctccagaatcaagaccaagagcaggagcaaggccaagcctgagacaagcagcagcaatcccggcacaaactcattggaagaggatgccaatctgcgcatggattttgtctctgccgtgctctccaaaaccaaaaccaagagcaggagcaatgccaagcctgagacaagcagcagcaatcccggcgcggcgatggagatcgagaagcctgaagaggcggcgcggcccgtcaccatggag

SEQ ID NO: 43850 - DNA, 2602 bp, Oryza sativa
  Clone ID: PAT_MRT4530_46968C.1
ggagagagagaactagtctcgagttttttttgaataggaaatgcagcaaagataataactagcttgcactgaacctcacacttctgaaagagactcttgatgtttcaactatctacgagaaaataatcactaggtgatcaagaaagtgattatatgtcaggcacagcacacaaataaacccaacatgactaacttctactgtccgtgaagttctaaccatttaagcaggggtaccaaatcatcatctgcagggagcataggcgacatgaatctcctattatacactcaaaaaacataaaagcccaagttctcgaaaaaggaaaaaagcagccgccaaaatggccgcgataagacgtcaaaatcaaaggcttatgttgtgtctcatgtctcccttcgggacctccggcgtggggcagcagctccatccttctcttcctcttccttctcgtcctccttgccaccgctgcttccagctgcttcggactcggtagactttggttttttgacctcggctacgggcttcacaggagccgctggcttcttgccgccgaacaggatcctgaagagcacagtcacaaagacgacaacgatggagaccagaattccaatggtgatgttgggctgcttctctcccttctcaattacatcaatgatcttagtcttgtagggttccaagaatggaatgtcagcgagtttgtacagaacgtcaaagatcttcttctggaactcagaaagaccatcacctgctgccgctgctgcctcctcagccttctccttctccttctctacttcgtacttgggcttccaagacttctccaggatagaagtggcaaccttctcatcatcagcgatcaaaatgttgtcaaacaggatgccatcttgcatcgtccagatctcaatcccaatagcggcaatcggatcagagtcaggcttgtcaagctcgaagtactcagggttggggatctcttggggcttccagattcctttgtagttggggttgtcgataagaggcgcatgccacttgcccttgtaagcagggttctgcttcatcggcctcttccactcaccacaaccaggagcctcttcacacttggggttgtcaatctttggtgcttcccattctccatcctcctcatcatcccagtcttcaggcttgttagcctccggatcatcaatttcctctggctcatcatccagccacccctctggctttgtggcctcttcgtcctcaatttccatgggggcatcctcatcccagtcatcaggcttcacagcatctggatcagggattttagctctctcatcccagtcttctggctttttgtcatcaggatcaggaatggtcttggatgggataagtgatggctcaaaatcatcagcagaaaggaagtttgccttcttcttctcttccccatcaaccaaaattctcacctcattatcaggcttcaagatagccgtgtagacatgagagagcttatcatatgggacagaaggtgggaacttgaggtggtgttcaacatacttgccagtcttggggttcttgtgcttaaggatgaaatgcaccttgttagttgatccacatttgtcaggaccaaacataatagtgtaaggagtctcattatcaaactccttggcatcccatgcagcatcctgaggacgaatgtacttaagatatgcacctccacactcaaggccattctgaagcctcacttcaaactgcaggacaacagtcccatccttcaaagtaacaggctcatcaagctccttgattatggcatatttcttggccttctcactaacaagcaggccatagtcttcatgtccatcactcttttcgtgcttccatacacctttgtagtcgtccttcccggagagaacccacctcccctcgaagctctcgtcgaacggctcatagaacagcggatcggaggcgcggatctggacgagcagcgcggagagcagaagcagcggcaggagcgcgcgcccacccaccatcgtcctcccgatctctcgcgagatccagaaatttccagagaggagaagaagaacagagctgcgtctctctctctctctctctctctctccccgtcgcgccgcggcgcattacgccctcgtgctccccttccaggaggcatacggcggcggggttgcccttgaacggctcggccgcgaacgcgtccaccacggcgtactggatggcgttcttgaccatttccggcgaggcggcggcgacgacgacgaatgcgcgggcggcggcggctgctccgaacccacgcgtccgcggacgcgtgggacaacaccattttctccgctgaactctcaagcatacaagagcaagcagatcgccagacactctgacagagagagatgctacgccaagagagtcccggccatcacagtgacagcttctccctggatccggactctcctgttctcgccgtccagctccaagtacaatgttccactccttggcgaagcctgacgaccatggtattgtgccgtttgtacttatcttttttttttcagaaaagtataatgttggcaacaattgtttaccccctacttgtcacaagaaggtagcaaaaggataatacctgaaacg

SEQ ID NO: 43851 - DNA, 243 bp, Oryza sativa
  Clone ID: PAT_MRT4530_46969C.1
atggcggcgatcggtggtgaagacaatgttgccatcaacaacggtggcagagtacaccaaccatggagacaacgacgctcatcagtggcggtggctccagcagtatatgtaaagagacaaaaacaatctctaattagcatcaagaaaattaatcttgtcgatgcggctgctctcgtgccctgtggtagccacgagagcgccgacgatccgtcggcgctgcttcggcgtttgacttgtgcatga

SEQ ID NO: 43852 - DNA, 171 bp, Oryza sativa
  Clone ID: PAT_MRT4530_4696C.1
aaaaacaagttttttgagcaagggtttggaaaaaaaggaccagggggggaacagcattgcgagcataacttaatcgaggacatacaacaagatctagaaagaattggtgggcctccggagatctaaatcgcaggccccggagaattccacaaaacatgcgatagaacaggg

SEQ ID NO: 43853 - DNA, 625 bp, Oryza sativa
  Clone ID: PAT_MRT4530_46970C.1
ccactcgccgccgcgctctctcgtcttcctcctcactctctccagcttccctctcctcgagctcgagatctcttcctcctcctcgatcgcgtccatccatggcggcggccaggaaggagaaggaggaggaggaggaggcgtctaagctccagctgaagccggcggggagcaaggtgttctccaagctgctgtccagggagagcgccgccgcggcgccgtcgttcagggtgtactacggcgtcgcctccgcgggctccgtgcccttcctgtgggagtcgcagccgggcacgcccaagaacgccatgtccgacgccgtgctgccgccgctcacgccgccgccgtcctactacaccgccggcaaggtgtccgccggcggcggcggcggcggaggaggaaggaagtatgggaagcacgggatcctcaggttgttcgtgctgcccaagatcaggctgcggagaggcggccggccggtgtcgggctcgccgacgtcgtcctgcgcctcctccacctcgtcgtcgtcgtcgtcggcctcgttctactcgtcgtactcgctgtcgttcaggagcacgcagtcgccgacgtgctcgtcgatgaggagcctgcaggggcaacggcggcggcggcc

SEQ ID NO: 43854 - DNA, 687 bp, Oryza sativa
  Clone ID: PAT_MRT4530_46971C.1
cccacgcgtccgcaccaccaccacactcaagatcaatgtcgcgatccacggcggcgaccgccgccgtggtggtggccgtggccgtggtggccgcgatggcgatgccggcggctggccagggcgcgccgtcggggtcgccggcgccgccgtacaagaaccacacggtggccggcgccgacgggtggttcttcaacgcgacgagcaacaccacctccggcaactactccgactgggccgccggcgagaccttctatctcggcgactacctcatcttcaagacggacgacagctcgtcggtggttcagacgtcgaacgccaccgcctactcgctctgcgacgccgagggcccggagaccctcatctacagccccggccacggcgacgcggcgtcggcgtccccgcgcgccgccaccatcgccgtcccgctcaccgtcgagggcgccaactacttcttctccgaagccggcgacggtgcgcagtgcgaggaagggatgcggttcgagatcaaggtcgcccacggccgcggcctgccgccggacctcgcgcacccgccgccgccgccgaagccgcgcgtcctcgcgccgccgcccgacgggacgagcatgagcccgggcgtcgccggcgccggcgccggcgccgccggcgacttgacggaggggaagagcggcgggagccgagccggcgtgg

SEQ ID NO: 43855 - DNA, 252 bp, Oryza sativa
  Clone ID: PAT_MRT4530_46972C.1
gcgctagacttggccgccaccctggggggggtgatggtaagatacgcagtggggcgccaaacccacccaggctggccgccgacaccgtcgccgatgcggcggatgcttcccacgctcgtgtcagcgccgggacggccaggggaagagggggagggggcgtcccaggccgcgactaccgagacacgcgccgggccgggttctgagacccatgttaccgagtataccaagggtgccaaggtccggctggagtgc

SEQ ID NO: 43856 - DNA, 253 bp, Oryza sativa
  Clone ID: PAT_MRT4530_46973C.1
ggccagctccggaggattcattaaaattctggggtcgggggaccaaaaacaaggctctctatcttctttaaaacaatctggagccgggatgactaaatcgggggggcccccgcccccccaaagaaggccgacccccacaaaaacgccggcaacaggataccacaaaatcttcccgggaaggttctatgcgggcggcccgtttttacaacccccattttcaaaggtaactccccccatccgattcaaccccccc

SEQ ID NO: 43857 - DNA, 914 bp, Oryza sativa
  Clone ID: PAT_MRT4530_46974C.1
gcacgaggagtttttacaggcccctttcatccaggctctgcaagaaccacccctgttcttcgctttttttgaagaaacagggcttaatcaatcaattattttagttcagattctgcacaaaacaaaacttttttttcttttagttcttggtagcctttagtgttgttgctaatggcggccatagatttgtacaagtatcagctgagctcctcgtcctcgtcttcttcctcggatcaggagctcatgaaagcgctcgaaccttttatcaggagcgcttcacccacctccacctccacctccacctccacctccacgccattgttctactcctctagctccatctccaccaccaccaccactcccttctcctactcgtctccattgccgcaagaatcgtactacctccctgcttcttcgtcctacgccgccattgttccacctccgacgacgacgacgaacaccaccacctccttctcggagctccctcccctgcctccctcctcctcgtcgttcgcctcgccggcgaatgctgcggcggtggggctggctcaccttggcccggagcagatccagcagattcaggtgcagttcttgatgcagcagcagctgcagcagcgggggatggcggcgtcggcgtcggcgtcggcggcggcgtcgtaccttggcccgcgggcgcagcccatgaagcaggccggggcggcggcggcggcggcggccggcggcaagatgtaccgcggcgtgcggcagcggcactgggggaagtgggtggcggagatccggctgccgaagaaccggacgcggctgtggctgggcacgttcgacaccgccgaggacgcggcgctcgcctacgacaaggaggcgctccgccttcggggagactacgtgctccttacttccgcactcttcgccttggg

SEQ ID NO: 43858 - DNA, 6468 bp, Oryza sativa
  Clone ID: PAT_MRT4530_46975C.1
atggcggaagagagagaaagttttgagagatttttccgaggaactctgaacttctatggaattagcctgcatcatctgaatccaaactccatagtgcatatcgccaattttattcatgcctgcgaagcttttctgggcattagacctcattttgctttgttccgccgcatcttcttcctcaagccccagccgaacaagagcaaaccatgcgttgttgggggcgctggtttccaactcagaggaacactaagccaaaagtatttctccatgcccttcaagacctcaaacaaaggctggcacgcaaactggttttacgttcagaatcctgaaccagcactccccgagtactcctgtctccctccggtctgccaggacacatggaattcattgcctatgggagatgaagctgctcaggcagtggaactgatggagcgcatgctaaaactgaaggaacaaggtttgcagggaaagcagatcactcggcacttcatcaaaagtcggctagctccaatcaaagagagatcccgcacggcttttgaatttgatggcaaacatgatccaaatcgtgaagatccagactctcttgactttaaggtcatgaaggaaagaatgtacaagatcttctcaaatgctatcgttgtcagctattcacatctgctgccagttgtaccatacaatgctttcaacccccctccaccggagtttaccttgatgaagtctgatcctccgattacccaacaccgcactccttgtgggaagactagccaaactagtggagggccaaaaatccgttctgactctcatcccaccaccactcagtcggccaaccaatcagatttccgtaagaggaaattggtcctgagtgacgacgatgatgctgaaaaggctggcagcaaaggggtgactggaaaacatccaaggcaggctaacccaaagaagaaaacatccagtcgtcccatgccaaaaatcaggaagtcttctaggaagccatctgacatagatccttctagaaaagactccgaaccgactggcatggagacaggtttttcaaaagagaccgagccgactgcaggggatcgcctgagtgacgaacagccggcaaccgacaatgtaggtcccagcaatgagcccccgactggaaaccagtcggccgaagctagggtcgacgctaatcaggagcccccgactggaaaccagtcgggtacagagcgaaacaaggacatcctcgaagtagaagctcaagttgacaatcctcctaaaaaagatgccaatgtcgatctagggtctagctctcctgctaaagtacaagggcctgctcgtccccgaccggaaataatcacagctcctggtttggaatggtacattcctggtttggagatagaactgtgcagccggggtggttgttcagaatggttgggcctatacaacaggatgccgcgttacaagcctgagtacctgtttggtgttgagggttttgtccaggagttgcgtacgatgtcctttgtcattggatttgggactgcccctttttatgcccagattcctcatgatcgtcatgaagagaagtgccgagtcaaagtcaccttgaacagcaatagtgaagaggtcccctcagtgatgtttgaagctggaggaagaaactacatccatgcatgtcaggaggtggcaaggatcgccataggagagctccgtgatcgctacagtgatcaattggccgacactgagtatcgctaccatcctcgccaacctcagggaagtgaccgtggcagttaccttgagactgaaggaattgagaatgatgttaccacgaaacatttggttgagatgttgtgggctatggatgaaagtcgtgcggagactgtgttagcagctcaagatcgtgaagatcggaatcgtggtaagatttgcaagctagaagacaaggtggatcgtttggagaaggaattagccgcattgaagggagaagcaccgccgcagaaggccaggattcgtcttaccgcaaggaagagagctctatttgtccctcgctatcaactggcgccaaagatggtgaacactcgtagcaatgggaatggtcccaacaaccccaataacaacaacaatggagagaatcccactcttgctcaagttcttgctcaacagacacagcttatgaacatgatgatgcagcaatttcagaatcagcaaaaccaagggaataatcatgcacctccacagaacaagttagcagaatttcttcgtgtgaggccgcctgttttctctagtaccactaatcctgttgaagctagtgattggctgcatgccatagagaagaagttggatttacttcagtgtactgatcaggagaaggtctcatttgcatcacatcagttgcatggccctgcctctgaatggtgggatcacttccgccttaacaggactactgctgaacctatcacttggcttgaattcaccgctgctttccggaagacgcatataccatcgggagtagtgtctctcaagaagaaggagttcaggtcgcttacccagggatctcgctctgttacggagtatctgcacgagttcaatcgtcttgctcgttatgctccggaagatgtgcgcaatgatgaagagcgccaggagaagtttttgggaggacttaatgatgagctttcttacccactcatggttggagattatcctgatttccagaaattagtggataaggctattcgtcaggaggacaagtacaatcgcatggagcagaagaaacgtcggattgctcaattcaagacacaacagggaaataatcagaagccgcgtcttactttaggaccccagcccatgccacagggaggttcttcgtctgttgttcgtccgcaacgtcagttcttcaacaacaatgctggcaacaacatccgtaatcaagctccacgtcctgttgcagctccagcacagcaacaacctgccaagagggagcaaggcaacaagcccgtggtgtgtttcaactgtggagatccaggacattatgctgacaagtgtccgaagccccgacgcgtgaaggttgtccctgcccagaataactctgctgtaccagcatccaaggctcgtgtaaatcatgtcgctgctgcagaagctcaagatgctccagatgtgattttgggtacgttccttgttaactcagttcctgcaacagtacttttcgattctggtgctacacattcattcttatctatgagttttgcgggaaatcatgggatggaagtagaagatcttagacgtcctttgatggttagtaccccaagtaatcaagcactctctttgcaacgtagcccctctgtcagaatagaaattcaaggagtaccatttctggccaatcttatcttgttagaatccaaagaccttgatgtcatcctagggatggactggttagccagacataaaggtgtgatagactgtgccaacaaaaaagtaactctcaccagctatgatggtcgagttgtaactgttcatgcattgtcatctgagtctttaaggtcaagactgaaccagataactttggaagagattcctatagtccgggagtatcctgatgtgttcccagatgatttacctggtatgccgcctaaaagggatatagagttcagaatagatttggtacctggaacaactccgatccataagagaccttatcgaatggcagccaatgagttggcagaagttaagaggcaagtagatgatttgctacagaaaggatacatcagaccgagttcatcaccatggggagctccggttatttttgtggaaaagaaagaccatactcagagaatgtgtgtggactatcgtgcactaaacgatgtgactatcaagaataagtatccactacccaggattgatgatttgtttgatcagcttaaaggtgccactgttttctccaagatagatcttcgatcagggtatcatcagttgagaatcaaagaggaggatatacctaagacagcttttaccactaggtatgggttgttcgaatgtactgttatgtcttttggacttaccaatgcccctgctttcttcatgaacttgatgaataaggtgtttatggaatacctagacaagttcgtggtggtctttattgatgatattcttatctactcttgaaccaaagaagagcatgaggaacatcttcgccttgcattggagaagctacgagaacatcaattgtatgctaagtttagcaagtgtgaattttggttgtccgaagtgaaattccttggtcacgtcatctcagccggaggagttgccgtcgatcctagtaacgtggaatccgtaaccaattggaagcaaccaaagacagtttcagagattcgcagtttcctaggcctcgcaggatattatcggaggtttatagagaatttttccaagattgctaagcccatgacacgactgcttcagaaagatgtgaagtacaagtggtcggaagaatgtgaacagagttttcaagaattgaaaagtcgcttaatatcagctcctattttgattttgcctgatccaaagaagggttttcaagtgtattgtgatgcatccaaacttgggttaggttgtgttctgatgcaagatgggaaggtggttgcctatgcctctcgacagttacgtccgcatgagaagaactaccctactcatgatattgagttagctgcagtcgttcatgcattgaagatttggcgtcattatcttttcggtactcgtacagaagtgtacaccgatcacaagagtttaaagtatatctttactcagccggatctgaacatgagacaacggagatggttggaattaattaaggattatgacatgggaattcattatcatccgggaaaggctaatgttgtagcagacgctcttagcagaaaaggctattgcaatgctacagaaggacgacagttgccattggaattatgcaaggaatttgaaagattaaatttgggaattgtcggtagaggtttcgttgcagccttagaagcgaagcccactctaattgatcaagttagagaagcccaaattaatgatcctgatattcaagagatcaagaagaatatgagaagaggaaaagctattggtttcttggaggatgagcacggaactgtatggttgggtgagagaatctgtgtccccgacaacaaagatctaaaagatgcaattctgaaagaagctcatgatactttatactccattcaccctggtagtactaagatgtaccaggatcttaaggaaagattttggtgggcaagtatgaagcgtgaaatcgcagaatacgtagcagtatgtgatgtttgtcagcgagtcaaggcagaacatcagaaacccgccggtttgttgcaacctttgaagattcctgaatggaaatgggaagaaattggtatggattttattactggtttacccagaacgtcatcaggccatgactctatttgggtgatagtcgacagacttaccaaagtggctcattttattccggtaaagacaacctattccggaagtcgcttggcggaattgtatatggcaaggattgtgtgtttgcatggcgtccctaagaagatagtgtctgatcgaggcagtcagtttacttcaaatttttggaagaaacttcaggaagagatgggttctaagctgaactttagtactgcttatcatccgcagacagacggacaaaccgaaagggtgaatcaaattttggaagacatgttgagagcttgtgctctagatttcggtggaagttgggataagaatctaccctatgcagaattttcatacaacaacagttatcaagctagtttacagatggctccttacgaagcactgtatggtcggaagtgccgcactccgcttttgtgggatcaaacgggagaacgtcaggttttcggaacggatatcctaagggaagcagaagaaaaggtaaagatcattcaagaaagattgcgtgtggctcagtctcgtcataagagttatgccgacaatcgccgcagagatttgagttttgaagagggagattatgtgtatcttcgtgtcacgcctctacgaggagttcatcgttttcataccaagggaaaattggcaccgcgttttgtgggaccttataagattgtcagtagaagaggagaggttgcttatcagttggagttacctcaatctttggcaggagtacataatgtgttccatgtgtcgcaattgaaaaagtgtttaagggtacctaccgaagaagctaatattgagcagatagaagtccaagaggatttgacttatgttgagaaaccaatccgtatcctggaaacaaatgagagaagaaccaggaatcgagttatccgtttttgcaaagtccagtggagtaatcactcggaagaagaatcaacttgggaacgagaagatgaattgaagtcagctcatccgcacctgtttgccagttcttccgaatctcgaggacgagattctgtttaa

SEQ ID NO: 43859 - DNA, 537 bp, Oryza sativa
  Clone ID: PAT_MRT4530_46976C.1
atgacgtcatcaccagcggcgactcggcctcgcacgctcgccggcgaacgacggcgcggcggcacaaatgaagagcatctacgcgatgcgggcgacgcggcgatccttaccgaggcacgaacggctgcggacggtgaccggacgacgacggcgacgaggatgagcggcgacgaagatcgggtcgacgacgacggcgatgttccggcagtcctcggcgttgacggaggggtggacgaggtcggcggcaactcggcgaacacggcggtggtcttcccaagcgacgacgatgaccggagcgacggcggcgcaaggctggacttgcggcggcgatggcccacggcgaccggcgatgggaaggaaagattaggaggaggaaggaagcggccgaatttggaaggggatcggcggctgcacggcaaggctagggcacggctgcggcgactggaggaggaagacgacctgacaggcttcggtacagcatatcccgtcgtgtccgacaactcgttggactcggtcggcgcctcggccgcgatttag

SEQ ID NO: 43860 - DNA, 2381 bp, Oryza sativa
  unsure (1)..(2381): unsure at all n locations
  Clone ID: PAT_MRT4530_46977C.1
agcgggccgcnncctttttttttttttttttttttttattccaaatttccaattgattccgtgaaaaaaaagagatcaagtacagtaaaattcactctgggtatcactatcaggcgtatcaggcttcagagttttgcttctgaagtttgtgtgacgtcagctgacccagctgtgttcttgctcttggcgtcatcgaggtagtgctggtaaacgtaggacaagaatccccagatgccaatgagcatggctatcactttggcaccgtccatccggtcgccgaggaagatcaccgccatgatcggcgacagcggcatccccaccgtgctgatcacgttcgtgaacagcgacgacaccgtcgcgacgagccccaccatgcccatcgtggcgagctgccacgagatggccgtccacgccagcgtcatcccgtaggccacctcgcccttcttgtacccgtccatctccgccgtcagggagctccactcgccggagatgaacagcccggccaccgacacgcacgacgcggcggcgttgctccagagctgcagctccagcacggcgtgtgccgcgttgctcctgagcaccgtgtcgaacgtgagctgcatcagggacaggatcagggcgaacgccgccgacgccgacagcgccaggacgaaccccagcgcgaacttgccctccgggacgctgctgttggtctcctccgaggagtggctcacgccgacgagcgcggcggagaaggtgagcagcacgacggagttgagcacgagcgcggtgaacctctccttgttgaggaagtaggagaagacggcgttgaagcagagctgggtggcgcagacgagggagtacgtcgacagcggcaggtagaggagcgcgtaggagtacatcaggttgtcgccggcgaggaggacgccaaggccggcgtagatggcagcgatcttgagcagcggcggacgtgccaccggggaggcctctggccgccggaagtagagcagcagtgggacggcgagcggcgcgccgcaggactgcaccaccgtcgccagccacaagctgccgccgccctggtcgtagtaaatccggccgaggagcgtggccacgctctgcccgccgaggacgaacacgatgttggcaaggaccaccgcccaccaccgcagccgctggctggacacaggcggcagcggcgccgccgccgccgccgccgccgcagttccatctgctcgagacgtgctcttgtcagactctgctaccacgtcttcttggcctcggacactatcacccgatgaagccttcttcgctttcttgccatctagatagtgctgaaacagatacgaaataaatccccaaattgcaatcagcatggccacgatcttcaccccgttcatcctgtcgtggaacaccaccaccgcgaagaacgggatgaccggcagtgacaccgtgctgatcacgttggagaagagcgccgacacctcgaagatgaggccgagcaccccgatgttggccacctgccacgacacggccgcccacagcagcgtcatcaggtaggagaactgccccgacctgaacgcgttcatctcccccctcagcgacctccactcgccgctcgcgaacagcccgaccaccgacgcggccgtcgccacgagcgccgtgtagatctgcatgttgaggacggctgagaaggtgtgcttcttgatgatggtctcgaaggtgagctgcatcagcgcgaggatcagcgagtaggtgcacgacgcccccagcgtcagcacgaaaccgagcagatacttccctcccgagacgccggtgaccccctgagactccttgctgactccgatgagcgaagcggacatggtgagcagcacgacggagttgaatatcagaggagtgaccttctgggagttgagcacgtatgagaagacgacattgaacgcgagctggctggcacagatgagcgagtaggtcgaagcggggaggtacttgaggccaccagtgtacatcatgtcgtcggcggcgatgatgaggcccaggacgatgtatatcacggcgagcttggccatgggagtgttggtgcaggaggacggtgacttcgaggggaagaagaagagggtgaagaacagtatcgggaagccggccgtccgcacgaacgccgatatccacttgctgcggccgccttgggtgtagtagtatctgcccagcagtgtcgccgatgtctgaccggcgatgaggaagaagacgtccactgccaccatcgcccaccatcgaaatggcttgcctgctggtgtttccggagctgctgcagcttcagccttggatggagctgggatcggtatctggacctcggcgttgttcgcggcaccgctactgttgttgccgccggcgttactgtccgccat

SEQ ID NO: 43861 - DNA, 637 bp, Oryza sativa
  Clone ID: PAT_MRT4530_46978C.1
atgatcaaaagtgctaggaatgtgggttttgatgcttgcaaatgtggtgatggaagggttggtgttatacatgatgctgcacttgttaccatgactaaagtggaaggcttacattcaagccaaaaatgttaccatctagcatcaaaacacaactgccatctctttggtggaacactcttgatgtggctcttcagggtaattagatgctttaataccaagagtgatatgtatgcgattttttatgctggtgatgctaatggtgtgatggaaggtgagataagaccacagagccagtcatcgctatgtctgaaagcatatagactatttcccagctgtttacaccccggcaaaacaatgttcaatcttataagtttagtttcagtgaaactgtttcctttgagcatgcatccaattagcatacatgtaacatttggtaaaagaactttttggcacttcgtagaattactaaatgcgacttctgatggtgagataaggccacagatccagctatcactatgtccacaaacatgtgcgaatccccagttgtttactgcacaaattcaccccaacaaaaccatgtttaaccttgtcagttctttgttagcaagaaaaaagcatgtcatctaatggggtgtgg

SEQ ID NO: 43862 - DNA, 311 bp, Oryza sativa
  Clone ID: PAT_MRT4530_46979C.1
gcccgcacaagcacgaagtttggacgctggagctgcgggccttccaccggtggtgcaaggctgggatgcacagcagggcgtgcaatggatggacgaaagggcctgccggtggccgaggccgccacgcagcagtctgccgcactgcgccagagatccagtacaacgtgattgcccccatgcgctgggagtccgcgcacctcgatgtgctcaagcaaagcgcggccggtttgtggattcgcaagcaggatgcggtgtacgccgatgcgatcgtgctgcgcgatgactggccatcctccattaggctggcatga

SEQ ID NO: 43863 - DNA, 2017 bp, Oryza sativa
  Clone ID: PAT_MRT4530_4697C.1
atggcccatgccacgctcggctcgcctgagccggcggcaaagcctcggctccggtgcgccgacggccgccaccgccgccgccttatcgtcgtcctgtgcatcgtcggcgtggcgctcgccgtcggcgtcgccgtggcggtggcgatcgccgtcttggggaggtcgaggatgacgtcgtcgtccggcggtggccgggcgccacgggggcgcgcgccgaccgaggcgatcgcgcgcacgtgcggggtgacgctgtacccggagctgtgcgtcggcgagctcatggcgttccccggcgccgccggcgccggcgacgccgagctcgtgccgatgtcgctgaacgcgacgcaccgccgcgtggtggacgcgctgtacaacgcgacggcgctcggcggcgccgccgcgctgctcgccggggcgcggtcgggcgccgcgtacggcgactgcgtggagatgctcgacgccgcggaggagctcctcgcgcggtcggtcggcgccatcgcggcgccgccgccgccgccggactcggtcgacgccgacacggcgggacgggacgacgacgacatcatgacgtggctcagcgcggcgctcaccagccacgacacgtgcatggacagcctccaagaagtcggcgccggcggcgacgccggcgacgacgacggcggccgcatcaagccgcagatgctcggctacctcggcaacctcggggaacacctcagcaacagcctcgccatcttcgccgcgaggggaaggcccggcggcgagctctctgatgtccccgtccacaaccaactccacagacggctactgaccatcgacgacgacgacgacgacgacgggagcttcccaaggtgggtgagacacaacgaccggcggctcctccaggcggccgccgccgagatcgaggccgacatggtcgtcgccaaggacggcacggggactcaccggaagatccgcgacgcgatcaaggcggcgccggagcacagccgtcgccgcgtcgtgatatacgtcaaggccggcgtgtacaccgagaacgtcaagatcggcagcaagaagaccaacctcatgctcgtcggcgacggcgccggcaagaccgtcgtcgtcggctaccgcagcgtccacgacaactacaccaccttccacaccgccacgctagcggtggccggggcggggttcatcatgcgggacatgacggtggagaaccgcgccggcgcggcgaggcaccaggcggtggcgctgctgctgagcggcgaccacgcggtggtgtaccggagcgccgtgctggggtaccaggacacgctgtacgcgcacgcgcagcggcagttctaccgcgactgcgacgtcgccggcacggtggacttcgtgttcgggaacgccgccgtggtgctgcagaactgcacgctgtgggcgcggcggccgctgccggggcaggagaacacggtcacggcgcaggggcggcgcgacccgaaccagagcaccggcatctccgtgcacggctgccgcctcctcccttcgccggagctcgagctcgcgccggcggcgcggcgcggccgcgcggcgacgtacctcgggcggccatggaagccgtactcgagggcggtgtacatgatgtcgtacatagcgggccacgtccacgccgccggctggctcgcctgggacgcgtcggggcgcgcgccggacacgctctactacggcgagtaccgcaactccggccccggcgcggcggtcggcgggcgcgtgccatggccgggccaccgcgtcatcaagctgccggaggaggccatggagttcaccgtcgggaggttcatcggcggctactcctggctgccgcccaccggcgtcgccttcgtagccggcctgaccgtgtgaggcgactctcactgactcatggtagcttaagccaataagttgcatttgctaattgggagataggtggtagtaaaagtaggtgtaatttttcaagtatgatgtaatcatctacacatgctaactgcttcaggaagcttatgattactgatta

SEQ ID NO: 43864 - DNA, 2448 bp, Oryza sativa
  Clone ID: PAT_MRT4530_46980C.1
atggggccggcggcgccttctgcagaaataccatattctcaatggaaattagaaaggaaatacaccagttctgattttgcacaactggtggaagtaacatccccaaacatgatgcaatggtttgcagatcttggggccaatatggagagatcagacatgtccttctctgtaagaacacaattggatgcttgtggtgaatgtgaatgggccagcagcaatggcatctcaggcctcttggcaaagaggagtaatgcgctcagccccagcttttggcgcatgatcagtgagacactcaagttcaagagggatgctctcagtttccaatctgtggttggatgtggtcatgtccatcacaaagagttttgggcttctctgcttcctctgtgctgtcgttttttcttgtttagtcgcacccagccgctcattgtcaatggtcgctctcagtcctatttcaacaaggtaagagaagatctggaaagcaggagctgtcgaataaaaactaactgccatgtgaaatccatttcaagttttgacagaggttacagagtcttagaggttgatggttcagaggagatgtatgacagaatcatagttggtatccatgcacttgatgctctaaaattactaggagcagaagcaacacatgaagaatcaagaattcttggtgcttttcagtatgtctctagacatcttagcgtgattgtatatcagggagcaatcccaatatctactcgtaaacatgtccatctttgcatcggggaggacagtggcagtggtggctcgggcaagttcaaggtggtgctccctccccttgcgctggtggtcgatggatgtggtggtgatgactggattggtgagaccagggagggcagggaagggagcttcccggcactgacattggtggatgacgtggacagaaacatgggaaagccactgaacattgaatctacaaatcattttctcgtgacattgaacccctcttatgttcctgatcatgtgttgcttaagtggaatacaaatcattttgttccgactgtggctgcttcaaaggcttctcttgagcttgatcagatccagggcaagagaggatctggcttccatgaagatggattccaggctggcaaagcagcagctcaaagtttgcttgggaacaagattgatcccctgacgaacccaaagcagatggtcctgtcatggacagagactggggcacgtcttctggtgttaagatttctcaaacagtacatctctgttggcaacttgatcttgtttgaagaaggtggcactatgttcagttttggtgaagcttgtgaaaaatgcaataaaaaatctgttctgcaagttcaggacccactattttattggcagatcctcattgccagtagagatgcacacaggagttcttgcaggaattctagtcgaaggggttggtggacacccttgctttttactgccggcgttgcatctgctaaatattttctgcgtcacatctcaaggaagaactctgtaacacaaactcgtcaaaatgtctctcagcactatgatttgagtaatgatttcttctcgctttttctggataagtcaatgacctactcatctgccattttcaaggatgaggaagaaagcttagaagaggctcagctgcgtaaaataaaccttctaatccataaggctaaagtgggacaggatgatgaagttcttgagattggtagtggttggggcagtttggctatggaagtggtgaagcaaactggctgcaaatatacaggagttacacagtctgtggagcaacttaaatatgcccaaagaagggtgaaagaagctggcttagaggaccgaataacttttctgctgtgtgactaccgtgaaataccatgtcacaaatatgacaggatcatatgctgtgagatgattgaagaagttggtcatgaatacatggatgaattctttggctgctgtgagtcccttttggctgaaaatggcatatttgtcacccagtttatctcaattccggaggaacggtatgatgagtaccggagaagctcagactttattaaagaatacatattccctggtggatgccttccttctctgactcggataacatctgccatgtctgctgcatcaaggctctgcattgagcacgttgagaatattgggtaccattattatacaactctgatacgctggagggacaacttcatggccaataaagataaaattttggccctgggctttgatgagaagttcattcgtacatgggagtactatttcatatactgcgcagccggttttaaatccaggacacttggagactaccaggcaagtactgtactactattgtattctctcgtcctgggaacaccaagatgggatctggcttctaaactcaaaattgacctctgccctagagcacgagccaacctatttatctttgccattgtgtaa

SEQ ID NO: 43865 - DNA, 666 bp, Oryza sativa
  Clone ID: PAT_MRT4530_46981C.1
atggaagaagcatcagatcgcaacaaactggtttctggttgcctgacccttccatgccccgaaaggatgctgtcgagctccacgccaccatattcctcgtcagcatttcatcgaacaccttgttggcgtcaacctatcgtggtcgccgcccgcgagccgccgccgccggtcagcccacgcccaccagctgtcgacgccgccgccgccgccgggcagcccgcgagctgccgccgccggttagcccgtgagctaccaccgcagcctgtcgacaccgccgcccgcgcgccactgccaccgccatcgcccgtgctgccctcgccaccgcgtgcccccgctgctgcggacgcggcctgtcgccactgcgtgccgccgtcagccgccaccgccgacgtttgggcccctgagttgtcagtcgacaacagggtagccttactccttgaatccgtgcccggcgagatcagagatagcactttcgtctctcctgacagtatccggagacaccgtagggtactagccgtgcttatccctgaagtcgatatccggcggcgtgtcctggtggatataggcttttatgttatggcttctatgtcgattgtgttgggtgttgatcccttcatggtgggtgttgatcgtctcatggtcatgggtgtccccctgtcctcctag

SEQ ID NO: 43866 - DNA, 124 bp, Oryza sativa
  Clone ID: PAT_MRT4530_46982C.1
ggcagattgccattaacttgtatgagtaagatatatcaactgggggtacatgtaactgcacataagaaatttgcaattgcatatgctatcatgagtattcaatcacttgttcgagctcctcagc

SEQ ID NO: 43867 - DNA, 190 bp, Oryza sativa
  Clone ID: PAT_MRT4530_46983C.1
cagtgagaaagctaagcacacacatgcgcgctcacagtgactcggagataggcgaaggacattgagagcggctgctggctgttgaacggcgcgcgagtacatgggcgaaggactacttccgaccccgccgcctggtgccagttgatccgtctctcgaggagctggaccaagtcggtccctgtacccgcgc

SEQ ID NO: 43868 - DNA, 605 bp, Oryza sativa
  Clone ID: PAT_MRT4530_46984C.1
gatcgtaaatggtatttcccactcaaaaagttagccaatgaggtgaggggctcctcacttatatattaggtcacttgcccttccacaaccaatataggactattcaacaaactccccctcacacattggtgtctctcagccgttcactgccccttcaccgttatccccacagtcaagctagccaatgagatcgtaaatagcctttctcaccccaaaagctagctaatgaggtaagagactccctcacttatatattaggtccattacccttccacaaccaatgtgagactatccaacaactacttaatatatatctgttgcttcaacagtgttccagaaaaaataatttcagtgcttgtctggttgtttctgcttaatcacattctactttttgacaaaattataactgatatgttgggatctagttttattggttaagcaggcattggaggtggtgcgctacggtgacgagttcgctacccatccacgtcgtccccatcgaccgtcatcgcggtcaaccggagccacacatccctccccggccatcgcgcccaccgctactcgccgccggccggagtgacctagccatgcgcaccgccactcgc

SEQ ID NO: 43869 - DNA, 500 bp, Oryza sativa
  unsure (1)..(500): unsure at all n locations
  Clone ID: PAT_MRT4530_46985C.1
gtcgctgtccctaagaagccagggaggttccaccaccaccggagttcacggggtcccagcagctggatctagccttctcaccgtcgtcttgcatgcccctcagcggcgagatcggtggtgtgcggcggcgggaaggaggcagcccgtgcccctcggcgatcggaggcggcatgcggcggcgggatggaggtggtccgcgcccctcggcggtggtaggcgaagtgcagcggcgtgcggcgacgggacggaggcggtctgcgccccttggcggcgggaggcggcgtgcggtggcgggacggaggtggcccgtgtcagatcgccacccgccgcaggagacatgaagcatgatggcttggatcacagatcctgagctcagcccattgtttgccaccatcaccctgcccttgccgcagtcgccattgttgtcgctagtcccaagttctggccctcgttcgataatgccgacccaccccttcccctccgtcgtgttccgcattgnt

SEQ ID NO: 43870 - DNA, 186 bp, Oryza sativa
  Clone ID: PAT_MRT4530_46986C.1
atggatcccgacaaccgtgagaccggcgagagaagactcgaagaccctagcgttccgctccttccaaagctgccacgatacaagaaataccagagagtcaaaagctttgtgaaggcgggacaagcagcagagcaaggcagagaacactacaaaaggccatggtacgacatggctgaggcaaactag

SEQ ID NO: 43871 - DNA, 702 bp, Oryza sativa
  Clone ID: PAT_MRT4530_46987C.1
atgagcgtgctgcaaagtcaggcgaagttcaactggaagactaccctatatgtacacacaggagaaggaaattgtatcgagcccaacgagatacttagaacgggaaccttccacgtgtgcttgaacccgctcgccggcgttgcgccgcgcccagaggaaccgcacaccgtcgtcgacgggaaggagaagaaggaggggaaggggaaggcccccactcctgccagccgcaggtgcacgcggcaagcggctgcggcaactgctcaagtcgagctcgccctgccgccctgccgccgccgtcgagctcgcacccgccccgctcgcgccgagctcgccgacacctcccccgcacgcacggccgcggtaggcgaccactcccccgggacgcggccggcgacacctcccccgtgcgtgccgagctctccaatgcctctggcgccaatgaccagcgggaagggagaccgggcgcccgctgttgagaaggtgatgctcatctcctgcaccggcaccacggccgacgtgttgtggcaggacggcacattgcggcgcggcgtgccgtccttggagttggtgtcgttcgacatcctcaacaaccacgagttcttcccgggtcagcacgtcgacgttgacaccatggcggtggcaacaacaacgacggcgaggcgcgtcggctttgtcgaggtccacgacggcgcgacgtcctga

SEQ ID NO: 43872 - DNA, 260 bp, Oryza sativa
  Clone ID: PAT_MRT4530_46988C.1
gatgcacgcacgcgtacgctaggtagccactctatttggggcggcccgccctttttttttggggggaatctggtcgctaccggcacaaaatcaatacaatcaatctatgtaagcactgcaccgaggaacggacacaacgcatgggccacaagatcaaaccaaaacgtgacagtacaagcgcagccatgggacgaaggcaaaaggtcgagaacttgacaaggacggcgagagaacaccagagcaagcaaaacaccccaaaa

SEQ ID NO: 43873 - DNA, 396 bp, Oryza sativa
  Clone ID: PAT_MRT4530_46989C.1
atggccgtgttagcaactgcctgctggttggtgatccgtttggtctttgtgaaagggaacaccgatcgtcgcccatgcgaagcagacgggatgaggatggtgccggggtccaggggcctccctatcatcggcgagacgctcgagttcctcgccctgagcccctcccttcagatccccgccttcttccaacgccgttttgatatgatcattggcaccgacagtctgatcaggacacacgggttgttacacaggcatatcaagaacctggccctccggcttttcggccctgaaaatctcaggcgagaaattatccatgatgtgcagaaaacggtggaggctagcctttcctcatggcttaatcagccaagcatcgagctcaaggaggcagtctcaagc

SEQ ID NO: 43874 - DNA, 438 bp, Oryza sativa
  Clone ID: PAT_MRT4530_4698C.1
atgaagatagtgctcaaggtgccgatcacctgcaagaagtgcaaatcctgcatcctgcagatcgtctcaaggaacaaaggggtcaagtcgctgacgttcgacgacgagaagagcacgctgacggtgatcggggaggtggacgtggtggtgatcgtggacaagctccggcacccgaagaaggggaaggagaagagggaggggtacatggtggaggtgatggcggtgagcgacgagaagaaggaggccgaggagaagaagaagaaggacgaggaggagaagaagaagaaggagaaggagaaggaggaggaagagaagaagaagaaggagtgcgccgagaagctcaagcagtgcgccgagctgcagcagtgctgcagggcgtgccggccctactacgtcgccgtcgacgaccacccaggctactcctgcaccatcgtctga

SEQ ID NO: 43875 - DNA, 1534 bp, Oryza sativa
  Clone ID: PAT_MRT4530_46990C.1
ggttcaacctcgtctcatagctatgaaaaatccttgaaatcatcatttctttacaggataaacaccatatatttatgaaagttcgaacttaatcaaaggcctaacaactaaaaaatacaagaaaaacaacaaccaaaaaaggatctagatcaacataagcaaccactgagacagcatgggttacgacaccgtgggcatcgacaaccctctgtacaattcttgcaagaccagacacacccacaggaacattcagggcacgacggtttcgggaggctgcagcagtgtccctcgcagcaggaaggctgcccctcgcagcaagacgactggcacttgcagcacgaaggctgccgcttgcagcatgacgactggcagctgaagcactgcgtcgtgcaggggcacttgcacaggctcgagcagcagccagcgcaggagcatttgaagatgttgaagcagctggagcaacgagggcacgagcaggagaagcagtccgcgcagcggcagcactgctcgccgcagcagccgttgcagcttggcttgcagctacagcaattggtagagcacgagccacaatcgggtttgcattgggcgcaagagcacgagccgcagccgttgcaaccgcagcttggaaggccacagccgttgcaaccgcagcttggacagccacaaccgttgcatccgcagcttggacagccacagccgttgcatccacagcttggacaggcacagcccttgcagctacagcttggaagggtgcaagtgcagcaattggggctagagcagttgcactgggacttgaagcatgaagggatcttgaagcagctgtacagggatttgaagcatgaaaagatgttgaagcaggtgcagctcggtttgcagcacgatgtatcgcagcatgagctgcagcttggacaggagcacgagcagttcggtttgcagcaagaaggggtcttgcagcaactgcagttaggtttacagcatgagcagcagtctggactacagcatgacccagcgcagcacgcactgcagtttggcttacagcatggctcgtcgcagcatgagctgcaagaacaattgaggcaccttggtcttttgcacttgggtgagcacttgcaacagtagcaaagacatgaaatgcagatacacaattttgatccgatccaccgaaaaagacggcaagatctgtgcctccttctctttgttggtattagtgggtcatgttttgtaccaacaaactcatttatcctgacaagtaatgtaagaggacattagcaactctttaatgcatccagaacgagaaacgggctgagctccttcaaggaagtgaagctcatccttgaggaacgtgatctcgcggctcaggatctgcacctccagctgcatccgccgccggccgcacaggtccgggtacctcggcggcgacttgggcctcggcgcctccatcaccaccgcctcctcccccatctccacacgcagcacgccaacggccaactcagaaccacccctcgccgccttcactcgtgccgaattcctgcag

SEQ ID NO: 43876 - DNA, 360 bp, Oryza sativa
  Clone ID: PAT_MRT4530_46991C.1
atggaccgcaacgcacggattggggtctccgtctcggtattcctttcgctcgcctgcctgccttgccgccctccgccaccacagcctgtgaccaccaccaccaccactgccatccctttccgtcggcgtccctgtcgcccaccgtggctggactggaccatctccgtctccgtctcgctgtacgaacgtatccctgccgacactgccattcggtacggcgtgatccgtgcgtgcgcaatggtgcacgtaattatacagtgttacaaggatcaagggacacggcgtgagcgttgtaaaggggcgcaatctccgccggaatcatttttagtggcgcctaatgattggcaacagctggagtag

SEQ ID NO: 43877 - DNA, 176 bp, Oryza sativa
  Clone ID: PAT_MRT4530_46992C.1
tcctgcagcagaagaagcagaagaacttgtactgctccaattcacggattcgtccgacaaaaaactacaccacagactcgaggcatattctgctctcagttcacacgacagtcagcaactacgaaacaaaaagatggggcatagcggacaaagatgacaacagagaatttggataa

SEQ ID NO: 43878 - DNA, 276 bp, Oryza sativa
  Clone ID: PAT_MRT4530_46993C.1
gcaaatcttctttccaaagcagaaaacccttccacatcaaggccatttggcataaaggccatctgccccctttatgcgtcctgcgagcattgcgttgcagtttcagcacaaacacgcccattgtggttatgggcatccaccagcatgggtggatcctagaaagcaggcacggtgcaggcgagtccccactattagccaattaccgcccctaagcaaggaagcgttaccaaggggggacatccccaaccaaacaggaattaggggcccttctttcaa

SEQ ID NO: 43879 - DNA, 449 bp, Oryza sativa
  Clone ID: PAT_MRT4530_46994C.1
aataaaccaataattttattttttattatgttacatgtccttatttaactccctgtggaaacgcaaacaaaaaccataagctcgacataccttttggggggaggataaaaatgcgacatggggcattcatccccacacagaaaaagaactggtttcaataaataccccccataccgggatgatgattagagccgggaagaacaaccaattggggccaccgagaaggaaaaaaagtttctgggcagagtatgcaaaaaagtggggtcaaggaaaaaaatgggcgcactgaaagaccaaatggctcccgtaaccatagcccatcttgtgttcagggctgcacacgaacactttaaggggccggacatcgcatttgcccacgctgaccttgacctttccagttttaaagttgcttaatcccaaatgatacccccccaactttttaaaaacag

SEQ ID NO: 43880 - DNA, 1647 bp, Oryza sativa
  Clone ID: PAT_MRT4530_46995C.1
atgaagatgagtcgtttctgctctgtggttggcatcgtttgcggctccccgtcgtcttcaggcgatgaagcttttgcttcccatggcgagcagcagcaggcgacgacgacgacgacggcgcagtcttctgggaagagctcgagctcgaggaggaagacggcgccggaggcctccggcgagcacaaggcgggcggtgaagcgccgccaccggcatccaagaagacagcattgctcgacaagggcaaagagaaggtatcagaaatggacacttctgtcaggagaaccagcaaaggaatatcaggcaatccatcagaggattccaacgaaccagtggctaaatctccgacactgaagaccgtgatcggcagcataaggaactatattgctaccaaaaagggtagaaaaataaagatcctggcctttgaggtagccaacacaattgccatgggttccaacctgatgaacttcctctccgaggaaaacataaggtacctgaaacgtgttgtgcttcagaaccaaggcgtccaaagtctgatctcagatgatcagagccagttgcttgctcttgttggggatgaaattagacaacagttcaaagattttgcggcatctgttgctaggcttgggaacatgtgcagggatcccaaatggcacaatcttgaagggcatttctctggattggagtatggtcccataactcaggagtattcccatgaaaaagcagcatccaagatggaggatctgatggaacttgtgactaagacaaagatactgtttgaagcattgcgccgattgggagtctccgagaagatgtacagggaagccaagcagacaggtatgccacttgagactttccaaaatgcggtgaacattgaaaaagaaatcgtgcaaagcgcaaagaagaaagcactttgggtcaagaagattgaaaaaattgtggaggaacttgtgtacattgtgcattacttgccttctgagatcaattgtgtcttctacaaggaacatgaagaggatagatctgtgaaggctaatgggagccctcagcaaactttagggtctgctgatctccagctgaattacgcaaggatcgttatcgccatacaagttttggtatccgtcgcatcatcggttccgcaatgtgctgtagattcattgttccatgcactgccttatagaatcagatcagttttgctacctaggatgagacacggcgattttgacgaccagaggacagaaacgcagatcgccgatgagatgaccaggagacttgaatggctctatccaatggcagaatttacaataaggctgtctcagcacactggaatgatcagagaatgcctggtatcagggagcctcagtgaccgtgatcaacgtaagatgctcaaggttcagacactgtaccatgctgataagatgaagactgatggctgcatcattgacatggtgatggaccttcatcttctcataaaagccgcgagactgagggctgatgcgccgcaccatagcggtcctcttgatcaaccagtgagtaccagtggatcatcaaccagctcggctagcacaggcatcagtggatcgaccagcttcggtaacattagcaccacttggtcagatattgatgaagatttcatcgccgtgatcgattag

SEQ ID NO: 43881 - DNA, 1475 bp, Oryza sativa
  Clone ID: PAT_MRT4530_46996C.1
ggcacgagggagagagagagagagaactagtctcgagtttttttttttttttttttttttttttggttgttttttttttttttttttttttttttttttttttttttgcaagacaatggtgggataacaaaggtagcaaccacccattggtattaaactgatgatctccaacaactagcagattaatttctcaagttaaaaaacggctagagctaacaaagagttcatgacgcctaactagattctgctttcgttttctcagcatctaaggctgagagcccctaaaagctcaatgcagcagattgagatgtgattatcagctcacttctacgaccaaggagcccgcctaaaattcaatgagacagattaagatgttcttcactatcagcttacttctacaactgaagagttcctaaaactaaacgcaacagatcgagacgttcccgaccaccagttcacttccttgggtgtggaacagaattcctcagctgcatgaccttcttatgagaattggagtgtatgtcactcacaaaagttggactattagcaggcctgtattccggcagcagcctgccagacttgaacctcacaccgcaagcattgcatagcgtcttaggccccaagggaccggtcctccactgtggcgtcttgtaggacaagcaatgggtgcacctcttcattggctcctccgatagcagctcatcattcacataaacagccttcttgatcttcttcttatctcgccgctttcctatgtcctgttctttgtcaatctcttggccatagcgcttcttggaactggtggtgtgcccattcctcgcctcaatcctcagacgacaagcatcgcaggtaggccctgatggaccatcccaccactgtggtgattggctggacaaacaatagctacaagtgatcaccagttgctcctgctggaattgcattcctgcactcattttgtaattctcttcctcctcttgttcttgctcttggacaagttcttcatctttgtccttcttggggaggataagctcactctctgctagccagtccttatgatcgagcaggagtagcggtggctcgacaaacagcgtgatacaatgttggtcatcagtgtcgcttatgacagatgccaggctccttttcttttttcttgcattggtagatgagcgtggtggtaactttggttttgcagcaccttgacttgccattgtaataggcggtagttctgcagagacagggtttgtgcaggatgcagaggttgacaagcagtcctctacatagacagagagccactctatgccacttctatcactttccgtggcgggctggtgcgggaacaactcctccagcgaggaggcggccgcattcggcgggtgcacatccatgcccagcgacgaggaggagcagccgcacggttgaggagagagaaagaggagagagagagagagagagagaagcggaggaagaagaggggt

SEQ ID NO: 43882 - DNA, 670 bp, Oryza sativa
  Clone ID: PAT_MRT4530_46997C.1
gagagatctaaagtcccgcggcaatgaatatcattttcgtctttgctgtccttgctattgctgcatgcagccgcctgtgcacgacttgatgtttaccgtcaaagtatacagcatatcagcgtgcatcgcctgacctgctacagcgcaggagcgtatcccatataatgagcccagtaaggcacgcagtgctggactactcgttagccccttcttgcttcagctgcctattaaactgagaaacaaccgagtctggcaacgagcttgcgctgcaaggcgcaacaatctcactatcaggacattaacattgttcacgccatagcgcatcaactacaactccagcagtttgaagatctctactctgatcggaatcgtggctcaagctcaagctctgctggctgtgaacgtgccatctagatatggtatctaccctacgaactatggtgcacccggtaccattaccacccttggcggtgtcttggaatgagcctgaacagcatatccgctcggaagttaaaactaacctcacatatcatcatatgcgacatgcgaaactgtgagcgatatatatagaagataagacgactgtcatagctgagttaggatcgaacccacctatctcagatgatattttgatgaaggcgtgtcaggtggataagaagatcatagattt

SEQ ID NO: 43883 - DNA, 377 bp, Oryza sativa
  Clone ID: PAT_MRT4530_46998C.1
aaggaaaatttaagcggcaattaaggaagtaataatatagttggaccaggaaaaaagtacccccccccccgttaattaatccccccaaagccaaggatgtaatggtcggaaagggctcggtctccaccccacaccaggggggggcaaaaggggatccccccccccaaggcgaactggcaaacctcaatgcccgggtcgggggcaaacccggaattgaggcccctgagggcgacggaaaacctccggtccaagtcccacaggggggtgtccgggggaagcgccaccgggccggcccacaggggggtgtcgaacacaaagggccccccgacccccaccaattggaaaaactgctcggggaacttgacgtaattgggctt

SEQ ID NO: 43884 - DNA, 186 bp, Oryza sativa
  Clone ID: PAT_MRT4530_46999C.1
atggcatggcaaagaggaggcggcagggaggttgagcgcagccacatgaggatggatgatgaggacattactcctttggatacgcaaaatacttctcatgttttcgtacaagcaacaaggtcaatcggtttcgacatggttgataaccagagaagacgtggtgctgcaattatagggttcggatag

SEQ ID NO: 43885 - DNA, 695 bp, Oryza sativa
  Clone ID: PAT_MRT4530_4699C.1
gcgacactacaaaccaatcagttaatcccaagtatataatcctaataaaatctcgccgcgacgatgaagatagtgctcaaggtgccgatcacctgcaagaagtgcaaatcctgcatcctgcagatcgtctcaaggaacaaaggttttgtcactagttgcttctcttcctagctttcatcaccccatacaatgcactactgctcatcgccgtcgatggttgttggtggcaggggtcaagtcgctgacgttcgacgacgagaagagcacgctgacggtgatcggggaggtggacgtggtggtgatcgtggacaagctccggcacccgaagaaggggaaggagaagagggaggggtacatggtggaggtgatggcggtgagcgacgagaagaaggaggccgaggagaagaagaagaaggacgaggaggagaagaagaagaaggagaaggagaaggaggaggaagagaagaagaagaaggagtgcgccgagaagctcaagcagtgcgccgagctgcagcagtgctgcagggcgtgccggccctactacgtcgccgtcgacgaccacccaggctactcctgcaccatcgtctgatcgcgagccacggatctaacccgctgctacattctctggccttcaaggctctgcagattcgtgtgtaaatcgtgttcatcggtttcgaagattcagccttgatgct

SEQ ID NO: 43886 - DNA, 157 bp, Oryza sativa
  Clone ID: PAT_MRT4530_469C.1
ttttaacaccaacgcacgcattctggacctagtattcgcttttcaaacgccaggggagcttccaaatcacttacctaccattctacacactagaatgctcattctcaccaagaacacagttgttgcagcacattattacatgatccacgaatcaccc

SEQ ID NO: 43887 - DNA, 688 bp, Oryza sativa
  Clone ID: PAT_MRT4530_46C.1
tggagaagaagctaggaagctccctgaaaggacaaacgaaatggctggtgtgtacccgagtcagtgcatagagctagccagggaaatgaatatacactgcattgatatttggtcaaagatgcaagagaccgcaggatggcagaaactttacttgagcgatggactgcacctgacgccagaaggaaatgctgttgtccacaaggaagttgtccaaacgttgagaagtttttgtctgaaagcagaagaaatgccatatgatttccctcaccattccagaattgatggtagttgcccagaaaaagccttccagtgaagtgtgatgccttgaatagcttgtggtgcggttcatctggagatctcttttcctctttgaattaggagaaagatcaaattaaagacaatgttttactgcttctatcatgagcttttggagtgaggaatttagcacccatttttactctggaagaaataaagttctcttcttgaaacccccctttttgggggtgtgggcaaattttctgggggccccttcttttttttttgggggttgggggtgttcctttctttttggttttgtttttgtcttccagagtataaaaaaaaaaggggcgccctttttgggggtcccaattttctttccccgggctggcggggtttaacctttttatggtgcccctaattttatttc

SEQ ID NO: 43888 - DNA, 180 bp, Oryza sativa
  Clone ID: PAT_MRT4530_47000C.1
atgagtgatcaagttggaattcagggcaaacgaggatggatatcgaactggttggaaagggaggcactaggaactttagctggtcagagacatggacaaccttgctggcttttagctcatggcattttcagtttcatcgatgtactggacgacgcagaatgtgaaaggctaggcagatag

SEQ ID NO: 43889 - DNA, 225 bp, Oryza sativa
  Clone ID: PAT_MRT4530_47001C.1
atgtgggcgtgcggcacgggcggagtgggcgcgggaagcggggaaaccggcggcgtgggtggtggcactgccgtcggttggaggtggaagaaggggctgacagggaaaagaacttctgggcgcaacatggagtcagctgacaagtatgccagccatagaaggaagcgtaggatccttgacgcgctgcgtgtccgcatgctcgctgcgaggaagaggaagacttga

SEQ ID NO: 43890 - DNA, 335 bp, Oryza sativa
  Clone ID: PAT_MRT4530_47002C.1
tggcaataaataaacgatggatcgtcccaacctcgccgtggccgtggtggggctactggcggtggtggcggctacgctgccggcgccgtcatggcagttcttcgacctattcctccccgccggtcccagccaccgtttcttcggcggagggtttggcatgcgggtgctgatcaaccacgaggagtccgttccgaagaagtcgctgtacgctatgatggccgccggccacaatctgtgggaagaccatttactcgagccttttcgttggttggaggaggcctaatgcgacctgggttggttgactccaagggtaccccgggcgacatcacctttac

SEQ ID NO: 43891 - DNA, 523 bp, Oryza sativa
  Clone ID: PAT_MRT4530_47003C.1
ggggcaggcaaacatgctgtctttccagcacattcacaaaaaacaatcttagttccaaggaaaaaaggcggccggggcccctgcctgattatgagttctataaagaccctaagttcgctgcaaagccatgttccaaaacattttctaaaaaaaaaacgaaagcctttggaacccgaaaaaaaaaaagggtggggccacatcagggggggggcccccgggacataactagaaatctaaaacccgggggactagcatcaaatcttcctttggctttcccgaagggtttcgggcccgggctggcaagccccgccccacaaatttaaggaccccgtcgatgaaaaccactgggaaagcaacgggtttcaccaaaagccatttattgaagcttaggggcacaaaaccaaaaacttgggcaaggaatggcccgtaaaggatcaaaaaatgcagcccgaatgaaaccgaccttgccagaagaagccaagggttaacccccgggggcatgctcaaaaagctaccatcctcc

SEQ ID NO: 43892 - DNA, 537 bp, Oryza sativa
  Clone ID: PAT_MRT4530_47004C.1
atggcggcgttaaggttcaagattccgaggaagcgattcaggctgctggtgcgaaccccggggggcacgatgtccatgcaggatggcgagaggttgaagacgacgccgctgggccgggaggtgtggctccggtggcacctgctcatcttcgaccaaaccatctacgccgtcgacggcatccgcacctgggacgcctacgcgcgccacctcccggacatcgccgccgccaccgccgccatcgccgccgtcctccgagcctaccgcgagcgccgcgtcgagctcggcctcttccacctccgccccctgcggaagttgctcgtgttccgcctcatgtcccctctcttggtcatgcccctccccgacgccctcgaaaagtggaggtctcggcgtcgcaggagaagacatgccatgctgctgctgcagagcaaatcgtcaggggatagtagcatctatggcaaatgctgcactactggttttatctaccctgtatacctcctgttcgtggcgattttagcttgtgtaattatcttctggtga

SEQ ID NO: 43893 - DNA, 1299 bp, Oryza sativa
  Clone ID: PAT_MRT4530_47005C.1
atgcggagggcggtcgctgtggcggctaccagcgaggatggtggaggcggcggcttttacccaacagtattgtcagtttgtcacgtctggactcacgagttgatcatggacaccatgaggaagcgagtacaagctttcacagaaggcgtcgtgctaatggtgtgcccggttcttctcgccgtctcgctcaagaaagccgacctgaagagcaacgggaacggatcgcttgtcggaggcggcatctcccctctcgccgccatcactctcgaagccggcttgctggccgtcctcttcctcggcatcaacgatagcctaccggcgtcccacggcctcctgctccgcgcctccaagctcctcgtccacctctgcgcccttctcctgatggcgctggccttcgtcatcctcctcctcatcgacatggacaggcacatgtactgcctcgccggcctggttcttgcgccgctggtgcctctcactctgttccgctgctaccgaggcgcgcgtgacggcggagacgaccacgcggcaggaggaggcgacgccgcggccacgctcgaggactccgtgaatttctcggccgctgtcacgacgcttctgttcctggggctggaagggctggcgttagaggggcagagcagcgccgcgtgccgcgggatggagcgcctgttcaccgcctccctcggcgtcacgtacctcacctgcgtgctcggcgtgttcgtcatgctggtggggacggtgcctgatccggcgatggcgagcaccgacgaccaaggcgacagatcagccaaggtgtgctacttcgccgagttactgaacgccacgttgtccgtcgccttcgccgtggtcgtcgtcctcatcacggccgcgccgctgagggagcaggcgtggctggtgttcgtcccgctaatcctgtcgttcgtgacatggatgtacagagctatagtcggcgacggcgtcggagagattaagccggcggcgtcgctggagctgaccaaggtcacgttcacagggttcctggccgtcgcggtgccgaccttcagtaacacgccggttggcatctcgacgcgcggcttcgttgcgctcagtgccgcggccgtaatgtcggaccttggatggaggctactgatgacgggccggatggaccgtaatgaccagaggagggcgtcgccggccatggtgtctgtcgccaacgttgcttctctatgtgctcatctttgcgtcgctgctgctgtgctcccattcgcaacgctggctgtcaacgccgtcagctcaagtgagccaggtagcggttgccactaa

SEQ ID NO: 43894 - DNA, 1410 bp, Oryza sativa
  Clone ID: PAT_MRT4530_47007C.1
atggaagggaggatgcaggggaaggcgccactgtcggattccaaccggcggatcatggacgccgacgcgccgccgcggcgggtgtaccaggggtggaaggggagcaatatatttttccttggagggagacttatttttgggcctgatgtgaggtcactcatactcacagtgtgtttaattgtaattccagtgatcctctttgctgctgttatttctggacagcttgaccatgagtaccacaaccaaattggaggttgggttgcatcagtagctatcatctttacagcatatattattgtccttctgcttctcacatctggccgggatcctggaattattcctcgaaatgctcatccaccagaacctgaagatgttggtgaatcctccaacttatcagagtggccaggtggtcaacatggttcgacgggtttacctctcaccaaagatgttcttgttaatggtgttttagtcaaggtcaaatattgccatacatgtatgctatatcgtccaccaaggtgctcccattgctcaatctgcaacaactgtgttgaacgttttgatcaccactgcccttgggtaggccaatgcattggaaagagaaactaccgattcttctttatgtttgtgtcttcaacaactttactatgcgtatatgtgtttgcattctgttgggtcgatctcaggataataatggacacacatagatgcaaattagggagagctatcatgaaatctcctgtctctggcattctcatcttgtacacatttattgctgtgtggtttgttggagggttgacctcattccacctctacttgatttctaccaatcagacaacttatgagaacttccgataccgctacgataggaaaacgaatcctcataaccgtggactggtccagaatttcattgagatcctgtgttcaagaatccccagctccagaaacaacttcagggcaaaagtaaaggaagattctgccaccttcccctcatcactcggtatggggcgggcactaagtccgccgaagatgagtgtggacctcgagatgggaatgaaaaggcaaactgtggccatggaggaactggaagacttacacagccaaatcggcagtgctatggggctggagcgatgcggcactgaacccccacatattgtcggtcgaaagggctgctctgaaattgcaaccgacatagaagcatttgctgaagagtttggcctggaacaaagacatggtgaagcattgaagccaaaggttttgctgtacttctggaatgctgggtctatgtactacaagaaccatcaagtgatattcaaggacttcatcttcttctccctcaaaggtctccaagaggaggactttgaggcagaggaagaggatgctcctttgcataaagattttctcagcaactga

SEQ ID NO: 43895 - DNA, 897 bp, Oryza sativa
  Clone ID: PAT_MRT4530_47008C.1
atgaagctgccgccgctcgagagcccgtcggccgccacggcgctctcctccactccgagcaccggcggcgacgcggcctcctcggccgccgccgccgccgccgaccacctgctgctccaccaccaccaccgcacggactgggccatgatggaccgcctcgtcgcgtcgcacctcaacggcgccaactccgacgcgcccgacgaccagctctgctttgacgccgccgacgacgacggcctcgcctactactccgccgccgccacgaggctgctcggcggtgccaacgccggcaccgacgacgacctgtggagcttcgcgcggtcggttgcgccgccaccgccgcccgccgccgccgttgtcggccacgccagagctgtctcagccacgtggcactgtaacacatgattcgtagctgtacgtacacgtacacgtatacgtacacgtcaggctacgtacgctcgagctgccaccctagctgctagtacagtaattacagagacaagacaagtaagaagaaaattgtaagtgattaaaaaaataaaagcaagagagagagagagagagagagatccaccatgaatgatgactgatagagagacatcattcgatcgatatatttcaaaggtgaggagcaaagatcgagtgattaattaattagtgagtgagacactggagaaaagaaagaaagaaaagaaagaaaaattaaggagcccaaagagacggaggagaaaaaagaagaagaagagagattaaaggcaaatgcgagtagtaagttagggtggcactgtcaaacatgtctgcatccaatgtttaattaattaattaaccctactacctgtccaggacagaaaaatatatattagcatctcattacttataatatattccctccgtttt

SEQ ID NO: 43896 - DNA, 1676 bp, Oryza sativa
  Clone ID: PAT_MRT4530_47009C.1
cacgtttttttttttttttggctcgtttaaaggaattaatttacacgtaatcaccgcatttttcaatttccaagtttctggtacaatggcatttcccttcagcaaatacagttcgaggctgtgagagatctaccagacagaagatcggcacgatatgaagcacacatccaaataactgatcgagtataccgtacaatttacagggatagcatatcgagctaatgactacaattataagggcagattctttaccacagtttgaacaattattggatccaatattaagatagtaaattagcactttgggcaggtgtggtggcgacgagtgacgaggctgaggcgttcaagggcgtcaacgtcgccatcgtcatcagtggatggccgaggagagacgggactttggcagatgcaatctgttggaaattcattacaatcctctcttcctggtctgataacctccggttctccccagtgtccactatgcactttctttaccttctgtgaaaatatatcccatcccatctgtttccgtctcttaaatagtaagttgagttttttagcatttgggcgaatggttctcttgtggcccatgtatcgccttcgtccagctaaaaccttggccatgtttccattattgtttgtaacaaaaacatcactcccgtcacatacgatgaaatcaattgcagccaatcttgaagagaacggaaggaacggtttcaaatcattcccagcaagcatttctttggtgtagtagtttggaaagagatccctcagaggctggagagtttcttctcccccatatatttctccagaagcaacatacaggtacgtgtcattgctaaaaccaagagctcggagcatcaaaccaatttcttgaggagtcagtggacatttgcccctactgcgctcatcctcagcgctcaactcaggtagtgtatcccatcttttcctaatttcacctaactccctccgttctttatcaccaccaccatagtaacaaccagaaaatgcaagcatgtcaggctcaaacctcaagtgaacggcaacgtatcgtgagctcatgctcctcagcttgcgcaccaatttctcacctagagtttgtatggaatttgtaaatcttaatgcatggaaatttactcggcagcgtaacttctgcaattcttcatcaagctcgttagtgagccgataatcaaactttgttagctgcaaagctcgccttcgcataaggataggcaaaacttcatcaatgtaaaaatcaggcatggatttcctaggcgcacgcatggtccatgggagtttatccattgacatcatcacctcataagggattcttttgacaatagttacatcctttgataggtaagagatgaaccagtccacgtcaaaaatgtcagagaagtcgctatcatccttccagaatgagtggtgatctaactcaggtacaacaagtgtggcattcaatattcgggcgacaacaacagcatctgttatccctatgcgctgctgatttagtcccccgctagtaccaatcagcaagtaaccagtagaactgttctccggcacagcagagacaaactacgtccatttactcctattgcactcgaacaagttggaatacctcgatttccaaatatttatgggctcgttatttctaacctgcttggatcgccaccggc

SEQ ID NO: 43897 - DNA, 504 bp, Oryza sativa
  Clone ID: PAT_MRT4530_4700C.1
atggatccctcatcggcttcttggccggctccggcttctccgccggtggagctgtccctgtccctgccggcggcggcggcgaggaaccgcgacgaggcggcgccgacggcgatcgtcgacggcaagcaagtgaggctgttcccgtgcctcttctgcgccaagacgttccgcaagtcgcaggcgctcggcggccaccagaacgcgcaccggaaggagcgcgtcgccggcggcagctggaaccccaacgtctacggcgacggcggcggatcagcgtccatgcccatcgcctcccatggcgtcacggcggcggggagtagtacggcagccgacggccggtggtgcggcggcgctgccagcgacgacgacacaacggcggcgcccatgccttccctcggctcaggctcggcggcgctcggcgccggcgccggtttcgcttcgaccgaaaggggctcttccggcggcggcgtcgccggcgaggagcttgtcctcgagctcggcctctag

SEQ ID NO: 43898 - DNA, 120 bp, Oryza sativa
  Clone ID: PAT_MRT4530_47010C.1
atggagctggagctagagctctgccaaacaagttctaagattcttagaagaagttggttgtttgaggaaacttgtgattataagatacagccgccggaagctcttctaagcataccctag

SEQ ID NO: 43899 - DNA, 690 bp, Oryza sativa
  Clone ID: PAT_MRT4530_47011C.1
atggcgacgtcgatggagctggcgcccggcgacgcgcggttcgcgaagctggcaaaagagctcgacgacaaggcgccgcccaaggccgcggccgcgccaccggcagcatcagaagaccaagcagcagcgagctccgggaagcccaagtacaagcacgacttctacaacggcgcgagcgaggtggtggtgacggtgttcgccaagagcgtggcggcggagcacgtcatcctcccatcgaagatcgaggtgcgtctcgccaaggcggatgagcaagtgacatggacgtcgctggagtacacgagcaaggccaacaacaagctcgcggcgacggcgacgacaacgacgaggaagaaggtagactgggacaagctggaagccgaggtgaagaaggaggaggaggaggaggaggtggacacggcgacgccggtggtgaacaggttcttccagcagatgtacggcaacggcgacgaggacatgcggcgagccatcatgaagtcctacgtggagtcctacgtgctgtccacggactggaaggacgtcggctctaagaagattgaggccagcgcgccggaaggcatggagctgccaagttttcacccggagaaatctcttgaagtggagttgaatgagggctccagtagcaacgccttcaagaaggtgaacggcgcccaagggcgtcgccgttgctag

SEQ ID NO: 43900 - DNA, 380 bp, Oryza sativa
  Clone ID: PAT_MRT4530_47012C.1
aacattaccatatattcattcctatcaaaggcctcgctttaccttacaacaaggtacaaaggacgggggctaaatccaagttcacatggctggggcatcaattatcataatttacaaacaacactctgaccccacttatttctatgcttttcaggagattaactagcgacacaccctcgagcttaattgtgtttaacgcatgcatgcatggattaaaagatcacaaggacggaacacaaaacccatgtataacagcaaacaccacattacacagtatcacatggtcttttctgagttgaacctagcatttgagctcagggcccaagtgcatccatcatatccacaggtgattgcttccatgcttctttacctttgtggaa

SEQ ID NO: 43901 - DNA, 480 bp, Oryza sativa
  Clone ID: PAT_MRT4530_47013C.1
atggaagatgatggagataaatacaagagatctcccccagagtcggctctccccaggggcggctcgggaggcgacccggccacccctcttccccccaccccaccccccttctccgcctcgctgtcgccggagcggccgccggcgaggccgcgcggccgcaaggacggcggcggcagggcgctcctcgtctcctcgcgcttggacggcctggggagccgcccggggatgggctggcaccccgcggcggccactggcgtcctccggcgcccctctaggcgtcggccggcgttggtggtgagggggacggccggatctggctcccttgcccagatccggcgcatcctcgagtggggatggggtggcgaaagtcttgctccgctctcggtgctagcaacggcgacgcccttgggcgccgttcaccttcttgaaggcgttgctactggagccctcgttcaactccacttcaagagttttctccgg

SEQ ID NO: 43902 - DNA, 1698 bp, Oryza sativa
  Clone ID: PAT_MRT4530_47014C.1
cgcccacaccggttgcctttccatgccttgcaggtgcagctccctaataggttcctcgtcttcaaaaccgatgtgagatgtgagattagatatatcgcacaagattatatatatataaaaaaaaacagaggagagaattgaacaccagcatcgatcggtgcagccggcatggtcaccaagaatgttcagcagcagcagcagcatcgtgtagatgtagtggtgcctgttcctgctatggtggtggcagccatggcgagcccctgccccgccaataagctcctccgcggcgcaatccagctcgccttcgggttcgcgctcggcatcgccgtcgccatctacctcattgggtcagcgacgcctgccgccgtccccggaggatcatccctcgagctcttcttccctctcccgccgccggccgccgcgtcgacggcgaacctgtcggcggtccggcagaagcagccgccgactccatcgccggaggcggagaagacgacgacggcgatcaagtcccagtcgtggccggcggacgacgcttcaggcggcaacagcaccgccgatcaggcaggcggaggattcgtggatattagcgacgaggagctgatgaagctggcggcagcggcgccgagggaggtgaggacgggcggcggcggcggcccgaggccgaaggtggcgttcctgttcctgacgaggtgggaccttccgatggcgccgctgtgggagaagttcttcgaggggcaccgcgggctctactccgtctacgtgcacaccgacccggcgttcaacggctccgaccccggcgaggcctccgtcttctaccgccgcactatccccagcaaggaagttaaatggggcgagataagcatggtggaagccgagcggcgtctcctggcgcacgcgctgctggaccaggccaacgcccggttcatcctcctgtcggagtcgcacgtcccgctcttcgacttccccacggtctactcgtacctcatcaactccaccaccaagatatacctcgagtcctacgacttgccaggcgtgacggggcgcggccggtacaaacgcagcatgagccccgtcgtcactgccgcacagtggcgcaagggctcgcagtggttcgaggtggacaggggcctcgccgccgacgtcatcaccgacgatgtctacttccctgtgttcgcgaggcactgcagccgtaattgctacgccgacgagcactacctgcccacgttcctgggcatccgccacccgtcgcgcgtcaccaaccggagcgtgacgtgggtcgactggtcccacgggggcccgcacccggcgaggttcacgaggatggaggtcacgccggacttcctccggtggcttagggccggggccgggactacgtgcgactacaatggcgccaccacgacggtctgcttcctgttcgcgaggaagttcctgcccaactcgctcaccaggttcctcagattcgctccaaaggtcatgggctttggatgatgatgtgcagcgaacgttttaatatttagctaggatatacaacttttcacattctttggtttgttttattcgcctattccacagacccaacgtatacatgtacgtaaatttcattttccttttctttcttcctgatttcattatgtaaagaccaaatgaatgtaaagagcacaaggaactatattttttatactaaaaaaaaaaaaaaaa

SEQ ID NO: 43903 - DNA, 564 bp, Oryza sativa
  Clone ID: PAT_MRT4530_47015C.1
ctgcggatctgctaacgagctgctaggtctccattggtaccctgtgcttgcctcctccataccctcgcctcgagctcgagaagggggggcggcggctgctgctcgcgctcggctactccggccaaggacgtctccctcagccggccccgacgcctgccctcttgccccaacttccccgcgttaagatcaagaaccgagggtttctcactgcaaaggctttggttttttcctgagaggagatgtctgggaagagagctttctgcacggcagtggagtctggcagaaaaactccagagttttgctatcttcttggtttcagcggtgttgttgcgctcccaggcgataggtttcaacctttggatgattttttgtctgagaatccttttctgtcacctattccattaggaaggctctatgaaaacattgatccagcaaagccttatatgctagaggaccctattcgtcgggcagtatggtctggatcccttgcaccttaaatagccaacaaatgaaaaagtccctgaccaatccttactaaggaaatgtgggggtgcataaggattt

SEQ ID NO: 43904 - DNA, 693 bp, Oryza sativa
  Clone ID: PAT_MRT4530_47016C.1
atgtgggtcccacgaggttttcacccggagaaaactcttgaagtggagttgaacgagggctccagtagcaacgccttcaagaaggtgaacggcgtccaagggagccaccaaatgtcacctgcacaccgaggatacctgcgatattcacaccacctgcacgacgaccggactccaaccaccccgttcccacccgaggacgcgccggatctgggcaaggagccagatccggctgtcttcctctccaccaacgccggccgacgcctagaggggcgccggaggacgccagtggcagccgcggggtgcctgcgtgctctggccaccaccggccgccgccggatccgggtgcgccaccgccggatccgcggcctccaccattgccaccccaacgccgtcaccatccccgccgccatcacccacaacaccaccccgcgcaactcacctcgaccgccaccgtcgcccgtccccgccgccagcccatcccgtcagatccggccggaacggcgcggatctggcggacaccgccgtcgccactccgggcggctccccaggccgcccgagcgcgaggagacgaggagcgccccgccgccgccgtccttgtggctgcgcggcttcgccggcggccgctcgggcgacggcgaggcggagaagggggtgggggtgggggagaggggcggccgggtcgttgcctcctga

SEQ ID NO: 43905 - DNA, 2206 bp, Oryza sativa
  Clone ID: PAT_MRT4530_47017C.1
atatatggcaaattacttccttttcaaaatctaggataccgttgacttttcgtactaacatttgacgttcgtcttattcaaaaatttaatataaatatgtaattgtataagctaagattatattgtagaaatttaatataattaaatgatataaggcaaatggtcaaacattatgctaaaaatcaatgacgtcatacattttgaaatggagggagtacttgatttttgttcttgtgagatgaggttgcaagtctcctctgtaatgatgtataaacttgcctggccaaaaataataataataataataatctggcccaactgttgttaggtttattttgtgacagaaaatttcgtggtagtaaaaattccagaaagtaatagtagtatatatagtagtaaataataacaaagaaggattttttttgtccatgtggagcatactgggcccatggatctatttagttggggatgtgggccgaataagctgtttcgtgggcctgcggatctgctaacgagctgctaggtctccattggtaccctgtgcttgcctcctccataccctcgcctcgagctcgagaagggggggcggcggatggctccagctccgtgcagcggcgccatcaccaccatgggcggcctgagcaccgacgccctatccctctccttctctactgttgctcgacctagagaagaagaaacagaaagagagaaggaagaaggaagaaagagaaacagaaaagaggacagcagcagaggagttcgcaagacttctgacagatcaagaaccgagggtttctcactgcaaaggctttggttttttcctgagaggagatgtctgggaagagagctttctgcacggcagtggagtctggcagaaaaactccagagttttgctatcttctcaacaacggcggcatcgaaggccgtggccgtggccgccatcatgggggagaagggcggggcaacgtggggcttgtggcggacaatggcggtgcggtggtgcggacttgggggagaagtcctacggcggtgcagccgtggtggtcgcggctgtagtgctcacgagcctcgcgacgtgatttctttgcctacccacgttctgttttttgccacatctcttaggggtgttctgttttttttgccacatctcttaggggcgtgggcaaatggtttcagcggtgttgttgcgctcccaggcgataggtttcaacctttggatgattttttgtctgagaatccttttctgtcacctattccattaggaaggctctatgaaaacattgatccagcaaagccttatatgctagaggaccctattcgtcgggcagtatggtctggatcccttgcaccttatatagccaacaaagtgaaaatgtccctgagccacatcctcactaaggaaaatgtgggggtgcataaggattttggcttggtggtgttcaaagatgtgccaaaaaagagagagggcatatctgattcgagcgaaaactaccaacactacagcagtttcttgacagagaccatacaaaggcttcatgggtctgagtccctcaatgcccttccagtggaaatggatatataccttaaagatttgacagatccgaatgttaaggaggatgatattgtggaccatcccatagcactaccaggaagggtatttggggatgtttctgttgaagcctatcgactactgtgcaagcaatatcctgtagtaaagaatgggaaggaaatttcagcggatcgcattattgaggctgttggtgcaaaattcaaggatgcactgactgtgtctcttgacagtggactattgccaaaattcttacctctgaaatggcagaagttatacccagctaacaaatatccatggatacctaagccccaattgattatctcacaagaagaggctggaaaaatagttattgagattcaccggcatggatctgtccattcggtcgaagtaggtgttgatactattgtgacttccaatttccctggcttttctggtgataagttcacgcgcatggaggtactcgcgctcattcgtcacattttcccagaatatctcaacacgatatttaaggaattcaagatggacaatctatatgaagatctgcaaattagggaaagaaatcctattcccagcctgtacagtgctcagggcgatggtgtttacgctgaagtgattgtcaagttcattgggttttga

SEQ ID NO: 43906 - DNA, 2217 bp, Oryza sativa
  Clone ID: PAT_MRT4530_47018C.1
atggcgatgaccgtcgaagctcttatgtatgtccttgtaccgatgccatgcctattcttcggtggtggatctacccagttcttgactagcagagatggtggagggtggttcaatgctgcaaaattcctgactggtgcatctgccatgggaagcattgcaatcccagcaattctgaggcacgctggcctaattgagactggagccatgttcatcgagttcacgtccttcttcatccttgtatgcacagtgatgtgcttccatagagctacgctggatgaagattggaagacccctgaagaagtgaagagagaagatttagagaagaaaaatgtacgagagaggagaaagacagaaacattgggagggaatggtgtagaggccacacagagagtcttcctctatccacagtctccaaaggtctcctctattgtcagcaagggatacagaactggatatcacttccagcctccaaagaactggatcaatgggccaatgtactacaatggcatctaccatgagttctaccagtataacccgaacggatcagtctggggtaacatagtttggggccactcggtctcgacagatctcatcaactggatccgtcttgaacctgcaatagaaggaaatactccgagcgacataaacggttgttggactggttcagcaacaatcctcactggtgatcaaccggttatcatatataccggtgccgacacggagaagcgtcaggttcaaaacattgtgctaccaaagaaccggtctgatccttacctgagggaatggaccaagccaaaaaacaaccctttgatcgaaccggtcggtccggcacttttgtacaagagcaaagactttatgcagtggactagagtagatcacccattgtattcttctaatgcatccaacatgtgggagtgcccggatttctttgcagtattgcctggcaagaacaatggactggacctctctgcagctatcccaaatggcgccaagcatgtcctcaaaatgagcttggattcctgtgacaagtacatgattggggtttatgatctgaaacatgacatgtttgtgccggatactgtcttggatgacagacgattgtggttgaggattgattatggcaattactatgcttcgaagtcattcttcgattcgaaaaagggaagaaggataatatggggctggactaatgagacagatagtacgtcagatgatgttgcaaaaggttgggctggcatccatgcagatgtggagatagattttgagctgacatccatagatgctgctgatccttttgacccttcctggcttttggacaccgagaagcattgccgagaagcagatgcatcagttcatggcggcttggggccatttggacttgttgttcttgcctctgataacatggacgagcacactactgtgcacttcagggtttacaaatcagagcagaagtacatggttctcctgtgctctgatctgagaagatcatcgttgagaccaggactgtacacaccagcatatggaggcttctttgaatatgaccttgaaaaggagaagaagatctccttgagaactctgatcgaccggtcggcggtggagagcttcggcggcggcggcagggcgtgcatcatggccagagtgtacccggcggcggtcgtcgacggcgccacccacatgtacgccttcaacaatggcagtagcacggtgaaggtgtcgcagctcaaggcatggagcatgacgagagcacaggggcggctcgggaggcgacccggccgcccctcttccccctaccccaccccccgaagccgcgcggccgcaaggacggcggcggcggggcgctcctcgtctcctcgcgctcggacggcctggggagccacccggggatgggctggcgacggggtaggcggcggtggcggcggggacgggcgacggtggctgctgaggcaccccgcggcggccactggcgtcctccggcgcccctctaggcgtcggccggcgttggtggtgagggggacggccggatctggctcccttgcccagatccggcgtgtcctcgagtggggacggggtggtttggcgtccggccgtcgtgcaggtgatgtgcatattgcaggcgtttgctactggagccctcgttcaactccacttcaagagttttctctgggtgaaaacctagattcgttaggatcggacgatgacgtcgttctgtcggcgtga

SEQ ID NO: 43907 - DNA, 538 bp, Oryza sativa
  unsure (1)..(538): unsure at all n locations
  Clone ID: PAT_MRT4530_47019C.1
ctctcaactctcaagccaagaattgtcagggacacgtagccatgaggacgatggttgcngcnncaccnntncnccggcaatggctgtctcgccgtggcactcgccggtgccgtacctgttcggcgggctggccgccatgctggggctcatcacgctcgcgctcctcatcctcgcctgctcctactggaagctcaacagctacctcggcaccggccactcttcctccgccgccgccgccgccgccgccggagatggaggcgacggcgatggcggctcgaagtcgccggcgaccgcggtggccgcgtttccggtggtgtacggggacctcgtcgccgtcgtcatggcaggggagaggatgcccacgttcttggccgcgccgatcgtccgtcgaccgccgtccactgacacctcctcctccgccgttgccgaggtggcctcgccggagaacggatgcgacgcggcggagggaggcgcggccagccggccacctccgcagccggtggcggcgaggcaagccgtacagctagctcagctctga

SEQ ID NO: 43908 - DNA, 477 bp, Oryza sativa
  Clone ID: PAT_MRT4530_4701C.1
atgctccaattttccaatgatatcatccaaccacgtgatcctgcttttcgtggtgtgcatggaaggttgttgcaatctaggttttccccacagttcatcaattgcattggagttattgatggaacccatatcccagtcatcattccacaagaggagtgcatgacctacatgtgtaggcatggatacactagtcaaaacgtaatggtcgtatgtgactttgacatgcgcttcacttttgttgccgctgggatgaagggaagatgccatgacatggctgtcttcaaccgcgtcgtgagaggagacaaatctgatttgtttcctcacccacctcacaataagtactacttggttgatactggatatgccttggctccacgatatatggctccatataggggtgaatggtaccatgtgccggattttcgtggctgcaatccggaactcttgcaagagaattttaattatctacatgcttag

SEQ ID NO: 43909 - DNA, 672 bp, Oryza sativa
  Clone ID: PAT_MRT4530_47020C.1
atggcgacgtcgatggagctggcgcccggcgacgcgcggttcgcgaagctggcaaaagagctcgacgacaaggcgccgcccaaggccgcggccgcgccaccggcagcatcagaagaccaagcagcagcgagctccgggaagcccaagtacaagcacgacttctacaacggcgcgagcgaggtggtggtgacggtgttcgccaagagcgtggcggcggagcacgtgtccgtggacttcggcgagcagatgctgagcgtctccgtcgaggtcgtcccggccaagtgccgctacagcatcctcccatcgaagatcgaggtgcgtctcgccaaggcggatgagcaagtgacatggacgtcgctggagtacacgagcaaggccaacaacaagctcgcggcgacggcgacgacaacgacgaggaagaaggtagactgggacaagctggaagccgaggtgaagaaggaggaggaggaggaggaggtggacacggcgacgccggtggtgaacaggttcttccagcagatgtacggcaacggcgacgaggacatgcggcgagccatcatgaagtcctacgtggagtcctacgtgctgtccacggactggaaggacgtcggctctaagaagattgaggccagcgcgccggaaggcatggagctgcacaagtgggagtattga

SEQ ID NO: 43910 - DNA, 469 bp, Oryza sativa
  Clone ID: PAT_MRT4530_47021C.1
atgaatctaggttttcacccggagaaatctcttgaagtggagttgaatgagggctccagtagcaacgccttcaagaaggtgaacggcgcccaagggcgtcgccgttgctagcaccgagagcggagcaagactttcgccttggagcacccatcaaccatagcatccacgacaggagccaccaaatgtcacctgcacaccgaggatacctgcgatattcacaccacctgcacgacgaccggactccaaccaccccgttcccacccgaggacgcgccggatctgggcaaggagccagatccggctgtcttcctctccaccaacgccggccgacgcctagaggggcgccggaggacgccagtggcagccgcggggtgcctgcgtgctctggccaccaccggccggcgccggatccgggtgcgccaccgccggatccgcgggctgcaccattgccaccccaacgccgtcaccat

SEQ ID NO: 43911 - DNA, 745 bp, Oryza sativa
  Clone ID: PAT_MRT4530_47022C.1
gcgccatttgggatagctgcagagaggtccagtccattgttcttgccagcaaatactgcaaagaaatccgggcactcccacatgttggatgcattagaagaatacaatgggtgatctactctagtccactgcataaagtctttgctcttgtacaaaagtgctgcactgtagccattcagctcagccccaactgctattctccatagcccatccggtcctatccaaccggttgtcggatctctgaattggtttgagttcaaacccggaccgaccggttcgatcaaagggttgttttttggcttggtccattccctcaggtaaggatcagaccggttctttggtagcacaatgttttgaacctgacgcttctccgtgtcggcaccggtatatatgataaccggttgatcaccagtgaggattgttgctgaaccagtccaacaaccgtttatgtcgctcggagtatttccttctattgcaggttcaagacggatccagttgatgagatctgtcgagaccgagtggccccaaactatgttaccccagactgatccgttcgggttatactggtagaactcatggtagatgccattgtagtacattggcccgtttggatcattgatccagttctttggaggctggaagtgatatccagttctctatcccttgctgacaatagaggagacctttggagactgtggatagaggaagactctctgtgtggcctctacaccattcctgcagggaa

SEQ ID NO: 43912 - DNA, 389 bp, Oryza sativa
  Clone ID: PAT_MRT4530_47023C.1
tacagccgtccaacaagagataaactcctaaaacgaagcctttaagaaggttacgccgacaacgacgacatcgtccgatcctaacgaatctaggttttcacccggagaaaactcttgaagtggagttgaacgagggctccagtagcaacgccttcaagaaggtgaacggcgtccaacgaggacgcgccggatctgggcaaggagccagatccggctgtcttcctctccaccaacgccggccgacgcctagaggggcgccggaggacgccagtggcagccgcggggtgcctgcgtgctctggccaccaccggccggcgccggatccgggtgcgccaccgccggatccgcgggctgcaccattgccaccccaacgccgtcaccatccccgc

SEQ ID NO: 43913 - DNA, 380 bp, Oryza sativa
  Clone ID: PAT_MRT4530_47024C.1
gacgccagagcgcgaggagacgcacacagagattgactctgctgtacagttagctcgggaatactggatctaccatagcagggcagtattccaaaaccgctctttgaaatgtgctacgacttggcatttgtagagtttttagatttatagatagcaaagatgtcggcacaggcggagctttcccgtgaggagaatgcgtacatggccaagctcgctgagcaagccgagaggtacgaggcgatggtccaattcatggagaaggtggccaagacgggcgactctgaggagctcaccgtggaggagcgcaacctgctggctgttgcatacatcaatgtgattggagcccgccgggcgtgatgccgcattatctcctccattga

SEQ ID NO: 43914 - DNA, 555 bp, Oryza sativa
  Clone ID: PAT_MRT4530_47025C.1
agtcgttcaacaagagataaactcctaaaacgaagccttcaaaaaggttatgccgacagaacggcgacatcgtccgatcctataacgaatctagttttcacccggaggaaactcttgaagtggagttgaacgagggctccagtagcaacgccttcaagaaggtgaacgacgcccaagggcgtcgccgttgctagcaccgagagaagccagatccggccgcccccctcaccaccaacgccggccgacgcctagagggcgccggaggacgccagcggcaaccgcgggatgcctgcgtgctcacgccaccgccggccgccgcgccgccgccccaacgccgtcgccatcacccacaacaccacccggtgcacttacctcggccgccaccgtcgcccgtccatgccgccagcccatcccgccagatccggccgaaacggcgcggatctggcggtcaccgccgtcaccactccgggcggctccccaggccgcccgagcgcgaggagacgaggagcgccccgccgccgcccttgcggccgcgcggctttgccggcggccgct

SEQ ID NO: 43915 - DNA, 3393 bp, Oryza sativa
  Clone ID: PAT_MRT4530_47026C.1
atgtcgcatgccccccgattcttgctcttcctcctccagctcctcgccgcctccgtcgtcgcgcggccgccgccgccggagagagcggactccgccgcggtcctgcgctcgtttcttgcgtctctgccgccgccgtcgcggcgcgtgctccggccgtcatggcggcgtggcggcggcggcggcgccccgcactgcgcgtttcttggcgtcacgtgcgacgccgcgggcgcggtcgccgcgctcaacctctccggggcggggctggccggcgagctggcggcgtccgcgccgcgcctctgcgcgctcccggcgctcgccgcgctcgacctcagccggaacggcttcaccggctcggtccccgcggcgctcgcggcgtgctcctgcatcgcgacgctcgtcctcagcttcaactccctctccggcgccgtccccccggagatcctctcctcgcgccgcctgcggaaggtcgacctcaacagcaacgcgctcaccggcgagatccccaccaccggcctcgccgccggctcatcggttctcgagtacctcgacctctgcgtcaactccctctccggcgccattccgccggagctcgccgccgcgctcccggagctcacctacttggacttgagcagcaacaacctatccgggccaatgccggagttcccgccgcggtgcgggctcgtctacctcagcctctactccaaccagctcgccggagagctaccccgcagcctcaccaactgcggcaacctcaccgtcttgtatctatcctacaacaaaatcggcggcgaggtgcccgatttcttcgcctccatggctaacttgcaaacgctttaccttgatgataatgccttcgtcggggagttgccggcaagcattggtgagcttgtgaatttggaagaattggtggtgtcggaaaacgcgttcaccggcacaatccctgaagcaattgggcggtgtcgatcgttgacaatgctctacttgaatggcaacaggtttaccggctcaattccaaagttcatcggtgatttgacccgattgcagttgttctcgattgcggacaatggaattacaggtgaaattccaccggagattgggaaatgccgcggattggtggaaatagcacttcagaacaacagcctttctgggatgataccaccggatatcgccgagctcaaccaactgcagaagttgagcctgttcgataacatactccgcggtccagttcctctggcattgtggcgattatccaacatggcagtgctgcaactcaacaataatagtttcagtggtgagatacattcagatatcactcaaatgaggaatcttacgaatatcaccttgtacaacaacaacttcactggtgagctaccacaggaattggggctgaacacaacaccggggcttcttcatattgacctcactcgcaaccatttccgtggcgcaattccacctggtttgtgcacgggaggccagcttgcagttcttgatcttggatacaaccagtttgacggaggatttcccagtgagatagctaaatgtcagtctctgtacagggttaatctgaacaataatcagatcaatgggagcttacctgcagattttggcaccaattgggggttgtcatacatagatatgagcagcaatctacttgaagggataataccaagtgcgctcggttcatggagcaacctcacaaagcttgatctctcaagcaacagcttctcaggtccaatacctcgtgagctcggcaacctgagcaatcttggaactctgcgcatgtcatcaaacaggctgaccggaccgataccacatgaattgggaaattgcaagaaacttgcccttctggatcttggaaataactttctcagtggaagtattccagcagagatcacaacacttggtagcctgcaaaatctattacttgctggaaacaacctgactggaacaataccagactccttcactgcaactcaggccctcctcgagttgcagcttggtgataattccttagaaggagctataccacacagcttaggtagtcttcagtacatctctaaagctcttaacattagcaacaaccagttgagcggacaaatcccaagtagcctcggcaaccttcaggatctggaagtacttgacttgtcgaataactcattgtctggtataattccatcacagctgatcaacatgatctcactttctgttgttaatctatcttttaataagctatctggtgagctcccagctgggtgggctaagctcgccgcgcagtctcctgaaagctttttggggaatcctcaattatgtgtacactccagcgatgcaccatgcttgaagagtcaatctgcgaaaaatagaacctggaaaacacggattgttgtcggattggtaatctcctctttctctgttatggttgctagtctgtttgctattcgttacattctgaagaggtctcagcgcctatcgacgaatcgtgtctcggtccgtaatatggactcaactgaggagttaccagaagaattgacctacgaagatatcctccgtggcactgacaattggagcgagaagtatgtcattggaagaggtcggcacgggacggtctaccggacagagtgcaaacttggaaagcagtgggcagtcaagacagttgatctgtcacaatgcaaactccccattgagatgaagattttgaacacagtgaagcaccggaacatcgtcaggatggctgggtactgcatccgtggaagcgtcggcctaatcctctacgagtacatgcccgaggggacgctgtttgaactgttgcacagaaggaagcctcatgctgcccttgactggacagtccggcaccagatcgccttcggtgtagcacaaggcctctcttatctgcatcatgattgtgttcccatgattgttcatagagatgtcaagtcaagcaacatactgatggacaccgagctagtaccgaagctcacagacttcggcatggggaagattgttgaagatgatgatttggatgccacggtgtcagttgttgttggcaccctcggctacattgctcccgagcatgggtactacacaagattaaccgaaaagagcgacgtctacagctacggagtagtgctacttgagctcctgtgcaggaagatgcctgtggatcctgcattcggggacagtgtggacattgtgacatggatgagatcgaacctgacgcaggcagatcgccgcgtcatcatggaatgcctcgatgaggagatcatgtactggcctgaagatgagcaggcaaaggcactggacttgctggacctggccatgtactgcacacaattggcttgccagtcaagaccttccatgagggaagttgtgaacaatctaatgaggatggacaagtaa

SEQ ID NO: 43916 - DNA, 2874 bp, Oryza sativa
  Clone ID: PAT_MRT4530_47027C.1
atggcggcgggcgccgtcgtcgtcaccgcggcgctgtgcaagaggagcaaccgggtcgcgcgggtgctcgcctacgcgctcctcgagtggatcctgatagctctcctcctcgccaatggcgtcttctcctacctcatatcgaggttcgccgccttcttcggcctggcgccgccgtgcgccctctgctcccgcctcggcgtggacagcctcttcgagccccgcggcgaggggcagggcgccggcgcggagcccctgtgccgcgtgctgtgcgactcgcacgccgccgaggtgtcgcgcctcggctactgccgcgcgcaccggcggctcgcggacgccggggacatgtgcgaggactgcgtgtccgcctccgcggcggcggcggcgtcgtcgtggatgaggcggagcgagctcggcgagcgggacctggcatgcgcgtgctgcggcgtcgcgctcgagagcggcttcatctcgccgccgttcttgttccccgcgccggcggcgtgcgacgtggactgtggccacaggagagacgccgccatggcaaatctcaatcgcgatctggtcttcgtgtccgaggagggccctgtgatcgagctcttcgatgagaagccattggaggaggacccgatcggcgccatggctggcttggcagctcaatgtgccgagattgttggcaatgtcctgcagctggtgcctcttgaatcagctgatttgtcaaatgtcagaaagagtgcagtatcatatgaatcccgtggtgaagggaatgatgcaatggatcatgtaacttcgaagcagcgcaatgtggtgctgaagaacatggctaacaccagtgaggataaatccgcggtgtcctctgatgatgatgacaaggtgggtgatatggttagtaagatgatcgacgaagaaattactgcgttagtcctctctcaggattgtattgaggatggattcagctgcgagatagatggggaaaccacggagagcttagctgctgatcatcaacaattttgtgagaagcatagtggattgaaagacaacaaccaggaaatttcaatcgggagtgagatacctgagaatgagcagggtgctgtaaaacaagaattgctttgcgtgctgacaaatccgagggggaatgaatttggtattgacaatttagaaggaaatactgagacagttcatcaggctgatctcaataatggatggaattcgatgccagtggaagctggagtgcatgcctctgaaacttcaactgagaacaatgaggagtggattcagccaggtgagctgagccagaaatcgaatctgatgccgatatactctagggagcatgctgatgaagaaattaaagaggacagaatttcactgactgagataaaacaaggattggactctgtgacaattgattcttgggaagaagttcatttgatttcaaatgatggcaccaaagagaatcaggctgaacagcctgagctgaatcatcaatcaacttttatgacagtacgtgctattgagtatgtaacagacttgtttgatgctaacatcagtgcaggcaacgttaatccaacagaggctgctctaccaagcttacatcaattctcttatggaccatcaacaagcttaaacaaattatgtcctgactataatgatgttgaatcagagagtgctccggatacaccaattcacattgaagatatcgatggtttacatgagttgccagaccataaagcaatgacttctgataccaagtcagttgatctggaaagtattgaactggttagtgttgatcagttaaaatctgctttggcatctgcacataaatctttgagcaccctatatactgagcttgaaaatgagaggagtgcagctgctatcgctgctgatgagactatggcaatgataaatcgcttgcaagaacaaaaggcggcaatgcagatggaggcaatccagtaccagcgacttatggaagaacaatcggagtatgatcaagatgcgctagagaggttgaatgaactagttgtgaagagagagaaggagaaacaagatctggagagagagctcgagttgtacagacgcaaggttcatctctttgaggtgaaggaaaggagaaaaatgtccaggcacaaggctgatgaccacaatgggtcatcctcagcatcatccagtgctgaggacagcgatgaccattcccaaagtttctatgaaggcgatgaatctgcccatggtcttaatggaagcaatggtagtatccctactgatgctgtgttacaagaaactgctaggcatctggggacacttggttgctcactcgcagattttgaggaagaaagactctccatactggagcagctcaaattgctagaggagaggctatttgacctcgaagatgaagattcagatagtgttaagatggacaagcgattatcagaagaaaaccatttgatgggtgcctcaaatggtttctctgatgatgatagcaacttcaaacttcatgacaaaagaaaaggtgtaagctataggggaaaaaagctgctcccattatttgatgacactaccgtggaagatgggaacgacctcctaacaaggcaagatcctgaggcagaccattctacagaaaatgttgtgttggaaccagctaatgagcaagataaacttgcaatagcgcatgaaattgatcaagtccatgagcggctgcatgctctagaggcagacaaggaatttataaaacagtgtgtgaggtctttgaagaaaggagacaaggggtttgatcttcttcaggagatcttgcagcatcttagggacctgagaaggatcgagcagcgtacaaggaactctggagagctctcaccgcattatctgcacccttacacggattga

SEQ ID NO: 43917 - DNA, 474 bp, Oryza sativa
  unsure (1)..(474): unsure at all n locations
  Clone ID: PAT_MRT4530_47028C.1
aaagtggatgacgactttattgattctctctatgtttacaaagtgcaccaacagcactccttacaaaaatctcgagtaaactcgaaaccctaactaaactatcaactcaatgctcttaaaagcgataccgagaagcctcacgctccctctctatttatacccgaggtaggcagcctaaagccacgaaccaatctcatacagaagtcctaatccccataggaaaccttctcgtacaagaaacaaactttacataaacaatacctctatcgtatgccatatggaaacttcaccatccacgtgcattgaactctagccttagtatctcgcatgatctctgaccaccacggacatcgttttatccctaagccgactcccagcccatcaccgcaaatactctcccagcatctcgagtcacctacacatgggacaaacaaagaaaccatattncgagaccaacctatccccaacttgact

SEQ ID NO: 43918 - DNA, 474 bp, Oryza sativa
  Clone ID: PAT_MRT4530_47029C.1
atgggtttaagagacggactctccaacaacaagctactcgatgacttcgaaccagggagatacaacctggccagagtacgtcccccaatgagatcggaatcatcatcgtcaacaaatttgatctatcgagatcaatcaaggtgtcgcaagccttggactcacatgccgacgccgacaagaagctgcggcgcgcactggtgggcggcggagctagcaaggtcattgtggcgctcgtccttgcccttttcaggtcgccgggcagcgtgttctatccacagcaaggcactcttctacgcctattacgtgatcctgctcgccgttgccgtgttcggcgtggcggaggtggctgtcggctgctgggtctctgcttccccgagcgaccggcggcgaggcgtcgggaaggtggtcgtttgggcctctgtcatggcaatcgttgtcgtcgccggacttggatgtttcgccgtgcttaagtaa

SEQ ID NO: 43919 - DNA, 624 bp, Oryza sativa
  Clone ID: PAT_MRT4530_4702C.1
attcgaagcattctgtatggttttgttgccttcttttcaacatgcaacaggcatcggcttagcggttacaaccacattcaagtgtttctccgacgcctatctcgtgttttaactggtgcacagcataccacctcttgtgaaggcacacggaggtattctagtcaaaatcatcctcaaaggaaaactcacacgagataacagtgggcctggcaacttgacttgccaggtaacaacctcattcagggagcctatgcgcgggataaatagagatagccagtcgtgagctgaaaaaagtgtgaacaggaaacatttactaacacagaagcatacccggtcgactggacagaccttcaaaacaacttgcttggaattggaagagtcatgtacaggtttataccgaatgtttcatcacatagctttaatcatgtatcctatctgtaccagcgggcaagtagtgaaacaaaacgccgcaattgtacatacgcagaatctgttgtttgttcattctaatggcttgtatagcagcctagtaggtttgtgcatatcctcccgaaatgttcctctgaacaacaattttgtaattacatccgagtattagctaaatagctaagcatcaatttccat

SEQ ID NO: 43920 - DNA, 5385 bp, Oryza sativa
  Clone ID: PAT_MRT4530_47030C.1
atggatcagaaatggatgtacgctgaccggcggtcgaaagagtttattgacggcgtgcatttttttttgagagtgaccgaaactaacaagcataagggttttatttgttgtccatgcaataagtgtaagaactagaaggagtattctgcatccaggactatttatttccacttgtttgagccggggttcatgccaagctataattgttggacatcccacggagagcaaggggttgaaatggaagaagatgaagtggaagatgagaacatttcggactgggctcagtacgctggaattaaagaaaatcaaacgggtgaggtggacagggatgctgacgataacgacggtgcggatgatcttggtcagatgttgcaggacgccaaggaggactgcgaaagtgaaaaggaggcccataaattggagcgtatgttagaggaccatagaacgtcgttgtacccaggttgcgagcaggggcacaaaaagttagataccactctggagttcttgcaatggaaggcaaaaaatggagttagtgacaaggcatttggcgatttattgaaactcgtcaagaacattcttccggagggaaacaaattgctcgagacaacgtacgaggctaagaagatagtctgtcctctaggactggaagtttagattattcatgcatgtccaaacgattgtatcctatatcgcggtgaggagtacgagaacctagaagcatgccctgtttgtaaagcactacgatacaagattagacaagatgatccaggtgaagttgacaggcagccaacgaaaaagagaaatcctgctaaggtgatgtggtattttcctataataccacggctaaggcgtttgttcaggaacaaggggaatgctagaatgatgcgttggcacgcagaagaacgtcaacaggacgggatgctgagacatgccgccgatggttcgcagtggcgaaacatcgacaggacatttcaagactttggagaggacacacgaaacatacggtttggtttaagtacggatggcatgaatccttttggagagacgagcagcggcaatagcacttgggccattacgatgtgtatctacaacctcccccttggctatgcatgaagagaaagtacataatgatgccgattattattcaaggccccaagcaacctggtaacgacattgatgtttacctaagaccactggtcgaagatctgaaactgttgtggaagaaagaaggtgtccccgtgtgggatgaggacaaacaggaggagtttaacctacaagcgctgctgttcgtaaccatcaacgattggcctgcacttagcaatctatctgggcaatttaacaaggggtacaaggcttgcactcactgtatggatgaaactgaaagtgtatatggaaagtcgaaagatacactggaagtatgtaatgatctgaagcatatggaacaacgtcgcgaccttcacccggaaccaaaggagaaatgaagccattacttgagtccagccagctacactctaagcaaggcagagaaggaaagtatgtttgaatgcttggagagcatcaaggtaccgtctggatactccacgaatataaagcgaataataagcacgaaggagaagaagttcacaaacctaaagcctcatgactgtcacgtgttgatgacacagctgctaccagttataattcggggtatccttccagacaatatccgggcaacaataacgaagctatgtgctttcatgaacacaatttcacagaaggtcatcgatctggatagattagaagcccttcaaaataatgtgaggtatatgggtgttctgaagaagtatgttcgtaaccgtgctcgtccagagtcaagcatcgccaaggggtatggaacagaggatgtcattgaattctgcgtagaatttattgaagaccttcgcccaatcgaggtgcttgaatcacaccatgaagggagactacgggaaaaggggactctcagaaggaaagcaataatgacggtagacaacaatttattccataaagcctatttcatggttctacaacaatcttctttggtgactccttacatcgaggagcacttggctctagttcgcgccaaaaacatcggtaagtccgatgcatggattacacgacctcacattgatactttccccgcgtggctgcaacaacatctcatgggtaacgagacgattaaccaacaactggccttcctggcgatgggaccatctggctcgatcgcgacattccaaggatatgagatcaatgggtacacattctacatgagagcccaagacataaagagcacgaaccagaacagtgctgttcgtatcgatgccattggacacgatggtacaactggcacatattacggtgccatcgaggacatatgggaacttgactatggatctctcaaggtccctatgtaccggtgccaatggattaggctgactggtggaggcgtaacgattggtgacagtgggatgacaacggttgaccttaacaaggttggatactcggacgaaccttttgtccttgccaatgatgtaacgcaagttttttacgtgaaggacacgtctagcaaaggaaagaagggcaaagggcctgacgagccgaagcgccacgtggttctcccatgcaaaagaaaaatcgttggagtcgaggacaagactgacgaggattatgatcagtttgataggcaaccccctttcacggtgacgattgaccctagcatcctcctatcaaacgaagacgccccttactcacgcaacgataacaaggaaggaacagtatacttgaacgaggagggaaacatggagagggatgcagagggaaaagaggagggaaaggaggaggaggaggctagtggaagttaacccttcgctggacagaagagggcacacgaataacgaggtgccgcgaagaagatagagggtcggcacatcataactgaagttgacgaagacggttgacctagtgccccggcagaagcagccaagaattacatacgatacagcggttgggttgtgagggataacgtgcctgtcagcaaggtgtactggcatagaacaagggcacgcggggattatgacaagtttgtcccggaatcagaaaaagagatgctgtggaccacaatgctcgagacgttcacgctccctgcgggtacggagaacatagtgaaacagtggactcttaagaaaatggcagaacagttccagagcttcaagggagatctctacaaaaaatacatcctgaaggggctgacaccgaacttcgacatattcccgaagctaagggatcattaattgggacgagtttgttgcttacaagacacggcaacaagggcaggcgctgatggaacgaaacaaagaaaatgccgctaagaagaagtaccatcagcacctagggtcaggcggctatagcgtcgcaatgccgaagtgggaggagatggaagctagcttgattgagaggggtatcaaaccggccaccgctaaatggccggatcgatcgaagttctggtactatgctcacggtggaacgcttaaccccgttgatggctccctggtgttcagcgatcagatacgcgatgctgcaagtcgactaacgcacgcagtggaagcgtcttctcagggcacgttccgacccgacagagagaaggacaagctgagtcggatgaggagcaagagagataccgaggcgaagattgcagatcttgagtacagggtatcgagttacgagctcagcatgcaagaggaggtggcaaggaaggtggatgaacgcatggccgcacatcggagccaggatccccaaccgtacattcctcctgtaatggtcagccccttaggcaatcgtagcagctacgcctcaacggggcaggtggtgtcgggaatggccatcccaacagacccttcagggacttaccactgcaggccgattccaccaggatactcgagggtcgaaattgagctggtggaagccgcgtacgaggacctcgagttggactaccctgggggagacggtgagacgcatctacgagacacaagccacgccattatactatagcgcaagcgctacatcatcctccctgggcaacaagcagcgtctcctgcaccatctcctccggctccgccatctcctccacctcctccgcctcctccgcctactcctcctcaggctcctgcgccatgtcctccagcaccttccaagtcaaggtctcatcaagctccaccgcctgcccgcacaagggcaacgaagaaggcggaagttgacgccatcgaaaacaaggagccgccgtacgactgtacgcaagaggagcttgacgcttatgtggcagcagaagtgaagaggcaattgaagcctcggagtccagaaaagcagattcctatagacccgagtaccaagaacttcttcaagaagatgtcgggaccagtcaaggaggccttaaagctaacggactatgagcgaactcttaggaaagcatattatggatagtccaaaccagtccctcagcttggagagcaaccaaaccaggaggtcaagccgttggtgaccgtggaagaaattggaataaaacaatttatttctgacaccgggctaactaaggctcagttgcttaaaggcgcaccaatcccaaaagcggaagtgaaataccagttcgaactcggtaaaccgcttgtcaagcctgagcagttgcagtccgtaccgacatagatgtaccaattctatgaacggtacatggaaatgagcgccaacggtagagagatgttcggagcgaggattggagactccgacttcttccaaggagaagatgttctctggatccatttcaagggtatctacgaactataccagctggacgccctcgacgtctctcttctgagcgcacggattttaatggagattcaaagggcccgacgacggggggttttcaatactggattcatcgaccctcggaaagtaaacgtcgaaatgatcgacaagtttccgaaagacacagaggacaatctcatccatctcttgatgaagcagcattacaagacgaagatactactgccgtacaacacagaagtcaatgtctatgactcaatgaataaaaaggtgtctacttttgaccaggtttttgaacttatagacagggcttgggatcggttccgtcaattggtccgtggcacttggaaagaaaaacttagccggaggttcaattttccagttattcacatgagggacaacctcacacacaaggaatttatcgcggctgttcgagaacaactcatgggattcatcaacgaacaagtccttgatcccgagggtgaattctactacgacggatcgacaattcataagtcgttatcttctgagataacgccgacgtcgaagccgtagcta

SEQ ID NO: 43921 - DNA, 358 bp, Oryza sativa
  Clone ID: PAT_MRT4530_47031C.1
acatcaccaagaaatgcatgctgtctatggaaagttagtatattctgaactgatattggtttcctttggaatgtgctacaccaatgcagaaatccgtgagaaacacaaattggaactggagaatttgacactaacaaagcatccattcaggacattacgttttttcatgttagctatgttgcaatacttgaaaagattagcaacatatatcctgagtaagggtgctttgtttgttgtcctcattgtgttggtgctagctcctggaattttacttgcggttacagatggtctgcataaaaaggtgtgttacttcctgtaatttgattacgatcgcagtgcttgtgctgataagagtaga

SEQ ID NO: 43922 - DNA, 5378 bp, Oryza sativa
  Clone ID: PAT_MRT4530_47032C.1
atggatcggcaatggatgtacgctgactggcggtcgaaagagtttatcgatggcgtgcattattttttgagagtggccgaagctaacaagcataagggttttatttgttgtccatgcaataagtgtaagaaccagaagaagtattctgcatccatgactatgcatttcctcttatttgagtcgaggttcatgccaagctataattgttggacatcccacggtgagaaaggggttgaaatggaagaagatgaagtggaagacaagagcattccggactgggctcagtacgctggatttgaaggaaatcaaatgggcgaggtggacaggaatgctgacgataacgacgttgtggatgatcttggtcagatgttgcaggacgccaaggaggactgtgaaagtgaaaaggaggcccataaattagggcgtatgttagaggaccacagaacgtcgttgtacctaggttgcgagcaagggcacaaaaagttggataccactctggagttcttgcaatggaagaaaaaaatggtgttagtgacaaggcattttgcgatttattgaaactcgtcaataacattcttccggagggaaacaaattgcccgagacaacgtacgaggctaagaagatagtctgccctctaggacttgaagttcagaagattcatacatgtccgaatgattgtatcctatatcgcggtgaggagtacgagaacctagaagcatgccctgtttgtaaagcactacgatacaagattagacgagatgattcaggtgaagttgacgggcagccaacgaagaagagaattcctgctaaggtgatgtggtatttccctataataccatggctaaggcgtttgtttaggaactaggggaatgctagaatgatgcgttggtacgctgaagaacgtcaacaggacgggatgctgagacaccccgctgatggttctcagtgacgaaacatcgacagaacatttaaagtctttggaaaggacgcatgaaacatacggtttggtttaagtacgaatagcatgaatccttttgaagagatgagcagtggccatagcacttggtccgttacgatgtgtatctacaacctcccccctggctatgcatgaagagaaagtacataacgatgtcgattattattcaaggccccaagcaacctggtaacgacatcgatgtgtacctaagaccactggtcgaagatctgaaactgttatggaagaaagaaggtgtccccatgtgggacgaggacaaacaagaggagtttaacctacgagcgctgctgttcgtaaccatcaacgataggcctacacttagcaacctcctatccgggcagtctaacaaggggtacaaggcttgcactcattgtatggatgaaactgaaagtgtatatggaaagtcgaaagatacactagaagcacgtagtgatctgaagcatatagaacaacgcggcgaccttcacccggaaccaaaggagaaaggaagccattacttgagtccaaccagctacactcttagcaaggcagagaaggaaagtatgattgaatgcttggagagcatcaaggtaccatttggatactcgacgaatacaaagcgaataataagcacgaaggagaagaagttcacaaacctaaaatctcatgactgtcacgtgttgatgatacaactgctaccagttataattcggggtatccttccagacaatgtccaggcaacaataacaaagctatgtgctttcatgaacgcaatttcgcagaaggtcatcgatccggatagattagaagcccttcaaaacgatgttaggtacatgggcgttctgaagaagtatattcgtaaccatgctcgtccagaggcaagcatcgccaaggggtatggaacataggaggtcattgaattctgcgtagaatttattgaagtccttcgcctaatcgggatacctgaatcacgccatgaagggagactacggggaaaggggactctcggaaggaaagcaataatgacggtagaaaacaatttattccataaagcccattttatgtttctgcaataatcttcattggtggctccttacatcgaggagcacttggctctagttcgtgctagaaacatcggtaagtccgatgcatggattacacggcatcacattgatactttccccacgtggttgcgacaacatctcatgggtaacgagacgattaaccaacaactggccttcctggcgaggggaccatctggctagatcgcgacattccagggatatgagatcaatgggtacacattctacacgagagcccaagacatgaagggcacgaaccagaacaatgttgttcgtatcgataccattggacacgatggtacaactggcgcgtattacggtgccatcgaggacatatgagaacttgactatggacctctcaaggtccctctgttccagtgccaatgggttaggttgactggtggaggcgtaacgattgatgacagtgggatgacagcggttgaccttaacaaggttggatacttggacaaaccttttgtccttgccaatgatgtaacgcaagtattttacgtgacagacatgtctagcaaaggaaagaagggcaaagggccttacgagccgaagcgccacgtggttctcctaggcaaaagaaaaatcgtcggagcagaggacaagactgacgaggattacgatcagtttgatgggcaaccccctttcacagtgacgattgaccctagcatcctcctatcaaatgaagacaccccttactcacgtagcgatcacaaggaaggagtaatagaggggaacaaggaagggaacgtggagagggatgcggaggggaacgaggaggggaacgaggaggaggaggctagtggaagtcaacactccgctagacagaagagggcacgcggacaacaaggtgccgcgaagaagatagagggttagcacatcataactgaggtggatgaagacggccgacctagtgccccggcagaagcagccaagaattttgtacgacacagcggttgggttttgagggataacgtgcctgtcagcaaggtgtactggcgcagaacaagggaacgcggggattatgacagctttgtcccggaatcagagaaagagatgttgtggaccacaagctcgagacgttcacgctccctgcgggtacggaaaacatagtgaaacagtggactcttaagaaaatggcagaacagttccagagcttcaagggagatctctacaagaaatacatcctgaaggggctgacaccgaacttcgacgtattcccaaagctatgggatcattgggacgagttcgttgcttacaagacagggcaacaagggcaagcgatgatggacagaaacaaataaaatgccgccaagacgaagtaccatcaccacctggggtcaggcggctatagcattgcaatgccgaagtgggaagagatggaagcaagcttgattgagaagggtatcgaaccggccaccgctaaatggccggatcgatcgaagttctggtactatgctcacggtggaatgcttaacctagttaatggctccctggtgttcagcgatcacatacgcgaggctgccagttgactaacggacgcagtggaagcctcttctcagggcacgttccgacccgacagagagaatgacaagctgagtcggatgaggagcaagagagataccgaggcgaagattgcagatcttgagtacagggtatcgagctacaagctcagcatgcaagaggagatggcaaggaaggtggatgaacgcatggccgcacatcggtcccaggatccccagccatacattcctcctgtaatggtcagcccctcaggcaatagtagcagttgcgcctcaacggggcaggtaggatcacagagcatggacgccatgcaaactcaggctgcatattcccttaaaaaacttatcaatcaaggtatgctcgtacttttatgactggtggaagccgcgtacgaagacctcgagttggactaccctagaggagacggtgaaacacatctacgagacataagccacgccattatactatggcgcaagcggtacatcatcctccctggccgacaagcggcgtctcgtgcaccatctcctccagttcctccaccacctcctcctgcaccatctcctctggctcctctgcctccactgtgtccgcctgcacctcccaagacaaggtctcgccaagctccaccgcctacccgcacaagggcaacgaagaaggcgaaagttgacgccaccaaaaacaaggagccgccgtacgattgcagtcaagaggagcttgacgcttatgtggtagaagaagtgaagaggtaactcaagcctcggagtcctaaaaagaagatacctattgacccgagcgtgaagaacttcttcaagggaatgcccacaacaaacaaggaggtcttaaagctatcggactatgaccgaacacttaagaaagcctattacaagaagtccaaaccagtcccttagcatggagaacaaccaaaccaagaggtcgagccgttggtgaccggtgaagaatttggcataacataattcatttctgataccggtctaactttggatcagttgattggaggtgcaccgatcccgaaggcggaagtggcatacaagtttaaactcggtaaatcgcttgtcacgcctgagcagctgcagtccctaccgacacaaatgtagaaattccatgaacggtacatggaaatgagcgccaagggtagagagatgttcggagcgaggattagtaactccgacttcttgcaaggagaaggtgttctctggatccatttcaaggatgtcttcgaactataccatctggatgccctcgaagtctcagttctgagggcatggattttaatggagattcaaagggcccgacggcggggggtttacgatactgggttcatcgaccctcggaaaatcaataccgaaatgatcaacaagtacgagaaagacacagaggacaatctcgtccatctcctgacgcaatagcatttcaagacgttcatactactgtcgtacaacacagaagtcactgtgtacgactcaatgaataaagaggagtggacttttgacaaggtcttccaactgatagacagggcttgggatcggttccgtcaattggtccgcggacttggaaagaaaaacttggacagaggtttcattttccacgtattcacatgagggagaatctcccacacaaggattttattacggctgttcaagaacaactgatgggattcatcaacgaagaagtccttaatcccgagggtgaattctactacgacggatcgacaattcataacgtcggtcctttctcttctgacataacgctgacgtcgaagtcgtagcta

SEQ ID NO: 43923 - DNA, 5317 bp, Oryza sativa
  Clone ID: PAT_MRT4530_47033C.1
atggatcagcaatggatgtacgctgaccggcggtccaaagagtttatcgagggcgtgcattattttttgagagtggccaaagctaacaagcgtaacggttttatttgttgtccatgcaataagtgtaagaaccagaaggagtattctgtatccaggactatttatttccacttgtttaagtcggggttcatgccaagctataattgttggacatccaacggcgagcaaggggttgaagtggaagaagatgaagcggaggacgagaacattcccgactgggctccgtacgctggatttgaaggaaattaaatgggcgaggtggacagggatgctggcgataacgacgctgcggatgatcttggtcagatgttgcaggacgcaaaggaggactgtgaaagtgaaaaggaggcccataaattagagcggatgttagaggaccacagaacgtcgttgtacccaggttgcgagcaggggcaaaaaagttggataccacgctggagttcttgcaatggaaagcaaaaaatggtgttagtgacaaggcatttggcgatttattgaaactcatcaagaacattcttccggagggaaataaattgcccgagacaacatacgaggctaagaagatagtctgccctctaggactagaagttcagaagattcacgcatgtccgaatgattgtatcctatatcgcgctgaggagtacgagaacctagaagcatgccctgttcttaaagcactacgatacaagattagacgagaggatccaggtgaagttgacgggcagccaacaaagaagagaattcctgctaaggtgatgtggtatttccctataataccagggctaaggcgtttgttcaggaacaaggggaatgctagaatgatgcgttggcacgctgaagaacatcaacaggacgggatactgagacaccccgccgatggttcgcagtggcaaaacatcgacagaaaatttaaagactttggaaagtacacacgaaacatacggtttggtttaagtacggatggcatgaatccttttggagagatgagcagcggccatagcagttggcccgttacgatgtgtatctacaacctcctcccttggctatgcatgaagaggaagtacataatgatgccgattattattcaaggccccaagcaacctggtaacgacatcgatgtatacataagaccactagtcgaagatcttaaactgttatggaagaaggaaggtgttcccgtgtgggacgaggacaaacaggaggagtttaacctacgagcactgctgttcgtaaccatcaacgattggcctacacttagcaacctatccgggcagtccaataaggggtataaggcttgcactcactgtatggatgaaacagaaagtgtatatggaaagtcgaaagatacactggaagcacgtaatgatctgaagcatatggtacaacgcggcgaccttcacccggaaccaaaggagaaaggaatccattacttgagtccagccagctaaactcttagcaaggcagagaaggaaagtatgttcgaatgcttggagagcatcaaggtaccatctggatactccacgaatataaagcgaataataagcacgaaggagaataagttcacaaacctaaagtctcatgactgtcacatgttgatgacacaactgctaccagttataataaggggtatcctcccagataatgtccgggcaaaaataacgaagctatgtttcatgaacggaatttcgcagaaggtcatcgatccggatagattagaagcccttcagaatgatgtgcggtacatgggcgttctgaagaagtatgttcgtaaccgtgctcgtccagaggcaagcatcgccaaggggtatggaatttattgaagaccttcgcccaatcggggtacctgaatcacgccatgaagggagactacggggaaaggggactctcggcaggaaagcaataatgacggtagacaacaatttattccgtaaagcccatttcactgttctgcaacacttttcattggtgactccttacatcgaggagcacttggctctagtttgcaccaaaaacatcggtaagtacgatgcatggattacacggcatcacattgatactttccccgcgtggatgcgacaacatctcatgggtaacgagacgattaaccaacaactggccttcctggcgaggggaccatctggctcgatcgcgacattccagggatatgagatcaatgggttcacattctacacgagagcccaagacatgaagagcatgaaccataacggtgctgttcgtatcgatgccatgggacacgatggtacaactggcacgtattacggtgccatcgaggacaaatgggaacttgaccatggacctctcaaggtccctctgttccggtgccaatgggttaggttgactggtggaggcgtaacgattgatgacagtgggatgacaacggttgaccttaacaaggttggatactcggacgaaccttttgtccttgccaatgatgtaacgcaagttttttatgtgaaggacatgtctagcaaagaaaagaagggcaaagggcctgacgagccgaagcgccacgtggttcttctaggcaaaagaaaaatcgtcggagtagaggacaagactgatgaggattacgatcagttttttgggcaaccccctttcacggtgacgattgaccttagcatcctcctatcaaatgaagacaccccttactcacgtagcgatcacaaggaaggaacaatatacttgaacgaggagaggaatgtggagagggatgtggaggggaacgaggaggaggaggctagtggaagtcaaccctccgctggacagaagagggcacgcggacaacgaggtgccgcgaagaagctagagggtcgacacatcataacagaagtggacgaagacggccgacctagtgccccggcagaagtagccaagaagtacatacgacacaacggttgggttgtgagggataacgtgcctatcagtacggtgtactggcgcagaacacgggcacgcggagatcacgagaactttgtcccagattcagagaaagagatgctgtggaccacaatgctcgagacattcacccttcccgcgggtacagagaacatagtgaaaaggtggactctaaagaaaatggcagaatagttttagagcttcaagggagatctctaccagaaatacatcttgaaggggctgacaccgaacttcaacacgttcccaaagctaagggatcactgggacgagttcgttgcttacaaggcagggcaacaagggcaggcgatgatggacagaaacaaagaaaatgccaccaagaagaagtaccatcaccacttggggtcaggcggctatagcatcgcgatgccgaagtgggaggagatggaggcaagcttggttgagaggggtatcgagccggccaccggtaaatggccggatcgatcgaagttctggtgctatgctcacggtggaacgcttaacctagttgatggctccctggcattcagcgatcagatacgcaaggctgccagtcgactaacggatgcagtggaagcctcttctcagggcacgttccgacccgacagagagaaggagggcaagggtcggatgaggagcaagagagataccgaggcgaagattgcagatcttgagtacaggatatcgagctacgagctcagcatgcaagaggaggtggcaaggaaggtggatgaacgcatggccacacatcggtcccaggatctccagccgtacattcctcctgcaatggtcagcccatcaggcaatcgtagcagctgcgcctcaacggggcaggtggcatcgggaatggccatcccaacggacccttcagggacgtaccactgcaggccgattccagccggatactccaaggtcaaagttgagttggttcaagccgtgtacgaggacctcgagttggactaccctggaggaggcggtgagacgcatctacgagacacaagccacgccattatactatgacgcaagcggtacatcatcctccctgggcgacaagcggtgtctcgtgcaccatctcctccggctctgccatctcctcctcaggctcctgcaccgtctcctcctcaggctccaacaccgtctccaccttaggctcctccggcacctttcaagtcaaggtcccaccaagctccaccgcctgcccgcacaagggcaacgaagaaggcgaaagttgacgccgcagaaaacaagccgccgccatacgattgcatgcaagaggagcttgatgcttatgtggcagcagaagtcaagaggcaattgaagcctcgaagttcagaaaagaagattcctatagacccgactgccaggaagttcttcaggggtatgtctgcacctgccaaggaggccataaagctatcggactatgagcgaacacttaagaaaacatattctggaaagtccaaaccagtccctcagcttggagagcaaccaaaccaggaggtcgagccgttggtgaccggtgaagaatttggaataaaagaatttatttctgacaccgggctaactacggatcaattgctacgaggcgcaccaatcccaaaggcagaagtgaaatacaagtacgaactcggtaaaccgcttgtcaagcctgagcagctacagtccctaccgacacagatgtacaaattccataaactgtacatggaaatgagcgacaccggcagagagatgatcagagcaagatattctctggatcaatttcaagggtatctacgaagtataccagctggacgccctcgacgtctgtattatgagttgttggattttgttggagattcaaagggctcgatggcggggggttttcgataatggattcatcgaccctcgaaaagtaaacgtctcaatgatcgacaagtatccgcaagccacagaggacaatctcgtatatttcctgaaggcgcagcattacaagacgtacatactattgccgtacaacacacaagtcaatgtatatgactcaatggataaaaaagagtctacgtttgaccaggtttttgaacttataggcagggcttggtatcggttccatcatttggtccacggcaattggaaagaaaaacttaggcggaagtttaaatttcctgttattcgcatgagggataacctcacacacaaggaatttatcgcggcggttcaagaacaactcatggaattcatcaacgaaaaagtccttgatcccaagggtgaattctactacgacggaaatacaattcataggtccggtttctccaccagtgacatcaacccactgaggaaaaaaaaacaa

SEQ ID NO: 43924 - DNA, 6430 bp, Oryza sativa
  Clone ID: PAT_MRT4530_47034C.1
atggatcggcaatggatgtacgctgaccggagatccaaagagtttatcgatggcgtgcattattttttgagagtggccgaagctaacaagcataagggttttatttgttgtccatgcaataagtgtaagaaccagaaggagtattctgcatccaggactattcatttccacttgtttgagtctgggttgatgccaagctataattgttggacatcccacggtgagcaaggggttgaaatggaagaagatgaagtggaagacgagaacattccaaactgggctcagtacgctggatttgaaggaaatcaaacgggcgaggtggacagggatgctgacgataacgacgttgtggatgatattggtcagatgttgcaggaagccaaggaggactgtgaaagtgaaaagaaggcccataaattggagcgtatgttagaggatcacaaaacgtcgttgtacccaggttgcgagcaggggcacaaaaagttggataccactctagagttcttgcaatggaaggcaaaaaatggtgttagtgacaaggcatttggcgattttttgaaacttgtcaagaacattcttccgaagggaaacaaattgcccaagacaacgtacaaggctaagaagatagtctgccctctaggattggaagttcagaagattcacgcatgtccgaatgattgtattctatatcgcggtgaggagtacgagaacctagaagcatgccctgtttgtaaagcactacgatacaggattagacgagatgatctaggtgaagttgacgggcagccaatgaagaagagaattcctgctaaggtgatgtggtatttccctataataccacggctaaggcgtttattcaagaacaaggggaatgctagaatgatgcgttggcacgctgaagaacgtcaataggacgggatgttgagacaccccgccgatggttcgcagtggcgaaacatcgacagaacatttaaagactatggaaaggacgcacgaaacattcggtttggtttaagtacggatggcatgaatccttttggagagatgagcagcggccatagcacttggcccgttacgatgtgtatctacaacctccccccttggctatgcaggaagaggaagtacataatgatgccgattattattcaaggccccaagcaacctggtaacaacatcgatgtgtacctaagaccactgggggaagatctgatactgttgtggaagaaagaaggtgtcctcgtgcgggacgaggacaaacaggaggagtttaacctacgagcgctgctgtccgtaaccatcaatgattggcctgcacttagcaacctatccgggcaatctaacaaggggtacaaggcttgcactcactgtatggacgaaactgaaagtatgtatcttaagcactgtaggaaggttgtgtacatgggtcatcgtcaattccttgctgcaaaccaccctgtacggaagaaaggcaagcactttgaacataaggcggaccaccatacgaagcctaaacatcgcagcgggaaaatagtgtttgctatggtgaaagatcttaatgtagtgtttggaaaggggcctggcagccagcctatagagagcgaagatggtcacgcggcgatgtggaaaaagaactctattttttgggagttaccctattgggaattcttggatgtccgccacgcaatcgacgtgatgcacctcactaagaacctttgtgtaaacctgcttggcttcctaggtgtatatggaaagtcgaaagatacactggaagcacgtaatgatctgaagcatatggaacaacgcggcgaccttcacccagaaccaaaggataaaggatgccattacttgagtccagccagctacactcttagcaaggcagagaaggaaagtatgtttgaatgcttggagagcatcaaggtaccgtctagatactccacgaacataaagcgaataataagcacgaaggagaagaagttcgcaaacctaaagtctcatgactatcatgtgttgatgacacaactgttaccagttataattcggggtatccttccagacaatgtccgggtaacaataacaaagctatgtgctttcatgaacgtaatttcgcaaaaggtcatcgatccggatagattagaagcccttcaaaatgatgtactgcaatgtcttgtcagctttgagttgatattttcaccttcatttttcaatataatgacgcatctgctttgtcaccttgtcaaagagatcggtattctcgggcccgtgtacctacacaacatgtttcctttcgagaggtacatgggcattccgaagaagtatattcgtaaccgtgctcgtccagaggcaagcatcgccaaggggtatggaacagaggaggtcattgaattctgcgtagaatttatcgaaaaccttcgcccaattggggtgcctaaatcacgccatgaagggagactaggggaaagaggactctcggaaggaaagcaataatgacggtagacaacaatttattccgtaaagcccatttcacggttctgcaacaatcttcattggtggctccttacatcgaggagcacttggctctagttcgcgccagaaacatcggtaagtccgatgcatggattacacggcatcacattgatacattccccgcgtggctgcgacaacatctaatgggtaacgagacgattaaccaacaactggccttcctagcaaggggaccatttggctcgatagcgacattccaaggatatgagatcaatgggtacacattctacacgagagagcaagacataaagagcacgaaccagaacagtgatgtccgtattgatgccatgggacacgatggtataactggcacgtattacggtgccatcgaggacatatgggaacttgactatgaacctctcaaggtccctctgttccggtgccaatgggttaggctgactggtggaggcgtaacgattgatgacagtaggatgacaacggttgaccttaacaaggttggatactcggacgaagcttttgtccttgccaatgatgtaacgcaagttctttacgtgaaggacatgtctagcaaaggaaagaagggcaaagggcctgatgagccgaagcgccatgtggttctccgaagcaaaagaaaaatcgtcggacgacgaatctcgggggtgaggcgcgctctctctctctctctccaaaccgccatcgacgcccatgccgccgccgccgccgccgccgcgccacgccgccatcgccgcgcctcgacgccgcgcgccgcccctgccgacggccacgccgccgcgcgatgatgccaccgccgccgcgccacgacgtcgccgccactgccgatggccccgccgctgccgcgccaggccaccgctatggttgatcgcagagggaagcagctagtactggaatgaagaagaggggaacgaggatccaaatcagtacttgaacgaggaggtgaacgaggggaacgtggagaggaatgcagaggggacagaggagggtactgaggaggggaacgaggtagcggatgctagtggaagtcaaccctccgctggacagaagagggcacgcggacaacgaggtgccgcgaagaagatatagagggtcggcacatcataactgaggtggacgaagacggccgacctagtgccccggcagaagcagccaagaattacgtacgacacaacggttgggttgtgagggataacgtgcctgtcagtatggtgtactggcgcagaacaagggcacgcggagatcacgacaggtttgtcctagattcggagaaagagatgctgtggaccacaatgctcgagacgttcacccttcctgcgggtacagagaacataatgaaaaggtggactctaaagaaaatggcagaacagttccagagattcaagggagatctctaccataaatacatcctgaaggggcagacaccgaacttcaacacattcccgaagctaagggatcactgggacgagttcgttgcttataagacagggcaacaagggcaagcgatgatggacagaaacaaagaaaatgctgccaagaagaagtaccatcaccacttggggtcaggcggctatagcgtcgcaatgccaaagtgggaggagatggaggcaagcttgattgagaggggtatcgaaccggccaccgctaaatggccgaatcgatcgaagttctggcactatgctcacggtggaacgcttaaccccgttgatggctccctagtgttcagtgatcagatacgcgatgctgcaagtcgactaacggacgtagtggaaacctcttctcagggcacgtttcgacccgacaaagagaaggacgagctgtcactcgccctgcagactcccgagcatctaggacgaacgcgagggaaaggcgtggttccttggaagattggattcaaggaagacatccacacgtacaggagtcggatgaggagcaagagagataccgaggcgaagattgcagatcttgagtacagggtatcgagctacgatctcagcatgcaagaggaggtggcaaggaaggtcgatgaatgcatggccgcacatcagtgccaggatccccagccgtacattcctcctgtaatggtcagcccctcaggcaatcgaagcagttgcgcctcaacgggcaggtaggatcacagagcatggacgccatgcaaattcaggacgaaaccacctgccccgttgatgaaatcacgcagcggacaccatgtgagctgcatattcccttcaagaacttatcaatcaaggtggcgtcgggaatggccatcccaacggacccttgagggacttaccactgcaggccgattccagcaggatactcgagggtcgaagttgagctggtggaagccgtgtacgaggacctcgagttggactaccctggaggagacggtgagacgcatctacgagacacaagccacgccattatactatggcgcaagtggtacaacatcctccctgggagacaagcggcgtctcgtgcaccatctcctcctcaggctcctgcaccgtctcctcgtcaagctcctgcaccgtctcctcctcaggctcctgcaccgactcctcctcaagctcatgcgtcgtgtcctcctcaggctcctcgtccggcaccttccaagtcaaggtctcaccaagctccaccgcctgcccgcacaagggcaacgaagaagatgaaagttgacgccgcagaaaacaaggtgccgccgtacgattgcatgcaagaggagcttgacggttatgtggcagcaaaagtgaagaagcaagtgaagcctcggagtccagaaaagaagattcctatagacccgagtgccaagaacttcttcaggagtatgtctgcaccagccaaggaggtcataaagctaacggactatgagcgaacacttaagaaagcatattatggaaagtccaaaccagtccctcagcttggagagcaaccaaaccaggaggtcgagccgttgatgaccggggaagaaattggaataaaagaatttatttctgacaccgggctaactagggctcaattgcttagcggcgcaccaatcccaaaggcggaagtgaaataccaatacgaactcggtaaaccgcttgtgaagcctgagcagctgcagtccctaccgacacagatgtacaaattccatcaactgtacatggaaatgagtgcggaaatgagcgccaccggtagagagatgatcagagcgaggatcaagcacacggacttcttgcaaggagaagatgttctctggatcaatttcaagggtatctacgaactataccagctggacgccctcgacgtctctcttctgagttgttggattttaatggagattcaaagagcccgacggcgggggggttttcgatactggattcatcgacccttggaaagtaaacgtcgaaatgatcaccaagtatctgcaagccacaagccacagaggacaatctcgtccatctcctaaaggagcagcattccaagacgttcatactattgccgtacgacacagaattccactgggtccttttactcttcgacttggaggcatgcagagtcaatgtctatgactcaatgaataaaaaagagtctacttttgacaaggtttttgaacttatagacagggcttggtatcggttccgtcatttggtctgcaacaattggaaagaaaaacttaggcagaggttcaaatttcctgttattcacatgagggataacctcacacacaaggaatttatcgcggcggttcaagaacaactcatgggattcatcaacgaacaagtccttgatcccgagggtgaattctactatgacggaaatacaattcataagtcatggagatttttttttaaagggagagtgatttcctagccacttgaggtatgtgtggtggagagaactagagaaacacgcgtgcgctcgctcgcgttgc

SEQ ID NO: 43925 - DNA, 1583 bp, Oryza sativa
  Clone ID: PAT_MRT4530_47035C.1
attggattcaaggaggacatccacatgtacaggagtcggatgaggagcgagagagataccgaggcgaagattgcagatcttaagtatagggtatcgagctacgagctcagcatgcaagaggaggtggcaaggaaggttgatgaacgcatggccgcacatcagtcccatgatccccagccgaccattcctcctgcaatggtgagcccttcaggcaattgtagcagctgcgcctcaacggggcaggtggcatcgggcatggccatcccaacggaccgttcaggtacttaccactgcaggctgattccagcaggatactccaaggtcgaagttgagttggtggaaggcgcgtacgaggacctcgagttggattaccctggaggagacggtgagacgcatctacgagacacaagccacgccattatactatggcgcaagtggtacatcatcctccctgggcgacaagcggtgtctcgtgcaccatctcctccggctccaccatctcctcctcaggctcctgcaccgactcctcctcaggctcctgcaccggcaccttccaagtcaagggccctccaagctccaccgcctgcccccacaagggcaacgaagaaggcgaaagttgacgccgcaaaaaacaaggacccggggtacgattgcacgcaagaggagcttgacacttatgtggcatcagaagtcaggagacaattgaagcctcgaagtccagaaaagaagattcctatagacccgagtgccaggaacttcttcaggggtatgtctacacctgccaaggaggccataaagctatcggactatgagcgaacacttaagaaagcatcttctggaaagtccaaaccagtccctcagcttggagagcaaccaaaccaggagatagagccgttggtgaccggtgaagattttggaatacaagaatttattaatgacaccgggctaactacggatcaattgctacgaggcgcaccaatcgaaagggcggaagtgaaatacatgtacgaactcggtaaaccgcttgtcaagcctgagcagctgcagtccctacccacacaaatgtacaagttccatcaactgtacatggagatgagcgccaccggtagagagatgatcggagcgaggattagggacacggacttcttgcaaggagatgatattctctggatcaatttcaaggccggcgccgccgcgccctcgctcccgcgtcttccgggccacgtcgcccacgtcgccacccacgcccgtgtcccccgcgcccactccctctctctcccgcccgcgctgcgctcgagacggccgggattcgaattcctccccacttctccccactccgccggcgaaattgcggccatcccggccacgatcgacccccgtgggtgtatataaagtgtccccgcctcctcttctctctttttcgttttgcaaccacccgctctcgtgccctccatcgccctagcgccatcgccctcctttccgccgccgccgccaacgctccggtcgccgctagccgccgctagccaccgtgccaagccgcgccatcaacgtcgtcgcgctcgccgtcgtgcgggtcgtcacgt

SEQ ID NO: 43926 - DNA, 5776 bp, Oryza sativa
  Clone ID: PAT_MRT4530_47036C.1
atggatcggcaatggatgtacgctgaccggcggttcaaagagtttatcgagggcgtgcattattttttgagagtggccgaagctaacaagcgtaacgattttatttgttgtccatgcaataagtgtaagatccagaaaaagtattctgcatccaggactattcatttccacttgtttgagtcggggttcatgccaagctataattgttggacatcccacagtgagcaaggggttgaaatggaagaagatgaagcgcaggacgagaacattcccaactgggctcagtacgctagatttgaaggaaatcaaacgggtgaggtggacagggatgctggcgataacgacgctgtggatgatcttggtcagatgttgcaggacgcaaaggaggactgtgaaagtgaaaaggaggcccataaattggagcggatgttagaggaccacagaacgtcgttgtacccaggttatgagcaggggcacaaaaagttggataccactctggagttcttgcaatggaaggcaaaaaatggtgttagtgacaaggcatttggcgatttattgaaactcgtcaagattattcttccggagggaaacaaattgcccgagacaacgtacgacgctaagaagatagtctgccctctaggactggaagttcagaagattcacgcatgtctgaatgattgtatcctatatcgcggtgaggagtacaagaacctagaagcatgccctatttgtaaagcactacaatacaagattagacgagaggatccaggtgaagttgacgggcagccaacaaagaacataatttctgctaaggtgatgtggaatttccctataatacgacggctaaggcgtttgttcaggaacaaggggaatgctagaatgatgcgttggcacgctgaagaacgtcaacaggacgggatgctgagacaccccgccgatggttcgcagtggcgaaacatcgatagaaaatttaaagattttggaaaggacgcacgaaacatacggtttggtttaagtacggatggcatgaatctttttggagagatgagcagcggccatagcacttggcccgttacgatgtgtatctacaacctccccccttggctatgcatgaacaggaagtacataatgatgccaattattattcaaggccccaagcaacctggtaacgacatcgatgtgtacctaagaccactggtcgaagatcttaaactgttgtggaagaaggaaggtgtccctgtgtgggacgaggacaaacaggaggagtttaacctacgagcgctgctgttcgtaaccatcaacgattggcctgcacttggcaacctatccgggcagtccaacaatgggtacaaggtttgcactcactgtatggatgaaacagaaagtacgtatcttaagcactgtaggaaggttgtgtacatgggtcatcgtcgattccttgctgcaaaccatccagtacggaagaaaggcaagcactttgaacataaggcggactaccgtaagaagactaaacatcgcagcgggaaaacagtgtttgctatggtaaaagatcttaaagtagtgtttggaaaggggcctagcagaagcccttcagaatgatgtggtgcaatgtcttgtcagctttgagttgatatttccaccttcatttttcaatataatgacgcatctgctttgtcaccttgtcaaaaagatcggtattctcgggcctgtgtacctacacaacatgtttcctttcgagaggtacatgggcgttctgaaaaagtatgttcgtaaccgtgctcgtccagaggcaagcatcgccaaggggtatggaacagaggaggtcattgaattctgcgtagaatttattgaagaccttcgcctaatcggggtacctgaatcacaccatgaagggagactacggggaaaggggactctcggaaggaaagcaataatgacggtagacaacaatttattccgtaaaacccatttcacggctctgcaacaatcttcattggtggctccttacatcgaggagcacttgggtctagttcgcgccagaaacatcggtaagtccgatgcatggattacacggcatcacattgatactttccccgcgtggctgcgacgacatctcatgggtaacgagacgattaaccaacaactggccttcctggtgaggggaccatctggctcgatcgcgacattccagggatatgagatcaatgggtacacattctacacgagagcccaagacatgaagagcacgaaccagaacaatgctgttcgtatcgatgccatgggacacgatggtacaactggcacgtattacggtgccatcaaggacatatgggaacttgactatggacctctcaaggtccctctgttctagtgccaatgggttaggttgactggtggaggcgtaacgattgatgacagtgggatgacaacggtagacaaggttggatactcggacgaaccttttgtccttgccaatgatgtaacgcaagttttttacgtgaaggacatgtctagcaaaggaaagaagggcaaagggcctgacgagccgaagcgccacgtggttctcccagtgcgccatcgtcttctccaccaacacttagaagatttttctccgatctcggcttctccttcgccgccacagcctagggcatccccgcgccgacgccgccatcgtctctcgccgtcgtctcgcggtcatcgttgtcgccgccgccgccaacgtcgccgccgcctctctctctatctcgatctcgatctctctctccaaaccgctgccgccttgttgccgacgccgccgccgacgacgcggccgaccccgactccgcctcctggaacgaccgtgaacttaacgagaacgaacgtgaatgaaacgtgaacgaaacgtgaacgaacgtgaatgaaacgtgaatgaaatagtttacgtggagagggatgcggaggggaacgaggagaggaggctagtggaagtcaaccctccgctggacagaagagggcacgcggacaatgaggtgccgcgaagaagttagagggtcgacacatcacaacagaagtggacgaagacggccgacctagtgccccggcagaagcagccaagaattaagtacgacacagcggttgggttgtgtgggataacgtgcctgtcagtacggtgtactggcgcagaacatgggcacgtggagatcatgacagcttggtcccagattcggagaaagagatgatgtggacaacaatgctcgagagattcacccttcctacgggtacagagaacatagtgaaaaggtggactctaaagaaaatggcagaacagtttcagagattcaagggagatctctaccagaaatacatcctgatggggcagacaccaaacgtcaacacattcctgaagctaagggatcactaggacgagttcgttgcttacaagacagggaaacaagggcaggcgatgatggacagaaaaaaagaaaatgccgccaagaagaagtaccatcaccacttggggtcaagcggctatagcgtcgtgatgccgaagtgggaggagatggaggcaagcttggttgagaggggtatcgaaccggccaccgctaaatggccggatcgatcgaagttctggtactatgctcacggtggaacgcttaacccagttgatggctccctggtcttcagcgatcagatacacgaggctgccagtcgactaacgaacgcagtggaagcctcttctcagggcacgttccgacccgacagagagaaggacgagctgtcactcaacctgcagactcccgagcatccaggacgaacacgagggaaaggggtgattccttggaagattggattcaaggagaacatccacacgtacaggagtcggatgaggagcaagcgagataccgaggcaaagattgcagatctttagtacagggtatcgagctacgagctcagcatgcaagaggaggtggcaaggaaggtggatgaacgcatggccgcacatcggtctcaggatccctagccgtacattcctcctgcaatggtcagcccatcaggcaatcatagcagctgcgcatcaacggggcaggtaggatcacagagcatggacgccatgcaaactcaggacgaaaccacctgccccgttgatgagatcactcagcggacaccatgtgagttgcatattcccttcaagaacttatcaatcaaggtggcatcgggaatggccatcccaacagacccttcagggacttaccactacaggccaattccagtacgatactcgaaggtcgaagttgagttggtggaagccgcgtacgaggacttcgagttggactaccctggaggagacggtgagacgcatctacgagacacaagccacgccattatactatggcgcaagcagtacatcatcctccctgggcgacaagcggcgtctcgtgcaccatctcctcctcaggctccagcaccgtctctacctcaggctcctgcaccgactcctcatcaggctcctgcaccgactctgcctcaggctcctcctactcaagcttctacagtgactcctcaagctcctgcgccgactcctcctcaagctcctcgtccggcaccttccaagtcaaggtcccaccaagctccaccgcctgcccgcacaagggcaacgaagaaggcgaaagttgacgccgccggaaacaagcagccggcgtacgattgcacgcaagaggagcttgaatcttatgtggcagcagaagtcaagaggtaattgaagcctcaaattacagaaaagaagattcctatagaccctagtgtcagaaacttcttcaggggtatgtctgcacctgccaaggaggccataaagctatcggactatgatcgaacacttaagaaagcatattctgcaaagtccaaaccagtccctcagcttggagagcaaccaaaccaggaggtcgagccattggtgaccggtgaagaaattggaataaaagattttatttctgacaccgggctaactacggatcaatttctacgaggcgcaccaatcccaaaggcggaagtgaaatacaagtacgaactcggtaaaccgcttgtcaagcctgagcagctgcagtccctaccgacacagatatacaaattccatcaaccgtacgtggaaatgagcgccaccggtagagagatgatcggagcgaggatcagggacatggacttcttgcaaggagaagatattctttggatcaatttcaagggtatctacgaactatacgagctggacgccctcgacgtctctattatgagttgttggattttaatggatattcaaagggctcgacggcggggggttttcgaactggattcatcgaccctcggaaaataaacgtcgcaatgatcgacaagtatccgcaagccacagaggacaatctcgtccatctcctgaaagagcagcattacaagacgttcgtactattgccgtacaacacacaattccactgggtccttttactcttcgacttggaggcttgcgtagtcaatgtatatgactcaatggataaaaaagagtctacgtttgaccaggtttttgaacatatagacatggcttggtatcggttctgtcatttggtccgcggcaattggaaagaaaaacttaggcggaagtttaaattttatgttattcgcatgagggataactcatacacaaggaatttatcgcggcggttcaagaacaactcatgggattcatcaacgaacaagtccttgatcctgaggtgaattctactacgacggaaatacaattcataggtcgctagct

SEQ ID NO: 43927 - DNA, 6316 bp, Oryza sativa
  Clone ID: PAT_MRT4530_47037C.1
atggatctgcaatggatgtacattgactggcggtccaaagagtttatcgagggcgtgcattattttttgagagtggccgaagctaacaagtgtacggttttatttgttgtccatgcaataagtgtaagaaccaaaaggagtattctgcatccaggactattcatttccacctgtttgagtcagggttcatgctaagctataattgttggacatctcacggtgagcaaggggttgaaatggaagaagatgaagtggaggacgagaacattcccaactgggctcagtacgttggatatgaaggaaatcaaatgggcgaggtggacagggatgctggcgataacaacgctgcggatgatcttggtcagatgttgcaggacgcaaaggaggactgtgaaggtgaaaaggaggcccataaattggagcggatgttagaggaccacagaacgtcgttgtacccaggttgcgagcaggggcacaaaaagttggataccactctggagttcttgcaatggtaggcaaaaaatggtgttagtgacaaggcatttggcgatttattgaaactcgtcaagaacattcttccggagggaaacaaattgcccgagacaatgtacgaggctaagaagatagtctgccctctaggactagaagttcagaagattcacacatgtccaaatgattgtatcctatatcgcggtgaggagtacgagaacctagaagcatgccctgtttgcaaagcactacgatacaagattagacgagaggatccaggtgaagttgacgggcagccaacaaagaagagaattactgctaaggtgatgtggtatttccctataataccacggctaaggcgtttgttcaggaacatggggaatgctagaatgatgcgatggcacgctgaagaacgtcaacaggacgggatgctgagacacctcgccgatggttcgcagtggtgaaacatcgacagaaaatttaaagactttgaaaaggacgcacgaaacatacggtttggtttaagtacggatggcatgaatccttttggagagatgagcagcggctatagcagttggcccattacgatgtgtatctacaacctccccccttggctatgcatgaagaggaagtacataatgatgccgattattattcaaggccccaagcaacctggtaacgacatcgatgtgtacctaagaccactggtcgaagatattaaactgttgtggaaaaaggaagatgtccccgtgtgggacgaggacaaacaggaggagttttacctacgagcgctgctgttcgtaaccatcaacgattggcctgcacttagcaacctttccgggcagtccaacaaggggtacaaggcttgcactcactgtatggatgaaatagaaagtacgaatcttaagcactgtaggaaggttgtgtacatgggtcgtcatcgattccttgccacaaaccaccaggtacaaaagaaaggcaagcactttgaacataaggcggaccaccgtacgaagcctaaacattgcagcgggaaaacagtgtttgctatggttaaagatcttaaagtagtatttggaaaggggcctggaaaccagcctatagagagcaaagatggtcacgcggcgatgtggaaaaagaactctatattttgggagttaccttgttggggattcttggatgtccgccacgcaatcgacgtgatgcacctcactaagaacctttctgtaaaccttcttggcttcctaggtgtatatggaaagtcgaaagatacactggaagcacgtaatgatctgaagtgtatggaacaacgcggcgaccttcacccggaaccaaaggagaaaggaagccattacttcagtccagccagctacactcttagcaaggcagagaaggaaagtatgtttgaatgcttggagagcatcaaggtaccgtctggatactccacgaatataaagcgaataataagcacgaaggataagaagttcacaaacctaaagtctcatgactgtcacgtgttgatgacacaactgctaccagttgtaataaggggtatccttccagataatgtccgggcaacaataacaaaactatgtgctttcatgaacgcaatttcgcagaaggtcatcgatccggatagattagaagcccttcagaatgatgtggtgcaatgtcttgtcagttttgagttgatatttccacctttatttttcaatataatgacgcatctgctttgtcaccttgtcaaagagatcggtattctcgggcctgtgtacctacacaacatgtttcctttcgagaggtacataggcgttctgaagaagtatgttcgtaatcgtgctcgtccagaggcaagcatcgccaaggggtatggaacaaaggaggtcatcaaattttgcgtaaaatttatttaagaccttcgcctaatcggggtacctgaatcacgccatgaagggagactacggggaaaggggactctcggaaggaaagcaataatgacggtagacaacaatttattccgtaaagcccatttcactgttctgcaataatcttcattggtggctccttacatcgaggagcacttggctctagttcgcgccggaaacatcggtaagtccgatgcaaggattacacggcatcacattgatactttccccgcgtggctacgacaacatctcatgggtaacgagacgatcaaccaataactggccttcctagcgaggggaccatctggctcgcgacattccagggatatgatatcaatgggtacacattctacacgagagcccaagacatgaagagcacgaaccaaaacagcgttgttcgtatcgatgccatgggacacgatggaacaactggcacgtattacggtgccatcgaggacatatgggaacttgactatggtcctctcaaggtccctctgttccggtgccaatgggttaggttgactagtggagacgtaacgattgatgaaagtgggatgacaacggttgaccttaacaaggttggatacttggatgaaccttttgtcgttgccaatgatgtaatgcaagtcatttacgtgaaggatatgtctagcaaaggaaggaagggcaaagggcctgacgagccgaagcgccacgtggttctcccaggcaaacgaaaaatcgtccaccaacacttagaagttttttccccgatcgatctcggcttctccttcgccgccactgcctagggcatccccgcgccgatgcggccgtcgtatctcgccgtcgtctcgcgggcgtcatcgtcgccgcctccgccgccgccgcatctctgggacttggcaaatatttcttgtatgaacaaatggctgatcgcgaagaggaacagatattgtacgatataatcacagatggaagcaactagtactggaacgaagaagaggggaacgaggatccaaaccagtacttgaacgaggaagggaacgtggagagcgatgcggaggggaaccaagagggaaacgtggagagggatgcggaggggaacgaggaggaggaggctagtggaagtcaaccctccgttggacagaagagggcacgcggacaatgaggtgccgtgaagaagctagagggtcggcacatcataacgaaagtggacgaagacggccgacctagtgccccggcagaagcagccaagaactacgtacgacacagcggttgggttgtccgggataacgtgcctgtcagtacggtgtcctggcgcagaacaagggcacgcagagatcatgagagctttgtcccagattcggagaaagagatgctgtggaccacaatgctcgagacattcacccttcccgcgggtacagagaacatagtgaaaaggtggactctaaagaaaatggcagaacagtttcagagcttcaagggagatctgtaccagaaatacatcctgaaggggccaaacaccgaactttgacacatttcccaaagctaagggatcactgggatgagttcgttgcttataagacaagtcaacaagggcaagcgatgatggaaagaaacaaagaaaatgccgccaagaagaagtaccatcaccacttgggatcaggcggctataacatcgagatgccgaagtgggaggagatggaggcaagcttgcttgagaggggtatcgaaccgaccacggctaaatggccggattgatcgaagttctggtactatgctcatggtggaacgctcaacctagttgatggctccctagtcttcagcgatcagatacgcgaggctgcgagtcgactaacggacgcagtggaagcctcttctcagggcacgttccgacccaacagagagaaggacgagctgtcactcgccctgaagactcccgagcatccaggacgaacacgagggaaaggggcgattccttagaagattggattcaaggagggcatccagacgtacaggagttggatgaggagcaagagagataccgaggcgaagattgcagatcttgagtaaagggtatcgagctacgagctcagcatgcaagaggaggtggcaaggaaggtggatgaacgcatggccgcacatcagtcccaggatccccagccgtacatttctcctgcaatggtcagcccttcaggcaatcgaagcagctgcgcctcaacggggcaggtaggatcacatagcatggacaccatgcaaacccaggacgaaaccacctgccccgttgatgacatcactcagcggacaccatgtgagctgcatattcccttcaagaacttatcaataaaggtggcgtcaggcatggccatcccaacggacccttcagggacttaacactgcaggccgattccagcagaatactccaaggtcgaagttgagttggtgaaagccacgtacgaggacctcgagttggactaccctgtaggagacggtgagacgcatctacgagacacaagccacaccattatactatggcgcaagcggtacatcatcctccctgggtgactaccggcgtctcgtgcactatctcctcctcaggcttttgcaccgtcttctcctcatgctccagcaccgtctccacctcaggctcctgcaccgactcctcctcaggctcctgcaccgactcctccgcaagctcctcgtctggcaccttccaagtcaagggccccccaagctccaccgcctgcccccacaagggcaacgaagaaggcgaaagttgacgccgccaaaaacaaggacccggggtacgattgcacgcaagaggagcctgatgcttatgtggcatcagaagtaaggagacaattgaagcctcgaagttcagaaaagaagattcctatagacccgagtgtcaggaacttcttcaggggtatgtctgcacctgccaaggaggccataaagctatcggcggactatgagcgaacacttaagaaagcatcttctggaaagtccaaaccagtccctcagcttggagagcaaccaaaccaggagatcgagccgttggtgaccggtgaagaatttggaatacaagattttattaatgacaccaggttaactacggatcaattgctacgaggcgcgccaatcgaaaaggtggaagtgaaatacatgtacgaactcagtaaaccgcttgtcaagcctaagcagctgcagtccctaccgacacaaatgtacaaattccatcaactgtacatggagataagcgccaccggtagagagatgatcggagcgatgatcagggacacggacttcttgcaaggagaagatattctctggatcaatttcaagggtatctacgaactataccagctggacgccctcgatgtctctattatgagttgttggactttaatggagattcaaagggcccgacggtggggggttttcgatactggattcatcgaccctcggaaagtaaacatcacaatgctcgaccagtatccgcaagccacagaggacaatctcgtccatctcctgaaggcgcagcattacaagatgttcatactattgccatacaacacagaattccactgggtccttttactcttcgacttggaggcctgcgtagttaacgtatatgactcaatggataaaaaagagtctacgtttgacaaggtttttgaacttatagacagggcttggtatcggttccgtcgtttggtccgcggcaattggagagaaagacttaggcgaaagtttaaatttcctgttattcgcatgagggataacctcacacacaagtaatttatcgcggcggttcaagaacaactcatgggattcatcaacgaacaaatccttgatcccgagagaaatacaattcataggtcgttagcttctgagataacgcctactactacgtcgaagtc

SEQ ID NO: 43928 - DNA, 363 bp, Oryza sativa
  Clone ID: PAT_MRT4530_47038C.1
atgtgggttggaaatggaaggcccagagttaccgtagaggtcaacgaaggggaggacatgccaaggtctgaagtagccggaggattcaagagcagtggcctcatcgatgtacgacatgacgagcccgatggaatggccccgccggttgaccttgtcgacctgccatctcaccctgtccattgcaggatgcactggcaaagccatggaggaggatcctgccagcaggaagagcaggagcagtggcagatggcacctcgtcagaggtcagaaggaaaagggctgcctgcaattgcaaagcaaccctcggtagttgaagtcacagcgaccgtacaacctcctgcaactgcacctctgcatcagtgg

SEQ ID NO: 43929 - DNA, 1951 bp, Oryza sativa
  Clone ID: PAT_MRT4530_47039C.1
cggacgcgtgggtttcaccccatgtggcatactggcaaggtgagaagttgaaaggcaaggctctctctgcttcaactcaatccatctatgatccatctacgacgagtctactaccactgatgcagaggtgcagttgcaggaggttgtacggtcgctgtgacttcaactaccgagggttgctttgcaattgcaggcagcccttttccttctgacctctgcaagtaaacaaagcaatgagcaaccaaatcctgtcatgctaactccgcagttatagtcagaaaagcagcgaacttgtatgggccagctgaaatccttacctttagatttggcaatgttttactggtactgtacatggtcaatgctttgggatggagatggaggtaaatctttgcatatgcaggcttgatttcttctctcttgcattcagctcaagcttctctgataaaaaccgacactgatgacagacacatccaacaatctcaatattactagtagtttagtaccaccacttggcggccctctttgatcgccgtactcatatacttatatattatactaaattggcccgcccgcagcacgtccggcaccagccgtaccaattaccaactccttaattggactttaaagcttgctactcagctgctctaagctcacaccgatccagtaatcgagctccagacatccatcaatggccatggagctctctaacctgacgaggtgccatctgccactgctcctgctcttcctgctggcaggatcctcctccatggctttgccagtgcatcctgcaatggacagggtgagatggcaggtcgacaaggtcaaccggcggggccattccatcgggctcgtcatgtcgtacatcgatgaggccactgctcttgaatcctccggctacttcagaccttggcatgtcctccccttcgttgacctctacggacgaaggtatcacatcgggagtattagaggtgtcaatgttatatatgcactgacaggacaacgcaggttaaatgcggctgtgactgtacagactctcatcgacgtctttactgtgtctggcattgttcattatggcacagcaggaagttctaatgattcaatgtcatttggcgatgtcagtgtccccaaatttgttgcttatacaagtgcttggacatggaagaagttcaaatcaccaaaagagtcggatacagaacttagctttggagattttactgtcccaaatggaggagagaatcttctaggagctctgaaattcagaaatgaggagctatactcagtgggtaagcctatgaaagaagttttctggttacctgtagattcagcatggttcaaaatcgcagaaggacttaaggtttcacttgaaagatgtaacgacactttctgcttgccaacaactccaaaagtagtctgtgggctaaaaggatcgtcagctgatatgtttctagacaatgcagaatataggaagttccttttcagagaatttggtgtatcaacagtagatgaggagagtgcagcagtggtgatgacaacaacatctcctggcatacctgtgattgtattccggggagtttctgatttggctggaggggagccaacatggtcgtcaacaagcctgatgaacctggcatctattaatgcactcaaagtggcagtggagtttattgctacagtcgggaaacagaagtcaacaatgtcagcaggaagtgctaataactgaaggaaaaagatcacatccatgctgatccaataatgccctggaataacattttacagcagtagctgcattcagaataagatgctttcctgagcttcaagtgcatgtcctctcccataaaggatattagtgttgaattattttgttgaaacttgtaagcatgcatgtgcgatcattttattgcaaatggaatagcagatgatgttgctttttacgaaaaaaaaaaaaaaaaaa

SEQ ID NO: 43930 - DNA, 289 bp, Oryza sativa
  Clone ID: PAT_MRT4530_4703C.1
agtatcaaagttagacagctgctgttccgatataaaaaatattggtaaatcgttctacatcaaaacaggcctggcttttacataccacagggctacctgctcctctatagtcccttgcacggccgggtgggcttttaataacacagtggaccgtgagaagctaccccagcaactagaggtggagttgtggatacctcaggtggaggccatggcgtgagcgtggcaccagctcttccttctggctgcagtggcagtggctgctgcggctgcggtacaagctgggggggag

SEQ ID NO: 43931 - DNA, 325 bp, Oryza sativa
  unsure (1)..(325): unsure at all n locations
  Clone ID: PAT_MRT4530_47040C.1
acgcgcgcgggagtcatgccatgccgccggccgtcctcgacgccgcgcgcaagagatggagagggcagacggctccggggccgcagcacgaccgctcgacggcggcgcactccccctcgggcgagtgcgcgcaccggcaagaggatgtgcagcggcgccgccgctcgtcgtcgcccgctcgagctccgagagaaaagaagggccggcgccgcgccgccgtgctcnccnnncgncgngtnnntncnncatgccgccgcgccttgccgccgcngcttgggtttcggtcggcnggctctgcttgggtttctgccgttggcttgtgggg

SEQ ID NO: 43932 - DNA, 308 bp, Oryza sativa
  Clone ID: PAT_MRT4530_47041C.1
ggtgatacctgtagaccggatatagagagtattggggtacgttggtacaagaatctacgtaatacgacatcaaacaaacagaagacgaagattatactggttcaggccccttgagaggtaatagccctaatccagttggtatgggattatatgatgggaatcacaggttacaaagggaacgatggaactcgatggatccggcgagatcgtaatcgagcaggctgtgggggttatgttggctctgagattcgatcccttaggtcctcccagggggtcccttttatatcacaggtcgggcggtttccaag

SEQ ID NO: 43933 - DNA, 405 bp, Oryza sativa
  Clone ID: PAT_MRT4530_47042C.1
atggcggtggcaacggaccccggctgtgattggcagcagcgcattgacgacgacggagagatgcagtggatgagtaggttcgtattggaggcaacactcgtgaagagtattcagctgccacaaggcaataagagaaaatattttgctaaagcacaacagtccgttaggaaggacgttgaacaagcatttggggtgctgcaagctcgctttgctattagccggtgcggcgtatgctcccacggcatcaagaccggcattgccgcggtgttcacagcggagtgcaaggcgacgacgagtaggagagggacaacagcgatttcttgggcggtggaggccgcttgctcgccctccggcctcggcacgccacccgccgcttccacatcactgccggcttgggagagatag

SEQ ID NO: 43934 - DNA, 489 bp, Oryza sativa
  Clone ID: PAT_MRT4530_47043C.1
cccacgcgtccggccacgcgttcgaaaaaatctgacctcgagacgaacgtagaatcggcttctcaagatgctgatctttgagaagtaccctgaccgggaggatcatgaccctggaggttgagtcctgggacaccattgacatggttaaggcacaagatccatggacaaggagggtatacgcccggaccagcagtgtctgatgtttgctggaaagcagcttgaggatgggcgaaccctgtccgagtacaacatccagatggagttcacgcttcaccttgcgctcatgctcacgggaggcatgcagatcttccataagaccttgactggaaagaccatcacccttgaagtagagctgtctgacaccattgacaatgtcatggccaagatccaggacaaggagggcatacccccggaccagcacggtctaatcttcactggcgagcagcttgaggatggtcgcaccctgcccgattacaacatacagaagga

SEQ ID NO: 43935 - DNA, 375 bp, Oryza sativa
  Clone ID: PAT_MRT4530_47044C.1
atgcccttggctgtggctatgaagagagagagagagggagagggtgagtcaggggaggaccgggtgcatggcgccggagacctcgctgagaggcggtggcagcggaaggaggacaagacggcgatgagaggagacaacagcagcatcatgaagagcactggaggagaagaggacggcgacgcctctgatgaagagaacccgtcgtcgtttctcctccccggtcaaacacacgggctgcaagtctggaatgatggagaaccaaacaacccgctcaatccaacgctcacgtgtgcgtctgttaggctgtgggccccggctgtcaggctgtggggccccggtcaacgtcttgaccgggacgcgactgtcgcgcagtga

SEQ ID NO: 43936 - DNA, 2124 bp, Oryza sativa
  Clone ID: PAT_MRT4530_47045C.1
actagtggatccccgggctgcgcgcaccttcccaatctaacctccctcctgagtcctgacccatccatttcttcccactcgctcgcccacctcgccgtcgccgcactcccccccaccatggcgtcgcgcgacctcgccgagagcctcctccccgtggggggcggcgccgccaccgccaccgccaccgccaccgcccacgacgagtacgacgagcgcgcgtacgactccgacgacaaggtctccatcgccgtctcggactccgactcggaggacggcggcggcggcggcggcgacgccatgcgcccggccttctcgtggcgcaagctgtggcggttcacggggcccgggttcctcatgtgcatcgcgttcctcgacccggggaacctggagggcgacctgcaggccggcgcggcggcggggtaccagctgctgtggctgctgctgtgggcgacggtcatgggcgccctggtgcagctgctctccgcgcggctcggggtcgccacggggaagcacctcgccgagctctgcagggaggagtacccgccctgggccacgcgcgcgctctgggccatgaccgagctcgcgctcgtcggcgcggacatccaggaggtgattggcagcgcgattgccatcaagatcctctccgctggcaccgtcccgctctggggcggcgtcgtcatcaccgcgttcgattgcttcatctttttattcctggagaactatggagtgagaaaattggaagcatttttcggagtcctgattgcagtcatggcagtatcatttgcaattatgtttggtgaaacaaagccaagtggcaaggagcttctgattggtttggtggttccaaagttgagttcaaggacaatcaaacaagcagttggaattgtgggctgcataatcatgccccacaatgtcttcttgcactcagcactagtgcagtcaaggaagattgacacaaacaagaaatcccgtgttcaagaagcagtgttctattacaacattgagtccattcttgccctcattgtctcgttctttattaacatctgtgtcacaacagtttttgcgaaaggattttatggatctgaacaagctgatggtataggtcttgagaatgctggacagtacttacagcagaaatatgggactgcattctttcctatactgtatatctgggctattgggctgttagcatctggacagagtagcactattactggcacatatgcaggccaatttgttatgggaggcttccttaatcttcggttgaagaagtggttaagagcaatgattactcgaagctttgcaattattccaactatgattgtggctttattttttgacacggaggatcctacaatggacattctgaatgaggcactcaatgttcttcaatccatacagataccatttgcactgattcctctcatcacacttgtctcaaaggagcaagtcatgggatcatttgtggttggtcctatcacaaaagtcatgtgatggattgttacagtattcttgatgctcatcaatgggtatcttatactgtccttctatgccactgaagtccggggagcattggttcggtcaagcttgtgcgttgtattggcagtttaccttgcattcatcgtctatcttatcatgcaaaatacctcactgtattctcgcctccgctcagcaatgacaaagagcacatgagcgtccttcagaagttttttgaacaaaaaaagggcaggacaattcccttatcggccttcagaactgttagtttctaccatggtgaagcagatcatattagaagaaagatgctcccccatgtaaaaacttgtactactgcctgcttgtattagctccaggaagaagcatagtaaaaaagtctatttgtattagctccaggaagaagccttccgatgaactatccacctgtatattcctctgctgttgtataagtgcattagcgaattggttgggcttctccacttagggttgggataaaccacagtggcattcatgtgtttgaggttataaacagcaagtagataactttgttacctcaaaaaaaaaaaaccggaattcgatctgcagaatttgctgttgacaccttggaacttctgaaaaaaaaaaaaaaaa

SEQ ID NO: 43937 - DNA, 946 bp, Oryza sativa
  Clone ID: PAT_MRT4530_47046C.1
tttaagtaattgtaattctttttctatcatttgatttattggtaaatatacttttatgtatacatatagttttacatatatcacaaaagtttttgaataagacgaacgactcaaatacctaatattttgcttagagaagagctttttttgtcttcgtgaagcttcttcttaaactttgtatgaaagccagataagtgatatcccccaagtgtctcaattagaaaacaattctttagtagatgaatttacggaaaatgaaattaaagatgcaatttctcaaatggaacataataaagctacgggtccagatggattttctgctaagttttatcaagtgttttggaatgttatcaaacctggtttggtagatttatttaaggattttcatagaagtctaaatctttaatcactcaactttggtactattattttacttcctaagtgcaaggaggctattaagattcaacaatataggcctatttgcttacttaatgccaattttaaaatttttactaaagttgctacaaatacaatttctggagtagctcagaaagttattagtcctacataaataccatttatacctgggagaaacattacgaaaggggttgttatcctccatgaaacagttcatgaattacatcagaaaaaaaatgaatggtaagtttttaagattgattttgagaaagcctatgataaagtggaatggtcttcctgtgttcaacaaactttgagaatgatgggttttttgcaaaaatggtgtgattggattgcttctttcattcaagggggtcatattggtattaaagtaaataatcaagtgggggcaatttttcaaactcttgtacatttggtggatgattgtttatctattttacaatatactgatggtactattatttttcatgagcatgatttagagaaagcgaagaatatgaagttgtta

SEQ ID NO: 43938 - DNA, 352 bp, Oryza sativa
  Clone ID: PAT_MRT4530_47047C.1
gataaatggcaaatgcctgtttgatttgggttcagtctcagaaatcacagcaatgtatgcatgatttcttgatcaaataattaaacaactaaataggctgcagtcctatatatgaatatgaatatatatataaatatatatatatatatatgtttaaacaatcttactatgattcatacagatctgataaatactacagcccatgtataattcctaccaccacagcctgcaatcaggtactattttctccaatgtaatttaggtgtttcactaactccctacagaacgcatactgttgtatttatggaagtattacattttggcagagacacaagggtggatttgcgaggat

SEQ ID NO: 43939 - DNA, 2293 bp, Oryza sativa
  Clone ID: PAT_MRT4530_47048C.1
ctatgaagcatgcactcaccgccactttgccattttggccattttgtgcatttcaattgcattttcgttggaatgtagcttgatgggaccaaattgcccttgctcgccgggcggcggcggcggcaacgatggcgacgcgggcatggcaacgccgcagcgaagggagatacacgacctccacaccgccgacgacgacgccctgtccgccgacgaagaagcaatgtcgatggccgggatgctcgacgaggcggaggcgaggtcgtcgaggtggaggactcggcggtgcttgtagacgaagcggcggcggcggcggcggcggcatcctcgaggtcgggcgggtggaggctgcccctgcccgccaccgccatacggcaccacaaaggcggaggcaaggtcgccgaggtggcctcgtggcagcggaggcttgcgctccagctcgctagcagctgctgccgcctctccacagcgtccctctccgcctccttcgccggcaaggctcgccagcagctgctgttgcctctccatcgcatcccccttcgcctccgtcactggcgaggccatggggcgcggcgaagtgacctcagagatgtcgtcgttgaccgcggcgaggtagtcggcggaggtggcgaggtcgagggaggggaagatgtcggaggactcgccggccacctcaccgtctgggctctcccatatagcgctgctccagacgccatccatggaggaggacgaggaggaagacagtgagctgctcgtggtggacatggagatgaccggcgaggacgagctcctctccctcaacggcggcggcgtaggacatgaagggcaattttgtcttatcacccggtggaggagtgaaaatgatttcgaaaatacacaaaagggccaaaatggcaaagtggcgaataatcatgtgaagattgctgttgttgccgatccacagcttatggacagcacctcccttggccttccaccgagctcaattgcgctgcaagctgctgagttctacacggatttgaacatgagaaggtcctttcagtctgttgtacttccattcaagccagacatgctattatttcttggtgatcactttgatgggggcccatatatgtccaatgaagagtggcatgaatcgttgtctcgctttaagcatatattcagcatgaatgaacatataacaaatccaaacatcccaatctactacctttcaggaaatcatgatattggctactcagcatttcacaaaattcatcctgaggtgatttctcggtatgaaaaagaatttggatcaagaaattaccaatttttggctgggaaggtggattttgttgttgttgatgcccaaactcttgatgctaaagaattgctaatatatgctgcaggagctaaagaaagcaaagaaagatcctcctcttgggagttcatcaaagcattgtcacctggtaacaaaacaaacccaaaggttctactaacacatattccactctaccgacctgacaattctccttgcggtccacatcgttcttcacctgttatcaatcagagggtatctaatgcagccatggatcaagggataacctaccagaattatctgagcaaagagacttctgacctcttgctacacttgttgaagcctgttcttgttctctcaggccatgatcatgaccagtgtacagtagttcatcccactccttttggaccagtaacggaggttagaaaatttaagctttatgctgccatatgtttcaagtttgcatctcatgaaatgattaatgctgcagcatacccttggtatatcttccagtttgtggtgacgcttcttctgcttatcttgtggccaacaaatggtctcagatctcttccgtacgtgaactcatttgtaagcttcatgcggtcagtggctgctgaattgttttcaagaacgaaagaaaaagatgacgaggaagatggtgaatatgaaatggtctgggatgcagagggatccatgcacctggttaaaaaggccgtggcaagaacccccagcactagctcagactcaagaactacaggacggggaaatgttgttgcaaggccaacagccagaaagaatcaaccggagcctgattcatcggttcttgttgagatgagctcagaaatgatatcagaagatggaggaaaggtgcctcgctcaagcaaattgaaaataaggagggtgcttcagaggctgtttcgtgtcattcagtcaattgttgtcattgccgcattgaatgtccctctatacatgatgcttctgttcaaggattggatcgaccgttga

SEQ ID NO: 43940 - DNA, 615 bp, Oryza sativa
  Clone ID: PAT_MRT4530_47049C.1
atggcgacgcgggcatggcaacgccgcagcgaagggagatacacgacctccacaccgccgacgacgacgccctgtccgccgacgaagaagctgacgatggtgacggccatgacgatggccgggatgccgaacccccacccccaccagcgtgccaatgtcgatggccgggatgctcgacgaggcggaggcgaggtcgtcgaggtggaggactcggcggtgcttgtagacgaagcggcggcggcggcggcggcggcatcctcgaggtcgggcgggtggaggctgcccctgcccgccaccgccatacggcaccacaaaggcggaggcaaggtcgccgaggtggcctcgtggcagcggaggcttgcgctccagctcgctagcagctgctgccgcctctccacagcgtccctctccgcctccttcgccggcaaggctcgccagcagctgctgttgcctctccatcgcatcccccttcgcctccgtcactggcgaggccatggggctaccccttcacttccgtcgccggcgaggccatggggccgcttcgaaatcctagccgccatcgtcgaccgcggcgaagtgacctcagagatgtcgtcgttgaccgcggcgaggtag

SEQ ID NO: 43941 - DNA, 2675 bp, Oryza sativa
  Clone ID: PAT_MRT4530_4704C.1
ccacgcgtccggtggtatttgaggaggagccattggtgattgagcgccgcgtggtggtgagagggggaggtaggcggcgtatttaccccaccgggggtggccattaactctggccaccttggcatgcggataggcatcaccatgggatgcctctgacctctgcgcagggaggtggtggagtcggcgtgatggagagcggcgggaagcggcatttcttcccccttacgagcttgcaaatcggggatttacaatcatatcttgctgaacttactatatttttgtgccctcatacgaagaagtttctcatattgcttgataaccggccatggctgcaagaccaggacacaaaacctgctcacctgtggcaattgatggtcacaaagtcaagactttcaccttttgcaaacactagaactaggagaaagggagatgaaactgggaagaaacttgtattctctaaagatcctagacatggttctcatttgtggaatccatcatccagatggtataccttaattgatgatgccatgcggaataaaaagcttcatgtgaataggctgaaggattctcgcctgctgaacaaggaactgcaccgaaccttatatggctttataatttttgaggtagactgggctgatgtgcgcggcatgaactatttcaatgaacttcagactgatacttctatggcagtggaagctaaaacaatgaagagatgggaatttgagagtgtcaaccaagcttcatcattaatcacttcatggttttctggaaattactctgaatgccagctcctacaggattatttgaacagcatctctcctaaagaccacttatatgcttgctgtacaggaaatgtgttttatgacgctcagaattatttctcaacacctgaaggggacagtgagaatgtacagagtgatgatgacgattctggacctagtcaatgcatgagagagtcgtcaagttttacaagctcctcatacacaccacctccttgctctggaccttacaagagaagaaagataataagatctgatgctggatataatatgactgtggaatcatattctgaagttgtctcctgacgaaaacattgaggtattctatctacctcctgctgcaaagatgatgattgtggaaagaatctgctcgactctcacacatatttggcaggtaacaacctcattcagtggagcccatggcgctggatatcaagagaataaacctaatcgttagctgaaaaaagtgtgaaccattaatatttactgacacagattcatacccgatcgactggacagaccttccaaaacaacttgcttggaattggaagagtcatgtacaggtttataccgcatgtttcatcatgtagctataatcttgtgtcctatctggattttatgacctctacaagaatgtccccatgttgaaggcaactgcatcaagattgtttggccctttctttgactggatagagacgtgggaaatgatttcacgactgaagtatcttggaaccatgctttttctacataacttccagcaggcttttacatggtctcttaagattgttaactgctactaaatctgctctaagtgttttgacaaagccaatcatgggaccaattttggaggttcttgaatttaccctgccgctatggaacctttgtgctgaaacagtaggacatctgagctcagttatcatgttggcgatggagacttcatgcagtgtagttatcagtacaatgcagatgattatatggcctttttggctggtcttcagtgttgtgcttaatgttgcaaattcagtcctgtaccctttcgtttggcttcttggagaaattctagctgcacctttccggcttgttgttgcgatagcaagttttgtggcagactcttttgtggacattgttggagttctgagggagacctggtctacattgagttccttatatcaagttggttctgcatccggatcgaccggacttgcatctgaaactaccatctgggggtcactatggaaagatcttctgtaccagattttccgtgcgattcgaagcattctgtatggttttgttgccttcttttcaacatgcaacaggcatcggcttagcatttacaaccacattcaagtatttctccgacgcctatctcgtgttttaactggtgcacagcataccacctcttgtgaaggcacacggaggtattctagtcaaaatcatcctatgttaagctatgttgaactacgaaatgtctacagaatcaacaaaggaaaactcacacgagataacagtgggcctggcaacttgacttgccaggaaagttttgatgtgatggaaaagttagaaaagtttgaacaggaaacatttactaacacagaagcatacccggtcgactggacagaccttcaaaacaacttgcttggaattggaagagtcatgtacaggtttataccgaatgtttcatcacatagctttaatcatgtatcctatctgtaccagcgggcaagtagtgaaacaaaacgccgcaattgtacatacgcagaatctgttgtttgttcattctaatggcttgtatagcagcctagtaggtttgtgcatatcctcccgaaatgttcctctgaacaacaattttgtaattacatccgagtattagctaaatagctaagcatcaatttccat

SEQ ID NO: 43942 - DNA, 243 bp, Oryza sativa
  unsure (1)..(243): unsure at all n locations
  Clone ID: PAT_MRT4530_47050C.1
catgaatcagcaacacctattgatgagacatcaacagatgaacataatgatggaaacatatttccttatctccatgttaatattggatcaggtgtcagagtgatagaggtaattggatatgggaagtttgagcggattataggatcttacctaggtgggggcactatccttggtctggcgaggctttcgacttggntgtncaagntatgatgaatncttggagtngagccagaagaggaataa

SEQ ID NO: 43943 - DNA, 1764 bp, Oryza sativa
  Clone ID: PAT_MRT4530_47051C.1
acgcgtcgccccgcctcgcctggccttccccgcgcatcctgcacggagccctaggaggctaggagaggaagaagaacacgcgcgcggggggatagtggatagccgaagcaactcgatcgatctgtggccgcgatcgtagctctcttcttggtccgatctcgtctctctcggcatggatttcaggaaggtgctcgaccagaccgtccgggagatgtaagaatcagaatttttatttctccttctccgcccctcttcctctccaggcatggttttcaggaagctgctccaccagaccggccgggagataaggagggaggtaaatcttaaggtgctcaaggtgccggaaatcgagcagaaggttcttgatgccaccagcgacgagccgtgggggccgcatggttccgatttggcagatatcgccagggccaccaagagctacggtgatagcgaaattataatgaatgtgttatggcaacgcctggggaacacacttgcgaattggcgtcacgtgtataaggcgttggctgtgatcgagtaccttctagctaatggcaccgaacgtgcagctgatggcattgttgacaatagctcacgaattgcaaaactcacaagatttgagtatttggagcctaatggaaaagatgttgggctcaatgtgcgtaagaaggctgaagctgttctagcaattttggatgacagggagaagcttcaagaggtcagagagaaggctgccgttactagagacaatggcagctactcatctggtagccactatgggagcacaggaggttcaagggaggtgggatcattcaaggatatacacacaggcacagaatggaaaaagaacaagaaggaaacagtgtcaaactacagcagcaatagagaaggactgtcttctgctgattcatttacttcagacacagagttctcagtacgcgagttctcagttcatgatccgacaagcaaatcttctcaaggaaaaactcccacaccagaacattcaagtacagcagcttttgatccttttgctgcaattccactgaagagttttgatggatccgaatcttttggaacattttcttcgaacacagcctcaaacattactgaactgccacgggattcttctgggggtcccaaaagttctgaccatggtcctttggaggatgccaattttgatgccttcacttcacacttgggatcttccacaacaagtgcaactgagtccatgaataagcccatcaaaaagcttgggcaggactcgatgtcagcatcaaaatcagttgcaaagaaagaaacttttcaggtcaaatctggcatatgggctgactctttgagccgaggattgattgatttgaatataacttcgtcacaaaagaaggtcgatctctccgatgttgggattgtcggaccgctgagcggcggatctgaggataaaggcccgggggcgacgatgggcacagcaccaggccttgcatctctgagcacgcttccgcttcgatccgccacgctcccggtgagcgagcgcgcgtgccgtgccggcggacgggttctcctcgcgctgtcgcgcagccgcttcgccggagtaggaggaggtggtggggacgggaagccttgagtacagctccatgcctataagagtaaacgtgtatatagctaccaactctgtgcgatgatcaggagacgtgttccaactaaccagcatcttctcttcccttgagcattaatatttttttacttagggcgaaatggaaaaaaaaaaaaaaa

SEQ ID NO: 43944 - DNA, 491 bp, Oryza sativa
  Clone ID: PAT_MRT4530_47052C.1
gtcatctcattctgtccaataggttctatttgcggtgtgcttgtttcattgtggggattcttagtcaattcccagtcaaagtgcaattttgaagctctgctccatcctcttccctagtaccatgaagatcttctagtgaaagtgccgaaattgaggcctctatttgcccagacacatacattgccgcagtttgatctggacgatcatggttgtcatacgcttcttgctcctgaacatcgtcctcgcctttgacaagacatcaaagtgcttcgtgtatagttttttgtacgattgccacacatgtgagcacttgtaattcttcataaacggtgtctgatctattccctgtaattcaaacagtgacattgggcctgttgtttgtaaatttttttgatgtgtgaggtatgtgtaatttttttgagcatgattcctgtagaaatttgacagacatagtggtttagttttttctttaaaaaaaaaaaaaaaaaaaa

SEQ ID NO: 43945 - DNA, 927 bp, Oryza sativa
  Clone ID: PAT_MRT4530_47053C.1
atggctggatgtctcgagtacgcacctcgtcatgatgctaagaggtctaaaactataattatcccatcaactgagctagtgagaacaaggattattgcgtcagcgaggggcgggtgtggaccgagtgcaccaaaggcgggccccacgcgtcagccaaaggggaagggcggtgcaccgtggaccgggaccacggggtggtccacgggcggtgcccctaaagtggcagagggggttggctggctcgccagcccgccgggcaagacggcggcggcagatggccggacgcccgccggcgatggcggcacgacgcggcgccggacacgggaggcagaggggaaaaggggaggaggaaggaggcctcaccgtgcgccaggcggtgaggggcgacgggcgcggcggcgagctcctcgggacgacggcgggacggcgctcccgtggcggctccatgggcgggacgcggcggacgagggcggccgcgacctggggatggagggagaggggttaggagggggagaggtggctcacggcggcgtgattcgccgaccggagatgagaggggacggcagatgctcacctcaagcgaaggggacggagttccgacggcgattaacgaagagggaggggtggccgtcgtgcggctcgacaccgcgaagacggaggggttgtcggcgctgccggacgtggctccgagcaccggaggcaagcggctggaggcaccaaacacagcatcggcctcgagtgcacggcggaggtggagtttcggtgatgattggaggaggaggggtggacgggaagcggcaaggcatggcgaagccagtgggaccaacggtggcgtgcggcggtggcgggcaactggaggcggtagaagcggcggtggctcgggttggcggcgggagtggtgctcagggggtggagagggggaaataa

SEQ ID NO: 43946 - DNA, 231 bp, Oryza sativa
  Clone ID: PAT_MRT4530_47054C.1
atgggagagtcctcatactacggcaacggttgcggctactgctacggcggcggcggcgcgtgccgctgcggctcgtgcgcgggtggcaacaagccgatggccggtgggtactacggagtggcctcggtgatggcgtcgtacgaccaccagggatggtactacggcaattggcagccgggctaccaacagaagcaatgctacgaggtccccaacgccggatgcagcatgtga

SEQ ID NO: 43947 - DNA, 412 bp, Oryza sativa
  Clone ID: PAT_MRT4530_47055C.1
ttatatttatctttttttttttttttttttttggttttttttaaatttatttgggggtttttccacccaaccccaaaaactgcaaaattaaaaataaaatccctccactcaaaacaaaaaaaaacaggaaaaacaaccccccctaaactaaaataaaaccacaacactttctattttatttttggcaaagaaagttaggtttaaaaatggaaccccccccccccaaaaccttaacccaggggggggcccaacttgactagggggggctaaaccaaacccccccccttttgggtaaccaaacaacccgggatcacttccttcacataattcagaaaaggatgggtttaaccctcaacggggagaaaaaagatctgcatcaaaaccgtgatctttttaaaaacaaaactacttt

SEQ ID NO: 43948 - DNA, 1397 bp, Oryza sativa
  Clone ID: PAT_MRT4530_47056C.1
gcacgaggatttcctttccttcgtctacctccagcagcatcagcggcggcggcagctggatcctccctcccgagactgagagcacggcaagatttgcaaaattgcaaggcgagtagttgcgtgagactgagtttttgagtgagcgagttagccatgctggtaaggagcgcctccacgccggttctcggcgcgctcctcccgtccgggagccactcgccggctgtctcctccccggccgtccacttcttcgccgactcgtcgccgacggtctcgtaccacccgccgaccatctcctgccggctcacgccaggcggctccgacgcccacgaccgctccctcggtggcctgcgccgcgcttgctccgatgggaacctcgcctctctaggcgccagcggggacgacgaccaccaccaccacctcccgccgtccggcaagtgcgcgccgcgctccaagccaacgacgctcgagacgatccagtcgttcacgcaacgcggcggcgcttccacggacgaggaggaggaggaggacgacgacgacggcgaccacgaaagcgcggagcaggagctgagctttgggaagttccgcttcagcggcagcagcacgttcgcgcaggtcgagcacccgctgttcctcgccagaggcctcgggatcgaccgcctcggctcaggcttgctgagcgccgacggcggcagcggcggttccgacggcggcggcggcggtggcgccggaggcagttacctggtgacctccgacaacggagggaatcgctctgacatcgagatgcattacaagaagatgatcgaggaggacccatgcaacggcctcttcctgaggaactacgcgcagttcctgtatcagattaaaggggatagccggaaggcagaggagtactactcccgtgccatcctcgccgacccgaacgacggcgagctcctgtcggagtacgccaagctggtctgggacgtgcaccgcgacgaggaccgcgcctccagctacttcgagcgggcagcgagagcctccccgcagaacagccacgttctcgccgcgcacgccgcgttcttgtgggacacggacgacggcgacgggccggagggtagcagcagcgacgcgctgggctacgcggggttcgccgctgctgctgctcactcgtccttggcttcggcaacaacctgatctgaacaaacgaacaaccttcctgttgtctctgaaactagcatggtgtagtattggtagtctcgcgttcatttcagtactagcttcccaataattggagcgctaaatggctggtccagtatgtgtgtatactgctgttgtaaatcaccaagcggaatcaagtttacgacgtatgaatgctgcagcactgatctgagcttcgtgtcactataacctgtttaaaa

SEQ ID NO: 43949 - DNA, 422 bp, Oryza sativa
  unsure (1)..(422): unsure at all n locations
  Clone ID: PAT_MRT4530_47057C.1
aaaagccggagcttccatatatgtcagttacatattcctcacccaacaacatatattcttancaaataccactcttacatcaaatcaaaaagagatcaggtgaaacaaaaacaaaagcagagcacggccggtaaaatcaaaagacgatgaacaaactgggaacacaccaaacaaggtgggagacatcatctaatcagagatgaacaattaaacaaggctatatattaccatgaccgcttaatttgccaccaaactcctcgcaccccgggggcttttagccaataaacctaataacctgaacttgcctaactttttcaaacccattaatccgaccaaatccttaaggtaccccctttttggcctcttcaacctctttaaccacctggttggcttaaggccacccaaccttggccagtttcaaa

SEQ ID NO: 43950 - DNA, 393 bp, Oryza sativa
  Clone ID: PAT_MRT4530_47058C.1
atgcgccgccgggcctgcagccgtcttcaccgggagccgccggcagcctccgtcgacgcgccgccagcctgcagccgtcttcaccgggagccgtcgtcggcgcgccgccgagagccgccgtcgccgccgccatctgtcgaccatggcttcggcctctcccccgtaagctacgacagcgacgatgcaagggatggagaaattatagccccgtcgtggttgacgggggcggggacggtgaaatattttcaccacggtgacggggacgcaagcatgacccccgacgaacaggacgcaaccaacatcgagaagcttgttgcgtgcgacaatcctcccaagaacgccggggttgatcttaccctctacaggctctcctccacgtccaactcgggatag

SEQ ID NO: 43951 - DNA, 409 bp, Oryza sativa
  Clone ID: PAT_MRT4530_47059C.1
tggagtaccaactttccaatgtattatttgagatataattgtctagctagcttaactgggagatgcattggtgtgggtataatgttcattcgtatgattgctctaagtcatgacgatgattgtagagtagtatttggtagtataagcgaggtgcttagactattgaatatcattatatggggttatatgctgcgggtcagtcgaggtgggccgctgatagtgatagctcagtataagtattcctccatattagtatataatcctaagttacttttctagggaggttacttctccgtatttagcaccggttggatggccataatgggttgtcgtaagaaactcggcaaccaggagtggtctctcgaaacaccaggagggcatttacaggagaatgcctcttctctcccag

SEQ ID NO: 43952 - DNA, 759 bp, Oryza sativa
  Clone ID: PAT_MRT4530_4705C.1
atgaaccagtgcgtgccgagctgggatctggacgacccggtgggtggcggcgggattggcggcggcggcggcggcgggcaccgcgtcgtgtcgggaggcgggggagggttcatgccagtggcggtgccgacgtcggaccagtacaacgaggtggcggagctgacgtgggagaagggcaacatctcctcgcatggcctgctgctcaaccgccccgcgccgcccaagttcccgccgcatcagcagctgcaggctgccatgggagggggaggaggtggcggcgtggtcggggaccgcgagacgctggaggcggtggtgggcgaggcggccgcgcggtcgtcgtcgtcgtcgcacctcgcggcgcgcgcgcgtcccgtgcccgcgccatggctcggcagcgtcggggtggtggcggcggccgacgcgctggtgccgtgcgacgccgacgcggcggaggggcggagcaagcggccgcgggaggtggtcggcgaggacgggcggcgcgcgtgcgccagccaggggagcgccgcgccggggcgccgcggcgagagcacgctgctcacgctcgacgcctgctgcggcaccgcggccgacgacgtgtgcgggttcacgacgacgaccaacaactccacctcgctggaggacaggacggaggacaagggctcgccggagacggagaacaccagcatcgccggcggcgccagcgactcgcgttgcttcagccgtcgctcgcaatcgcaggcaagcacagatagtagctag

SEQ ID NO: 43953 - DNA, 155 bp, Oryza sativa
  unsure (1)..(155): unsure at all n locations
  Clone ID: PAT_MRT4530_47060C.1
gtgatatcctacgggccgggccaacagcgctgagtcttgaaacgaaccatcttcagatgtcccaccagacgacgatcaccggatttnncaacatatcaccatatatgggaggaggattctctcncttccncctcgatgacatatactcaaaactg

SEQ ID NO: 43954 - DNA, 291 bp, Oryza sativa
  Clone ID: PAT_MRT4530_47061C.1
atgcgcgaaagcgagaaggccacatatgcgcaattagctcaccgctctcacgcccgcgagccgaccgcgatacccctggcgctctcgctcgcgtatagcgcgatactgaccgcgctctcgctagcacatagagcgagacctctccgggacccacgtgcgtcagacggcccccgtcgctacggtctcacgcgagccgaccgcgatactgcacacgctattgcgcactcaaagtgcgagaccgcttcctggcccgagtgcgtcaggcggcgtcggccggccggcccacgctaa

SEQ ID NO: 43955 - DNA, 1657 bp, Oryza sativa
  Clone ID: PAT_MRT4530_47062C.1
atggcggtggacgtgctgctgtgcgcggtgccgatctgggcggccgtcatgatcgggctcgtcatcggctgggcgtggcggccgcgatggacggggctgctctacctggggttccgaagccgcctccgcctcctctacgttcccccgggcctcggcgcgcgccgcctctggctcgcctgcaccgcgctctccgccttctccgtcgcgccgcggctcctctccaccgccttcggcagccgcggcaagcaccagcgcaaggacgccgccttggccgacgacgacgacgccgccgacgcctccggggacgccggcgattgcgtcgatggcagaacattttttgagggcggccatcatgttgtcactgagaaggacctagaacacctcgtacaacttcttgataacaaggagagtggggatacaacatggcagcatttgatggaacgtaccacttccaacatgacttacaaggcctggcgccgtgagcctgaggtgggacctatcatgtactgtagtcgcactatttttgaggatgctactcctgagcttgttagagatttcttctgggatgatgaatttcgtctgaagtgggatcccatgcttgcatatttcaaaattttggaggagttcccccaaaatggaactatgattattcactggataaaaaagttccctttcttttgcagtgaccgtgaatacatttttgggcggcggatatgggaatctgggaaaacttactattgtgttacaaagggagttccttatccagctttgcctaagaaggaaaaaccaaggcgtgtggaactgtatttctcaagttggcgtattagagcagttcaatcaccgaaacaagatggacagcaatccgcatgtgaagtaacgctggtccactacgaggacatgggcatccctaaagatgtcgccaaggtgggtgtccggcatggcatgtggggtgctgtaaagaagttccagtccggatttagagcataccagcaaatgagagacacagagaacaccctctctcgcagtgccatcatggctcgagtaaccaccaagacatctattgctagttccagttgccccctggatcaagagccctccaatgcagcgaaaaccatcgatgagagtgagaattccagagcggttcaaccagggttcgactggaaatgggtggtgttcggtggcgcagtggctgccgtctgcgtgctcaacactgggcttgttgggaaggctctcctcatcggagctgcatcaagaaggcaggcgaagaagtgatgactgagtactgatgatgagtgatcagcaccctacctgtcagcttctgcaagatggcgttgagctctcttgcgcttcagactgtgcatgttgcaagtagagaagaggtaaagcgaaaaaaaaaaggacatagatgcggtgctactacaggaggcagataattagcacgcttaattttggatctcgtatttatgcagtatcgctgtcgcacatgtgtatcgtcaccataacgtaacaacagatcgtcgtctctggctaatgtacctgaattgaagatatgtctaatgggggattaattattaaaaggttttgctaatgtgcctgaactgttgcagttgataataaaattctccgccgtaattctcgactaaaaacccaaccccag

SEQ ID NO: 43956 - DNA, 214 bp, Oryza sativa
  Clone ID: PAT_MRT4530_47063C.1
tcgaaaaagtcggtgccagaaacaaaaaacagtgctaaatgctaagatcattgccagtaagaaagagccggtgcttatatatattcagtaagctaggggtaagatatggtaacgtattcttagaggaattttcttattagaacactttctatctctctggcaagtgatacaattaatgtgggtgaaaccccatatctctcctttataagatatt

SEQ ID NO: 43957 - DNA, 1547 bp, Oryza sativa
  unsure (1)..(1547): unsure at all n locations
  Clone ID: PAT_MRT4530_47064C.1
cagtgtggtcgtcggaggcgcgaggatcgtcgacgccggctggatggcgagacgcggcnccggcgccatcggcatcccccgcggcgaaggaggaggcgccaccgctgctgcagcgccgccgagcccgatcccctgctgcttctgcagtgtggtcgtcggagaaggtgcgaggatcgtcgacggctgctggtcgatggcgagacgcggccccggcgccatcggcatcccccgcggcgaaggaggaggcgccacccccgctgcatcagcgccgccgcatccgattccccgctgcctctgctgctgcgtcttcgtcggctgctgctgctgcacggcgagacgcgttcccaccgccatcccccgcggtgagcccggcggcgcgccgtggaggaagccgccgccggcgccggcgcctccgctcagcggaaataggtgaggacgaaggccgccacggcggcggcaacgccgatgcggacgatgcggatccagaccaaaataacatgtgtgaacccgaagaaggtgacgtagatgaggagcagctggctccaaatcgcagcgaaggcgaggacccagcggagaagtcgggggagacatcgcgccatcatccttgggctggctgggctggcaaggctgataggccgaggacgcgcgcttgggcctccaatgggccgcaacgccacacggcatccactgagacctgtggtttccggactcttcgccggccgccgttgcacgtccctgtcctccctcttcacttggcgcggcagtggggtggcgtgcaacatcgctgccgacgtagcaggaggcggcgatggtggtgggggaaggaggaggtggccggcggccaaggcggcggctgtgggcgacgacggcgcagcgagtgagacaggcggcgactggatcgacagccaagggcggcagggatggcgacgcttggcgtctggggggcggcgggatccgaccgccgcatccgcccgtcgcatccgcctccgcttgcctccgccaaccgccgaccgccgcatccgcctccgcctgcgcccgccgcccgcttccgccctcgcctgcgcctgcccgcccccctccgccagccgccgccgccgcatcagggcatcgtcgccatttttgctgtgccctacgcccacgaggccacgagtggagttcgtcgccgacgccacaaccgaccgctcgcggcatccacgccgcacctccctgatcgtcaccaccgttgctccattgatctggtcggtaacgatggaggaggcagccttgagtgggaagcggtgaggttttaccatttttgcgcacgcggcatctgcatctgtgtatagtggtagtagtgcatccgccgccgtgaacgcaaatcggatgcccatgagggtgtaccggatgaggtcggtagccgaaagacgactcccctgacgaagcgcagtgccgtcctcttgtttttcttgaagctgaaccttcttcttcccgtctgccaccatacgcgccttcgcttctgccgtcaagggcttgtggagctcgtcgatgaattccttggtgtggtccat

SEQ ID NO: 43958 - DNA, 2173 bp, Oryza sativa
  Clone ID: PAT_MRT4530_47065C.1
aataaaatataatcagctgcttgttatgcaaaaatcacaacggatattgcatactacaaatacatctcatagtccgcatattgtcattacagccaatagtacaaaataagattttacaggttggaagtgttcttgtctagttctgatcttgtggaataactgctcttttcactgtctcaatagctggatcttgtggaataactgctcttttcactgtctcaatagctgaattcacaactcgaacagacaagtttcacatgaaatcaacatttcatcgaacttttagaatttatatttattaaaaacacaggttgatcaaaatagtgagcttgggtatgcattcaacgaaggatttaacagcactagctctcaagcctggcagggcgaaagctattaggcagtaactgcagatgctatgagaaattttagcatcattaggcgtccatcaacagctcacttacattcagtaaacattaattatagaagtggcaaaacaataatttaaagagaatacagttggtgttgcattgcatcagacatccaaggaaggaattagcagcattagctctcaaacctggcaaggcgaaagctcttaggcggcaactgcgaatgttatgagaaacaagccttgcttttagcatcatttgccatgcagatcaccaatttacagaagaacaacaaataaacttgcatgaagaaaatggctcagacatccaaggaaggaattaacagcattagctctcaagcctggcagggcgaaagctcttaggcggcaactgcgaatgttatgagaaacaagccttaaatttatcatcattgccatataatcaagggaccaaaaaaataaaagcaaaacaaaaaaggttgttaattcaaataaatcaaatgtaatgacagatacgggctctgtagaccgatggagatgcagtcccaggttcctatcaacatgtgaaacgtaggaaaccaactctgttttggcctaatcaaagcatcaccggtcaaagccgtagctacaggtgacgtggcatcaggcccaaactatcacaaaataacagatacaaattctatattattatgagacagcttcgcataatccctcaagagacccgtttaaaatcacacacacagctgaattaaccaattgcaaatgggtactccatcccagaccaaaccacaaaggttatggtcgaaggatggacacttgcaaatgagaaaagcagctgctgtttaaagtgtcatacggcacttcctatggtcatagaatcctcactgggactagattgcaactcataatacatgaacaaaatctagatctttatacactacaatattactggattataaagcctcaggatgccagacaaatgtcgtcatttgataatctgacggtaattccaacaatatgctaatcatcataggcttaaaatcgtagatataggaaggagaaaaaattatagaacacgcaagatttaaagaaaagaatataaaaatgatctttaaagcatcatcagaaagaaaagccttctcattcacagtgttatagcactgtgtcagaaggtgtcctaagattgttataaggtttcatcctctgatactgtaaaaaatccacataaaaccataaacgataagatctgttctgtgattggattcagatgcaaagatgtgtaacgtcacatggacgacagaagccgtcctctgatcaagtgttggattatgcatcaattacctcctcacaatccaaacagatctaagaaaaacaacagaaaaaacatagcagaacaaattgaaggaggatttcaagttactcagtggtggctttgttaattggttcgattctgccagcgagtgtcctcaatgccttcagaagagggagcttaatatcctcatcgcaatagactcctccagtgcaaagaacacgaatataaaccaataaggaatcgagaaagatagcaatttttaacagaaaaacaattaaaccagataagaaaaaagagcaaaatcagatggctcggttcagcggaaaaatcggcatacaaatcaatccctgaggagtagatccagagagaaagacctgtgatttggtctgttgagcttgaatattaccaggtcgtcactgccatcgcatcgcttgcataataaaacaacaaaacaaccgtgaaaaaaaagatcaaaa

SEQ ID NO: 43959 - DNA, 506 bp, Oryza sativa
  Clone ID: PAT_MRT4530_47066C.1
tgaacagtctgcattttcctgagcccatggagatctctgatgatgtgtgggggatgtatgtgtgttcttcagtgattcagtgtggatgcatcttgtcacacccctgaactaagagttctgtagccatccatggaaagaaaagtgatgcaaaagaaactggcaagtgtcaattcagagatatggccactttggaattcaagaccatatggatagctgctgcatattgtgattattttggttcaataattgcagcaggggcacatggttcggggcgtgtgctctggtgcacatccttcctcgacaaccagctgtcgatgtaaaacttttcttgtaacattttcttcctatcttaattacattgaatgacctccttcggtcattccggcaaaaaaaatgtagtaggaaaatacacatcagtttgatgtagaaagtatttggtttcttgtactgattagtactaatttaactaactctgaacattaattgcttcaaaaaaaaaaaaaaaa

SEQ ID NO: 43960 - DNA, 721 bp, Oryza sativa
  Clone ID: PAT_MRT4530_47067C.1
ctatgggttcgggttacttaacagacttgaagcccctaagctcaccagagcttcccgggaagcggcaccaccgcaccttcacctcctcacagtcacattgggttccctgtgcgcgcgctgtcctggagcacccctccattgtccttggcgtcgcccctcctgccgacgaggtctaggccgctcggcgctcgttgccgtttgcgcggccgcctagccggaccgtcatcgccgccttcgccgtcgttccacacgctcgtcgcgggagagaaatgggatggggagagagggatttgggagctagggttttgcccctctctctcggtcggcgcttcatccgagcggggaatatcagagacgtccattagatcggacggctcagatatcggcaacgttgggccgccgttgccgattacgctgcgcaaaatgggccgcggaagtgcatcggaccgtccccgcataagtgggccgcgctcagctgctcggcttgcgggccatcgaattgactcggtttgccgaagatgggccaacctaagtttgggccggcttgggaagacctaggccgaaagcaaatttgatcaaacaatgtgactcagattttttaaattaaagtctgttggataaactcctaagtaggctccaaaaaataaatctaaaactaaaccctaaatcctatgctaattcatcaaattagactcggttctacctatttgttaatatatca

SEQ ID NO: 43961 - DNA, 111 bp, Oryza sativa
  Clone ID: PAT_MRT4530_47068C.1
atggagtacttcaacataggcaagtatattcaggggccagtgccctgcacccatgcatcatgtgtgaacagaaaatttaacaggaacaacacggagtgcttctcgctctag

SEQ ID NO: 43962 - DNA, 160 bp, Oryza sativa
  Clone ID: PAT_MRT4530_47069C.1
atggcgcgccagagcgggaacgaggacgggaggtggagcacggctgtcgtggaagctgaggcggcggaggtagaggagcgccgggcggagctggtcgtgaatgccgaggtcatcggtgaggaaggcaaagaccgggtggaggtcggcgcggacgctggcg

SEQ ID NO: 43963 - DNA, 587 bp, Oryza sativa
  Clone ID: PAT_MRT4530_4706C.1
ccggccagtgtgacaacttcatcaacgaaacgatctcacccccaacgcccagtctctccaccgtcaacacacccagagaccatcacgacaatcggcaaaaatggcggacaacgactctcccgtcaccctccgaactcgcaagttcatccgcaaccctctgctgggccgtaagcagatggtcgttgacatcctccaccccaaccgtgccaacatctccaaggaggagctccgcgagaagctcggttccctctacaaggcccagaaggaccagatctccgtcttcggtctccgaacccagttcggtggtggcaagaccaccggcttcgctctcgtctatgactcccccgaggccatgaagaagttcgagcctcagtaccgattggtgcgcgttggcctcgccaccaaggccgagcgtgcttcccgacagcagcgcaagcagcgcaagaaccgacaaaagaccctccgaggtacggcaaaggtcaagggtgccaaggcgaagaaggagaaataaacgattcatggcttggcttgtgtatatcctcgggctggttggggagcggctgctgttatgtctgcagctgcgtgca

SEQ ID NO: 43964 - DNA, 1452 bp, Oryza sativa
  Clone ID: PAT_MRT4530_47070C.1
gcctgcgccgcgatcccacccacccggacgaggaggaggaggattttttccccctctctccccttcgctttcctggagcttgaaggatagggatcgaggaggaagaagacagatcaagaagcaagcaagtactgtgttgcagcaataggaggatagctaagggtgaagacaacacctagtgagagagagactggtgctgaggccctagtatgagcaaaagcagttctcaactctgaacattgatagcttcatcttcatagcttgatagaattatatccgagcttgcaggcatgtacaagaaccagcttcaggagcttgctcagaggagctgcttcaatctgccatcctatgcgtgcatccgcgagggtccagatcacgcgccacggtttaaggccacggttaatttcaatggagaaacgttcgaaagccccgccttctgttctactctgcggctggcagagcatgcggcggcagaggttgcgctcaatgagctgtcgaagagagggccatcatcgtcacttgctgcaaaagttctggatgaaactgggatctacaagaacttgcttcaagaaacagctcatcgagcaggtttaaaactgccagtgtacactacaattcgatctgggccaggtcatacacctgtgttcacatgcacagtggagttggcagggatgacctttactggcaatcccggcaagaccaagaaacaagcacagaaaaatgctgctatggcagcctggtctgaattgaagcaattaggtgagccatcatcctcatcttgtccaccagatcatgacgatgatgatcaggaacagattatagtggctcgtactcttgcaagcttgaatcagacaaatggaggaaagacaccacagcaaaaggaaaaacagcaaagcagtaaccgcccgtcatctcggagaccctcttatccgaaatcaaatgcatcattttatggccggttgcatttacaaaagcatgcatacccaagtgttccaccagagcaagcaatgtaccatatgtggcatcaggtgcaagcaacacagcagaagccgcattttccaatggtacccactatgggcagtacaggctttccaccgcctccaactgtgctccacatgtaccctccacctagagggcaattcaccatgccatccagccaagatgctgcctcagttacaatcagaacaactatccctgtatgctcagcgaggccaaatgtggtgaactctagtgctgttcagcagctgcagaaaaaacatgaatgaataagcttggtaagaatacattccatatgtacactagagccatgtggtgatttttttgggaaacattaattttcccgatacactggtccagatttctctggtacatcagaaaatgctgttcaagataacaagaaagaagaatataccgagagcagtcctggctccgagcaaagaaagcaaatctcat

SEQ ID NO: 43965 - DNA, 177 bp, Oryza sativa
  Clone ID: PAT_MRT4530_47071C.1
atggcgcaggaatactcctggtatattatggttatagagttcatccgcaagcgcacggatattaccatggtagcatttcatccgagagtattccaaggcatcagttttgcccacctcatcgctaccttcctcagcgtctccctcgccagcaacatcaccatggtccccaaccactag

SEQ ID NO: 43966 - DNA, 565 bp, Oryza sativa
  unsure (1)..(565): unsure at all n locations
  Clone ID: PAT_MRT4530_47072C.1
ccacgcgtccgaaaggattggataagtgcattgtagttgtaggagtgctaggagcccaaatcggtgacatttctttcagcgtttcgctgaacatagtgtagatttgcctgcaatgggtttgcctcaggttaatccagccgaggaagcgcctacgccgtcaagtaggcctgtgtcgagccctcgtagcttcgagggtgggggcgcctgtgatttggatgggcttcttggaggaagctcaagtagcagggtattcgaatacccgtcaatcggtgattctgatcggaagactgcattagacatcccgaatggatcaactgagtattctagagacagccattgctttgatagacctgcaggtctccgaggactaagaattgattcgagggatgcagattctagatcttctcataaattggatcctactgtccatgttcccacaatgagggttgtgggatttgagtcgggttctgttggaggttctgntntnntagaaactgatnattggnatacttcatttcgatcagcatgaaacttatgcaaggagaagactgctctcaccatcgaa

SEQ ID NO: 43967 - DNA, 1155 bp, Oryza sativa
  Clone ID: PAT_MRT4530_47073C.1
atggctaagcttgctgtgttgctcacattgctggctctggtgggctctgtgacatgccaaggctataccggcaatgctagcccacccacacccattacatacccaagcccgccaagcctgagcccgagcacgccgcctacttatcctccacctagctcgactcctccgagcctagcaccggtgagcccgagcccgccgacaacctatcttccaccaagcccaactcctccgagcccggctccggcaagcccaagcccgccgtccctagggcttagagttggttattacagttcctcttgcccaaaagctgagcaaattgtgaaggacaccgtcaagaatgctgtgtacaccaaccgcggcatcggcgcagggctcgtccgcctcttctttcatgactgcttcgtcgagggctgcgacgcctccgttctgctcgacccgacgacggcgaactcgcggccggagaagctcggcgtgcccaacttccccagcctccgcggcttcgaggtgatcgacgcggcgaaggcggcgctcgagagcgcgtgccccggcgtcgtctcctgcgccgacgtcgtcgccttcgccggccgcgacgccgcctacttcctcagcaacgccaacatcgacttcgccatgccggccggccgctacgacgggcgcgtctccctcgccgacgagaccctcaccaacctgccgtcgccgttcgccgggctcgaccagctcaagaagaacttcgccgacaaggggctcgacgccgacgacatggtcaccctctccggcgcgcactccatcggcgtctcccactgctcctccttctccgaccgcctcgcctccaccacctccgacatggacgccgcgctcaaggccaacctgacgcgggcgtgcaaccgcaccggcgaccccacggtggtgcaggacctcaaaacccccgacaagctggacaaccagtactaccggaacgtgctcagccgcgacgtgctcttcacgtcggacgcggcgctccggtcgtcggagacggggttcagcgtgttcctcaacgtggtcattcccggccggtgggagagcaagttcgcggcggcgatggtgaagatgggcggcattggaatcaagaccagcgccaatggcgagatcaggaagaactgccgcctcgtcaactag

SEQ ID NO: 43968 - DNA, 1023 bp, Oryza sativa
  Clone ID: PAT_MRT4530_47074C.1
atggcatccatggctgctaataagctcgtcgtcttcgtcttgctcgcgttgctcggcagcagcaatggcgatggctataccagtccgggctcgatcgccggaggtctcacggtcgggcactacaagggcacgtgcgaccgcgcggaggagatcgtgagggacgccgtcaagaacgccatccgcggcggccgcggcgaccgcggcgtcggcgccgggctcatccgcctcttcttccacgactgcttcgtccagggctgcgacgcctccgtcctcctcgaccctacgccggcgagcgccgcggcgccggagaaggccggcatcccgaacctgagcctgcgcggcttcgaggtgatcgacgcggccaaggcggcgctcgagggggagtgccccggcgtcgtctcctgcgccgacgtcgtcgccttcgccgggcgcgacgccgcgtacctcctctccggcaacaaggtctacttcgacatgccggcggggcgctacgacgggcgcgtctccctcgccagcgagacgctccccaaccttccgccgccgttcgccggcgtcgaccggctcaagcagatgttcgccgccaaggggcttgacaccgacgacatggtcacgctctccggcgcgcactccatcggcgtctcccactgctcctccttctccgaccgcctcgcctccaccacctccgacatggaccccgagctcgccgcgtcgctgcagcagcagtgcagctcctcctccagcaatggcggcgccagcggcgacaacacggtggcgcaggacgtcgagacccccgacaagctggacaacaagtactacaggaacgtggtgagccaccgcgtgctgttcaagtccgacgccgcgctgctggcgtcgccggagacgaggtcgctggtgagctcctacgcggagtcgcagaggcagtgggaggagaagttcgcggcggcgatggtgaaaatgggcggcgtcggcgtgaagaccgccgccgacggcgagatcagaaggcagtgcaggttcgtcaactag

SEQ ID NO: 43969 - DNA, 1206 bp, Oryza sativa
  Clone ID: PAT_MRT4530_47075C.1
atgtgcccgtttcttttttgcaccccctctcacttcctcctcctcctcctgctgttgttgtggtttttagagtctggtccggtgacagcaagcaagggtcgcatttaccatgagacatatgggtgccaaatgaatgtaaacgacatggagatcgtgctttctatcatgaaaaatgaaggagcagaaagtctggcagcgactgaactacttttggttcctgaaaaggcatggaaagctaatgttgctgcagggcggtcaagatctctgcggcctccaaagattgccgttcttgggtgcatggcagagcgattgaaggagaaaattctcgattctgataagatggttgatgttgtctgtggacctgatgcgtatagggacttgcctaggttgctgcaggaagttgattatgggcagaagggtatcaacacgcttctctcactcgaggagacgtatgctgacatcaccccagttaggatctctgacaattcagtgaccgcatttgtatcaattatgaggggttgcaacaatatgtgctccttttgtatcgttcctttcactagaggtagggaaaggtcccgtccagtgtcctcaattgtccgagaagttggggagctctggaaagcaggcgtgaaggaagtaatgcttcttggtcagaacgtaaacagttataacgacacttctgaagttgaggaattagaacctggtaaaaactgggagctcagtgaagggttttctagcatgtgcaaggtgaagaatatggggttgcgttttgctgatctcctggatcagttatctttggaataccctgagatgcggttcaggtttacctctccgcatccaaaggattacccagacgagcttctatatttaatgcgggataggcacaatgtttgcaaacttattcatatgccagctcaatcaggcagctcagcagtgctggaacgtatgcgtcggggttatactagagaggcatacttggagcttgtgcagaaaatccgtagtatcattccagatgttgggttaagcagtgatttcataagtggtaggtcacttttccgagatcatcattgtatgaccttatggtctatcttctatctgtttcctgcttttcaaagttgcaatattttctacaaagtactagcaatgtggctatttatttcctgtttggctgcttcaagaaagggtgataaaccatatatgtcgtag

SEQ ID NO: 43970 - DNA, 784 bp, Oryza sativa
  unsure (1)..(784): unsure at all n locations
  Clone ID: PAT_MRT4530_47076C.1
cccacgcgtccgcccacgcgtccggcggcgccgctcaccgccgccgccgcgctccgcctcggccggggcctcagccaccgccgcgccttcctcctccgccgccgctactcccccgcgccccttgctccttccccgtgcgcggctcctcgatgcctctccagcgccgcccatccgcccccgcctcctccccgccgcctcgcccgctctggcccctcccgtccgctcgccgcatccgccgccacggccgtgtccgaggcgcagacagatttagagtctggtccggtgacagcaagcaagggtcgcatttaccatgagacatatgggtgccaaatgaatgtaaacgacatggagatcgtgctttctatcatgaaaaatgaagggtatgatgaaattgtccctgaccctgagagtgcagagataatatttatcaacacatgtgcaatccgtgacaacgcagagcagaaagtctggcagcgactgaactacttttggttcctgaaaaggcaatggaaagctaatgttgctgcagggcggtcaagatctctgcggcctccaaagattgccgttcttgggtgcatggcagagcgattgaaggagaaaattctcgattctgataagatggnntgatgtttgtctgtggacctgatgcgtatagggacttgcctaggttgctgcaggaaagttgattatggggcagaagggtatcaacacgcttctctcactcgaggagacgtatgctgacatcacccagnttaggatctctgacaattcagtgaccgcattt

SEQ ID NO: 43971 - DNA, 460 bp, Oryza sativa
  Clone ID: PAT_MRT4530_47077C.1
tcccatgcattgcttgtgttaccccacatcttggtccttcaactcactgtcgtttagacctgtgatccttccggattccgcatgtcttgaattaatagatacccgatgatgcacagaagtaatgcctgggtctcatttgacggccaaagaaggcagccattgtcgagaggggactctgttcatatatccctgagtcagcacccgctcccacactgttaataagtctgacccaactggcgattggttccgcagcctgatcacggtgcctcaactggaacgagaggttggaccagaaggcgctatagatgctagaactttttttttctgttgttgtacatatatagctttacatccatatagttttttttccttgctaacatgtaacatcgacctagccaaacacagaagttatatagtttatttttctggcactacgacccaaaaaaaaaaaaaaaaaaaa

SEQ ID NO: 43972 - DNA, 161 bp, Oryza sativa
  Clone ID: PAT_MRT4530_47078C.1
tgaacaaggcaaagaaaggggagtgtgaatcagttcacaattttggaggcggcaggaagggatcaaaatcagatagtgccaccatgatgccaccgttcttttgtcctcagtggcatctcaagctggagaccacaccagctgtcaagaactgggggattact

SEQ ID NO: 43973 - DNA, 171 bp, Oryza sativa
  Clone ID: PAT_MRT4530_47079C.1
atgcggcagtggctggcgaagatggtgtctcagcagaagaagggagatctagatgactccgaccttcatggtgatggtttgggaggtatgatggtgttggcgggttggagctgcgacaccatcagcggctggcggatgcgcatcttcccctccctcattcaattcttgtga

SEQ ID NO: 43974 - DNA, 315 bp, Oryza sativa
  Clone ID: PAT_MRT4530_4707C.1
gtcatcgccgggcagttttatgcaacactgtgtttctctttaacgaaccatcctgtgacatatgaagatgataggtactcgaaagaaatgtatgaaactttcttcgtgcttttaatatatgaagccgcagaattttgcaggaacgcaagagaacaaacattcaaacatcccatagagacgagttaccagcactacactgaagatgataggtactaccactcatactcgccaatccaaggatcatgattaagaggatcataagtgcagctagctgcacgctttgactacgtctgaacgctcttgcggcggactcgc

SEQ ID NO: 43975 - DNA, 396 bp, Oryza sativa
  Clone ID: PAT_MRT4530_47080C.1
atgggtttacccgccgcgacctgtccattcctcatcgtccccgccggcggacgtggcaccctcgctgccgtcgtcaagggaatcagcggccaggaagcttctccggcatggacgacggtgagcccaggaggacgaccgctgaggggaatcggcgaccggggagccgagggcgaagcccggcaggacgagcggcacgggggaaggagatcggtgacggcagcggcgagggttggggacggcgacatggcggtggacggggtggcaatcggcacatgggcagtggccggggccctcgccgggggagtagatgatgacaacgcaggcgcagcccggcccgccgactccgagacgaggcgctcgacaacgacgacaaagtgcagcccggcttcgagatga

SEQ ID NO: 43976 - DNA, 258 bp, Oryza sativa
  Clone ID: PAT_MRT4530_47081C.1
ttcctgctctggcggcggcagcggcaccatctccactacagccaggcgaacttccatcggcccgagttggtttctcctcaaatcgggattggtctctcgatgatggagatgagcgaaggatcagatttgctgacgtgctactgcgtggagaggggtgacagggaggtgaccaccaagtggttcccgcgatcaatggtcacacgggcgagcgtgataatctcacaggagggagagcctgaaacagatttcagttggtag

SEQ ID NO: 43977 - DNA, 1341 bp, Oryza sativa
  Clone ID: PAT_MRT4530_47082C.1
atgacgtcagtgtccgacctcccaccggagctggtctgcctcatcggccgccgtctccacaccgccatcaacgtggtccgcttccacgccgtctgctctgattggcgccaatcgttacgccatattccgccgtcgccgccgccggccgccgccttgctgccgtggcttcccgcgccgtcgtccggcgacgacgccgacgccgccgccggcgtggcgtgccgctgcgtcttctccaagacgagctaccacgcgccgggcctctgcttccgcgacaggagggtggcccacgccgacggcacggcctcctggttcatcaacgacaagctagtcaaccctttgaccggctggatcaacgtcggccgggttaagaagtatccatggatgtggaccgatggcagcaagggcttcttccactgcgtcgtctccggcgacggcagcctccttgtgtaccgcttgtcgccgaggtggcgctctccggacagattatctatcacgcctaccacggcggcgccaccagccactgttctggcttctccgcacgcccctatgccgctacctgacgagccccgcaaggtgcgccgacacagctacctcctggagcttcgcggcgagctgctgctggccagcgttctgcaggacgacgacgacgacgaccgcctctcggtgtcggtgcacgcgttcgatgtggatgcagctgtgcacgcgctcgatccggatgccgccgagccgccgccggtggcggcacggcagcggcgacgctggtggaaacgctgcccgccggatggaacgacgagagaagaacaggaagaagacgccgccgctagggcatatcagcagcggcggcagcatcagcagcgagacctgaggatccacgtcagcgacctgtcgccgcaggtggatagctgccggctgcgagagatgtacagcgagcacgggaaggtggtgcgggccggcgagggtcgcgtacgacaagcggggggcgatcgcgagggtttgggttggttagcagttggatgtaacttgattcctgttggccaaatcttattgcccacaagatttcccaaccgacactacgaagacggcattgatgaggactcaaaggtgactggcatctttgaggaggatctgccaggggagctcctgccgatgcctgatccgtcatgggaacggccgctgaagccacatccgctgcgagaaccctcgccgacaccgcatccacccgcttccgacgccgtcgctcacgccgccaccgacactgccggatccatttttgcttgctgtcactatcgactcagccgatcgaaagggaagggggcagaggaggagaggaggaggggatag

SEQ ID NO: 43978 - DNA, 261 bp, Oryza sativa
  Clone ID: PAT_MRT4530_47083C.1
caaaacgaagagcttaaccgaactgaaataacctcactgtaccaactttgtacgctgcactgactgcgtaagacattattacatacaagatgaacagttaaaccagcacatctcttacggtgtcctatcttttggccacaaaatcatcacaaagctacactgtagcatggatgcaagttataatatataacctgcctctacactgtctgaggctgctgtacagacaaatgcttctcgcctacgtctttttggactcatgga

SEQ ID NO: 43979 - DNA, 416 bp, Oryza sativa
  Clone ID: PAT_MRT4530_47084C.1
aaaaagaaaaagggggggactcataaaaaggggtgaaactcccaacatttgaaaaaaaaggtggaagggcaaaccccttcgaaaaagttaacggaaaccacaccttttcttttacccccattttggcaaaaaagcaggacttgggaaaacgactaaaaggattacacacgggcccagacacaagaccattaccactggtcattgcacacgatttttattttagcaacaaagggagaggggaaaaggccacgggggcaaacttttccaacttcacaaataacggggacaaccaatggagttccagcacaccggatttaccaggggacgattttccagggctggggggggcccttgcaccactttcaaagggcgaagggggggccctcggggacccccccggggtccttgtccccggg

SEQ ID NO: 43980 - DNA, 219 bp, Oryza sativa
  Clone ID: PAT_MRT4530_47085C.1
gttgttcttgaatcttgtacgaccgctgttacaaattaaaacgttagccaagcgtgttagtggtgacatggtgagccgttttatgaaaaggaatttctcttcatatggattgagaagggcactactgggaattgaagaacctgctgaatgctataatatacacatggttatagatagaaacgattgagctctgcgtccattttgcagaataaatgtgca

SEQ ID NO: 43981 - DNA, 1677 bp, Oryza sativa
  Clone ID: PAT_MRT4530_47086C.1
atggcagtgctcctcatgctcaactgcttcgtcaaggccacggcgccgccgccatggccgccgtcggcttcgtccgcctccttcctcgacgacctcggcgacctcggcatcgcgccgctcatccgcgccgacgaggcgggcaccgcgcgcgcctccgccgactttggcaacctctccgtcgccggcgtcggggcgcctcggctcgccgccgccgccgccgtgctctacccgtcgcgccccgccgacatcgccgcgctgctgcgcgcgtcgtgcgcacgcccggcgccgttcgcggtgtccgcgcgggggtgtggccactcggtgcacggccaggcctccgcgcccgacggcgtcgtcgtcgacatggcgtcgctcggccgcctgcagggcggcggcgcgcggcgcctcgccgtgtcagtggaggggcggtacgtcgacgccggcggcgagcagctgtgggtggacgtgctgcgcgcgtccatggcgcacgggctcacgccggtgtcgtggacagactacctccacctcaccgtcggcggcacgctgtccaacgccggcatcagcggccaggccttccgccatggcccccagatttccaacgtgctagagctcgacgtcatcaccggtgtcggggagatggtgacgtgctcgaaggagaaggcgccggacctgttcgacgcggtgctgggcgggctggggcagttcggcgtcatcacgcgggcgcgcatcccgctcgcgccggcgccggcgagggcgcggtgggtgcggttcgtgtacacgacggcggcggcgatgacggccgaccaggagcgcctcatcgccgtcgatcgcgccggcggcgccggcgcggtgggcgggctgatggactacgtcgagggctcggtccacctgaaccagggcctggtcgagacctggcgcacgcagccgcagccgccttcgccgtcctcctcctcctcctcatccttcttctccgacgccgacgaggcccgcgtcgccgcgctcgccaaggaggccggcggcgtgctgtatttcctcgagggcgccatctacttcggcggcgccgccgggccgtccgccgccgacgttgacaagaggatggatgtgctgcgtcgcgagctgcggcacgagcgcgggttcgtgttcgcgcaggacgtggcgtacgccgggttcctggaccgcgtccacgacggcgagctcaagctccgcgccgcggggctctgggacgtgccgcacccatggctgaacctgttcctcccccgctccggcgtcctcgccttcgccgacggcgtcttccacggcatcctcagccgcacccccgccatgggccccgtcctcatctaccccatgaaccgcaacaagtgggacagtaacatgtcggcagtgatcaccgacgacgacggtgacgaggtgttctacacggtggggatcctgcggtcggcggcggcggccggcgacgtggggaggctggaggagcagaacgacgagatcttgggtttctgcgaggtggccgggatagcctacaagcagtacctgccttactacggcagccaggcagagtggcagaagcggcacttcggtgccaatctctggccaagattcgtgcagcggaagagcaagtatgatccaaaggccatcctgtcccgtggccaggggattttcacgtcaccactcgcatga

SEQ ID NO: 43982 - DNA, 264 bp, Oryza sativa
  Clone ID: PAT_MRT4530_47087C.1
atgttgggagtcccgtcaagcagaccttctccgaacggcagctgtcgtatcgagggcatacgtatcaacgatttccgtggcgatttcaaccgcagtgagcctatcaacgacatcgaatgttccaatggcaagtgccatcttttagtggtttgcataataagtccagctggggttatcatcgacttcgaccagcaattgaccagcacctatcttcatcttactttttttcgagttgagggccttatcttcatgaccgatttgtga

SEQ ID NO: 43983 - DNA, 261 bp, Oryza sativa
  Clone ID: PAT_MRT4530_47088C.1
atgaggcgacgacggcgcggccgcttggaactgcgggaggcatccgcatccagctccccgcatgagatcaacaagcggcgactgggcacgagagctggtgtgcagcggcgcggctacgcggcagggacacgcgcgtggcaggcggcgagccagcaggcagcaggagcgatgtgggaggcggaaggcaagcagcagcagcaagattctatgcatatctatcctctccctgattcaattgattattgccttgctgaatattga

SEQ ID NO: 43984 - DNA, 383 bp, Oryza sativa
  unsure (1)..(383): unsure at all n locations
  Clone ID: PAT_MRT4530_47089C.1
aaaaanacacggggagtatatactgatgattccgcccatatagttagattctttataacactttaccacaaaatacaatgggtatagtatttatattacaatattaatggagcgaccgaccagaaggatgaattagccacttttccaagctggacacacatttttggtagataattaattatcacatatggcgaggtttgcatatactccctacatactcataaaaaaagttgttttggacagcgacacagccttcaaaacataactttcatatcttattccttttaaaatatttattaaaacagtgctgtctgctatttttataaaagaatttttcaagacaaatcaatgcaagtaatttttacatttttaaacccaataat

SEQ ID NO: 43985 - DNA, 489 bp, Oryza sativa
  Clone ID: PAT_MRT4530_4708C.1
gatgtgaaggaaaatttgcagtttttcgttcagtcctgatttgagattcaggaaaattacagaattggatcagtttgattttgggggaaatgttctagggatttggcacgaggcacaaactgaagtacaagaatcagcaccatgttaatttaaagattataattccatacatacaagaatcagaatcaggcagacctcttgcatctcaccctacttgtaaacaactaaacaaccatacaagccgatgatcttgctaggcaacaaaaggggaaaaaatgagaaaactctaaaaggaaaaaaggttgctgggagagcaaatgcattcacagctatttacacctcaaaagcaaatgttgttgagggaggaggggtcagtgagagtaggagctcggctcctcgctgtatgtcgtctcgctggacccaaacacgggcttctcggcttcccacttgatgatctcccttccatagcggatcggggagcggaccgac

SEQ ID NO: 43986 - DNA, 495 bp, Oryza sativa
  Clone ID: PAT_MRT4530_47090C.1
gtgttttataaaatacattaatacatcacaaatagatcataatgattgtagggatataatccatagggacatgcttcacaaaaaaagtatataacatacaatagttccaccacaaatgtggcaattgatttaattctagaactggatgtgagtatttctttttccttcagaaatgtaacaacaaataaacttgaaagagaagatgaagttggcatacttccaaagttgaatttaaattgttccaatcaatttattggtactggttcattggcttaggagcggcaactgatcacttaccgctggctgtatcatgactcctctttgtgcatattcaacactgcattatttaattttgtcttctaattaacatacttgctccatttttcagttcttccttaaggaccaatgctgtgtctaatttccataccctcgaggataagtcctttcttcgagttgagctggacgatctcttgcaggttgataacaaccattcca

SEQ ID NO: 43987 - DNA, 682 bp, Oryza sativa
  Clone ID: PAT_MRT4530_47091C.1
cccacgcgtccgagcgtcttccccttccctttgtggcgtaaaagaaagaaaagaaaatctcccgtctctttgtctcctccgctccttgcgccgccgagacgagtcgcggctgaacaggggaggggcggcgatctccatcggggcgagcagagcaggggagaggattcatggtttatcactctagctttgttgatgacaccgggattaccaaagcatgcggctgtcctttgcttccactaaaaactcatataaggggcccagcgccagcattcgatcaagacaaggctgacattgttgatgaagcaattacattcttccgagcaaatgtcttcttcaaaaacttcaatgtgaaaagcccagcagacaagttactgatctatctgacattttacatcaatattgccctgaaaaggctggaaggttgccgaacactggctgttgggacaaaggcaatcattaatctgggtttggagaaagttcctgtgcctggggaaccagggtttcccttccctggtcttttcactctaccccaatctcaggaggaagcagaactattgaggaattatctgaagcaaataaaggaggaaacaagtgggaaggttgcttaactgcgcatacagagctaaaggtacttccaaacaaatggggggtgggcttttgccaagagggaaattcatgaaca

SEQ ID NO: 43988 - DNA, 974 bp, Oryza sativa
  Clone ID: PAT_MRT4530_47092C.1
atggtttatcactctagctttgttgatgacaccgggattaccaaagcatgcggctgtcctttgcttccactaaaaactcatataaggggcccagcgccagcattcgatcaagaaccatgccaagctgctgatttatgtcgtgctattacagacaaggctgacattgttgatgaagcaattacattcttccgagcaaatgtcttcttcaaaaacttcaatgtgaaaagcccagcagacaagttactgatctatctgacattttacatcaatattgccctgaaaaggctggaaggttgccgaacactggctgttgggacaaaggcaatcattaatctgggtttggagaaagttcctgtgcctggggaaccagggtttcccttccctggtcttttcactctaccccaatctcaggaggaagcagaactattgaggaattatctgaagcagataagggaggaaacaagtggaaggttgcttaactgcgcatacagagctaatggtactccaaacaaatggtggttggcttttgcaaagaggaaattcatgaacattgtcattctttgaagtataggtattttccgcgacatgtttgagcaattgagcagcttgtaggaatggtaattgcacttgcgtacttatttctgcgaatactttagagaattaaaggaacgacaatgattctacacctcgattgatggagccaaaggttctaatgaaacaatggatagaatgtcaacaatttgtttattgcaatggatgaacacaaggacacctttcagctgttatgttgaatttctatttttcatttttattgtactccgtccgtgcccttaaattgggcatgtatttttcagatgatgtttgaatagcgaatgttccgtgtaggacatttgtacagatttaatcaggtgtaatgagaatgtgaatatatattttcctgatcccaaaaaaaaaaaacaaaaaaaaaaaaaaaa

SEQ ID NO: 43989 - DNA, 273 bp, Oryza sativa
  Clone ID: PAT_MRT4530_47093C.1
atgagacgatcaacacgatcaacacccactatgggacagaggatcaacacccaacacaatcgacatagaagccacaacatagaagcctacatacgccaagacacgccgctggatatcaacttcagagatacgcacggggtgtcttcggatactgttaggagagacgaaagcgctatctctgatctcgccgggcacagattcaaggaggaaggctaccctgttgtcgactacgagtcagatcgtcagaccgccatgtcgacaacagttagatag

SEQ ID NO: 43990 - DNA, 569 bp, Oryza sativa
  Clone ID: PAT_MRT4530_47094C.1
ctccaactccaagtcgtcgtggctgctccttgtttggagaagttgcaacttctggctgccccaagctgagggctctcccaccacggcttggagagcaggccaccaacttgaacgagctcttttataagagaccgcatagatgccttgaaagacggttgggaagaactccccgtccctcttcttggtcccttttagtccaaaagaatgtggaagccttggaagaaggattctcccacccttccccaagtaagaagacctggccgtgccagtgggtgcccccaatttgaaggccatttggagaatttggttgttttgggaccaacttaagccttgtccaaagaaataatgccaagaagatcttcttccacctgtgggtccccaggctttgaggagccaaccatccccagcctcccatgggagaatgaccataatttggagttcaaccgagtgtttttaagaccaattaatttagatgtccaagttaatcttgaagaattgggccgccgtcacccggtaatcggacctttgtcttaacctagcctactgggtctctgaatatattaaaaaaa

SEQ ID NO: 43991 - DNA, 1233 bp, Oryza sativa
  Clone ID: PAT_MRT4530_47095C.1
cccacgcgtgcgcccacgcgttcgcttgatcattgctttcgacgcgaaatcatgaacggcgatatcaaaatgtatgataatgggggcagctgtgtcaactgtctactacaacctcaagctgaagcacccaactttggatatgcctgttattgactatgatctagccctgcttatccagccgatgctcatgctagggatcagcatcggtgttcttttcaatgtcatattccctgattggctcatcacagttctattgatcatccttttcctaggcacttcaactaaagcttttctgaagggtgttgagacgtggaagaaagagacaatactcaaaagggaggcagcaaagcggttggagcaaataggtgtatcagctgaagaaccggagtatagtccgctgcccacagggccgaatgccacagctgagtcaaaagccccatcagatgcatctctatggcaaaatgtttactggaaggagtttggacttcttgcctttgtttggatagcattccttgtgcttcaggtcactaagatcccggtgtcagttggggtgaccatgtacgaaggattgggcttgatgcaggggaggagggtcatatcatcaaaaggagatgaacaaaccaatctaaaatttcaccagcttctggtgtactgcttttttggaatgatggctggtgttgttggcggcttgcttggtcttggtggcggcttcatcatggggcctctgttcttggagcttggaatccctccacaggtctcaagtgccacagccacctttgcaatgatgttctcatcttccatgtctgttgttgaatactacctcttggaccggttccctgtgccatatgctcttttcttcaccgttgtggccttttttgcggcgattattggacagcacattgtaaggaagctgatcaattggttagggcgggcatcactcattatcttcattctgtccttcatgatcttcatcagcgcaatctcactaggtggagtcggcatctccaacatgattggcaagattgcgcgacacgagtacatgggtttcgacaacatctgcaattatgatgtataaggctcaggctcacaagggaaatataagaaaatggactcaccaacaagccacagttgcggagactaagcacggccacggagcgctagtggccgacgagcaccgggacgctcgtggcagcagacccgttgatgaccggcgcaagcgcgaccaccctcgcc

SEQ ID NO: 43992 - DNA, 466 bp, Oryza sativa
  Clone ID: PAT_MRT4530_47096C.1
agatataatatcatgaaggcggaattagcccccaaatatttcatggttctagctcgttatgacagatacaatattgttaaggcagaattagcccccaaatgtgtcatgatccaaaacgctaaacaccttggcctttggcccaatgcccatgacaaaatgcttatttgataagatctctaaaatgactacaacaaccatattagaaggctgatgtaaggcaaataaaataataaggattttgtacagggtctcaatttattttttgatggataatggacatgaacagcatagttatttcaaacgcgtaagataatgtgatgcatttgtagcggcgaacttgacattcttcaatgacactcagaactatttttggccctaggtgacaacaagtaaatgataaaatttgaatggtaagaatctcactgttccatgttatcactgcattgggctgtctgctttttgtagc

SEQ ID NO: 43993 - DNA, 2069 bp, Oryza sativa
  unsure (1)..(2069): unsure at all n locations
  Clone ID: PAT_MRT4530_47097C.1
ccgccgcgcgcgcgtccgctcctcccccccccccgccccccgccacctctccccccctccaccccccgtcctcccccctctcccggccttcctcgccgccccccccgccgcccatcgccggccgccgccccctccccgcctccccccctgccctccggcgttcgcccccgggctcggttccgtgggctcggcgcgcctcctttcgatctgtgccggggggccttgctctggcggggtattgtggcgggcggcggggccacgccctcgccgccatggggaggaaatggcaccatgtcgccgcggcgctggccgtggcctgcgccgcgacggcggccgccaccgtcgccgccgcggccgacagggggctctggtccgccgccgccgccgccgtggcggaggagggggaggaagcgagccacctgcgcaaggtggccaactttttgtggcggagcggcggcgagaactcctaccaccacgtgtggccgccaatggaatttggatggcaaattgtgctggggtcatttgtcggattcattggagcggcgtttgggagtataggcggtgtaggcggcggtgggttcttcatgccgatgctgaccttgatcattgggttcgacgcacgacggcgatttcttatgataaaagtcatccgtggcgatatcaaaatgtatgataatgggagccgctgtgtcgactgtgtactgcaaccttaagcggaaacacccaactttggacatgccagtgattgactatgatctagcccttcttatccagccgatgctcatgctaggaattagtatcggtgtcattttcaatgtgatattccctgattggctggtcacagttctcttgatcatccttttcctaggcacttcaactaaagcttttctgaagggtatcgagacatggaagaaagagacaataataaaaagggaggcagaaaagcgatcagagcagacaagtgaagaactagagtatagaccagttcctgcatctgagtcaaaacccccttcagatgaagcggtatctattttgcaaaatgtttactggaaggagtttggacttcttgcctttgtttggatagcattccttgtgcttcaggtcactaagaattacatgcctacttgctccacgtggtactgggttttgaactttctccagatcccggtgtcagttggggtgaccatgtacgaaggattgggcttgatgcaggggaggagggtcatatcatcaaaaggagatgaacaaaccaatctaaaatttcaccagctgctggtgtactgcttttttggaatgatggcgggtgttgttggtggcctgcttggtcttggtggcggcttcatcatggggcctctgttcttggagcttggaatccctccacaggtctcaagtgccacagccacctttgcaatgatgttctcatcttccatgtctgttgttgaatactacctcttggaccggttccctgtgccatatgctcttttcttcacaactgtggccttctttgccgcgataattggacagcacattgtaaggaagctgatcaattggttagggcgggcatcactcattatcttcattctgtccttcatgatcttcatcagcgcaatctcactaggtggagtcggcatctccaacatgattggcaagattgcgcgacacgagtacatgggtttcgacaacatctgcaattatgatgtataaggctcaggctcacaagggaaatatatgtgcagttcagtgaatagaacattgtgatgtggatttttcagatgtcaaattgtagcaagtacagattgaagcataggggcatgccgatcaatttttttgcctgtaatttaagtaattattattgcccgacaactctggagaggcaaactccaaacataagcagtcgatattctctgaagagaatagcaagagcagatcatttattattctttttactggtttcgttgtcatcgttttatatttaaatgttgtaagaaaaagctaaacagatttggagctcagtgttactgttatttttttttccagtgttcatagaccaaaaancaaaacacccgccc

SEQ ID NO: 43994 - DNA, 446 bp, Oryza sativa
  unsure (1)..(446): unsure at all n locations
  Clone ID: PAT_MRT4530_47098C.1
cttttcctaggcacttcaactaaagcttttctgaagggtgttgagacgtggaagaaagagacaatactcaaaagggaggcagcaaagcggttggagcaaatagctgaagaaccggagtatagtccgctgcccacagggccgaatgccacagctgagtcaaaagccccatcagatgaagcagcatctctatggcaaaatgtttactggaaggagtttggacttcttgcctttgtttggatagcattccttgtgcttcaggtcactaagaattacatgcctacttgctccacgtggtactgggttttgaactttctccagatcccggtgtcagttggggtgaccatgtacgaaggattgggcttgatgcaagggaggagggcatatcatcaaaaggagatgaacaaaccaatctaaaatttcaccaaccttntggtgactgctttttt

SEQ ID NO: 43995 - DNA, 381 bp, Oryza sativa
  Clone ID: PAT_MRT4530_47099C.1
cccgggctgcaggctcaagaagactaaataatcaagaaatccatcccgatggaaaaatttcaagtttagttggatctgagcatggtactcagtactcacgggtcatcactaatcccctcgccttcctgggctgataaagtaaggcagcctccccactgcacaacactctgtcgtgatgaacagcaagtccttagctaggacgaaacgaactacagcaaaatggattatgaaaacgtctattatctgaagaaagacgcgttttctactcttctcaattttcagaaccacctcatcatgaacaaagacgtcttttgagacgttgtgaataacgtgctgtgtacatttacacctattttctttctttctttaaattttgtttgg

SEQ ID NO: 43996 - DNA, 1302 bp, Oryza sativa
  Clone ID: PAT_MRT4530_4709C.1
atggcagccattgatgagcagcagccactgcacatcctcttcctcccgttcctcgtgcccggccacctcatcccgatcgccgacatggccgcgctcttcgcggcacgcggcgtcaggtgcaccatcctcaccacccccgtcaacgctgccgttgtccgccctgccgtggaacgtgccaacgaggactctctccgtggcgatgccggcggcgcactggtgccgatcgacatcgccgtcgtgccatttccggacgtcgggctcccgccgggcgtcgagaacggcgcggcgcttacttccgaggacgacgttcgcaggttcttccacgccatccggcggctgcgcgagccgttcgaccggttcatggcggagcaccgccccgacgccgtcgtgtccgacggcttcttcacttggtccgcggacgccgccgccgcgcacggcgtcccgcggctggtgttcctcggcaccagcgtgttcgcgcggttgtgcaacgagatcatggtgttcaacagcttccacgagctggagcctgagtgcgtcgagcaccaccgcgcggcgctcggccgccgcgcgtggctcgttgggccggtcgcgctcgcgagcaaggacgtcgccgcgagaggcgccgccgagctctccccggacgtggacggctgcctccggtggctcgacacgaagccggacggctcggtggtgtacgtctccttcggcacggtgtccagcttctccccggcggagacgcgcgagctcgcccgaggcctcgacctctccggcatgaacttcgcgtgggtcatcagcggcgccgacgaaccggaaccggagtggacgcccgaaggcttcgccgagctgatcccgccgcgcggcgaccgcggccgcaccatccgcgggtgggcgccgcaggtgctcgtcctgaaccaccccgccgtcggcgtgttcgtaacgcactgcgggtggaactcgacgctggaggccgtgagcgccggcgtgccgatggtgacatggccgcggtactcggaccagttctacaacgagaggcacgtcgtggaggtgctcggggtgggcgtcggcgtcggggccagggacttcgggtcgaacctggagagccatcaccgggtgatcggcggcgaggtgatcgccggagccataaggagggtgacgggcgacggcgaggagggcgaggcgatactgaggaaggcggcggagctagccgcgaaggcgagggcggcgccggagaagggcgggtcgtcgtacgacgacgtcgggcggctgatggatgaattaatggctcgccggaccttccgttga

SEQ ID NO: 43997 - DNA, 2019 bp, Oryza sativa
  Clone ID: PAT_MRT4530_470C.1
gtccttggcactcccgggcgggagggcgggttagtgctccgcgcctcggggtccggcgagggcgtcccgctggcgccggccgccggcggcgcctccctcgcggccgagctctccttcgacccgacccgcgcgccgttctacctctcgttcctgctcacggacgcgtcgggggcggagatacggacgcaccgcaagacgagcttccgcgtgcccgtcggcgtcgggccgggcagccccgcgccgctcggcatgtctatctcaggcgacggcgccgtcaatttcgcggtgtacagcaagaatgccaatgccgtttctctctacctctacgccgccgccgtcggcggcggcggcggcgacgagcccgcgctggagatcgacctcgatccgtacatccaccggactggcaacgtctggcatgtctctctggcgagcgtagatgggtacgtcagctatgccttctgctgcggtggcatccgccgcccactgttggacccgtacgccaaggtgatcggagacttcgtctccagcaactcggtttacgacgagggtgtcactgcgccgtcaatgaggtgctttgcatcgttggcgattgcgccgagctacaactggggaagggacaggcacccccgtctgccattggagaagctggtggtgtaccgggcaaatgtggctttgttcacaaaggacaggtcgagcgggctcccggatgacgctgccggcactttcaccgggctttctgctaaggtagagcacttcaggagccttggtgtcaatgcaattttgctggaaccagtgttcccatttcatcaggtgaaaggaccttatttcccgtaccatttcttttcaccgatgaacttgtatagcagcaaaggtttgagtgtttcagccatcaagtccatgaaggatatggtcagggtaatgcatagaaatggaatagaggtcctcttggagaagctgattttggacagcctccgccattgggtgcttgacttccatgttgatgggttttgcttcatcaatgcccctttccttgtgagaggtcctggtggtgaatatttatctcgacctccccttcttgaggcgataacttttgacccggttctttccatgacaaagatcattgcagatccttggtctccacttgacatatctaacgtgcaattcccattccctcattggaaaagatgggctgaggtgaacacaagattctctattgatgtgcgcaaatttttgaagagagaagcacttattagtgatcttgctacacgcctgtgcggcagtggggacctgttctcaaccagagggcctgcattttcattcaatcatgtatccaggaattcagggctttctcttgttgatctggtgagtttcagcaatgatgatcttctttctgagtcgagctggaattgtggtgaagaaggtccatcagagaacagtgctgtccttcagacaaggctaaggcagatacgcaacttcttatttattctatttgtatcacttggtgttcctgttctgaacatgggagatgaatgtgggcactctgctgctggttcagtatcatacaaggatagagggcctctgaactggagaggcatgaagacaacatttgttaaggaagtgaccggattcatttcatttctaactgcactcaggagtcggcgaggcgatatctttcagagaagggaattcctaaaacttgagaatatacattggtatgggagcgatctatgtgagccaggttgggatgatcctaccagcaactttctttgcatgcacataaatgcagaggtagatgaaatggcggcagattcggtcagaggcgacctgtacatctgtttcaatgcaaacgaggaatcagtgagtgctgccttgcctgctcttgcagaaggatccgtgtggttgcgcttggttgacacatcacttgcatttccagcgccggaacaacgctgtggtctcccggcgctggggagtatgttcgaaggcgttcccatcgcctcgctgagcttcttcccgcagtag

SEQ ID NO: 43998 - DNA, 999 bp, Oryza sativa
  Clone ID: PAT_MRT4530_47100C.1
gtgaaattgcgcagcaagcactgcaagacctgtgatcgctgtgttgatggatttgatcaccactgcaggtggctgaacaattgcattggaagaaggaactatgcatcatttattctgctcatgttctttgtcctgctcatgcttgttattgagggaggaacagcaatcgcgatcttcgttcgctgctttaccgacagcaaagggttgaaaatggaaatggaacacaggcttcacatcaggctcccaaaaggagcacatgcagcgttatcaatggtttttgtgatcttcaccttatacagtactgtagcactgggtcagctcttcttcttccatgttgtgcttattagaaagggaatgaggacatatgattacatccttgctatgagagaagcagcacaagcatttgaccctttcgatgactctgattcgtcgtctgatgagagtatcgacttcgattcaccagaaaggccatcctttctgtcaaggatcttctgcagaaaagatgaattaagtgaaagtacccgaaagctatccatcaggattgaaaatgagcccagtgatggaacaagaaggaaagatgacatccagatcaacccatggacgttgatcaagatgagcaaggagaaggctatggcagccgctgagcgtgcccgtgagcgaatcaggaacaagctgccatcaacaacaacctcaccgatgaaaccattaccggtggagacaaagagaggtcctctgaaccaagagagaaagcacatcatgacagggaaggagattgttcctgttttcaccaagagctggttgtcaggatccccgacagcaaggctgtcaagcccaagaagacgattctccggttcaccatctccgaaaccacagagacaccggagcaacttcgatctgagacttgcagaggtgtcaagagagcttgagtcccacatctcaaagcaggttctttgctccgttgtcatgaagggtgttgaagatgaagattctccatcctga

SEQ ID NO: 43999 - DNA, 338 bp, Oryza sativa
  unsure (1)..(338): unsure at all n locations
  Clone ID: PAT_MRT4530_47101C.1
gttttcacgtccaacatttgacgtgcctcaaagtagtatggagtggattacatggctactacgaccaaatatacgaagatctggtaaaaggagaaattgctaggcgtgtgtttgctttgtgtgacgatggatgtttattgtttaattgcataatacctctctgtttcaggctataagacgttttgattttgatcaaagttaaactgttttaaatttaactaagtttatagacaaatatagtaatatttataacactaaattagttttatcaaattaataattgaatatatttttataataaaattgtcttgggttaaaaatgttgttacttttttntt

SEQ ID NO: 44000 - DNA, 505 bp, Oryza sativa
  Clone ID: PAT_MRT4530_47102C.1
gcaagatctatttcatctctggctttacacgttgacagtctccttttactttgtcggttgaacagcacaactgcagggttaactccaaagcatggtagtagcagcagtacactactgttcgtcaatgagatgggttagtaggtctgatgcgtctcggccactaaatgtgccaaaagttagctgttgggcacagcgatcagctagcttacccccattctagaaccttgtctttttatgtttcccgtgccgccgttctgaaaaagatatgggttacaccacttactagcaacagtgtactgtttgcgctgttgtcgtaaacaggttgatgctccgattttgtgtcttcacttgagtggactctgatattattttaggatcccatcagtaaactggttcagatgtaacatgaattatgcagggtcataaactgaataatgcttgttttgactacgcagccagatcggcctgacgagttggaacgagtggaagcagctggaggcagagt

SEQ ID NO: 44001 - DNA, 393 bp, Oryza sativa
  Clone ID: PAT_MRT4530_47103C.1
ggaattcccggctcgaccacgcgtgcggtacgtcgaactctccacagacactcttgggagatggcactcctagtgacctcaggccactactttcctgccatggacgcagatgcgggcagcttctcactcgcacgacgagccccaatgatgtcttcttacgcgaggagagggacaatgcatagaaagcgggccctccagccaaacaggacgaaggatgtgaacaaaggctggcgaataggaagcacacatcggcgaagcgctttgcagaggctgaggacgagggcatccgaacctatgaggagtccaggctctacactaagtgcagcgcgggacccacattttttgaagaatgataaaaccctgtttttggagatctctgtaaagatgagcaaa

SEQ ID NO: 44002 - DNA, 1593 bp, Oryza sativa
  Clone ID: PAT_MRT4530_47104C.1
atggcgcagaggagggtgcagtattatagagatatcaggacaccaaccgggcaatggtttcacgtcgtgcgcgcgccgccatgccatgccaggtacgcgacgggggaggccggttttggggagctggacgtgggtgaaaccagcgtcggcatggtggagcagcagtgcagcagtagccccgtcatgtacgcgctggtgcagtgcacgcctgacctcttgccggccgactgccggagctgcctggccggcatcgcctcgcagatgcccaggtggttcagtagcaacaccagttaccgcctcggcgggaggattctcggtgtccggtgcaacctgaggtacgaggtcgatcgcttcttcctagaaagcaacgagaccatcaagattcatatgccaaaaccgaaaggttcattgagcgcagggaagatcgtcggaatcgtccttggagtagtagccttcgttattctaattttctccttgattatacttgcattgctcaaaagactaagagaagtaattcaagagtcagaacggcaaaagaaactagcaaaacttgagactgagatcatagacgagattggaccgctcttttcacgctatactttacaacagataaaagaagctacacgtgatttctcaaatgaaatcggaaaaggaggttttggccatgtttacaagggtaaactaccaagcggaactgatgtagcagtaaaaagactcgcggtatcttcatctggccaaggttttgaccaatttatgaacgagattaaacttatggcaactcttcaacacaggaacctagttaggcttctaggtttctgcatccaaaacgaagaaaacatactcatctatgagtacatggagaacggaagcttggatgatgtgttttctgatcccgaaagaaaatcccggctgctagattggtctacacgcctccgtgtaattgatagcatagcccaggggcttctctacctccacagattagcaaaacagaatacatgcatcgttcatagagacattaaggtcaacaacattctgctcgatgcttcaatgaatgcaaaaatctcagatttcggaatcgctaagatattctgcccaaatcttatggagtcagcaacaaccaaaggatgcggatcatttggctacattgcacctgaggtgttacttaccggcaccttctccgataagtctgatgtgtatagccttggcgtgcttatcttggaaatcataagtgggacaaaggtgaactctgcctgcttctttcaacaaggaagatcagacaacctgttgacctgtgcatggcaactgtgggatgcgcaaagatacaaggaccttgtggaccgctcgttaatatcagcaggagaaaacattgaggacgctgtgttaatcaggtacgtccagatggcccttctctgcgtgcaggccaaccccgagcatcggccgaacatagacaagatcgtcgcgatgctgagcaacacggaggccctggacgtccctaaggaacccccggcatattacaacgtacaagttcccacatcaagtaatcatagtggcgctgtcacccccacgatgttctacactagtatttctagctag

SEQ ID NO: 44003 - DNA, 462 bp, Oryza sativa
  Clone ID: PAT_MRT4530_47105C.1
atgtgcaccggccagccacatcagtcgaggccgcgtatgcatggccggaccgcaactaaccgtggcggcacccgtggtgatgcaatcacgcgatcccgcctcccccatgacgcgcggcggacgatgcaacgtgtcccggcagtaacatgcgcgtacggccaagcgacccccgacccaacccaacccaatcatgggcgcacgttcgcgtcggagacggaatcaatcaatcaatcaacccatgcccatgcatcaacgacgccgacgacgcccgcgcgcgcgagcgcacgcacgcggggcacacagggccgtgacgaggctgtcggtacgccgctgggcagagcggacgcagcccgcagccgccgccgcataaaaaaatgcgagacctcgaacaagtttggcgcgatcggggcaggcagcgccccggtgaggtcgccggctatcgaaacaagatttcggcaataa

SEQ ID NO: 44004 - DNA, 481 bp, Oryza sativa
  Clone ID: PAT_MRT4530_47106C.1
gaaagggacatgattttcatggttcaccaaggggaccgagtttaccccagcaaaggacccaaatttgatgggccccggtttcctcaaaactggaacatggcatacaagcaggttgaaaaacaaagggcttccaaattttccccctcaaccctcactggaaatatggcccattcaggaggaatctgcaccgcccggggggggggccggttgtccttcggcccccttgactgatgcccatttgaccaaagggtggaagctccctttctccttgaaaagtgggaaaaaagggggcttgcagtataggatcccttccaaagctgcataattggatggcaaaagggcccacccaccgggaaaacatttaaagcaggacttggggaaggcctgtccttaaactgtcaccttttttaaaggataccctgttttactgcaaggggcacacttctcctgggcccctgaaaacatgcgtgcggttttgcta

SEQ ID NO: 44005 - DNA, 2098 bp, Oryza sativa
  Clone ID: PAT_MRT4530_47107C.1
atggcctcgcctatgccaacgcctacccaccgcgtcaagcgccgccgcctcgacctctccccgcccccgcacctcaacgacctcgccgacgagctcctcttcctcatcctcgaccgtgccgccgcccatgacccccgcgccctcaagtccttctccctcgtctcccgcgcctgccacgccgccgagtcgcgccaccgccgcgtactccgccccttccgccccgacctcctccccgccgcgctcgcccgctaccccgccctctcccgcctcgatctctccctctgcccgcgcctccccgacgccgccctcgccgcgctccccgccgcgccgtccgtctccgccgtcgacctctcccgctcccgggggttcggcgccgccggcctcgccgcgctcgtcgccgcgtgccccaatctcacggacctcgacctctccaatggcctcgacctcggggatgccgcggcggcggaggtggccaaggcgcgccgcctgcagaggctctcgctgtcgcgatgcaagcgcatcactgacatggggctcggatgcatcgccgtcggatgccccgacctgcgcgagctctcgctcaagtggtgcatcggggtcactcatctcggactagacctcctcgccctcaagtgcaacaagctcaacatcctggatctctcctacaccatgattgtaaaaaaatgctttccagccatcatgaagctacaaagtctacaagtgttactactggtgggatgtaatggaattgatgatgatgcccttactagtcttgatcaagaatgcagcaaatcactacaggttcttgatatgtcaaattattacaatgtcactcatgtcggtgttctgtccattgtgaaggcaatgccgaatctgttggaactcaatctatcatactgctctcctgttactccttctatgtcaagcagcttcgaaatgattcataaattgcagaaactgaagctggatggttgccaattcatggatgatggattaaaatccattgggaaatcctgtgtttctttgagggagttaagtctgagcaaatgttctggagtgacagacacagacctttcttttgtcgtgccaagactgaaaaatttgctgaagctggatgttacttgttgtcgcaaaatcactgatgtttcattagctgccatcacaacctcatgcccctccctcatctctctgagaatggagtcctgtagccttgtttccagcaaaggactacagctgattggaaggcgctgcactcacttggaggaattggatcttactgacactgatttggatgatgaaggatgcaggctactttctaagcttgatatcaagaaatgctttgagatcaatgacatgggaatgattttcctttcccaattctctcacaacctccggcagataaacttgtcatattgttcggtcaccgacattgggcttatatccctttcaagcatatgtggcttgcagaacatgaccattgtgcatttagcgggtgttacgcctaatggactgatagctgctcttatggtctgtggtttgagaaaagtgaagcttcatgaagcattcaaatccatggtgccatcacatatgctcaaagttgttgaagcccgtggttgtcttttccagtggattaataaaccctaccaggttgcggtagaaccgtgtgacgtatggaagcagcagtcgcaggatttgcttgtacagtgaaatgtttcaaagataaacgttgtggaaactggggcgtgttttgtggtgttgaatttatcttagagcaatatctccagtcctagagaatgagctccaaaagttttgtgccataactggctgaatagtgtattgaattactgacggtagtattgtcagaacaacatactagtactggtattttgcttgtatgccagtggaggcgagggaggttatattcttgatgtgttgtatatagcgcaggtaggaatcaacaatcaaagagagattattggggtaaagcatgtagtaagtgtggagtatgtgatatgccttgttgtgcctttttgatgcacaatttgattaatggaatggaacattgcattctcactataaaaaaaaaaaaaaaaaaaaa

SEQ ID NO: 44006 - DNA, 1668 bp, Oryza sativa
  Clone ID: PAT_MRT4530_47108C.1
gggatgtaatggaattgatgatgatgcccttactagtcttgatcaagaatgcagcaaatcactacaggttcttgatatgtcaaactcttacaatgtcactcatgtcggtgttctgtccattgtgaaggcaatgccgaatctgttggaactcaatctatcatactgctctcctgttactccttctatgtcaagcagcttcgaaatgattcataaattgcagaaactgaagctggatggttgccaattcatggatgatggattaaaatccattgggaaatcctgtgtttctttgagggagttaagtctgagcaaatgttctggagtgacagacacagacctttcttttgtcgtgccaagactgaaaaatttgctgaagctggatgttacttgttgtcgcaaaatcactgatgtttcattagctgccatcacaacctcatgcccatccctcatctctctgagaatggagtcctgtagccttgtttccagcaaaggactacagctgattggaaggcgctgcactcacttggaggaattggatcttactgacactgatttggatgatgaaggtttgaaagctctctctggatgcagcaaactttcaagcctaaaaattggcatatgcttgaggataactgatgagggccttagacacgttagcaagtcctgtccagatctccgagatatcgatttgtacaggtctggggcgatcagtgatgaaggggttactcatatagctcaaggatgcccaatgttagagtctatcaatatgtcctactgcacaaaattaacagactgttcactgagatcactttcaaaatgcataaagctgaacacattggagattcgtggctgccccatggtttcatctgctggtctctcggaaattgcaacaggatgcaggctactttctaagcttgatatcaagaaatgctttgagatcaatgacatgggaatgattttcctttcccaattctctcacaacctccggcagataaacttgtcatattgttcggtcaccgacattgggcttatatccctttcaagcatatgtggcttgcagaacatgaccattgtgcatttagcgggtgttacgcctaatggactgatagctgctcttatggtctgtggtttgagaaaagtgaagcttcatgaagcattcaaatccatggtgccatcacatatgctcaaagttgttgaagcccgtggttgtcttttccagtggattaataaaccctaccaggttgcggtagaaccgtgtgacgtatggaagcagcagtcgcaggatttgcttgtacagtgaaatgtttcaaagataaacgttgtggaaactggggcgtgttttgtggtgttgaatttatcttagagcaatatctccagtcctagagaatgagctccaaaagttttgtgccataactggctgaatagtgtattgaattactgacggtagtattgtcagaacaacatactagtactggtattttgcttgtatgccagtggaggcgagggaggttatattcttgatgtgttgtatatagcgcaggtaggaatcaacaatcaaagagagattattggggtaaagcatgtagtaagtgtggagtatgtgatatgccttgttgtgcctttttgatgcacaatttgattaatggaatggaacattgcattcgcact

SEQ ID NO: 44007 - DNA, 382 bp, Oryza sativa
  Clone ID: PAT_MRT4530_47109C.1
gacccacgcgtcacggcatgtgtctcacacaaccgagagcactgaacgcatgaagtatattgttggtggacagagtttacttcgaaaaaaaaaaaaaaaaaaaaaaaaaaaaaaaaaacgactatggctaaaacgagccaaaaagccaaaaacaacccgaaaacaacataacttatgcaaaaagaaagggcaaaaaaagaaaaaaaaaaaaaaaagggggggggccgtttaaaaggaccaaagttaccgaacagggggtcggaaggcaatatgttttctaaggggcaacaaaaattaaatcaacgggcgggggtttaaaaacggcgaaacgggaaaaacccgggcgttaccaaattaaaaggcctggaaaaaaatccccttt

SEQ ID NO: 44008 - DNA, 348 bp, Oryza sativa
  Clone ID: PAT_MRT4530_4710C.1
tttttttttttttttttttttttttgggcgagggagtaagtgtattatatgtatgtaaatattatattattgtaaatcattttgaggagctagactagcgtgccttattaaaagggagatatgtaccattacatgatgattaaaatataaatttgtagttacatggaattaaggtagtggaccaaaggaggaaggataataaaaaattcaaattttcaatggatggaaatggaataaggtggctttgaaaaattttccgccaaattggtggaaggcttcttggggaaaaacgggggggggttgttgtaagaaaaggaagtccttgtgaatttcttcggcggccgaagg

SEQ ID NO: 44009 - DNA, 1010 bp, Oryza sativa
  Clone ID: PAT_MRT4530_47110C.1
atggctattcgaatagttttactctggccagaggtgcacaactgtacccaaaagacacaatccaccggcatgtcaccgcgcctgtccggacacgtcaccatgtcgagtgattgtgacaagacccttcatataaccctctctgaccaagcacaccacacctcaggtttcacccccactcctcaacaggcagcgggcagtcccctctcgtgcctaggcaaatcaaaaaggcgcatagactgtcgcagggcccatccgaactccatcacgctcacccttgcctggatgcgtcagagaggaaagctatacttcaagtcagacagttacccattcccgcttgtggtaagcgcggtaagtcttccagtgcatcctgtgaaccggtccttaactgccatgggtgggactagcaaaaccatgcacccacaacccaccattaagtcgcattttagttggataattatgaccaataaaacatggtcggatgtctcgagcacgcagctcgtcatgatactaaaagttctacaagatcagccagtcgtccatcccatgatgaggacaagcggccatatattcctgaagtcgttcccacgcctcaggaatggactcatccctcgtctgctggaaacttgagatccttccagaagggcgttggttttgcccatcgggaagaattttgacaggaatgacgtagagcatttatcccaggtgttgatcgtggcacggttggcataaaaccattgtttcgctttcccaaggagggaaaacggaaacaattgcagcctgacggcgtcaggactgacacccttcattgtgaacgtgttgcagatctccaggaactgttgcagatgagcattggcatcctcattaggcttgccgcaaaacgggctagcctgcgccattgtgataaggctggacttcagatcgaaatccacgtctcccatgttgatttgcggcccagtggccacgttgttagcagagggagcagcaaattcgcggagggtcttgtcagccat

SEQ ID NO: 44010 - DNA, 285 bp, Oryza sativa
  Clone ID: PAT_MRT4530_47111C.1
atggcagtggtggtggccggcggtggctacgcgaggagggggccacggctgtccgtgtcgattgaggaggataggttggaggcgagggagagggacgggttgggccgcctcatcgtcaagctcgggttgcgccaccttgtcaccgaggcgaagcttgtggaggataaggaaggtggtagtggaggcctcggagtaggggcggctgaatcggaggaggaggaagctgcatcgaggttgccaatggcgaggaggacgggtcgcatttggaccctccctgacaagtaa

SEQ ID NO: 44011 - DNA, 136 bp, Oryza sativa
  Clone ID: PAT_MRT4530_47112C.1
aaatcatgacaaggaaatgaaagaaatgagacaacgaccttgttagccttcctgtggggatcctctcctctccactacttggtctatcttcttcttggagagctagcaggaggagcaaagcagtaggggagagaga

SEQ ID NO: 44012 - DNA, 293 bp, Oryza sativa
  Clone ID: PAT_MRT4530_47113C.1
agggagagaactagtctcgagttttttttttttttttttttttgaagtgaacaagggcgagtcgacccctgttgctgtaatttttgtcatgaaaaagaagggcgtttacgaaatgacacagatatgagtcatcgaagcaggggatccccaagaacagattgcaaaggcaaggtgtgtgcgcgcgcgcgcataagcttcatcagattcagagagagcttaattatcaccgatgtcccatgcatcgatctgcacctggctgtgcatgtactaccccaatgcatttctctctctac

SEQ ID NO: 44013 - DNA, 548 bp, Oryza sativa
  Clone ID: PAT_MRT4530_47114C.1
ccgccgccgcagcctcctcaaggctgctcccatcctctccttcgagttagcttcctccttattcaaccatgggtaagtgagtaagactgcacactcaacatctggtggggtgcattggggccaccgtacgcacttcccggcgaatgtgcgacacatccaccggggcctatcctgatcgtacacagctataggagtgtactctgacatagcgatgtgattcgagaggctcagataacgaacccgctgatatgaacaataggtgtcgcaaaatgcaatcggtgagacactgttgatctcaaacggatctaatacaggctcatggttttacaggctcttgggccccgcatagacaccataaatgacacggccttacccctttgcagaggggtaaacgactgttactaccatacaagctggctttgaaggatatctcgttagcgtgagaggcccaaatgatgtcctcgcttctcataggatagtattctcacttgacgatgcctcattcgtatctgacgcaggcagcgtagacgttctctttatatttgcat

SEQ ID NO: 44014 - DNA, 312 bp, Oryza sativa
  Clone ID: PAT_MRT4530_47115C.1
atgggaggaggatatgatggagatgagcgtgagatcgtcagatggatcgatcatctggagatggacggtggatgttgcttcaccgattttgcatgcatgctgacgggcgggtgggaggcggagcaggcgagcgaggcgggctgtccgagctccggcggcgatggtactgagtggaccgcgacaaggatccccaagacgatggacaacgacgccggcgacgggagcctcaaccgagggagaggaggcgccgcgatggccagagccggggtggtcggcgcaagagtcggagcgcttgaccgcgggctccgatga

SEQ ID NO: 44015 - DNA, 431 bp, Oryza sativa
  Clone ID: PAT_MRT4530_47116C.1
tcggtgaaggatctgaagaggaaagcaagagagatcacaggcctatcacctcttcatacagagaccaacgaagtctctatttaaagccttaccgtaaactctgacaccgacgacaccactgtcgccggaaaccacacgaccttgtacataaatgcttgcataatgtgacacgaccgtcctgaccttatcgctgtgatcacccacgctttccatggcctgaggctgaggagcggcatagcatagatgacatctgtgagaggaagggagcaacttgtggttatatcgagctgggaggaatgcattgctggacaagagagccatatgcttctgaatgaggctgagaggcgggatctatgctatgacggctctcatgaataggcctagggctgcatggactatcacagcaagaaggacaggacgctggagtcaca

SEQ ID NO: 44016 - DNA, 374 bp, Oryza sativa
  Clone ID: PAT_MRT4530_47117C.1
actaaacacgacttgggtattgctacgaaacataccactatcaaatctagcagactctttgatccaaagagcaaatgcatttcatttatacaatggagaaggcactgacataaaccattcagtctacacactactgttgcataattgaactagctacacatgtttctccatcttttacacttacataatactaaactactacacaaatgtctggacgttttacacctacacacataattcgggtcactcatcgcctcataagactctcaataataagtcaactattaacttatcacacacttctgcgcactcttgttggccggctccttattggggcctgtaatcttcagcctgctgcccgcggacgggtccct

SEQ ID NO: 44017 - DNA, 624 bp, Oryza sativa
  unsure (1)..(624): unsure at all n locations
  Clone ID: PAT_MRT4530_47118C.1
aaaaatancaatataanctgcacttttaaccaagagagagagagagatggtcaaataactgaacaggaaaactaaagaactttgcacagaagtgcaatgttatgcaagaacttccaagatgcaaagtagttaacttcatacagagatgtttcgatatacaagaactgtcaagatggaaattctgaaacctatccaacttgatatcaagagtctgaaaactagttgcaaccaacgtttttggtcgataaccgtgaagattccggtcaataagaaaccaagtaaacaacaatatatatcacaatttgacctacccatataatgcatgcaaaaatagtttcagagacactttgaatgtcagtggtggagcagttttcctgtaaaaagaacaaaaaaaaacattaaatgcatcttccacaataacaactcagcaaataggtagaactctcatacctttctagcacaaatgcgacgggaaccaagaacaggatagcaatcacatgcctgtagaaaacaaagacagatgtgctcatgccttcattgaaggcaaattttgttacaatctgcatccctccatatagggaccttatgaggaatgcaaccacaaaagccgctcggacgcgtggg

SEQ ID NO: 44018 - DNA, 469 bp, Oryza sativa
  Clone ID: PAT_MRT4530_47119C.1
gagacgagtaagatcgtgtcatagacaagtgtccgaaggttaatttacacttgcacactttgtaaattggttgttgtcgataaaatgtcaacatgaaaaatgctaattatttgtttgtggggagtgatgaacaattcacttttgccaccaccaatagtgttcttccaagatcttggcagtctttaattctgacaaccttaaaagtacctagagactagtctctttaagcacccactgacattatgtcgttagttgtagctcatagggtaaactgaaacactacctgtacagacaacgaaatattcagagttcatctgagaagccagtttgcaagagctttaaggtaagcactgccaaacaagaccaccacagaaaaggtcttaaaagaatccatgaacccaggtacccaacaagctgcagtggttgttgaactgtttcccacaagaaaaagactgcacgacaagacagt

SEQ ID NO: 44019 - DNA, 597 bp, Oryza sativa
  Clone ID: PAT_MRT4530_4711C.1
gcgttcggtcaaccactggttgtgctccgggcacattggagtgatcctcgacgaccatgcgtccttggaaaacagcatggtgctcgtcgatacacttgagaggagcatccttgaatgccttcgctcctttcctttcctacacggtcgaagatcatgtcagcgtatgcaactagaattggtgtaaaatatggatgcaaactatagaaatgatggagtaagtcagaatgcgatttgttcacatgcaatataatgtactgtacagaaataaacagcaagcagtacttaaataaatcataagacagcattatccacactactcaaactcaatccggtacttgaatatgctatatgaactgcactacagaaataaaatgatacacacagaaataaagcatttttatttgcaggcatatttgcggaatcagcatgttgaactgcagcacagcaaagcatttctgtagtacagcaatcaggcaaatttgaagaacaacaataaagcaatatgaactacaagcagtttactttgtataaaggaatcacaaatatctcacatgcacaacggctgcatgaattggctggtacctattgatttcatag

SEQ ID NO: 44020 - DNA, 2750 bp, Oryza sativa
  Clone ID: PAT_MRT4530_47120C.1
atgagcctcgcctcgctcgcccgcgcgctctcccgccgctccgcgccctcctcctcccgcgcgcgccaggcaagtctccgccctctccctcttatcatcccggactcttccgccaccgcctctgggctcgggtcccactgcggcacccccacgcggcccccgcgcccctcgtcgccgcgcccagctctccagcgcggggaggccgggcggctggccttgctactcctccgcgggtacctgtcggccgcgctggggagtccgggcgccgagaaggctgcggcagacgggaggtccgtcctcgcgaacccgcagtgccggggagggtggtgtgacgggtttaagaagaattacgagaactactaccccaagggcaagaaggaggcgccgaagggggatgggagtaacaagtctgattcgaagcaagattcaagtacagacgatcaatggaatttccaggagactgcctcaaagcaattgcaaaattttctggcacctctactgtttcttggactgatgctctcgtccttgtcgtcgagctcatcagaccaaaaggagataagcttccaggaattcaagaataagctactagaacctggtttagttgaccgcattgttgtttcaaataaatcagtggcaaaggtctatgtcaggagttcaccacagtcgaacagccaaggtcagaacactgatgccatcattaccaccaatgatgttccgagcaagcatactcccagcagatacaagtattacttcaatattggaagtgttgattcctttgaagaaaagttagaggaagcccaggaagctttgggagtagatccacatgattttgttccagtaacttatgttgctgaagtgaattggttccaagaagtaatgagatttgccccaacagtctttcttgttgggctaatatatttgatgagcaaaagaatgcagagtggttttaatattggaggtggacctggcaagggtggccgtggtatttttaatattggaaaagctcaggtgacgaagatggacaaaaattccaaaaacaaggtgttttttaaggatgtagctggttgtgatgaagctaagcaagaaataatggagtttgtgcatttccttaagaatcccaagaagtatgaagagttaggagctaagataccaaaaggtgccttgcttgtgggtcctcctggaacaggcaagactctgcttgccaaagctacagcaggagagtctggtgtgcccttcctgtctatttctggatcagatttcatggaaatgtttgttggggttggaccatccagggtacggaacttattccaagaagctcggcaatgtgctcccagtattatatttattgatgagatcgatgcgattggtcgtgcaagaggccgtggagggttttctggttcaaatgatgagcgtgaaagtactttgaaccagctgcttgtagagatggatgggtttggtacaacttctggtgttgttgttcttgctggtacaaataggcctgatattttagataaagccttgctaaggcctggaagatttgatcgccaaataacaatagacaagccagatataaagggccgtgatcaaatattccgcatatatcttaaaaaacttaaacttgacaatgagccatcattttattcgcaaaggctagcggctttgacacctggatttgcaggagctgacattgccaatgtttgtaatgaagctgctttaattgctgcgagaagtgaggaaactcagattaccatgcaacattttgaatctgcaattgatagaattattggtggtttggagaagaaaaacaaggtcatcagcaaactggagcgccgcactgttgcttaccatgaatctggtcatgctgttgctggatggtttttagagcatgcagagcctcttctgaaagttacaattgttccccgtggaacagctgctttaggatttgcacagtatgttccaaatgaaaatcttttgatgacaaaagaacagctttttgatatgacatgcatgacattaggtggccgagctgcagaggaggttttgattggaaggatctccactggtgctcagaatgacctggagaaagttaccaaaatgacctatgcgcaggttgctgtatacggtttcagcgaaaaggttgggcttctgtccttccctcagagggacgatggctttgaaatgaccaaaccttacagcaaccaaacagcatccatcatcgacgatgaggtgagggaatgggttggcaaggcgtacaaaaaaacagtggaactgataactgagcacaaggagcaagtcgccaaaatcgctgaaatgctgcttgagaaggaggtcctccaccaggacgatttggttagggtattaggagaacggcctttcaaggcatccgagccaactaactacgacctcttcaagcaagggttccaggatgaagaagacagcaagaaccaagaggcggccaaaacccctcagcctgatgatgacggaacaccctcgcttggcgaggttgtacccacgtaatcctgcagcaaatttacagctgtaaattgcactcctattcgatagattcttgtttgttgttgcagcataagaaaatttgtataaattaacgccctcgcctaatctctgatgtgggaacccagttggcttttcgccggccatagtgtttccctgttttaaatgaatacgaagagctagtcgaggatcatgatttgagcttaacctaaaaacagcttttcaacagactttcggac

SEQ ID NO: 44021 - DNA, 381 bp, Oryza sativa
  Clone ID: PAT_MRT4530_47121C.1
atgcatggtactctctctctctctctctctctctctctcaatctctctgtgtgtgcctgttttgcaaagagctggctttctggactgggctttgtctctgggtgtttggaagcaagtaggattcccctgtgcaggacagatgtggaccagacctgttgtatcttaatttgccaagttgttcggattatgtcaccggggtgggtgggtgtattaaggatagggatgggaagaggaaggatccatggtttagacggaggctggggaggggtgaaggatggggtagatttgaaggcggcgacaaaatatgaaggagaaggggtgaggaattggtcagaaggggggggtagatttgaaggcggagacaaggttagatttggttag

SEQ ID NO: 44022 - DNA, 375 bp, Oryza sativa
  Clone ID: PAT_MRT4530_47122C.1
acgtggacgcgtgggcggacgcgtggggtcgacgattcgccgacgattcccaacaagagggtatcattgtgtggcggcacctccttcaacgaccgccttaccgcatgggtgaacagtataaccaccaacactttccgcatcaccattgaagacgagaacgagaagaagaaaaaggagaattaccactggaacaccgacaacgactacggcgagcacgccatggacctacagaactgcatggcgccggcaccgcgcgccctgaagataagcgagtcatccgcgaaggggcactgtaagatgaaacgttccacgttcaaccacttaagtcgactatggcaagaggatcatatattcggtaagagcattatcgtgggg

SEQ ID NO: 44023 - DNA, 262 bp, Oryza sativa
  Clone ID: PAT_MRT4530_47123C.1
tcgaccccggccactacatggaggttgaactgtgttccccgatcttgcttcgggccttgcgtcttgccccatacgatcttgcccgttatccgccattttatcctcccctgccgatgatcccgttgccaacacagcccccctaggtgaggctttttattccctgtaaagtggtgggtagagacccgagactatattttggacatttttttttgtttaggccactgttaggtctcgtaaaatttttgttctccaaaacactcac

SEQ ID NO: 44024 - DNA, 1422 bp, Oryza sativa
  Clone ID: PAT_MRT4530_47124C.1
gctttcctttgcaaccaacgcccgtccccctcccctccccaccttctcctccctcgtctcctctcctcgttcggaccgacggcgacggccgcctaaattatccatacctcccctccgccgtggccaccagccacctccacgaatccaattccaacatctcctcctcctcctccgccgccgccggggggatccgcgctgcgccgtggtaagcccatctctctcccggccttcccggctcgacgttcgttgtggggggcgtgttttgcgcccgaggattggtgggttggcggggggatggggattggggcgtcggacgagctgctgggcacgttcgtgccgatcgccgtgtactggctctactcggggctgtacctcgcgctggacggcgtggagcggctggacgtgtaccggctgcaccccagggaggaggaggccgccaagaacgtcgtctccaggggcaccgtcgtcaggggcgtcctcgtccagcaggccttccaggtcgccgtctcgctcaccctcttcgcggttattggtgatgaaagtgatattgaacagaagcaaccttctgcccttgtgatattgctgcaatttgccattgcaatgttcgttatggatacatggcagtacttcatgcacagatacatgcacatcaacaagttcctatataaacatatccactccaagcaccacactcttgtagtcccttattcctttggagctctttacaaccatcctcttgagggtcttattttggacaccattggtggtgctctctcattcctcgtctctggtatgacaccacggacatccatattctttttctcgttcgcaaccatcaagacagtggatgatcattgtggtctgtggcttcctggtaacatcctccatgcgctgttcaacaacaacagcgcttatcatgacattcatcatcagctctatggaaacaagtacaacttttcacaaccattttttgtcatttgggacaagatacttggaacttacatgccttactctatcgagcacagaaaaggaggagggtttgagtcacggccagttaaactcaacatagcagagcagaccaagactgattagtgtattctcggtccactactctcggctctgtggtaccctgatcttctaactacactgttggtgtgaaattatcaccttgttcgtatagtgatgtttttcttgttctctatattcttcttctgttaccttttgggaggggttctccttgtaccaaggtatagtgagtaaattagtgtactatatcaaagaatactaaagcactaagatccacttggatctgtttcctggagattggctgcatgtattgagcttacatgcatgccaatgttaacaagagaagatgatatttacactgtaaaaaaaaaaaaaaaaagccagtaacttttgtgg

SEQ ID NO: 44025 - DNA, 697 bp, Oryza sativa
  Clone ID: PAT_MRT4530_47126C.1
gtgggagttacagtaacattgtgagttcaaatttggttcagaagctttagttgccaacacaaccgcatcgtaatccatattacattaaagagttcaactcttgtggtatctgagagcaaccaagctaatgaggaagagaagaatggcagagagaaaatagacctatccatagctccatgcatacttgaaatttttaattgaccaagcacctataatttctgaagatgagaacaaagaagataataatggtgctacatcgactcaaggtacgcatagttatgatgtgttaaatatgtccactacttgtgctacattagagcaacccgtagtggaaataattgttgaaatacatttgtcacaaaaaaatttgcttgatatttcttatgataaagaacaattatgcgatgtttcacttatatccatgccacaactagtgaatggacatgttagttctatggttgagctaccatatgttgagtttaaacatgatattcacattgctagtgagaatgaagagcttaaattgctatcttctttaaatacttggggatatattcaatttgatgatttttgtccactcatctgtttagagaagaaattatttgctggatctaaattgccacgtccttctgatgtgatttttcatgttattagaaattatgatagtaaaggagaatataatgtgcatcgagtatat

SEQ ID NO: 44026 - DNA, 1463 bp, Oryza sativa
  Clone ID: PAT_MRT4530_47127C.1
ggggggcaaactggcaatacgtcattgatcctttttcataaaacgtacacagcaattgccatcatcattgtcaacgcattcattaccaataccaccagccagcaagacaacatagttttgcaaaatagcaaatctcatatcggcaggccagttcaatctattttctacttatgcttagatcccaaagaacataaataacgtatgttaatacaggatcacgggaacaagcacagtttgcgaaacaagatacttggtcaaccaaaatttaatggattgcagggcagctgagctcgcattgatcaccgcatcttgtagtgttgtgttcttgacacttggcatctatgcccacttagggcgtagcagagcttaatgtcaatatctcggggattctttttattcggtgtaacagtcatactgcctgtgatggtttccccctcacagatggtcagtacatcctccaggtacagaacagtttgcttccagtgagtggcttttgatcttgggcctgttgagaagcccatcatcttatggcatttggtgaaggacacattgaaataggcaacaagagcatggatatagtcattacgctctgctactaacttaaatggtactgtaaaggacgcatctccaggtgtcattttggaaatatccattgtcttcagtaactggcagttagtgacaatctgatttgcatccaccgtatctacaagtggctccatcattgcctgtttcttgatacagcgcatatcaaagccatacacattattccaaaattcaattttgtcttctttgtattctgcatcttcgattgcagtaagatgcaaagaagctttgtcaggtaggacaacaccaccatcagcaagccatttatcacgtgcatatagaacagtgttcagcatattctcgaacaggaggaaatagcccatccattcggagattattacatctacttttgggacaggaagctcaatttcttccactttcccttttattaccgttataacattagaatatccatttgttttcacaatttcctttgccatatctgccatttgagaacactcaatcgcatagacatgcttagcccctgcttttgcacagaaaagtgagaggatcccagtcccagcaccaacatcaaggactattttgtccttgaaaagaaagctgttctgggtgataacattttgatatgattttgtccgaaccacatcttttagcatttcttcatgaataccgaagtgggagtaggagtcgaagtagtagtcggcgctggtcttgtcgctgccgatcacctcctcccctcctcctccctctcccccttcctcctccgccccgacggtggcggcggcggcggcggggttctcctccatgacctcgtcggggtcctcgaacctcagcctcgacgccgtcgcctccgccaggccgccgttggcgtcgctgccgctgcccttgcgctgatccat

SEQ ID NO: 44027 - DNA, 199 bp, Oryza sativa
  unsure (1)..(199): unsure at all n locations
  Clone ID: PAT_MRT4530_47128C.1
gcgaggtgctcaaaggttcngatatgtcagggcaaaaaattttagggtagaatntaaacacggccttattttgaatgtagacaatcacttgtctgatcggagtaagaaatgcttatattttgagatgaagtaagaaatgcttatattttgagatgaagatagtataatttttaaaagatgttttaaaaaaaaaaaaaaa

SEQ ID NO: 44028 - DNA, 1618 bp, Oryza sativa
  Clone ID: PAT_MRT4530_47129C.1
acccaaactttttcatcatcatcgtcacaacttacaaagagagcttcaaaaatccaacaaaatctaccctttgcatcctaaggtcgaaaaggagatcaatgggaaacgcaaatgctttaaatatgtacatgggcatacgatttactatcagtttacaaatcacaagctggtttgctctggttacagctacgatgcctctatcagagtgaggtgtccttggtcgagagccgcttcaagaactcgtaggcggtgaccatggtggccgcggagagcgacatggacgcccacctcggccccaggccgcggtagcaggcgccccacccgccctcccgcaccagcgcgcgcgcctcggacgccagcgacgcgccgccgccgtccatgacctggagccgcgtcttgacggtgtcgagcggcatggtcaccagcgcggcggcgccgcccgccgccgcggcgctggcgccctgcacggcgaccacggacgcgcggctgtcgtggtgggcggggccgagggcgcgccagatgaggcgctgcgccgtggcgtaggacgcccaccacgcggcgctggagggcgcgtaggtgaggacggagacgccgaagccgcggtacaggccgcgcacgccgtcggcgcggaggatcctgcggagcgcgtcggcgccgccgcggtacggggggccggcggcggcggtctggaccatcaggcgctggctgacgacgtcgacgggggtccacacgacctgcgccgcgacggcggcggacacgccgcccgcggccgaggccgcggcggacgcggccggctccgcgacgccgaggcggacggcggcggagcccacggcgctcttggtggcctcgagcgcggccatgtagacggcgcgcgcgggcaccgtcccggcgagggacgcgccgaagccgcggtagaatccccgaggaccgtgacggcggaggatcgccgccgccgtggtagacgccgccgccgcaggcggcggcgagacctggaggtgcgtcttgaggaccaccgccgggtacagcgccgccgagacgccggagaagagcgcggcgccgagcagaaagaaccgcgacttgtcaagcatctcccagctcacctcggccggcatagctctcacctcctcacccccactcgccgccgccgtcgccgcggcgccgccatcgtcgacgtcaacggcgccaaagctcatccccttcttgacgcgcccacccaccaatccagctagctcagatccagtcaagctcccgcggcggcaagaagtcaaaggaggatgggatggagcatctctcgcgccgagtggacgtcgccggcgatgtccccggtcgccgacggcagcatctccggcgagggcagggtcgtctcgtggttgggaaggcgaacggcggtgacaagtggaaagaggagggaaatttctcggatcccgagggggcccctgagcagtcgcccttgctgttgccttcccgagctcctgccctcgccacggtcaccatcaagcctgccgtcgctctttcgccgagccatcactgcccctcccccatcaccaatataggcttccgcgcagggctgtcaaaaaagctcgaggcttgcgagctgctcgagctcggctcgtcctag

SEQ ID NO: 44029 - DNA, 165 bp, Oryza sativa
  Clone ID: PAT_MRT4530_4712C.1
gataattgcaacataccatcatgctcgacacaattttgtgtcagaatgggcggaagcggcttacaccacgccgaaacgaatgcacaggatcaatgacttaatacagtcggataagagcaaggccgcgtgtgtcgatgctgataacgaggaacttgcacgctatta

SEQ ID NO: 44030 - DNA, 348 bp, Oryza sativa
  Clone ID: PAT_MRT4530_47130C.1
tgaaccgtgtacagaccgtcggtgttaagccggcagaaggagaggatgatgccaagtcatcatgcccattatgccctgtgctacacacatgctacactgggcggtacaaagggtcggggagttcgtgaaggaccacgaattggtggaggacttggcgtaatgctgtacagaggattcagattattttattagtatgctcacattctttggtgccattattgaggtgtgcatgagaaagcttgcgttttatccagaaatcagtggcttcctcgaggaggatgaagaccacttcccttatgtcggagctcgttatgtgtatggctgttcaacaaagcttattatgcttga

SEQ ID NO: 44031 - DNA, 705 bp, Oryza sativa
  Clone ID: PAT_MRT4530_47131C.1
atggcaagccgcccttcggccgctgcctccctcgggctagcggcggctgtcgccgccgctgccgctgccggattcctcacccacgtcgaccggttcggtgaaaacaccttggttggagctcctccgtcgcgagacgccgctgtccagctgatgctcctgcggctgcttgtggcggcggcggcgatgggtgccttcaacaccgccgtcgcgctcatctacgcccgcctgtacaacgccggcggcggcggcgtgaacgggaggattacacggggcgtttacctcgtcctgtttgcgtcttccggcgtgctacatgtcttcttggttcctcagctagagccaggcgtcatcgtcgatggcgctcaagaacttctgcctcctctcgccgtcgccgttgcacatgtgcttcttccaactgctgcggcggcgacgttcttcctctccatgatgctcatctacgcgcatgtcggtgccggcggcggcgccgttggggacatgatggcgatcccgacgaccaccgtgaagctcctcaccaagctgtggaggaagctttttcggccggaagaggagagcaagctgaaaacaaaaggtggaacagatgaagcaaatgatgacaagattaagacctccaagagcaggagtgggatagttgtgatgtttgctttccctgtttatagttgctgtaggagttctactggttgtgtttag

SEQ ID NO: 44032 - DNA, 164 bp, Oryza sativa
  Clone ID: PAT_MRT4530_47132C.1
cattgggaaccgatgccacacgaaacttatacctagctctgctatagagcagacgtggggtctgttcattggaacaaaatgactccgatccatagagggtctagaatgaaactggtgctgatgctgatggctgcactaactaccgctcgtactagataaaaagt

SEQ ID NO: 44033 - DNA, 430 bp, Oryza sativa
  Clone ID: PAT_MRT4530_47133C.1
cggctgcgggaacctgatcggcttacccacggtagaaatcgctgctgattattttattactgctacaggtatggacgctgttgttgtcactgacgaccatacagtggttgccggcgacgccactggcatgatttaccagaggaaattgggcgggtccaaatacggaaggcgactgccgtctcaatgtgcaatgtcggctagtgctcgaccaaaagtatgttggaaaactcccaagccatgattaaggactatcgctggccagcaagggaaacctccctccgttatgattaagaattgttaggtgactcttatgtgtctgcacctgtgaaaggagtgcgttaccagtgtctaaagatgggcttaggggaacctatggtgacagcgtggaagaaaatagagcccccgggcgttaagcacacctagatggact

SEQ ID NO: 44034 - DNA, 417 bp, Oryza sativa
  Clone ID: PAT_MRT4530_47134C.1
atgacggatgtagaactggagaggccggccgttttatacagggccatgagtaggcgatacgacgatcttgaccgtgccaggctagggctacaggggcgcaacgctgcggtgtggctggcgcgtgggggacggcggaggcaatgcgacacggggaggagaagcgagcaagccggctggtgggcctgcacgtgctgggggaagcagccgctgggggaggggaatcgaccacaccgcatctcgcgcacacgcacgggggtggaagagaagcgagcgcggtgggcgaggggaatccgcatctacggcgggcccacagtgcaacttgcgtgggcgcatgctgggcggagaaagagcgcgcatctggcggcggctgagaaaggagaagaccgagcgcccagattagatcgcagattagattga

SEQ ID NO: 44035 - DNA, 195 bp, Oryza sativa
  Clone ID: PAT_MRT4530_47135C.1
atgacggcgcctggtgtggcaggaggtaccatggatattagcggcgatacgttataccttagtgtcaattactttggcaccaatccttggacttacatggaccgtcgaggtcaacgcttggaaacatcggccgccaatgcagatgctccaggtgcttgggtctcgatgccatggtgtctggttctaacacattag

SEQ ID NO: 44036 - DNA, 513 bp, Oryza sativa
  Clone ID: PAT_MRT4530_47136C.1
atggcggcggctccggcgacgacaaaggggaggggtggtggcggtgaccggtggcggcaactcctgcgcacgggcgacaaatctggtggtggggagtcttgtctctccggactcggcggtgacgattggtggcggcaaaggggatggggtggcagtggcgactcgtgcaagaggctgcgggcgattgatgatctggggaacctcccctctccggggtcggcggcggcgaccggtcatggcggtgaccagcagtggctagggctcggcggtggcaagagagccatcgtggcgggagaaaaatcacgtgaaatatcagaaatacccctggacccatatgtcaacccttctctatatatgaccacctcgcattcttcctcgaggtgcctgaccccttctgtcgagcttgacccgtcggccacgtcgcagcgggagcatatgacgcagacggtcgcggccctcaccctcacggcgagctccctggtatcgcgctccttctctgtccttggccactag

SEQ ID NO: 44037 - DNA, 183 bp, Oryza sativa
  Clone ID: PAT_MRT4530_47137C.1
cccactcctccgcccacgcgttcggatagcataagcaacacaagggattaactcatcactcacttagctaattaaatcgtcgaccatgtgggacaagtgcgtcatctgtgactgttcttacatgagccagtgcttgaagataggtaccagctatggcgacgtcttacgttgaagcccataagt

SEQ ID NO: 44038 - DNA, 1205 bp, Oryza sativa
  Clone ID: PAT_MRT4530_47138C.1
ccgcgagtccgccccgcggcgccctccccccgccttctcgtcctcctcgccgaaccacccccatcgacccacacaaccagcgaaccggaaggatttcactcagctgagtttcctgcctccatccccacggcgatggcggaggaggcgaagaacctcgagacggcccgggccgaccgctccgtgtggctcatgaagtgcccgaccgtcgtctcccgcgcctggcaggaggccgcgaccgccgccgcctcctcctcctcctcctccgacgccgccggtgggcaactccaacccacgcgataaccccgtcgtcgccaaggtcgtcctctcccttgacctcctccgctccgaggagccctccctccaggcaagcctcccccgcccactccctctcccttgcggattcgaatgttacatcattcattataacatggtgctattggcatggcagttcaagatggagatggctcaaactaacactggcaatacaccaaagagttactccttgaatatgtccaaggattttgtaccaatgtgtgttttctctgagtctaaccaagggaaactttcatgtgaaggaaaagtcgagcataaatttgacatgaagcctcacagtgataatttggtgaactatggaaagttatgccgtgaaaggacacaaaagtccatgatcaaaactagaaaagtgcaggtaattgaggatcacagaatgagcctgataccgttgcctggcatggttggtctcataccttctggttctaaggagaagaagaagcaaacaccaaccaaaccatctgatgcaaaaagaatacgtagggatcgcagggaactggaaaatattatattcaagctttttgaaagacagcccaattgggcactaaaggcgctggtgcaagaaactgaccagccagagcaattcctgaaggagattctgaatgatctgtgtttttacaacaaacgaggaccaaaccagggaacgcatgagctcaagcctgagtacaagaaatctacaggggacactgatgcttcttgaatatgctagttcatttaactgctttcggataaccaacatactcaacctgttgactctgaagtcacgaacattgagttgtgcagacatctcatatttcagtaacattcgttctgctgctaaatgctaagaggcataggcgaatagttgtaaggatagtttgatacatttattagag

SEQ ID NO: 44039 - DNA, 3781 bp, Oryza sativa
  Clone ID: PAT_MRT4530_47139C.1
gatccccgggctgcaggaattcggagagggagagaactagtctcgagttttttttttttttttttcactcacaaaagaacatgcgtagatacatagatcacattagaaagggacatatgtagtaatcttcaatttcctgttatatatccatgcatggctggaatcttttcctattctaacatttaaaaataccttattatctcattcatcagactaattacaaaaccttacatgaacaaaatacatgggctgccatcacgacaggatattgaatacaccagacctacacagcaagaagcatgctgcaatgaatagatcgtgatgccaaaactcagttccctctatacgaacttctagtaacaaatatcgggtccccaaaaagggatggaacaattaaaaaattgaaatgcagcctggcatggttaaagtatggggcaacaatttcagctcagaaaagggcaaaaacattgctatgattttcacacggcattactgggagtattgacattgtactccgctgtcatttaagtgctatgtacttgtatcctggggagcaatgcctcatttaatgtggataatgttagaaagtctgcacaggatttcacgccaataacggcgatgtcttggagtacttcccatgtaccatatgagtactgaacatttgcagacacagtcagttcctaatgtacaggtcagtcattcatcaacttttgtcccaaacttttcagcaagaaatcatccaagaagaccataattcggaataggcttctggactgaagttctcagcaggcaacttccgaatgcatacaagaatatgttggacatcacggcacaatctgttctttgcctgaggtgtactgagttctaacttcgaaaatgcttctgtgatatgtgaatggaatatttgaactacttgcctgaatatcaattgcacatctgcctcaagcaatgtttgagaaaggatgcgatgcaagtaactaacttccttcgtaacagacttggcaaattgacttggctgcaaatcagtatcttcaggcccattccaactttccacaatttgcggtaattttctcagatttgctagtaatctctctctcattatctggactagcttggtgtgaatttcatctcgatgaatcttgtaatcctgagtcactctatccagttcagacattaacagttgtttgcgtgcctcgggtattttcaggaaaagtacacgccggatatctggaattaaagaatatataaagctgattatctgacttgccaaagctaaatgcttagacgtaattgatttcagaccagacacctgcatggcacctgcaccaagaaccagttggcacgtcctagtgttgaagagcttcaatatttcaacaacacgttggaccacctcaaaagataatgatggcaagcatttactgatgtcaacatattccgataacatcttcaacaatatcaaaccacagtttaccatatgatagcctacacccccatgcacaatggtttgctgtgttgatctagcatgcccaacattgttttcagtcgaaggagaagtagatactgcgttgccattatcagtattattttcagctgaatttactggttcttgacttgtaacccgattttcatggagctttgagctgtcatcagtgctaggcatctccatgccattagcaacggaataagtggatgatagtgatagaacaattgcttggaactcttctggaacatcaatagcaacccatgtctcttggtcaagaactgccttgatttttgccatattgtgaaccggaggaagtacttgtttaagccttacattctccgtttgcactaccattttactcagggtatttgatggtgaaatgcactttccgcaagtaatattccggacagtatgctgatagtcaacaaattgctttgattgttgttgtacaattccacggatgttgtaacccaacctgcctccaatcttttcagtggcagctacaaattcttctgttacattatagatgatcaagaactcctgaagtcttaatttggggtgaagggcagcacgaacaccaagaagtttagcccatcgtccatgggcagcatcacatgcagcaaaaacagcttctgtgttttctctcaagacatcagctcggacattctttattgaatttgtactggacatgtcattcgtttttccttgaaagaagggaaacttagaattactcctggtaagagtattagacacccgtgaagtgacaccgtggtcattttcttgggaaaaatcagaaaccgagccactgtgcttttgtacagaatttgaagcatcagaacttaagctcccctcgaggtttcccatgatccattcaactattcttttaacttcagctgcttgcactagatgtacctgtactatcctaaatatagccgataaaagctgaacaaacccttcagacgatagactccgcaacttatttgctaaagactggcctccagcatcagaatcagcagctctgtctccagttactgaatcagaatctattgtcctggcaactaaaattgggagcagctcagctactgtggctttaattgaagctttcataacagtaattagtgtgtcacggtaaattcttagcaccgctggaagtttgtccgttctcagtaggcaaataatgagggggagaagccgatctctgagaatgaagctttcttcctcatctatgtttaccgcataacattgctttcctatcatgcattgaacttcatgctccgtcccattaagggggacagaagcctttcttttcacatttgcttgaatcaatgcgtctacagcttttccatcaggaacagcagcccgcacaaattctgctgaaagaatgctgttgacagaatctagtgatgtccccaactgatcacgaatatttcgaaagcaataaagcccagtgagttcatcagtatctagcaagttttgcaggtcatcaattacgtcaagggcaccagcacaatccgcagctgccacaagcagctttagagcagcgagcgcctggctgacgtagaggatgacggtgagcttctgctgcagcgcgacgaggttaccccgcgtcgcattgagctcctgcacctggcgcgcggcacccacgagatcgccggtgagcacccggaccacctccctgagctcccggatcctcccgaccgcggcgacgatctccccgtccagcccccgcagccggccctgcgcctcgtagaaggactcggagcggcgcgcgatctcccgcacgaggtgcgcctcgacgacgtcgaggtgctggccgaggcgctcctgcagcgcggcgtcgccgagcgggcaggcggccttgaacgtggccccgtcctcgagcgcgaagtcctccttgaagaagagcgcggggacctcgcggaggcaggcggcgaggccggaggccgcggggccggcggcggcgccgtcctgggactccgcgagctcctccgcggaggcgtggagccggatatcagcgaagcggccgaaggggtcggcgacggcggcgaggtagggggcgaagtcggcgcgggagacgtcgcaggggtggggcggcggcggcgggggcgcgtcggggagcggggtgggagggggccaggtgagccagtagtaggaggaggaggaggcggaggggagagggttgttgaggagcgcggtgatggactgcgggacgccgccggggggagcggaggtgggggagtcggtggagagggtggaggaggaggcggaggtggtgcggagcggaggccgcgaggccat

SEQ ID NO: 44040 - DNA, 1485 bp, Oryza sativa
  Clone ID: PAT_MRT4530_4713C.1
atggatgagcagcagccactgcacatcctcttcctcccgttcctcgtgcccggccacctcatcccgatcgccgacatggccgcgctcttcgcggcacgcggcgtcaggtgcaccatcctcaccacccccgtcaatgccgccgtcgtccgccctgccgtggaccgcgccaacgacgacgctctccgtggcgatgccggcggcgcaccggcgatcgacatcgccgtcgtgccattcccggacgtcgggctcccgccgggcgtcgagagcggcacggcgcttgcttccgaggaggaccgtggcaagttcgtccatgccatccagcggctgcgcgagccgttcgaccggttcatggcggagcaccaccccgacgccgtcgtggccgacggcttcttcacttggtccgtggacgccgccgccgagcacggcgtcccgcggctggtgttcctcggcaccggcgtgttcgcgcggtcatgccaggagagcatggtgcgccacaacccggtggaggcctgccccgacgacgaccccgacgccgccgtgtccctgccggggctgccgcaccgcgtcgagatgaggcggagccaaatgatcgacccaaagaaacggccggaccactgggcctacttcaagatgatgaacgacgccgaccagaggagctatggcgaggtgttcaacagcttccacgagctggagacggactacgtcgagcactaccgcacggctctcggccgccgcgcgtggctcgtcgggccggcggcgttcgcgagcaaggacttcgcggcgagaggcgccgccgagctctcgcccgacgcggacggctgcctgcggtggctcgacgcgaagccacacggctccgtggcgtacgtctccttcggcacgctgtccagcttctcgccggcggagatgcgcgagctcgcccgaggcctcgacctctccggcatgaacttcgtgtgggtcatcaacggcgccgcggacgacaccgacgcgtcgggtcagtggatgcccgaaggcttccccgagctgatctcgccgcacggcgatcgcggcctcaccatccgtgggtgggcgccgcagatgctcatcctgaaccaccccgccgtcggcgggttcgtgacgcactgcgggtggaactcgacgctggaggccgtgagcgccggcgtcccaatggtgacctggccgcggtacgccgaccagttcttcaacgagaagctcatcgtggaggttctcaaggtcggggtcagcgtggggtccaaggacttcgcatcgaatctggagaaccaccaggtgatcggcggcgaggtgatcgccggagctgtcaggagggtgatgggtgacggtgaagagggcgccgaggcgatacggaagaaggcagcggagctaggcgttaaggcgaggggcgccctggagaagggcggttcgtcgcacgacgacgttggacggctgatggacgcgttgatggcacgccggacctctgttgacgtatga

SEQ ID NO: 44041 - DNA, 1006 bp, Oryza sativa
  Clone ID: PAT_MRT4530_47140C.1
ccggccgggcaagcactgccgcctccaccgcctcaacccggacgcagcagccgcagcggaagagggaagcgaagcaagcgaagctcgaggggagatggcgcgcggcgtggcggcggcggcggggggcaagggcggcgccgggaagaagaagggctccgtcaccttcgtcatcgactgcgccaagcccgtcgacgacaagatcatggagatcgcgtcgctcgagaagttcctgcaggagcgcatcaaggtcgccggaggcaaggccggcaacctcggcgagtccgtcaccgtctcccgcgacaagaccaaggtcaccgtcacctccgacgggcccttctccaagaggtacctgaagtacttgaccaagaagtacctgaagaagcacaatgtgcgtgactggctacgggtgattgcatccaacaaggaccgcaacgtgtacgagctccggtacttcaacatcgccgagaacgagggcgaggaggaggattagatgcactgcctttttctatgtcttgtgaacttttgaacttgctggaacactatgctgtagtcactgaagagaagaattttgatgtttcatttatcaatgtttccctgtgtgcttaaaacctatgcttaggtaagcaagttgaagaattattggttctcacctttgcagttgagcagtgtgcatttttaaagttttaactggaacctgatggagctgttagtgctgttggttcatcagctgatactgaatcgagcacatcagcttttactatggccaatatcactcggaataaatccgattcattattgtgttcaaaaataaaactccaaaatccttctatttttccctccttccttattacttcagcccccggtctctgtcccctttgtcctcccccctcgtcttccctcctcctcttgtcgcgtctgggtccgcgaccgccgtcttcctcctgcgtgttgtcggttctatctcatatcctcccattctgtcacaacacataatttcttttcttat

SEQ ID NO: 44042 - DNA, 1023 bp, Oryza sativa
  Clone ID: PAT_MRT4530_47141C.1
gtgctgtttccgattactatagggcgaattcgagctcggtaccccagatactacaagggatgtcaagattgtcagaagttcggagcaattcagagagcaccagcatcggctatgaatcctattatcaagccatggccatttagaggatggggcatggatatgatcggccaaattaatccatcttccagcaagaggcataaattcatattggttgcgactgattatttcaccaagtgggtagaagctattcctttgaagaaggttgattcaggagatgctatacaatttgttcaggagcatattatctaccgctttggtattctccagaccattacaaccgatcaaggctcgatctttgtgtccgatgagtttgttcagtttgccgatagcatgggcatcaagttattaaattcttccccatactatgtacaagccaacggataagccgaggcatctaacaagaatttgatcaagttggttaagagaaagatttctgattatcctcggcaatggcatactaggttagccgaagcattgtggtcttatcggatggcttgtcatggatcgattcaagttcctccttataagcttgtttatgggcaggaagtagttttaccatgggaagttagaatcggctccaggaggacaaatttacataatgaattgacagccgatgaatattataatctcatggccgacgaaaaggaagattttgttcaatcaagattgcgagctcttgctaaagttttcaaagatagggaaagggttgcatggcattataacaagaaggtggtgtctatgtctttttctgagggagagcttgtttggaagttaatcttgccgataggaactcgagataacaaattcggcaagtggtagccgaattgggaaggaccgtttcaaatctataaggttgtgtccaaaggagcttatatgttgcaaggacttgatggagaagtttatagacgagcacttaatggaaaatacttgaagaaatattatccaagtgtttgggtcaattca

SEQ ID NO: 44043 - DNA, 265 bp, Oryza sativa
  unsure (1)..(265): unsure at all n locations
  Clone ID: PAT_MRT4530_47142C.1
ccgggctgcaggatgaggaagagctggtgtctacaagggtcgcgccccaaggcggaagacgactggatcatccacgagtaccgcctccanccaacgaacacgcccctactcaggaggaaggttgggtggtttgccgcgcgtttcagaagccgatgcccaaccagcagcagcacaggctgtcctacggctgcatccccggcagctacggcgccggagcctacgccgccgtccccgacaactacagcttgctgctgcaccacgacaa

SEQ ID NO: 44044 - DNA, 356 bp, Oryza sativa
  Clone ID: PAT_MRT4530_47143C.1
ggcagaaaattttacatccattatttttccattttgcataccgcaagaagaccgctagctaggctgaatagagtgaaaaaaggccaaaaactatcacaacacgtggccgaactacaacacgtgcgcacggtaccacactagaacgtaaaaccttttttgagagcggtataccctaccatctatttggtagcacttatcaacaaggggcgaacagatcagccaagatgtaggctcaaatgtgcttgcacttagtcatgacggaacttactttatcaccctggtacgattgcaagttccgctccagcgctgatgaccatctcttgttgaatgccgagggggcccctcacactgggaag

SEQ ID NO: 44045 - DNA, 393 bp, Oryza sativa
  Clone ID: PAT_MRT4530_47144C.1
atgcgtgacgtggtcaggtcacactcgacatgctcccatccgcacggcgtcacgtcggactacatccacatggccaacacgcccattgggtcaaacaacatcggcttgaacatgattgaacatcggcttgacagcgtcacgtcggactacatccacatggccatcacgagctattcagggcgtccctatcacctgcccctcgagcatgacccctgtgggctatccttggggcacactagcccccgagtacggctgctcagggcatatcaacccccgggatgcggctccccgtgggcagagctcggggcacattcgcccccgggggcgatgctcgggttgagagaattattctacgaggagtcaaaggagcaagagatgaggaaaacaaaatag

SEQ ID NO: 44046 - DNA, 147 bp, Oryza sativa
  Clone ID: PAT_MRT4530_47145C.1
atgtaggtgagagatagcagccggctgggaatgaggaagaggaggaggaagaagaagagagagataattctgtggagcttgcctggatgttgccacctgccgccaggcgtggagctgtcacctgtcacaagaacactcaatagctag

SEQ ID NO: 44047 - DNA, 1862 bp, Oryza sativa
  unsure (1)..(1862): unsure at all n locations
  Clone ID: PAT_MRT4530_47146C.1
acggatctcgccgccatgtggaagcaattcatcgggaagttgtcgtggaagtcggtgaaatcgagctccaccggaggcggcgggggtggaggaggagggttctcgccgacggcggcgaagccgccgccgccgccgtccccgcgggcgaatgggacggcggcggcggcgaagccgagcgcctcgccgccgccgccgccgccgccggccgccgcgggcgccccacgcgtccgcagggaggaggcattcgtccagaacgtgaacatctgctgcgcggtgttcgacttctccgaccgcgggaaggacaccaccgagaaggagcggaagcggcaggtgctcatgtcgctcgtcgactgcgtcggcgccgccgaggagcccctcacggaggcgatgatcgcggcgagcgtgcgcatgttcgccgccaacctcttccgggtgttcccgcccaaggcgaggtcgggcgccgcggcgtcggagacggaggaggacgagccgttcttcgacccctcgtggtaccacctccaagtcgtgtatgaattgctcctccggttcgtgacgtcgccgatggtggacgcgaaggcggcccggaagtatgtcgacagctcgttcatctcgcggctgctggatctcttcgattccgatgaccccagagagagggacagcttgaagacagtgttgcataggatatacggcaagttcatggggaatcggccgttcattcgtaaggccgttagcaatatcttctataggttcgtgttcgagacggatcatcacaacgggatagcggagctgttggaggtgtttggcagtgtgataagcgggtttgcgaagccattgaaggaagagcacaagttgttcctatggaaagcgttgatcccgcttcacaagccaaagacggtgggtgtgtatcttccgcagctgacgtactgcatcacacagttcatcgagaaggaaaccaagcttgcagggactgtaatcagaggcctgctgaagtactggccagttacaaacagtcagaaggagatgatgttcttgggggagttggaggaggtgctcgagttgaccgacatggctgagtttcagaaatgcatggtaccgctgttccgcaggattgcaagttgcctgaatagctctcactttcaactgataaaacctttcatcggtgatcctaccgatcatatatccagctctggagaggaacacccgttggcactggaatcagtcggtcctcaatgttaccctgaatgtcaagaaaatgttcttggacatggacgagagattgctcctggcctgccagaacaacttccaagcggaagaagagaagcgagccgcgaccgaggagcggcgaaggctgatgtgggagcagctggagcggaatgccgctgcggcatgccatccacatccagtgatcaccactactgactcaagctttccttcacccccttcatcaactcctctggtagctcccactgtgacatgacatgtggatcaaatatactccatttccacttatttgttagctagctagatgatgatgaagttgcttgcttctcctgggactatacagaaggcattttgttaccttcgtaaggcccccccatgtcaaagtctgtaattaatagttgatggtttgaggacaaaatgacacttgattttttcttctttttttgtggtgtattctcgagtaatgggcattgctttctaggcaaaatctttgattggttcatcctgagtgagtgatctgtcaaagtgtggacaacaatgatttttgtgtgagagaaatgacaagtttgcagccgttctttgtggctnnnnnnnnnnnnnnnnnnnnnnnnnnnnnnnnnnnnnnnnnnnnnnnnnnnnnn

SEQ ID NO: 44048 - DNA, 543 bp, Oryza sativa
  Clone ID: PAT_MRT4530_47147C.1
atggatggaccttatgctgttgcgaagagtcctcgtcaaccagattaccagcgctttgcacaatcatggttccgttgttttgagctaatggacgagaaacgcccaggggtcttccggctagctccacaaggtggtggactagacgatctagacagtacaaaaatcctctccggccgccgcaaaaagcccctgaaacttgcagattctccagtcaataatgtcttgtctgcacatcggccgggtcagatcgatcgatcgaaaagtctctcagcaaattctccaagaacatatgctcgatcgaagtgtcgaacacctgtgcgctcgatcgaattattattccttcacacgcggagaagacgaagcaatggaggagtacaacgtcgtggaatcgatcgatcgatcgacggcgacctgacctgtcctgcgcatcgatcgatcgatcgctgcacgcggctcgcgatcagccaagtggacttacgccgtcagttcgtctccaatgccaaattgccaatcaaaatgcagttggatcgatcgatcagttcg

SEQ ID NO: 44049 - DNA, 350 bp, Oryza sativa
  Clone ID: PAT_MRT4530_47148C.1
ggtggtggatgcgacggcggctgctgcagggtggatgcgacggtggccggtggccgcggcaggatcgatgcgacgacggctgcgacaggatcgatgcgacgatagccgcggtaggatcgatgcgacggcagccgcggtgggatcgatgcgacgatgggatggcgctatcatggatgcaacggcggcacgacgacgccttggatgcgaaccaccccgacggcatcgggttgtagcttccgtacggcggcggcagacagttgtgtgcggcggggatggcagagtgtagtacacgggcggtggcggcggccggtagtagtctagagttggcatgtccggcggcggcgagctgg

SEQ ID NO: 44050 - DNA, 473 bp, Oryza sativa
  Clone ID: PAT_MRT4530_47149C.1
atagaggggaacatcggggttcatcatttattcaccacacatatgcttccaaacaaaaggaaaacactaatttttttagtaaccaccccacatacatgcccaggtagctacagtagcctagctaggagccagatctcgccagccagtagcaaacaccacctcccccgttggggatgtccaccttgcaaaaccccgggggggttgcccccccgccctccaagtcccctttccgggagccggggaacaccttggacatggggggccccacattgggggcccccagctccctgtaaatgccccccaacatgggggtgatcgcctcgcacctgcaccaactgtcgtcaacgggggggagctgccggcagcaatctccccggacctgcttggggggggggggcgtgccacggccgacccactggcgcttaaccaacccccgggaacgcgggagcgggtacatcgggtagcccattcct

SEQ ID NO: 44051 - DNA, 325 bp, Oryza sativa
  Clone ID: PAT_MRT4530_4714C.1
acacagggaccttgtaatccgggacactttcacacaccaaacaatccgattacatcccccgttaaccccgctgggcttcttgagcgaattctttcatccccatggtaccgcccccccctgaccgcttttcatatccggaaaaacctttcgccaaaaaactcgggaaggggtggacagcaccccgagagctaccttgcacattccatttttttggattatggcactcactgactcacttagctaagtcttaccctttttaaaagggggataagggcccccaagggacaaactcgggggtggacttaatgggctgaaaacgcgggac

SEQ ID NO: 44052 - DNA, 2874 bp, Oryza sativa
  Clone ID: PAT_MRT4530_47150C.1
atggcacacaccatggtgagcgttgccacaggggtcctgtgccctgtgattgggaaactctctactctattgcagatgaagtacaacaggctgaagggagtagatagtgagatcctctccctgaaggatgagctaagtagtatgaacgctctactcctgaagctagaggacatcgatgacctcgatatccaagtgaaggagtggagggaccagatccgggagttgtcgtatgatattgaggatagaattgattatttcatgttccaggtagatggtgatgcccacaggcgtgaaagcatgaaaggtttcttgcagaagagcattcgacaactgcggatgcttcgagcacgcgacaagatggctgatcaaataataaagttaaaggctcgtgttgacatggcgagtgaacgtcgcaagaggtacaactttgatgagaccttgtcaagttcaattggtgtggtgccgatcgatcctcgattaccagcactctatgtagaagaagaaaacctagtgggcattgatacaccaagagtagagctcatcaggtttttgaccgaaggggatgataaattgctgcaaaaactgcaggtggtgtctattgttggaattggtggactaggaaagacaactcttgcccgtcaagtttatggaaaaattagtgggcagtttgattgccaagcatttgtatcagtttctcaaaaacccgacataaggaaaatattcaaaaatatactgatcaatataacagagctcgattacggagctatagatgcatgggatgaggagcggctcatcaataaactcagagaatttctcaacgataaaaggtactttgtcgtaattgatgatatctggagcacaacagtttggacaacaatcagatgcgctttctgtgaaaattaccgtggcagtaaaatattgtgtacaacacgtatcatttctgtagctgaaacatgttgctcggctgactgcaaaaatatttatgaaatgaaacccctgagtgatgtttatgctgaaaaattgttcatcaaaaggatttttggctctgaagatcaatgtcctgcttatttgaaagacatatatattgacatcttgagaagatgtggtggtttaccattggcaattatttctctagctagcttattggctaccaaaccacgcacaaaagaacaatgggggaggtacagaaattctgtttgctcagcaactgagaacgttcccagtgtaagcaacatgcagaggattctatctcttagttataatgacctgccccactatttgaagacatgcttgctatatctaagtacatttccagaggatgtgctgatattatgggatccattggtaagaagatggatagccgaagggttcgtcactgcacaaggtgaaggtggacgaactttagaggaagtcggagagtgctattttaatgaactaatcaataggagcatgatacaaccggacgaaatccaatacgacgggcaagctcatgcttgccgaatgcatgatatgattctagatcttattatatctaaatcagttgttgaaaatttcatcacttcattttctcataattatttattgggatgtcaagacaaggtaattcgtcgactttccctcgactgccgagagcgagatgctatacttccagcaaccatggttctttcgagtgctcgatcacttgttgtgtatgggtccaccgaacacattccacttatttcagccttccatgttctgcgcacaattgccatagaaagcaatgataaactgaaaaattgttatctcagggatatagggagattatttcagttaaaatgcttgaggctgagagaagtaggcataagtgagcttcctgaagaaataggcgagctacaagaacttcagacactagagctccaacgtacccgcataaaagaattacccaagagcatagttcggctgaaaaatttagtgtttttggttgctgatggcataactctaccagaaggaattggaaatatgagagctttgcagaaacttataggggtgaaagttgatatcagcatcccagtggattgtttgcgtgaactgggtggtctgaatgacctgagatgtctgtatataatatggtgtgttagtgatgcataccctgacaagaaaacatacacagatagctttgtttcttgcatcgacgagctgtgtacattcaagcttcggtacctacaacttggatgtgatgattcatctctggatttcatgctggattcttggtctcaccctccttacccgctttacaattttcagatgatcacttactactgtttccccataattccagagtggatggccacgctttttaacgtcgcattcctggacatcaatgttacttctgtggggaaggatgttcttcggatccttggggacttgccttctctcttatctctttcaattacgacaaaaacaattgtatctgaaaggctagtcttcggcagcaatgggttccaatgtctgaaagaatttgacttccattcatggcaagatgtcttaggtcctttattgtttgaggttggggctatgccaaagctcgaaaagtttcggttcaacgtgtgggcacgaacactaggatctctagacagcaacttctatgaaggcctccagaacatggcttgcctcaagaatcttgtcattgaggtagactgtagggaggcgagggcagaacaagtggaggctacagaggttgctgcgaagaatgccattgcaaacaatcatctccccgatcatctcaatgttcaaatgagacgaaccaacgtagacaggatgataaaggacacggtcatgggcaacagtgttgtggaacagcaagaggagacagcagtaaagattcactataactga

SEQ ID NO: 44053 - DNA, 370 bp, Oryza sativa
  Clone ID: PAT_MRT4530_47151C.1
tttttgttttttttttttttttgtttttttccataatccatgggttttattcctcctacttgttgttccaggatgcgcaaatcgggctcgcggttccccattcttttttatctattccatttgccaaattcatgcataaaattcttgcagggttttgttgttctagcatgataagtaaccccccaacccccatatcctctggctctcactatgttatgtacaaactacaaaactgtacatttcctaatattcttgaagactgctgaaatggttttacaaggtcaggtaggtcttgatcatcgttgagccggccggatcagagaggagatgcctgacaaggttcattcgcatttggttcggggcaattggg

SEQ ID NO: 44054 - DNA, 449 bp, Oryza sativa
  Clone ID: PAT_MRT4530_47152C.1
cccacgcgtccgcaactgtgaagcccatttttatgagaattattcgaaatgcacgcaaaacatcatccaaaaacttaatttcatttaacttcccctgtttaagaaatatacttcctccattccaaactataagcatttatgcgtgttattcacaatgaatctcgatcttgagattcattctgaaaaacaagtataaatgctttttattttggaacggaggtaatattcgggtgagggatgatggtgcttacgaattactttttgaactgcaatgatccagggatgaagttcatgaatgtggagaggtcctttgcacagcagcactatgccgacctttccgacaagcccttcttccctgggttggtggagtacatcatctctggccccgtcgttgcgatggtttgggaagggaaaggatgtgttgccactggccgcaggatcattggggc

SEQ ID NO: 44055 - DNA, 1775 bp, Oryza sativa
  unsure (1)..(1775): unsure at all n locations
  Clone ID: PAT_MRT4530_47153C.1
aaagtataaacgatattctttttgaacttccttgatgaaaagaaattacatatncggaaatgaagcatcttgcacttgataatggtgcgcaaatgaacacaaccaaaaacctgcttggctgcttcatctgacgtttcaacaatcaagttctgctcatgccaacaacctacaaagctgagcaacctaagaaaaacacagcccttcttacaacagtcaaatctgatccatatctgacaacaacgttggaagtgttattgtccaacctgaaaacatatcaaggcttttctgtcgtgctggtagacagatccaatctctcaaacctcagtattaattctaatgaatttggacttcatatattctaccacaagctcattccagtctgacagggaagcaaatggcagcaaaccagccaagcatgggagaataaccgacaggacagtataaaatgtgtatcggcaaacccgatatggtaaatcagacgccttcgttctgtcagtcactgaaataggaccataaagcatgcggtataaaagagatggcctgctgttcccaaataaatggatgaagcagagaatctccccgaaaaagagccagacatttccatccccgcctagtgtgtcaacgcagaaccttccgacagaaccacagagaactcccaataacataacattgaacgttattggcatgtttggtccagtcattgcagaacgccttgaagccgctgcacaagctgcagtaacagcagttatccgcttgtacgaataaatataggttccataaccaaaacagacagacataaataccactgcggtaaggagcaaatctataagcctcctgaggagttcagcatgtcttgtgtcctccatttgcgtcctaaatttttcctctctgaaagaagctttctgaaatcccatagaaattttgatcttctctagcatgtgtgagtatgagctgagagctatctgagattgcttcaattgcaatttcctcatgtttagtcctatttcaagttccttgagctcatttgaacgagtctgctcattcagagatctctcaaatacattaagaatgtgcctatcaaattctggactagctttattatgaggtagtttaaccaactgctgatcggtgcccgcatgaagaatgatttgattatccattgaacttaacgatgtactctcctggatatcatgtaccggcctttttgaatcagcaccactcaatttgatttcagcagcagaagtaccatcttcgtgagaaaaccgagagttatcttgctcatagacaggtgtctcattaattaaatgaagtgtcctcaatgtacttccaaatgatttctcaaagtttttcgtgaagttgtcgaatctatcaccatatatctttgaaaggaaatcaggttgtaatcttccttctcagcaaccgctgcgatcgcgcacctgggcaagaaccgccgcgaaggacatcccgagaggcagcgcgaggtcctgcgcgccgtcggcggcgcccctcccatcccctccagtcgcaagcagcggtctccggagcctctgccgccgccgccgcaggcgcacccccttctgcagccgggacgcggagccgtacgacgacgccgacgaggacgccccgccggactccggcgagccaccgccgtcgcagcaggccccgtccataataagggagcgtggcggcgaggcagaggcggtagggtttagttgccgcgccgcaatttcttcgcctcgaccggtgcgcgacccgctctccggtgggcttctcat

SEQ ID NO: 44056 - DNA, 1014 bp, Oryza sativa
  Clone ID: PAT_MRT4530_47154C.1
cttccgacagaaccacagagaactcccaataacataacattgaacgttattggcatgtttggtccagtcattgcagaacgctggaatatcaaccaagcaatcaagagaatcattaacatgccaaatgacatccttgttgctgctattaaatgacacccttgaagccgctgcacaagctgcagtaacagcagttatccgcttgtacgaataaatataggttccataaccaaaacagacagacataaataccactgcggtaaggagcaaatctataagcctcctgaggagttcagcatgtcttgtgtcctccatttgcgtcctaaatttttcctctctgaaagaagctttctgaaatcccatagaaattttgatcttctctagcatgtgtgagtatgagctgagagctatctgagattgcttcaattgcaatttcctcatgtttagtcctatttcaagttccttgagctcatttgaacgagtctgctcattcagagatctctcaaatacattaagaatgtgcctatcaaattctggactagctttattatgaggtagtttaaccaactgctgatcggtgcccgcatgaagaatgatttgattatccattgaacttaacgatgtactctcctggatatcatgtaccggcctttttgaatcagcaccactcaatttgatttcagcagcagaagtaccatcttcgtgagaaaaccgagagttatcttgctcatagacaggtgtctcattaattaaatgaagtgtcctcaatgtacttccaaatgatttctcaaagtttttcgtgaagttgtcgaatctatcaccatatatatttgtcaaggactctttcactgctgacgtgcacatctttgaaaggaaatcaggttgtaatcttccttcagagcaactgcttctattaaggacctgggcaagaaccgccgcgaaggacatcccgagaggcagcgcgaggtcctgcgcgccgtcggcggcgcccctcccatcccctccagtcgcaagcag

SEQ ID NO: 44057 - DNA, 222 bp, Oryza sativa
  Clone ID: PAT_MRT4530_47155C.1
atgcaggatcggcgggcacttgggaaggtgattgccaagctcgagcttgcagtaatggtggcaatgcgggatcgatggaacaggtgccccaggtggaggccgttggtaacgatctacgtgcaacttgttggcgtgaagagggaggagtgggcgaaggggtgggtggggtcccggttttttatctgggactatgaatccgggactaaagatcgttatatttag

SEQ ID NO: 44058 - DNA, 471 bp, Oryza sativa
  Clone ID: PAT_MRT4530_47156C.1
atgaagcaccggcgaggcccaagagccctaactacagacagactggaccaccaacgcggacgaacaaatctcctcaaccaccaaaacactccacgcccgggtctggaagcagacggccaagagaagggaggagcatcaaggaggggagggggcctggccgacctgaaggggaattgtgagctgaaggcaagggcattgaagacatcggtgtcttccatgtttccggtgagggtctccgggcttcgcggggcaaaccctataacttacaactgcggcaaccccctccaacttcaccaccagcgcagagagaggagcactagggcgagcagcagagcaactgagaagaaggaaggaatggggggatgggatggtgggggggagcgcgtcggcctcccccttctgcttgagtcgagagacgacagagagaggggagaaaggggaaagaaggagagaaatgggtgttgctggtga

SEQ ID NO: 44059 - DNA, 138 bp, Oryza sativa
  Clone ID: PAT_MRT4530_47157C.1
gtatggtcccaaatatttggtttcctccaagtccaatccatatgagctcttgcgagagattgtgctcaagaaaactaagttaggcaacttggggccaatatccatcggcaaaaagcctgatagcatgttcaggccgat

SEQ ID NO: 44060 - DNA, 432 bp, Oryza sativa
  unsure (1)..(432): unsure at all n locations
  Clone ID: PAT_MRT4530_47158C.1
gttgggggggtttttttttttttttttttttttggtttttttttttttttttttttaaaaaaaggccatacaccataaatatggccaccattgtactacacaacaaaatgaatatattccaaaatgttccaattagtgttaactttncataaaagggcaagttgggttcttaaanaatttaaccccaaantncataaatattcacttaactgttncaaatcaaaaacctcaaatccctcaaaaatactaacaaaagctttcccccctaaaggtttccatctttttcacaatctcctnnnctaaaatcttaacaaggagctccacgtcctcgagtaattcaccaaggaatgaaatggtctccggaaaaaaaaccacgtattcctcctttaactgttggaccatgtgcctaacaaccttcaaaccaaacatttt

SEQ ID NO: 44061 - DNA, 920 bp, Oryza sativa
  unsure (1)..(920): unsure at all n locations
  Clone ID: PAT_MRT4530_47159C.1
atgaaggtggttgtgtggagggtggagggctcgatagaggcggtgaggtgctcggtggaggactcgatgaaggtggcggtggcggttggctatacgatggagctactgtcgggggacttgatggaggtggtgatgtggtgggtggaggggtcgacggaggtggtggctggttatatgatggagctaccgtcgggggagtagatgaaggtggttgtgtggagggtggagagctcgatagaggcggtgaggtgctcggtggaggattcgatgaaggtggcggtggcggttggctatacgatggagctactgtcgggggacttgttggaggtggtgatctggtgggtggagggctcgatggaggtggtggctggttgtatgatggagctaccgtcgggggacttgtcgaaggtggtggtgtggtgggtggagggctcnatggaggtggtaaggtgctcggtggaggactcgatgaaggtggtgatgtggtgggtggagggctcaacggtggtggtgaggagctaggtggtgggctagatgaaggtggcggcggcgactggttgtatgatggaggtactgttggcgggctatatggaggtggtgaggctgtagatggagtgcttgatggaggtggtgacgtgatgggtggagggcttgatggaggtggtggcggcgactggttgtatgatggagcaactgttgggggactagatggaggtggtgaggttgttggtggagagctcgatgacggtgatggtggtggctggttgtatgatggggcctccgttggcggactaggcaacggtggcgacggaggtggactgttatcttggtacggtggagatgcattaggtggactagactccgatggtgatggcggtggcgacatggttggaggagacgatgatggtggcggctcgtaa

SEQ ID NO: 44062 - DNA, 2083 bp, Oryza sativa
  Clone ID: PAT_MRT4530_4715C.1
ccgcgctccaacctccttcccactcctcaacctcgcctcgccatctccgcgccgcggcccagatccctccggcgagcgccgccgctgccacccactcggccatggaccgcctccgcgcggggagccccgtctacgggcggcagcggagcggcagcagcacgggctcctcctccccgggcggcgtctccccgtcccaccaccgctcctcctccacctcctccgccgcctccgccgccgcggggctgggcggcggcgtctccaacgtgcgccgcacgcagaacgtcgcggcgcgggcggccgccgcgaggctggcccaggtcatggcgtcacagagcgccgcggccgccgcgggccgcgacgacgacgacgacgacgacgactacgccaatgaccacccgcccgcccctccccccgcgaggttcggctccgcgcgccccgccgcggcgcacggcagcaacggcgtctcgttgctcggccgcaccgcgagatctccctcccctgcgttaggtaggaacattgtagagccacctcctactgtccgctcaacatcagctgggaggcctgccgttgcttcacggccgaccaccacggtggttccaccgatcaaaaccagcacgacattgcggacaccatcgcctattccacctgtggctgtggagcctccagtggaccgcagtcggcagaaaagcttgaatttctttttcccattttttcaaatgttcctaaaaataggcatcaggtttgatacagggcatctcaactccagagaatcaacaccaaaaagggaggcgtctgcacttcaagatgagcttgatatactacaagaggagaatgagagtgttctagaaaagctacgacttgctgaagaaagatgtgaagaagcagaagctagagccaaggagcttgagaaacaggtagctgcccttggggaaggggtatcattagaagctcgcctcttgagcaggaaagaagctgcccttaaacagagggaggctgcactgaaggctgcaagggaatcaaaagatggtaaagatggggaagtgacaacactaaagcatgaactggattgtgccaaagaagaggttgtaacagctatggagcagctaaaggaagcagagactgaaacaaaggccctccggtccatgactcagagaatgatcttaacccaagaggaaatggaagaggtggtccttaaaaggtgctggctttcacgttgctggtcaaaaggctaaggaggaacctcaaacacggtgaggatgacgcccaaaggagaaataaacttgtgcgagatatgagtgatgtaatgggagaaggcaatatagagagcatgctctcagttgaaatggggcttagagagctttcatcattgaaggtggaagatgctgttgtggttgcacttggtcaacaccggagacctagtatagttcggcaattcacatcagatcttagccatgaagaggcagaagatgttagctttaagcaggcatggcttatatacttctggagaagagctaaaactcatggcattgaggaagacattgctgaagaacggcttcagttctggattggtcgcaatgcagtagccccaacttctcatgatgctatagatgtggagcgaggtctaacagagctcaggaaactgggcatagagcagcaactgtgggaaggatcacgtgcagatatcgatgaagattcatcggcaattgagaatcactaggcacatctcaaggttgtttatggtacatgattattccaattttggagaatggaaatgctttttcgcggctggtcttgggccattgccatcattggatccctgaatggtgctgcaatcttcgggtgttgagcaatgggcagtcttcgggtgttgagcgatattatgggcttgtccagagatattgtgtagtgcatgtgcgagccatttatcttttgtcgaaatatttttgtgaaatgtgtaattgttttgtcctggcaatatgatggtgatctcacttcatccaatttgtgaatttgtgattacaccacatgtgtactgcctgttattcagtaaaacatacaccgaggaagctatgcttcctgcgac

SEQ ID NO: 44063 - DNA, 1136 bp, Oryza sativa
  unsure (1)..(1136): unsure at all n locations
  Clone ID: PAT_MRT4530_47160C.1
gcacacatctacctctctttgcattggttaatcagagattcaggagagagcatgtgatccaaccccaccgtcaccttcaccgtcgaatgattcgccggcacctccctcttacgagccgccaccatcatcgtctcctccaaccatgtcgccaccgccatcaccatcggagtctagtccacctaatgcatctccaccgtaccaagataacagtccacctccgtcgccaccgttgcctagtccgccaacggaggccccatcatacaaccagccaccaccatcaccgtcatcgagctctccaccaacaacctcaccacctccatctagtcccccaacagttgctccatcatacaaccagtcgccgccaccacctccatcaagccctccacccatcacgtcaccacctccatcaagcactccatctacagcctcaccacctccatatagcccgccaacagtacctccatcatacaaccagtcgccgccgccaccttcatctagcccaccacctagctcctcaccaccaccgttgagccctccacccaccacatcaccacctccatcaagtcccccaacagtcgctccatcatcagccgttcagccaccaccgtcaccttcatcgagtcctccaccgagcaccttaccacctccatngagccctccacccaccacaccaccaccttcgacaagtcccccgacggtagctccatcatacaaccagccaccacctccatcgagccctccacccaccagatcaccacctccaacaagtcccccgacagtagctccatcgtatagccaaccgccaccgccaccttcatcgaatcctccaccgagcacctcaccgcctctatcgagctctccaccctccacacaaccaccttcatctactcccccgacggtagctccatcatataaccagccaccacctccgtcgacccctccacccaccacatcaccacctccatcaagtcccccgacagtagctccatcgtatagccaaccgccaccgccaccttcatcgagtcctccaccgagcacctcaccgcctctatcgagccctccaccctccacacaaccaccttcatctagtcccccgacggtagctccatcatataaccagccggggatcctctaga

SEQ ID NO: 44064 - DNA, 330 bp, Oryza sativa
  Clone ID: PAT_MRT4530_47161C.1
atgacgttggcgatgacgtcatcaccggtgacggctcggcctcgcgtgctcgccagcgaacaacggcgcggcggcccaaacggaggacacctacacgtagcggacagcacggcgaactcattggtgaccaaaacgacggcggaagatcaacggacgacgacggcgacgaggaagagcggcggcaacggtcggatcaacagcggcgacggtgctccggcggctgacagggacggcgaaagggcggatgaggacggcgacgcgacggcgaccacggctatgacatccccgagcgacgacgacgactggagcgacggcagcgcacggaattga

SEQ ID NO: 44065 - DNA, 468 bp, Oryza sativa
  Clone ID: PAT_MRT4530_47162C.1
gtttcatctctcaatctctctctctctctctctctcaaacacacataatattcccctttctctctctaggcattattcctctgatttcttttactgcctcttctctctctaaccttattcccccctacctggacactgtaatgctctctctctctctctaaccttatagtagtagcatcaagctttctctctctctctagaggcctttcctttctcatctctctagttctctagaacacacacacacacaaacccccatacaaaaatgatatgctactcatgacctaatcacccaattcccactacctctcttctcctctccttcttctcctcctccttttcttggaaccaaacaacaacaacaaacttactctcccacacttagctagctcacacaccaccattgttggctagctagctaagcttttaatttgttgaagcaatgagcacaactactgctactactac

SEQ ID NO: 44066 - DNA, 309 bp, Oryza sativa
  Clone ID: PAT_MRT4530_47163C.1
atgggagaggagggggcggcggcggcgacgcgcgcgtcgtgcagccgccgcgcggccgcgtcctgctggggacggttcggcctcggcctggcggcgctgtggcggaggcttaggtggatcggccttcctcgccggcgcttgcggacgtacgtcctcagcgccagcgggctcaactacgacccgctcggttactcccagaacttcgacaacgggggcctcggcgacggcgagtgcgaggccaacttctcggtcaggttcgcgcggcacgctggcgcgacgaggccgcacgcgccgtcggtcgcttcttga

SEQ ID NO: 44067 - DNA, 1080 bp, Oryza sativa
  Clone ID: PAT_MRT4530_47164C.1
atgtcccctgccgcctgccgcggcaacccgtcgcggtccgcctccgcctcggccgtcgtggtcgacacggccaccgggtaccacctcctcaagatcgaaggctactcgctcaccaagggcatccccaccagcttgagcctcaaatccagccagttcaccgtcggcggctaccgctggcgcatcgattacttctccaacggagactgcgcggactccgccgattacatatcgctttttctctcgctggacgaaagggccaacaaggatgtgaaggtgcgggcgagctggagattccagatcggttacactggcaatgtggataagccgccttcgttgtcaacggcgaaagcatgtactacttttggtgttggacctgatggttcttggtcttggggttatgacaggtttattagaagggaagattttgagaagtccgacaatctcagggatgactctttcaccatccggtgcgacattgccgtcgtccgccgattccgcgccgaggagacgaccgagatactccctgtcgaagcctttgtgtccgtgcccccatccgacatgaaccagcagttcggcgacctgctggagaccgagaagggcgctgacgtggtgttcgagtcgccggtcttcagagcggagctctacagctcgatgaaggagggtgacactgctggagtcgtgcgcatcgaagacatggaggcgcaggtgttcaagctgctgctccgctttgtgtacaccgactcgttgccggagatggggaatgatgatgaagacgtcatgtgccagcatctgctcgtcgcggcggaccggtacaacctggagaggctcaagttgatctacgaggagaagttgtgcagctacattagcgtcgacgctgtatcgaacatcctggcgctggctgatcagcaccactgcgacgggctgaagaaagcatgctttcattttctggcctcaccgggaaacctgaatgctgtcatcaccagtgatggcctcaagcatctgagcaggagcttcccctcacttatggaagagctggttgccatgctggcgcctctgctgagtcatgctttagtgatttag

SEQ ID NO: 44068 - DNA, 262 bp, Oryza sativa
  Clone ID: PAT_MRT4530_47165C.1
ttaggaggaaattgtcacaggaatcattagaggcacttggggatgggaacccgaaatatggcactaaggtgctcctcgtggacgggctgctacaagccctactgccggcataggcggaaggagggaaaggagcggatcgcgctgaagaagcgcccgatcgacgagaacagacgcgtagccgcgcgactctccggcgaggaaggggcgcgccggctgggccttcgcggcgccaactcccttggcggcggcggtggtgagggcg

SEQ ID NO: 44069 - DNA, 239 bp, Oryza sativa
  Clone ID: PAT_MRT4530_47166C.1
ggggagggggaaaatatacgcggccgaaaaaaagacctttgacatacaaatataaacaaaaaggccgcctaattttgtacttgattgaccgcccctcaacaatgcctcaaaataactaaaagaggcgggccctactattttcgcctgaaatgtgctgtgtcaacattgggcaacagatatctctgcctaatcaaaagcgcgtggggccaaaccgtgtcttgcaacagggaagatctttt

SEQ ID NO: 44070 - DNA, 309 bp, Oryza sativa
  Clone ID: PAT_MRT4530_47167C.1
atgacgacggcgacgcggcacggcggcgtggggcgtgacggcgacgggacagcgacggtggcgacgttgggacggcgcgcggcgcgacagcgcacggaggtgacaagacggcgcggcagcggcgctggcgacggcgatggtgacacgagcggcgcggggctcagcgcggcgtacgcggggctcgaggcgacgcgcggcgacgcggcggcgcgggcaggactcgaggcggtgatggtgacggcggcacgacggcgtgcggcggcgttcggtgcaaggcagcggcgcggcagtggggaggaagagggctag

SEQ ID NO: 44071 - DNA, 680 bp, Oryza sativa
  Clone ID: PAT_MRT4530_47168C.1
atgagcactgtcagcgaggcgttcctagctcgatcggccctcccggaaagccaccccgacacggttcgggtgcgccgggtggccgccaacatcgtttcgacgacgctggaggatgcggtgttcgggcagcggaggctgtcggagaggatcgggcaccgcttcgtccccggcatcaactggagggtgcacgtcatcaacgacgacaagagccttacgggttgtttggagagcggggagatcttggtcttcactgggttcctcaacgcgtactgcggcggcgggcgggatgcggaggccgcggcggcgcgggatgcggaggcggaggtggctgcgcgcgggactgggaggcggtgccggctgcgcacgggactcggaggcggcggcggctgcgcgcgggactcggaggcggcggcggcgacggctgcgcgcaggacgcatcggcgacggcggctacgcgcgggacgtggaggcggcaacgactgcgcgcgggactcagaggcggggacgcggaggcggcggctgctgctcccgggatgcggatgcccagttattcatcgagcgcgtcctgtccgtgagcggcaccacataaaaattcctcttcccacaacacctaccacaataaggatgaggaggaactggatcctagggctgtcggccgtggcggggattgcgtcgtgcgg

SEQ ID NO: 44072 - DNA, 1404 bp, Oryza sativa
  Clone ID: PAT_MRT4530_47169C.1
atggcgatgtccgccgccgccgcctccgcctctgcctcctccttccccaactgggtgatgctggagcgattcgtcttccgcagggacgacgacaccagggctacagtactgagggcatccggttccggatcccacgggacccccttcaccatcgccttccgcatcgccgaccctccggcgatctcccgcctgtacgtgcggtggccgcagggcccggacccggaggagatggtggcgtgccccctcgtcgccacccaccgcaacctcgtcctcgtctgcttctgctacatcgtcgagtccccctccggcccggcttgcccgcaggactacttcatcttcaccgcgtccggctccggcgacggcgacgtcgaccaccacccagttccctcgccgctactcaaggccctccccccatgtacctaccatgatgagggcgacggcaacgacctatccatgcggtatccgttggagttccggtccgtcggcatcctgtgccgaggcgaagagttcgccgtcgccgagctgcaggtcctcagaaccgccagtggcagagtcaaagccaggctgtgcgtgctccgctcggccatatcctcctccaaagacgaagatgaagcagaagatggagatcatggaggcggcggccggcggccgtgggatatcatggagctgccgatcgtgtacgacggcgacgaggagcgctgcgacatcttctactggaccaccgacgccgtgatcgccttccaagaccacctctgctgggtggactacgaccgaggcatgctcctctgcgacgtgctgcggacaagccctagagtcgccttcctccggtttcctctggacagctcgatcatccctaccggcagacgatctcgccgcaatttctcccaggtgtaccgcggcgtgtccgtcaccaccgccgccaccggcggcgccgccctcaagttcgccgacgtcagccggcacgacggcaagctcctgggctccctagaacaaggacgaggaggctacaccatcacctgccacactctgaggtcgacgttaggggcggccgccattgatgacgagtggagctggagcaaagacttcgcgatcgcgtccgacgagattcttcggtccttcgagggcgcccccgagctcgagcctcgtgaggttctcctgttccctaccgtgagcatggacacgccgagcgtcatgcacttcctcacctgcgactacgaccgcatgatcaggaagatgtcggtggtgaccattgacatagccagcaagatagtgttgtcggttgttccatatgttaacggggaggaggacctttccggtgaggatgccgacatggtcagggcgaagtcgggctatccccagtccttcctcccctcagagttttccaagtacttcaattcaatctaa

SEQ ID NO: 44073 - DNA, 259 bp, Oryza sativa
  Clone ID: PAT_MRT4530_4716C.1
aaatgcaacacttcacacccattataacagaagccatactctatggagtgaaagatccaccagattcataatacacccacactcataactacacatcatctaaattataacaacacaatccttacatattcaacattaaacatccagaacacacattataacacaaatccttaaacaatcaaccaactccgcacacctaatttcattttgaaaaccatatcctaccttcaccatccaatataaactacctccaccagta

SEQ ID NO: 44074 - DNA, 531 bp, Oryza sativa
  Clone ID: PAT_MRT4530_47170C.1
atggaccggccggaaagtcaggcctacggcggcgtagctgtggcactgctagtagttactgctagtgcatgcactgacctagcgcctgggcgagtggccgtggtcggctcccgccgggtgactgctggtgcgtgccccgctcccgcttgcatgtattctcgcgcgatgccgctgctgctgctgcagtacgtttgcgggtgcctttacggtttttctacgtacctggctgcccatggtggcctggccgggaagtggccactccgacccatggccatggccatggctgtttgctgcatgcatcccctcctgcgcgcgctgctgcgtgctgtgctgcagcggccttccatgctgcttgttgctttcgtcggccggccggtctgctacctgcatgaagtgctatctcactgcttgaacaataatgcacgcctgtctgcagtgcctcctcctcctgcttcagctgctgctgctgggcgagcgtacaccacagccacatccacatgcaggcatgcgcttgcctccccacttgattga

SEQ ID NO: 44075 - DNA, 177 bp, Oryza sativa
  Clone ID: PAT_MRT4530_47171C.1
atggaggcggcgacgcgcgcgcgcgcgaggtgttcgtcggaatgccgcaactgcgacggggactcgaagggtttggtggtggaaaaggcggcgcgggtgaaagctgagggctttggtgaaatgttggtcacggccagaaattcatataactctacccattttgttgagaaggaatga

SEQ ID NO: 44076 - DNA, 343 bp, Oryza sativa
  Clone ID: PAT_MRT4530_47172C.1
tttgtgtttttttttttttttttttttttttttttttttttttttttttttttttttttttttttgttttttttttttttttttaaacgggggtccccacactttactaggggccctggggcaggggggccgggggacgggggccgcgcccgcaaggggggggggcaaggcccaggagggtggggggccccagacatcggggagaggatggaaacacagaggggggaactacggccagctcaccacaacaaaagcagcaggaattccttgtgaaactctcgagaaagaaaaacacgacgagctaaaacacaaaaggttccaagaagccagggcccccaccgcg

SEQ ID NO: 44077 - DNA, 749 bp, Oryza sativa
  unsure (1)..(749): unsure at all n locations
  Clone ID: PAT_MRT4530_47173C.1
agaggacgcgaggccagagcgccgggaagggagacccgaaagcaaacccgaaacgcgagcccagngaagagagaccgaaccccagcccaagccacgaaccggcccgcgacccccacgcgggacgcaaagcggaaccgaaaacagaagcgggccgaggcacgaccggagagccagaaacgcaacgaaagcgaggncaaacgccgacagaaacggcgancggcaaagcgaaacaaaggggaagcgagaaaaaccggaaaaagggaagagaaangagaaagggagagggaggagganngggagagagaagggaaagaaaaagggggaggngagggaaaagggaaaaaacgagaaaagaggggaggcggagaaganaaaaaaaaaaaaaaaagggggaggaggagaaggaggggagaaggaagagggaggaaagagaaggagacgnngagaaaggaaggaaggggaaaaagagggagaggagggagaaagggaagggagaaagggaaggagaggggaggaggggggaggaaagaggaaaggaaaagaagggganagaaaaacaggagggggaggaaaaggagggagagagagggagagagaagggctcgccggccaccccggggtcgatgggccgagagggattcggcccatcgaccccggggaggcaaaatagacttttgcggaggaaattgatttggaaggatttggattcggaaatgaactcgacgatagatcggggattgagatcttga

SEQ ID NO: 44078 - DNA, 1622 bp, Oryza sativa
  Clone ID: PAT_MRT4530_47174C.1
cttgcagttgagcgccccgattcctcccccttcgcctcgccaaaaaaaaacccagctcccccgatctccccaccaccaccacccagatctcgaaaccctcgccgtcgccgccctcctcctcctccaccgtcgcggcggccatggcgaaggagttccccgtgccgccggtggtcttcactccctccacccctacccaccgccgccatcctcccccagggaccggcccctccccgccgccggccttcgcgcctccccgcccctccacctcatccggcgcgaaccctctccccttcatgtccttcgacgtcggcaacgcggccacctcctcctcgccgccgctgttcgccgggccgatcggcgtcggcggctccggggcctccttcgaggacgagccgccgctcctcgaggagctcggcatcaacacgcgccagatctggcggaagacgctctccatcctccacccgctccgctccgccgatccctccctccacgccgacgccgacctctcgggcccgttcctcttcctcctctccttcggcctcttccagctgctcgccggcaagttccacttcgggatcgtcctcgggtgggtcaccgtcgcttccttcttcctctacttcgtcttctccatgctctcgggcggacgccgcggcgatctcgacctctacagatgcgtcagtctcgtcggatactgcatgctccccatggtcatcttctccgcgatctccctcttcctgcctcggggtggcggcctcatatttggggtgggcatggggttcgtgctgtggtccaccagggtgtgcaccaggttgctcgctgagcttgcatcaagcggtgacgagcatagggggctcatcgcctacgcgtgctggcttgtctacatgctcttctcgctgctcgtcgtcttctgatgccctttttatgatcatgttcaggattcttttgccgtatgaagtggagagctgccaatctaccagtcgctggagtggtcttggtgtgttttgctggacaacagattatcacgccagttgggagattttgtgtaatgatctgttcctttttcaccccgtagttcctgtggcatggtagttttagagggatcgtacagatcttggtaaagaaaagaaaggcaagatcaagacaccgaaaatatgaagtaattaggttttgctgaatattgatggaatctggcgactttcaaactaattcgtggtctgtacgaacttgttcattgtatttacttaccacgattagttgttttagggtcatttctgcctactttgtttttacccccatcttttcttcgtttcagtttgataagagaggattgttttatcattacgacatgtgttacttgctgactcaaattggatgagtcacttagggccccctctttctcttgctataggctctctacaagagctccagggcgggcccggtacccaattccccctgtcgtgtgccctctctctctcccccggcccgcgttcctccacgtcctgactgggaaaaccctgcgttacccaacttaatccccttgcagcacatccccctttccccactggcgtaataccaaaaaggccccccaccgattcccccttcccaacattttgccccaccct

SEQ ID NO: 44079 - DNA, 1317 bp, Oryza sativa
  Clone ID: PAT_MRT4530_47175C.1
atggcggtgttcttgctcgtcttgctggcagcgcttgtttccgtggatgtcgccgcggcgcattccggtggcggcttcggcttcaaggcgacgcttacccacgtcgacgcgaacgccgggtacacgaaggcgcagctgctgtcccgcgccgtcgcgcggagcagagcccgcgtggcggcgctgcagtcgctggcgacggcggcggacgcgatcaccgcggcacgcatcctgctgcggttcagcgagggggagtacctgatggacgtgggcatcggctcgccgccgcggtacttctcggccatgatcgacaccggcagcgacctcatctggacgcagtgcgcgccgtgcctgctctgcgtggagcagccgacgccctacttcgagccggcgaagtcgacgtcgtacgcgtcgctgccgtgctcgtccgcgatgtgcaacgcgctctactccccgctctgcttccagaacgcgtgcgtctaccaggcgttctacggcgacagcgcgtcgtccgcgggcgtcctcgccaacgagacgttcacgttcggcaccaactcaacgcgtgtcgccgtgccgagggtctcgttcggctgcggcaacatgaacgccggcacgctcttcaacggctccggcatggtcggctttggccggggcgcgctgtcgctggtgagccagctcgggtcgcccaggttctcctactgcctcacctccttcatgtcgccggcgacgagccggctctacttcggcgcgtacgccacgctcaacagcaccaacacgagcagcagcgggccggtgcagtccacgccgttcatcgtcaacccagcgctgccgaccatgtacttcctgaacatgaccggcatcagcgtcgccggcgacctgctgccgatcgacccgtcggtgttcgccatcaacgagaccgacggcacgggcggggtcatcatcgactccggcacgaccgtcacgttcctggcgcagccggcgtacgcgatggtgcagggggcgttcgtggcgtgggtcgggctgcccagggcgaacgccacgccgtcggacaccttcgacacgtgcttcaagtggccgccgccgccgcgccggatggtgacgctgccggagatggtgctccacttcgacggggcggacatggagctgccgctggagaactacatggtgatggacggcggcaccggcaacctgtgcctggcgatgctgccgtcggacgacggctccatcatcgggagcttccagcaccagaacttccacatgctctacgacctcgagaacagcctcctctccttcgtccctgcgccgtgcaacctcagctag

SEQ ID NO: 44080 - DNA, 1668 bp, Oryza sativa
  Clone ID: PAT_MRT4530_47176C.1
tcatctcttgcgcttggttgaatcgcatccctcaaccgcaaaaccgggtgtaatatatcccccaactcccaaaaccgttgcaaatcgacttcccgggcggtttcggaggcggtttttgtcccacgtggcatctttgaccccgttgaatggctgagtcatcaggtgggacccacatgtcagccagccggctgctggtgctgcgtggcgacagggtggccttttcctcctcgtcatcgtcgttctcgcccgacgccgaactcgagctggcggcggcgggctggcggccacgttccgcatcccgccgcagctagagtgcacgcaacaggctgggagggggctagcggcggcgttctgatggcggtcctcttcgtcgctgtcctttcccgcctccccaatcaacgccacctggtccgcacggtggcgagcaacgatgacggcaggaaccccatgggtgtcaacacgaggtcctcgatggtctagcgatcgtcgtggaggcagtgtgcggaggcgatgatgtacgtgccggagatggagaactgtgccaccttgacgctgagcggcctggcgacgtcgacggtccacgctgtgccaccttgacgcccagcggcctggcgacgtcgacggtccacggcgtggggaagtcgaagatcgcaacatccaggaggatcctttcccttctcccctctctctcctaggatgcgggcggcaggcagtgagcatcggctgccggcgggagaaggcggcaccgatggcgacaccaccaccacctcgcggcgagcgggacggcatcggctgtcggcgggaaaaggcggcaccggcggcgacaccaccaccacctcgcggcgagcgggacggcatcggctgtcggcgggagaaggcggcaccggcggcgacaccaccaccacctcgcggcgagcgggacggcatcggctgccggcgggagaaggcggcaccgccaccacctcgcggcgaacaagacggcggcggcgttcggagagtacaagatctcccgggtccagccgaccgcgaccaccctatgcgctcctcccaccgcccggccaaccgtggccacccggcaagctcctccccggtgcccagccggccgaggcatcccagcgagctccatccgcgcgtccaggcggccgcggcctcccggcgagctccatccgcgcgtccgagcggccgcgacctccctgcgagctcctcccccgcgctcggctggccgcgactacccagcaagctcttcccccgcgtccagccggccgcaacctcccggcgagcttctcccctacggccagccggccgcggcctcccggcgagctcctcccccaccgccgccgctcgagccaatggaaggcggctgtctagccaatcattgagcctaaaacatcctgtgagtggtttctccaatctgtcgttgaattctgtatctcgagagatcctttgctcatggcagtctgaagacttgtttcctaactccatgagatccaagaggcaggacttttccttaaagtatctcttaatgatttctgtgggcatgacacttgagctgatatggagtacaccatcacttatagcagacaaatcacaaaccaacctcccttgcttctgcactgacgcatcactgcctctgctgttgattgagggctccacgcggcactcgaccat

SEQ ID NO: 44081 - DNA, 438 bp, Oryza sativa
  unsure (1)..(438): unsure at all n locations
  Clone ID: PAT_MRT4530_47177C.1
ggcgtgtttttccgtgaagcggccagagagagagcgggaggcgtgcgtccagtatcccagattaccgattacgttggagaatgggggggactacgagacgcgagcgccaggagcgcagaccgcgctggacaaggtccggacgggcgttctacccgccgtcttgtcctcaacaaagagagccatacctaggtcactgctgcggagtctcaaccggtcgcaacgcacgccaactaccccaacaactgccacgacgccctctgcttccagtgcaagaacaacccggacgacgactgcntcggggcacctacgcgatggaggagcgcgccacatcctgtgagtaactatacgcacccagagccttgcgaaaatctgtgctgccgccgcgagggcacatcctctggcgtacacgactgtgtgtacacggatgataccatgagc

SEQ ID NO: 44082 - DNA, 315 bp, Oryza sativa
  Clone ID: PAT_MRT4530_47178C.1
atggggatgaagctgttgaactcctcgccatattacgcaccggccaatgggcaggcagaagcatctaacaagagcttgactaaactaatgaagagaaagatcactgattttcccaagcaatggcatgccagattagcagaagcattgtggtactacaggatggcttgccatgggtcaactcaagttcctccctataagctagtttatgggcatgaggcagtcttaccaagggaagttaacattggcttgagaaggattactttacaagatgagttaacggcggatgattatcacaatctgatggtagatgagtga

SEQ ID NO: 44083 - DNA, 529 bp, Oryza sativa
  Clone ID: PAT_MRT4530_47179C.1
gctgcaggaaagatgacatgaagagtgtacaagtgaaatatggttctgttgactgattgttgcttttggttgctagtatctgggtctggggcagccaagtttgtatcctgttgaggtcaggagcatacaaaccaaattgctgttatgattctttggattaccataatcaaacacatggaaggcacaaaaacttgtgtttccttaatcaggcagaattgttatgtcttttttcaagggcattcaacgcttgccaagtcgttaaggctgatggataacatgtgttagtttgcgaactaagacacaaaccaatagcatcagctcttgcagttttacagcatgtcacttttttatattctggctagagagtagagactgtaggttgaaccaattgctgcgtttgatgttgggtatttcgggtacacagtacacgctgcatattttgttatcttctattttgctctttccatcctggtgagtaatttatgcttgaaaattcacttttgcatttgcattagtcaattcctactgt

SEQ ID NO: 44084 - DNA, 4180 bp, Oryza sativa
  Clone ID: PAT_MRT4530_4717C.1
gaagggcaatactgaaatgaatgaaaaaattagcaagtaaatgagtgcaaatgcaccacagttttttgagcttttgattgcatcaaccaaagagattttggcaggaaaaaaaggcattgccagaagttaaggcaagcagggggtgatctcatacaacctatacatccatctgccacagctatagatgagatcacttctgcgaaaacggaagcaaagaaaggtttgagctttattctgactaaaggaacctagtgttgggtgaaactgactgtacatttgaatgtacattgaaccactgaaaatgtgatggtgagcctaagagagatcagtaactcttgagagatggctgccatggtcatggtcatcactggacctgtggcttgacaatcctcacgttgctatagaagcgcttgaagtccttcatcgcctgctcttcaatctggatcgagcgaatcgaggacggagcgtcggcctctggcttgaaccagcggttgggaacattgtccttgatgccaccaacctcaggtgatgtgccctgggaaggtatagcgaagcccgatgtcctggtttttggactgtgggagatgccagtttgccgtttctcctgttgcatctgtatgtccctgagagaaggccgcaatacattaggtgaggtagcagaagacgaccaggatagtgtgctcttatccccttcagaagcaggcacgacacgagcaggtgtgacagttatcggtgtagagcgtgcatcaggtataaacgaagaaagtcgcatgcgcccagcactgtcaggtgagtcctcaaagcggtcttttgccttggccgtgatcggctcgtttgttttcctctgctcgctttgaatatctcgaagggaagcagatccctttgttaccttagcaccaccccaggcaggaccttcatgctttggtgtgacagtcacaacaggggtaggcgggcttggttttggggtgtcatcaagagcaccactcagaaacaacgataagccacctttcctattcttcttctttgacgaagttggctgggaagctttgttttccaatggacaagagatagcctttgtgttaatgaaagtgacatgctctgagggtttgattgaatcagcaacgcttgcttccttttctgcagaaatatggactggtaagacttcctgaagatccttgacatagatttggtccctgtcctcccttttcaccaagggagtatcagaatgtgctgcctgcttgtttttccgcttctgtttcttagaaacactcgatttcttgtttgtcttttcttctgtaacacagactggagttcttaaatctgtgggaatgccgagttctgcaagttcaccctcaagggcagcccttgactcaagctttgctagctgctgattatcaagctgatgaccatccagttgtttagcctcgagcatctcaatctgctgcagtttcttgcgaagtgccctgatctgtttagaggcagcttgtccagcattgctatctttctcaaggaagttcccataacttgatattccatatgacttcgatgcagacttctgactgtccctgagcctaagaaatcctcctgcttcatctccctcttcatcactatcaatgacagcaggataagtagctgtcactgtgggaaggcgacgatgactccatggctctgacgatttttcatccagcaatctctctaagtttgcaagagtttcaggagaagcattcataactgatggagctgccactgtgaaaatgtaatcaagattgcgaatagctatatcctcgcagtgcttcttgagctccttagcttccaaggactcggcaacttcaagaagttgtatagaattctttggctccagaatatgctcaatcgcaactttctcacataagctcttcaggctaggtgctcccttttttattacaccatcgcttccagatataccgctgtcaggctgtacatcattaaacatgatgtcttcatccaattcttccatcccaccattccattctaacatggctttcttgcattggattttaggtttgggtgggtactcaggatggtatatgctagaaagcacaagcatatgtgtttcaccaacacaaactgacgttgctcgcttaacaccatgcactcgagtaaacattgggagatcatccttatgtttctttgcatcccacataaaaacatcaccacctgcggtagccaatgcagtccagtattttccagctgagatgttcacaacattccttccacacatagagaatatctgtcggcatcttaaatcagggtccgatgaaacccagtagaaaatagcaccatctgcggttaaaacagtggtgtgcatcactccagcagccactgagatcacctgaagccgctccatacgatggaacttcaggtttgtatttccacccttcttaagacatctagatattacagcacgacgtggagtcacaagccgatgaccccaagtaaacacctcgccatcagttcctaatgctacagtatgatactttgctgcagacacacatttaaatgcttttcctttcaagtactcgaccattcttggaatgcagttggatgctgaattagaagtgccataacctagctggccctccttattgctaccccaggtgaacacttcaccagtatcagcaacagcagctgagtgcttgttggcagcagcgacagaaataatccttgctttcagggaactaacgcgccgtggtgttggttgggtatccacagaagggtaaccaagctggccctctctatttgatccccacgtaaacaactccccagcctctgtagcaatcacagtatgatgtttcgctgctgccacaacattcactcgtttacggcctaatcctactgttacttggcgaggagtaatcacagcagttgtctggccactatggatatctggatgaccaagacgaccacctcgaccaaatccccatgtgtataattcaccatcagaactaactgctacactgtggaactttgatgcagcaactgttttgatgtatgacccatgcaaggcatctactttgcatggtagtttttgtatgtgggcattgcctgttcccagctgataatttgtcccacttccccaactgaagacttccattgcaactgaatcaggagaatctccattggcctgtgatacagggcctgagagaagatcaacaggtgtacgtcccttggtgtcttccaaagcaagggatgctccaaactgtagaagaacactagcaacacacaggtggccaaaatgaagtgctctgtgcaggctgctccagccagattctccatcccttgcatctggatcagcaccagcatcgaggagcctcctcacaattggtagatgatttctccacgttgcaaggtggagagcacaaagaccaaacacatttctgccatcaatgcttccaccactctttttcaacaaagctaaagcagattctacttcagctattgatccttgcttggaaacaagacacagatccttaagagagtttccaggagaaggtctacgaagacctgcttgctttgatgagcctggtggagatatcgatgcctccatgagacctcaggaaatcacgagtatctgataaaagcaggtaggctactgaactgcttggggcaagtctttcacaacggcaatgctattctgggctgtttcacttctaatggcacagctaaagtttttcctaataagattacaagtctggtgtaattacaattctatctcctcatggagaattggggcatcatctctactatgtaagactgttttgctaacctaaagaaactgccaaaataacctaggacagcatgatgctagagcttcatcttgtaataaattgttcttgttagagttccatgaagctaggatgacaattccatctcaagataagattctatataaagagccatctatataatatagatcaatcttgggattggacccagccaagaagaactctcgtcaagaacacatgctgtcctacgccgtctctccctccctctctctctctgtggcacgtatatgctcgcgggggggaggggatccgggcggggaatatgctccgcgagcgcaagggacgaaccgcctccaagctctccacccgcctctcgttctctctctctctcctctcgctcgctcgcgtgcgtgccc

SEQ ID NO: 44085 - DNA, 540 bp, Oryza sativa
  Clone ID: PAT_MRT4530_47180C.1
atataacctccttgcctcgtgcgctgctgctcctgctcccttgtacgcactgctcgacgccgacattaccatgagctccttcaccagcaccgccgccagatccgccgtaggcttcgcgcgctcatcctaggcaatcaatgtctccccatcatctttcactggattaacgaacagaagtagtgggtttcactctgcagtcaaggacaactggattctgcagtctctccgcggtgccataaaggaacacagtggagaatgatcgcgtacatcgccaacaaatatgttggacttcctgaacgcactgacgctagctgctgcctctagatgcaccgatcttgctgctgattgccctcggatagccgagagattgatataggacttgaagaggatatcaacatcagacgtggatgactcatgcgcgcgactcaattgcgacagtgtaggatgctgctgagctcagcgacgagagagtatctaatgcagagtatactcaatttccttagaatactgtgacaactggcaaagagattagactgctgc

SEQ ID NO: 44086 - DNA, 500 bp, Oryza sativa
  Clone ID: PAT_MRT4530_47181C.1
ctctcctctccccggccggaggtggcagcggctctcggtggcgggtggcggcgggtctcattggcgggcggcggcgggtctcattggcgggcggtggcggctcccggcccctccctccctcccagatttggccggaggggggcagtggtagggtggagtggcggtagggcggccggcggtggctccccttccttcctccctccctcccagatctggccggaggggggaggggggaggccggcggaccggagacggggcactgcgtcgcgtgcgcgtggcgcggagcggccggcagcggctccccttccttcctcctagatctggccggagggggtagggggaggccggtggccggcggcgtggggcggacggcagcggagtgtgtccgtgcgaacatttgtgatgcgtttgatttgattgtgaatcaatatgatgcttctatgttaatctgtgatgcttttgtgcatttgatttggttcgatggtgaatctggatggtga

SEQ ID NO: 44087 - DNA, 474 bp, Oryza sativa
  Clone ID: PAT_MRT4530_47182C.1
cccacgcgtacgctctgtttctttccgtctgaaaatggaagcctgtaaatatcttcagattcagtttgggcatttgacaaatgtttggcaaacctgtgaaaaaaaaaaaaaacaagagatggaagggatacagatgtcaacacccaaaaattacggcttcttagtcttgtacagaagagtacaggcaagcgtgcatggataccaaaatgcactccattgaccaacctggaacaaaaacactgacagtggtttgactattactcaaaggcgaaccccgggtcaagacgtcaacaacaatggaaagacagtgttcaactgctagcttcggcgtagacagctaataaatataccccaatactatttagctgcaaagaaagcaccctgaggaggatgggcacacgctgtgtttcagaccaatactaacagtatgggaagtcccattgcaagaaagaattccatctttcgggctgttcc

SEQ ID NO: 44088 - DNA, 148 bp, Oryza sativa
  Clone ID: PAT_MRT4530_47183C.1
aaacgacacaggggaaacttatggaaacatccgccgaactctccggagggttccgcagcggcggcggaattcaaggacacgtgaggcggaccagtgcctcgacctgccacacgggacgaagcacgatctgagcgaggaggagatccca

SEQ ID NO: 44089 - DNA, 219 bp, Oryza sativa
  unsure (1)..(219): unsure at all n locations
  Clone ID: PAT_MRT4530_47184C.1
gccatgagaaactaataattaccgaacaatttatcggacatgcgtatctagtgaccacacagatagccctacggacttcttggacatagctcaatgacatctacgaggccagcacancaccaactggccgctatggccgaagtcgataacacgatctccgaggcacagccggaacacggctcaactagttcctcccgccgaggcccatgctcagggaca

SEQ ID NO: 44090 - DNA, 287 bp, Oryza sativa
  unsure (1)..(287): unsure at all n locations
  Clone ID: PAT_MRT4530_47185C.1
ntgaacacagcaccaccccttctgctgcatctcccacctccctctganttgtgggcctgaggcgatggcggcgctcgcccgtccaagatgctcggcacccggctcaacttcgccggctcctcccgctacgccaccgcggcaccgaccaccggagcgcagaagatcgtntccctcttcagaaagangccgcccgaagcccaagcccgcgcgtcaactnctcgagcccgcatcgggatnagtcgcaagtgnacggcctacagagatcttcttgcgaggntctggacgta

SEQ ID NO: 44091 - DNA, 810 bp, Oryza sativa
  Clone ID: PAT_MRT4530_47186C.1
atggcggctcgaactgaccgtactgagacgcaaactgaggttgagccagtccccctggctgatattgggcttgtggggaaggaggctgatattgataattcaagttgccccctggctgtccaccaggcgtcacaaacccggccgatgcgctcattgagccttggtgctgaatcggctgaaagatttgctgtcttaacggcgtttgctgaatcggccacggaggctgttgccttggtggcatttgctgaactggttgcacaacttgttgctggattggttgtacaacctgctgaatcgggagtgtctgttgaatcggctgctgctgtattggatcaacagcaggtggagacggcagaaacatggcagcaacctgatcttgcgttagccgattcgcaacctgcccactatgctgtggctgctctctcattaacaactgagggttcaccagctggcctggtgccaatgctgacggagcaggtaagggagtcgatgccggcgccgtcggctgagctgatgttgagcagagccatctggagcttgtttcccgtcttcacctttggaagaactggtcccaggatcatcggcaactacctttactttatacttctaaaccaatgttcccttgtggtcaaccccaacttctggatcttttctttaacagtgcttgggctagtcgaggatggcgacagcggtggcttctcggccatgaggaagaattgcttgctgacttctaatctgtcccaccgggcgtaccaaaagcgtgttgacagaaaacacgaggcctgggagatctgcttaactccagtgtag

SEQ ID NO: 44092 - DNA, 399 bp, Oryza sativa
  Clone ID: PAT_MRT4530_47187C.1
atgcgctcattgagccttggtgctgaatcggctgaacgatttgctatcttaacaacgtttactgaatcggccgcggaggctgttgccttggtggcgtttgctggactggttgcacaacttgttgctggattggttgtacaacctgctaaatcggaagtgtctgttgaaccggctgctgctgtattggatcaacagcaggttgaggcggcagaaacatggcagcaacttgatcttgcgtcggccgattcacaacctgcccactatgctgtggctgctctctcattaacaactgagggttcaccagctggcctagtgccaatgctgacggagcaggtaagggagtcgatgccggcgccgtcggctgagctaatggtgcgatgggggaaactgcctgaatag

SEQ ID NO: 44093 - DNA, 130 bp, Oryza sativa
  Clone ID: PAT_MRT4530_47188C.1
gaatctccatatgccatgggtgtggccctaaaaagacaaaaaagaataaaaataaaacaaagtttaagaatttctcactaataagaactatttaacaatggaatggataaatgtgttaaattgctatagc

SEQ ID NO: 44094 - DNA, 399 bp, Oryza sativa
  Clone ID: PAT_MRT4530_47189C.1
atgcactcattgagcattggtgctgaatcggctgaacgatttgctgtcttaacgacgtctgctgaatcggccacggaggttgttgccttggtggcgtttgctgaactgattgcacaacttgttgctggattggttgtacaacctgctgaatcgggagtgtctgttgaatcagctgctgctgtattggatcaacagcaggttgaggcggcaaaaacgtggcagcaacctgatcttgcgtcagccgatttgcaacctgcccactatgctgtggctgttctctcattaacaaccgagggttcaccagctggcctagtgccaatgctgacggagcatgtaagggagtcgatgccggcgccgtcggctgagctgatggtgcgatggggggaactgcctgaatag

SEQ ID NO: 44095 - DNA, 1533 bp, Oryza sativa
  Clone ID: PAT_MRT4530_4718C.1
atggaggaggcgaagcagctgcacgcgcgcgcgctccgccgcggggtgcgcctgctgcagccgctgctcctccgcgtcctcgccgccggcgaccaccgctacgccgcgcgcctcctcgaatcctacccggcgcctccttcggcgccgctccacaaccgcctcctccatgctctcgcctccctccaccgcccccaccccctcctcctccccttcttctcccgcctccatcgccttcgcctcctcactccgctgtcattcactctcctcttctcctcctcctcctcgtccgcctcctcctccacccccttcttcctctgctcccactccctgcttatcaaattaggccacttcgcatcaagcgatcccttcctctcctccgcgcttgtctcattctacgccaagagcaagctcctggttgaagccaggaaggtgttcgacgaattgacgtgcagggacacggccgtgtacaatgcgcttctttcggcctacgcgaaaggcggcctcgtcgattcggcagagaagctgttcgaggaaatgccagataggaatgtggtttcctggactgcgatggtgtctgggtacgcgcagaacggtcggcatgaggaagcggtggagacgttcttggagatgtgggagagggcaggggtacaaccgaatgaattgacagtgagcagtgtgctgcctgcatgcgcagcagttggggcgatggagcttgggaggaaggtggaggagtatgcgaggggaaaaggcctcctgaggaatgtgtacgtggctaatgcactactggagatgtattccaagtgtggcagcattcgacaagcttggcaggtgtttcagggtatcggtcgtcagcaggatctctgttcttggaactctatgatcatggcatttgctgtgcatggcctgtggagggaggcccttgccttgttctataagttgcggatggcaggggtcaaaccagatggtattacttttgttggggtcatcttggcttgtacccatggaggtttggtgaatgaaggcaagctattctttgactcgatggaagcagagtttagtctgaaaccgagaattgagcactatggctgcatggttgaccttctcgggcgtgctggtctcctgattgaatcatacagtctgattgcgagcatgccagtggagcctgacgctgtcatctggggggccttgcttggtgcttgcagcttccatggcaatgtagaactagcagaattagcaatggacaagctcatccaccttgagccacaaaacacggcaaacctagtgatcctttcaaacatatatgcgtcatctggcaaatgggatggtgttgcccaagtatggaagttactaaaggagaaagaccacaagaaatcagctgggtacagcttcattgagttagatggtacgatgcataagttccttgttgaggataagtcacatccaagatttgaggaagtatacaatacccttaatagtgtcacaatgaccatgaagctggttggcttggaaaacctggaagaattgaaaggctag

SEQ ID NO: 44096 - DNA, 450 bp, Oryza sativa
  Clone ID: PAT_MRT4530_47190C.1
tctctctccactccactcgctctccgttcaccactccaaacgcgtagcgctagcgccgcccgccgcacgatgagcgcggtgcccgtcgtgtcctccgcgctggccggaccagcggtcgcggtcgcggtcgccaggcccgcttccgggtccgtcactcgcctccgtgcgccggcgccccacggcgtgccggccggctccgtgcccctcgcgtccggacttgccaactgctaccgccggtccgccgccgccgcccggaggcttccgatcccgtctgcagcggggggcggcacagttggggatgcttttgttatagaagacacaacaaatgtgaaatttcctcgagagatagctgttccgggctacaccgagcctttggttattcttggaacaggtacattttcttgtccgtttccctacgggattaaatcggcttgactatgctacttcgca

SEQ ID NO: 44097 - DNA, 477 bp, Oryza sativa
  Clone ID: PAT_MRT4530_47191C.1
atgctcgggaacaacttgaggcattactgtgccatccggctgtacatggctgtccaccaggtgccacaaacccggccgatgcgctcattgagccttgatgctgaatcggctgaacgatttgctgtcttaacggcgtttgctgaatcggccgcggaggctgttgccttggtggcgtttgctggactggttgcacaacttgttgctggattggttgtacaacctgctgaatcgggagtgtctgttgaatcggctgctgctgtattggatcaacagcaggttgaggcggcagaaacatggcagcaacctgatcttgcgtcggccgattcacaacctacccactatgctgtggctgctctctcattaacaactgagggttcaccagctggcctggtgccaatgctgacggagcaggtaagggagtcaatgccggcgccatcggctgagctgatggtgcgacggggggaactgcctgaatag

SEQ ID NO: 44098 - DNA, 491 bp, Oryza sativa
  unsure (1)..(491): unsure at all n locations
  Clone ID: PAT_MRT4530_47192C.1
gctcggacggcgaagagcctggaccccatgtgcagaatggctgctggtggcctgcacaatgtgcctagcccgagccggatggaattatctgaccataataggatggttggaccctngtgcaacaccggaggcgtggtctgtctggganactntgtcgagaatgaaaganatgganctgcgtgctgctgtgcagtttgttgtgaggtggttgtgcccatgatgctgtgagaaattgaatgcaggaaggccgtggattgagatgcgtgtgctgtgacatattttagtgaattgatcatgtgccatatgttaattnatttgatgcatgttggaaattgattggttnctgctacccaccgtgttgaggactggtgaataatgcatgttgctgattttgcgaaggccatgtatatactcttgtattactagtgcgtgtgtgnaaaaacnccccntagatttttttttttttttttgaaaaaaaaaaaaaaaaaaaa

SEQ ID NO: 44099 - DNA, 245 bp, Oryza sativa
  Clone ID: PAT_MRT4530_47193C.1
ccccccgcccacgacgaccactacctttagcatcatgttttttttattgacacactccctctcctcggcgcaaggtcggttttatgagatctgacatcaacatttcaaacatcttgattactgacagccatatgttctcacactaaatgtttctcatacctctaccatcaagacccatgccatcctctgtaacgctcaatttttctgatcataaaatgaacagatcgtaatctccatacattcat

SEQ ID NO: 44100 - DNA, 230 bp, Oryza sativa
  Clone ID: PAT_MRT4530_47194C.1
atggggaaacaagagagggagctcgagggagggtttttatgggcgagggaggggaggacgtggccgggagggtggccgaagccgccggcgacgcaccaagccttcatcggatccacctcaccgtcgctcctcctcgcccccgagccgccgccacctattctcctagtcgccgagcagtcgccagccctcccccgttgccaccgtgggaggaatctcccctttaggctccg

SEQ ID NO: 44101 - DNA, 318 bp, Oryza sativa
  Clone ID: PAT_MRT4530_47195C.1
gggcatgttaatcaaggaaccaacggacttaattagcatgcaaaaatcaatggtgagtgcctagcttgaaaaacatgggagaggccagtttttcttctgaactagcaattgtggagaaaaaaaaatgaaccattgtcatggcatgcaaataatggattgccatgcttgataaaaaaaaattttttttttgttcgcacttgatcaaacttttgagcttaatgaacaaaaagaacaattttttcgcatgcagctgcgtgcgtttccctccttttgatcctcccaggcattattacctcgtttttacccataagcacaagt

SEQ ID NO: 44102 - DNA, 255 bp, Oryza sativa
  Clone ID: PAT_MRT4530_47196C.1
atggacgacacccatgacaatcaacacacgcccaccagaagccacaacatacaagcctacgtaagccaagacacaccgccggatatcgacttcagggataggcatggctattcccctacggtgtctccggataccgtcaggagatacgaaagcactatctctgatctcgccgggcacggattcgaggaggaagactaccatgttgtcgactacgagtcagaccttcagaccgacatgtcgacaacagtcagatag

SEQ ID NO: 44103 - DNA, 954 bp, Oryza sativa
  Clone ID: PAT_MRT4530_47197C.1
atgaccacggcagacgccattgacggccggaggcggaggggagggacaaactcaccggagcacgaggagaagtggactccggtgggtttttgcggcaatcgaatggcggccgaggagcggccggcaccggagatcatgaaggtggtggtggcgaggctatacgacggccctagcgtggtgtggcgtggcgacgacgctagctgcggcggcgtgcggccggaggtgggcggcgggtggcggagctcgggtgcacggcgcgagggcggtataaggcgtgggagaggacggctgtcgacgtttgatgtcgcaattctggttcgggcccctgaattgtcagtcgacaacagggtagtcttcctcctcgaatccgtgcccggcgagattagagatagtgctttcgtctctcttgacagtatctggagacaccgtaggggactaaccgtgcctatccctgaagttgatatccggcgtcttgtcttggcgtatgtggtatccataaccctgacaacggcgaatggggaaacaagagagggagctcgagggagggtttttatgggcgagggaggggaggacgtggccgggagggtggccgaagccgccggcgacgtggggtggagagatagagagagtggggtgggattcgaaatcaaatcccgcccatttcgtgcgcgcgcgcggggcgggagacgcggggagagggcggcgacgtggggaggacatgggagcggcgcggcgtgggcgcgggaggagcggaagaggtggggcggcagcggcggttgccgccggctggaggaggaagacggggccaacaggcaccaagccttcatcggatccacctcaccgtcgctcctcctcgcccccgagccgccgccacctattctcctagtcgccgagcagtcgccagccctcccccgttgccaccgtgggaggaatctcccctttaggctccggtga

SEQ ID NO: 44104 - DNA, 189 bp, Oryza sativa
  Clone ID: PAT_MRT4530_47198C.1
atggactcgagggaggaacggctgtggaatgtggatggtgagttcggctcgattcgagccggctcgctctttttttttatggctcgagcaaagttaaaggtgccggtccccaagcttgaggccatcggctgcctggcgtacggccttgtggccagctacttgactgttgctgatgaatgtgtagtatga

SEQ ID NO: 44105 - DNA, 475 bp, Oryza sativa
  unsure (1)..(475): unsure at all n locations
  Clone ID: PAT_MRT4530_47199C.1
gctgcgcgtggctctacaccatgatgtgcccaaacattcacgcgtgcgccatggcatacggtccagccatggcacaggcttgcggaaagacacaacccactaagagcgtgagctgacctgtatacccttctaatccatacgtgctcagtgctgtgcccactgatgacagtctcattgcaactgatcttctgatgcacatcacgcagcatgctcacgccaatgctgatggtagatcatcgtttgacacactgattcgccaacggactcaatgcgagtctgnccaggtactcgtagtcaaatttacaagaactacactataactcgccttccatgcactgatctgcatgaacgcataccaccctcattgggccgcttcgtcatgcacgaagatcgtcgattactctcccaatcaaacaattacgaatgctagggagatagccaacaaagctcacattgtctattatggcatatacta

SEQ ID NO: 44106 - DNA, 861 bp, Oryza sativa
  Clone ID: PAT_MRT4530_4719C.1
cttgagttggagcaacacaccaagaaggccagagagattcagagaactacaccgagaaggcgagattgtttgcgtggttggtaatttggccggccttgatcgatcgagcggagaagagaagaaaaagatggcggggagcggtgtcctggaggtgcatctcgtcgacgccaagggcctcaccggcaacgacttcctaggcgagataggcaacatacacccgtacgtggtggtgcagtaccggagccaggagcgcaagagcagcgtcgccagagatcaagggaagaacccgagctggaacgaggtgttcaagttccagatcaactccacggcggcgaccgggcagcacaagctctttctgcggctcatggaccacgacaccttctcacgggacgacttcctcggcgaagcaacgatcaacgtgactgacctgatcagcttaggcatggagcacggcacatgggagatgagcgaatccaagcaccgggtcgtcctcgcggacaaaacataccacggcgagatcagagtcagcctcacgttcacggcttctgcaaaggctcaagaccacgcagaacaggttggaggatgggcgcacagctttcgtcagtagaaagattgtgaacttcaagtctataatcagttggggcctgtgggaggtttagataagtatactatagtactagcaaggtaggattttgtgagtaacaacggcatctaatgcccaagattgatgtggttcgaagtgtatgtatgctgccttttttttttctatactagatgtatattcagaacattgtagagtcatgaacctgttaatggatgtgaattatgatactacttcaaccaaaaaaaaaaaaaaaaaaa

SEQ ID NO: 44107 - DNA, 179 bp, Oryza sativa
  Clone ID: PAT_MRT4530_471C.1
acacccatctcacagttagattggctctcttgaccattagctttgtatcttaattattgagcaggtcgtcatgttaccgtggccactatcgtgtctgttctcacgtcacagttctgtgtaaattctcatacagtagattttttctttcgaaaacgacgttatataaaaaaaaaaaaaaa

SEQ ID NO: 44108 - DNA, 153 bp, Oryza sativa
  Clone ID: PAT_MRT4530_47200C.1
ataggcagttcccttcccaattctacggggccccaagttggggaagtctcttgcccacgccagtattccctatcttcgccacccccctaacggtggagatatcctcctgctaacgcggagcccaataataatccgtattgccacgggtccttt

SEQ ID NO: 44109 - DNA, 401 bp, Oryza sativa
  Clone ID: PAT_MRT4530_47201C.1
ttttttttttttttttttttttttttttttttttttttttttttggccaaaaagatcagttgaatgaattacataaaatctggcaaaactggaaagaacacatggaacagtatatgacacgtttacaagattactaccaatttaaggctagtttagtgtgtaaatagtacaaaaacagccgtggggttccttttcctataaaccgtgttaatggatcaacaacaagcagatgtggtccaagcattttacaacactgaaatcactgccagatttaatcttcacgttgatttctcctgcaacaccgaagcattagactaggatctttcacacagaacaaggactgacgatgcttacaaattccgggagagcaatttattgccttaaccatttaacaccttaag

SEQ ID NO: 44110 - DNA, 724 bp, Oryza sativa
  unsure (1)..(724): unsure at all n locations
  Clone ID: PAT_MRT4530_47202C.1
ntttnnttnnnccccgccctccggggggaaaaaagnggaaaccctttggggttttttgnnaanagcggcgcnccgccnnngaaaggaaggcnnnnggggaaaacnngngnaaganggtttttttttttttttttnnagggggnttttnggnnccccaaccccccgangggncaaaaaccngcccntccnaantttcccggggggggccgaangccgccgaactttcggggccggcccaacnttggccnggaagaaaacgcccngggggtggatggcggggngaaccttcgccgtttgttcggaccggaaggaggaacgccatcccatcccaatataatattntgnttcggcgtcaantaattcatcaactttttggaccggcgccggcgccgcaacgccggntccgccttccggggtgcaacttgaacggangacgangacggcatcattcgccgggcggcggatcggccggcggcggcggcgggcatcccctaccgttttcctttgctggcgtgtgggctggatgctctgcttcgtgtggctggtttctttcgtgcaccttttcaatgtaaacaagcgagcagggcctcanttntantaattactgtttttgttttttaaacttttcacggttttcaccaacgtaacccggagtgtgatggtttttaatggnaacaagtaataaatcagtttaattttccttttcaaaaaaaaaaaaaaaaaa

SEQ ID NO: 44111 - DNA, 297 bp, Oryza sativa
  Clone ID: PAT_MRT4530_47203C.1
atgcaacgcaactccaagaggacaaagacagagaaccaagaaaccgaagcggaagacgagaacaccggcgccgtgtcgtgcgcaaccactctgcggctcggctccgtcgtcgccgaccgtttccgattcacgcggaagcggcaaaacgctctccctgccgcgccgtctcgcgttccagccaagcgagcctcttgcctcgtcccgcgcgggggttcggaatcgtggcttaacttaacacaattgcgtgtatttttgcaaaacgtggcattggttggcgaggcaacggcgagttggtga

SEQ ID NO: 44112 - DNA, 363 bp, Oryza sativa
  Clone ID: PAT_MRT4530_47204C.1
atggcttttactcaactatcaaccgagcttgttctcatggatcctaaccggtcaagtgggtacaacaatttcttgaaggatcccgatctggtgcaccccttcggtcaagcctccacccaaagcgatttttgtcatccccacgacgacttccccaacgctcatgctcagtttccccccttctctacccagccaccaccactagcaaccggcaatggtggcctgacattggcctccatatctagggtgaggcagcgtgtgcaggcaaatccagtcagccaagacgatgggaaggcgaggatgtactacactcatgatgaggacatacgcttggcaagcatatttgatcacattccaaatatttga

SEQ ID NO: 44113 - DNA, 221 bp, Oryza sativa
  Clone ID: PAT_MRT4530_47205C.1
gcccggactgaccggccggaccgacccacgcggataattccgatacattgctccctgtgatctgccgcggagccgacatcgatcacatccctaacataccacacgcatgtacgcgccacggtcgccatcctgtactacatcctcacagccgcgcgctcccatgcagagcggaggccaaggtcgcttcggcgtcgtcgtacgcgagcacgggcaacggctgc

SEQ ID NO: 44114 - DNA, 836 bp, Oryza sativa
  Clone ID: PAT_MRT4530_47206C.1
cacgcgtccgcgaagattacactctggagaaagtatatggattcagattagtatgcagaagtgtggttgatctgaggagtcaaaatttatacacgtgtttataagagaaagagctatttcaggagttcagcatcagaatgtgagaagatcattcacagtgctagatggctagaatttaggagacagagggtagcatttcagagaactagaaggacaatccatcttattcctttggcttctcaagatgatagcagtggtttatctgttaacggatccccacaagttgattcggcaagcgagatggatgatataagggtgaaattggttaaagcactacaaagcgaggatataagcactggccttgtccaatcaatacatgatgctgcaagatctattgaattggctttcttagatcacagcaaatcatcaaaaaactcttggtttccaaaggaatggcttggtgtggataacaatgaatggataaaaccactctcttaccaggctgctgtcggttcattgttgcaagcagttattgatgtttcatctaggggaaatggcagagatagagatatcaatgtatttgttcagaggagtttatcccgcctacttagttctctagagggtgctatccaaaatgagctgtcgaaaagggaacctacattgtaccagtggtactcatctgatcaaaatcctttggttgtgagaacatttgttaactctttttgaaacgatccacggtttaactcctgcaacagcatatgccatgaacgccagcaaatgaatactagtgaaagtgacctttctctactttatgctaggttgacatgttctgctgc

SEQ ID NO: 44115 - DNA, 155 bp, Oryza sativa
  unsure (1)..(155): unsure at all n locations
  Clone ID: PAT_MRT4530_47207C.1
tacactanncaacaaaatannnctaactgtnctatcaaatncaactctaagaaagaacaagatatattctttcttggtcatttcatcgaacaccatgaatgcacagttcgcactacaaatcagcaaccacacgttcaggaaaaaataaattgaag

SEQ ID NO: 44116 - DNA, 369 bp, Oryza sativa
  Clone ID: PAT_MRT4530_47208C.1
atgaggcagccggtcgatgaagacatagacgccatcaacggtgacgcgaaaacatcagtcggtggcggtgaaggcaagccggtcggtaaagacgtagacgcccaacaacgacggtataatagaccagccgtgcaggcggagacaccagttggcggcggcgaagtcaagccgatggcgaggtcactagttgacggcggcgaaggcaggcctgcggtgaagacgtggacgcccaacaacagtggtgtgatcaaccaaccgtataggcgaggacaccagtcggcggcaacgaggcggtcggcgaggacaccagtcgacggcggcgaaggcaggctgacggtgaagacatggacgccaacaatggtggtgtga

SEQ ID NO: 44117 - DNA, 453 bp, Oryza sativa
  Clone ID: PAT_MRT4530_47209C.1
atgaaaatacacaactttctacgatgtccgccaactgctagcgttatgatgttttcgctggtgggccatgtaggcaacgtgacttcgggtggcgggcggcttgggagcacgcgtgacagccggctccgtatcactcccatcaccgtcacgacggctggatccaccacctcgttcgccgcgtgtgcgcgcgatggccggatccgcgccaccgatgctgccgacgacgatggggaagaggaggtggccgggagtggcgtcgccttccccacgcgcggcgacgacggatctggcggtggtgaggcatggcggccatcgcccgcgtggatccaacggcgaccgccttccccccacatggcggcggcggtggatctaaaggtggtgaggcatggtacccgtcgcccacgtggatccgacggcgaccgccctcccctcacacggcggcggcgaatctga

SEQ ID NO: 44118 - DNA, 446 bp, Oryza sativa
  Clone ID: PAT_MRT4530_4720C.1
tttcgttatcagcagcaagcggaccacaggagggaggcgttaattgaaacgagggctgctaaacaaaccagcgagcgagcagccaacggcccatcaaagtgaggcaatcgtgaggggcgccggccccgcaggagcgctctcatgcacgttccgctccgcttccccttacccgacctccccggccacccgccattgctggcctgttctaggctaccgctcccgctcccgctcgtatggcacggagctggggcccgcgcacgaagagccccggggcacctaggttattcctgtcgacaccatgacggcgcttcagattctgcaggcaaagcaacgcttctatccacgaacaaagggcaaaacaaatgctcgctgccatctttcagctcattctgacagtcagggattccgcctgaacaaccaaaatctacccgtaagcacaatctcct

SEQ ID NO: 44119 - DNA, 270 bp, Oryza sativa
  Clone ID: PAT_MRT4530_47210C.1
aacgcccccaagcggagagggcgcccgtcccagtccgacggcgacggcggcgcggccgccgcccaggtggggaggcggaggccgctgcatcccatggcggtgaagcccgaagccctcgtcgtcgtcgtcggcggcggcggcggcgatggattggtggatgaatcgatccggtggttgcgagatgctcctcctcttctgctgcttcttcttcgtgttccacttttttggttagccggcaacggtggcgaaggagagcgcgcgtgcgggtga

SEQ ID NO: 44120 - DNA, 636 bp, Oryza sativa
  Clone ID: PAT_MRT4530_47211C.1
atggcgaaggctatggagcaagaacggcgtgaggcgaagagtcgtacaagtgccttgccaggccagaggcgtctcaggcgaagggtgcaaggcgaagactatctaccgaaggaagacgacttcgccttggttttaaaaagtcttttttggctttgggccgaaagtcggcccaaaaccctctttctctctccccggcccaagtcggcccagtccgcagccgcagccgcccgcgcgagcgcgctgtcgctgacaggtggggcccgcctgtcggagtcgtcgtcaaccttcggccgccgccgcccgaaaccctagcgtcgagccgccgccgtttccttccaaatccggccgctcctttcccgatccgatgaaattgaaagaggggaaacaatctttgggatctcctccacctttttccgtctggaaacttcggctaaatcggtttggaaatcgttgtctcggattcgttcttcccgaagtttccttcgccgtcgccagccgccgtgggcctttgccgccgcctccgagcccctttaaaaggttccccgagctctgtcacgaccggtggcaacccgaccctgggtcccagctcgtcccaagccaacccaggccaaccattccacattttagttgttaagc

SEQ ID NO: 44121 - DNA, 510 bp, Oryza sativa
  Clone ID: PAT_MRT4530_47212C.1
atggcagcatatgcagtcagcagaacttaccaagaagtgtattatactggagagaatctatacgataggacatcaagcacacatgagacaaagattatactggttcaggtcccttgcgaggaagccctaatccagtttatatgggattatggagaaaaccatatagattataatagagaacaatggaaccctgagattgccgacgagatccctatcaagaacggctcgacgagatccaccgcctgcttcttgactgctaataagggtttcatcggggtttcagccaatgaggatcaaactgactggcacgctcgcatatcatcaagatttggacctgcactggagctaagcagatctcccagatgtcgcatgcagtctcagcttatgagaatacactgcacttgcatttgctggtgttttcaggatgcttcagatgctgccagcagtgctatgggaaattacgctgtttgtggtgatgtgaagggtattgaagaagttgaagtcccttaa

SEQ ID NO: 44122 - DNA, 345 bp, Oryza sativa
  Clone ID: PAT_MRT4530_47213C.1
atggccgccgccgccgccgccaccgcgcgctcctcggtggcgccgcacgcatcgcccacccttcgccgctcgggctcatcagctttagtcatatcagatttggtattgcaacaattaaaccttctcaaggattggatgatgatggagagtgtggtcgatgaccaagataaggagcaaagaaaacaagccagtggatcgctgcacttcctgagagttcttttaaagatattaccgtctctctcaacgcttaccggaattgcagattcgatctatttgcttcgactgcaaaagcaggctttgtttcgacgccctatcggacctttgactgacgtgcttgcttgttag

SEQ ID NO: 44123 - DNA, 267 bp, Oryza sativa
  Clone ID: PAT_MRT4530_47214C.1
tttttgaacgaatgttttttttgaattttttcattggacttggcctatttaatttagaaacccaaaacaaagggaccagtccatgccatgttaattggatttgacctgacaaactgatggaacaaatggaatggaccaattaccaatgttaccacgccagatcaaaagggcacaattcgagggggaaacctggggtctttttaggaggctactgggtcacatgatttgggggccatattttacaaacacgggcggtgcaaataacaa

SEQ ID NO: 44124 - DNA, 336 bp, Oryza sativa
  Clone ID: PAT_MRT4530_47215C.1
caaagcccacagatgtagatacaaatagggtttgcttagataacaaagggggactcaggccctgacttgataaatctagcgaacgatgccgtcgtatgcccagctgggcgggttctcatacagcttgggttccgatctctctcttcccctttaagtgcacagatagcatcgtcccttgttttgagtactgatcaactgaaagtcaaagactatgaccctttacgcgcacagggggctcagatccaatactgccatctgtagaatcacttactctatcacattttatccggcattgcaaaccctgagatcgttgggttgtacatcgtggcctgcgag

SEQ ID NO: 44125 - DNA, 191 bp, Oryza sativa
  Clone ID: PAT_MRT4530_47216C.1
atgacatgggtactcgtacttgtgaacaacgccggcgtcatcgtagacaggctttaccggcttaatggtggtgaccgtaggcaagttgatctagtcacctgtgatggggttaacgagatgcagctcagatctctcgtctgccgtgatgatccaaccatgagaggacccgattatatacctgctacggatag

SEQ ID NO: 44126 - DNA, 233 bp, Oryza sativa
  Clone ID: PAT_MRT4530_47217C.1
gtcttatccaacacacgctgtcaggaccgtatccgagaccttaaacttcatgggaagcttaggatgctgatacgtgccaatctacagacacgaatgcgcattctcacctagcgcacagttatagaaaccccatatcgacgatcaagttacacacccagttctagaggatgcattaacgagccataagatctaggtctactgtgaactactcgtatagattacttagacacaaa

SEQ ID NO: 44127 - DNA, 487 bp, Oryza sativa
  unsure (1)..(487): unsure at all n locations
  Clone ID: PAT_MRT4530_47218C.1
cttttttttttttttttttttttttttttttttttttttttttttttttttttttttttttttttttttttgaaaaaaaacaatacttttttgagctgaactgaacaaagtacaaggtttcatttgataaaacccccagggggggggggaacaaaattttttacacaaaaaacggcgtggagcagttagcatatcccggggcaaaatagggcccccaatttttggggtgtccaacaagggccccagggaaggggtttttgagcttcatacaaactgaccatgggatgaaaaaccccttccctggcagtctcacatggggggcccaaactttgggtggggaatcaaggaaggcccaaacttattatcagggacatgcaaactaacaaactggttggggtgggcgttcaaagggtttgccatgtccataccattatcaaagggggcaaaaaagncaaaataccccacattggctacgggtatctttggc

SEQ ID NO: 44128 - DNA, 1951 bp, Oryza sativa
  Clone ID: PAT_MRT4530_47219C.1
ctctttttccctttttccaccctccacagccgcctccttctatcgcccctctgcttcttctgccggagccgccgccgcgccctcctcctcgcctcctcgcgcgcgccgtcgccgccgagcgagcgagcccggagggtgcgtggacggcctcctcttcctccgtcctagccttctccgctccctcgcgcgcgggcgcggagcggcgcggcacggcacggccggcgagcaaagttcggagaggcggcgaggtcggccggcccagccagccagccagcctcgttccgccacctcgggttttttaagtgcagtcgcccgccttcactgtgtgctgtagattgaggcaaaaacattttccaggagatggcagcgacgatggtggcgatgtcggccaagagcaagaacagcgtgctgacattggagaagaagcagggctggtctgtcccacaacttccggagctccggttcccttgggatttgcatgaagacaagggcttctctttgagcttacatggctctgcctcccctcatggtgggctgtttgctagcgtcggtctcaaagtgtccacagctgcaccagcagtggcacccagtcctgccgagcatgacttcaagattccgttcgctgatcattgcataaagtatgtctcctcagcagtggggtaccaagttcctgggactgaggctgaatctgtcaatgaggaagaggtggtggatggcaaggctgtgaagaaagccaagaaacgtgggctgaagctgaaaattaagattgggaacccacatttgaggcggctggttagcggagccgttgcgggagctgtctcgaggacttgtgtggcacctctggagacgattaggacccatttgatggttgggagcaatggggactctatgacagaggtattccagtcaatcatgaagaccgaggggtggacagggctgttccgtgggaactttgtcaatgtcatccgagttgcaccaagcaaggctattgagctatttgctttcgatacagccaagaaattcttaactccaaaggctgatgagtcccctaagacacccttccctccatcgcttattgctggagcacttgctggggttagctcaacattgtgcacataccccttggaattgatcaagacccgattgactattgagaaagatgtctataacaacttcctccatgctttcgtcaagatactacgagaggaaggcccctcagagctctaccgcgggctgacaccgagtctgatcggcgtggtgccatacgctgcaaccaattactatgcctacgacaccctgaagaagctctacaggaagacattcaagcaggaggagatcagcaacatcgcgactcttctcatcggttcagccgcgggtgccatctcgagcaccgccaccttccctctcgaggtagctcgcaagcaaatgcaggtcggagcggtaggcggcaggcaggtctacaagaatgtcttccatgctctgtattgcataatggagaatgaagggattggcggcctttacaaggggcttgggccgagctgcatcaagctgatgcctgcggctggaatctcattcatgtgctatgaagcttgcaagaagatactggttgaagatgatcaggatagtgagtgaagcatgtgctcttgaaggaagatgagtcccctagttctttttctttcgtcgagaaatgcaagttggatgattaacaatcaaaagtttaggactaagatatttgagatatctgttagatcaaagttttggctttggcttcatgtcaaaggattatttggcttcttttgtgctcgagttcaaatctatgaacaacaatgtcatcctgagcggaaacaattttgtcgtgattttgttcgtctataaaaggggattaaagtcggcgggtccaggattaaaaaaaaaaaaaaaaaaaaaaaaaaaccaagggcggccgctttaa

SEQ ID NO: 44129 - DNA, 1005 bp, Oryza sativa
  Clone ID: PAT_MRT4530_4721C.1
atggcggggtgcctgtggccgtgcgtgaccggcggcggcgcggcggcggacggggcggggagcctgttccggtcgaaggcgaggggccccgtggaggtggtgcggcacgcgcgggagctcctcgccttcctcgccgagaaccacgacgcgtgcggtgacaagcgcgacgtcaaacgcgaacacaagatggtagatctagccaaaagcatcggggagatgaaatccatcctttatggaaatggcgaggcagacccagtcgatgaagcttgctcgcagttgacgaaggagttcttcaaggagaataccaatagtcttcatctactagttgtttgccttccatacatggacctggaaactcagaaggatgtcactcaagttactgcgaatttgctaggcaaaaggtatgacaacatggacattgcaatacattatagtgcaattctaagggactgcatacggcaccaagtcgctgcaaggtatgtattagagtctcagcatatgaagaaattttttgattatatacaatatccagacttcaacatagcatctgatgccttcaagacctttaaggaactcctcacaaggcatagatcaagtgctgctgagttcttttcaaataattacgattggttttttccggaatttaactcaaaattgctgtcatcatccaactatatcattcgaaggcaagccactcagctactaggagacattcttctggataagtcaaacacaacagcaatggtgcgctatgttagctcaaaggataacctcataatactaatgaaccttttaagggagcaaagcagggccattcaagttgaggcttttcgcgttttcaagctgttcacttgcaatccgaagaagccacctgagatcgtgggtatactggtgacaaacaagagcaaaatcctcaggttcttggcagatttcacaatagaaaaagaggatcagcagttcgaggccgacaaagcccaggttgtcaccgagatatcggccatgtga

SEQ ID NO: 44130 - DNA, 360 bp, Oryza sativa
  Clone ID: PAT_MRT4530_47220C.1
atggccatgccaaatgacattccacgggataaaggcaaccaaaccctaaaaatcctctatcctctcccgattcctcacgccgccgctcctcagcgctcccccctacctccaccaccgccaccgccgcccggcctcgccagctggccgaaagccagcggcggcgagctgtctgtcgtcttccccgtcgccggcggcggggtgccaccatcggccatctcctcctaccactctttccgctttgcccccgccgcctacaccggcctatcgcccgctcccgaccccgcggcttcggcgccgccactaccgcctcgccgcccacccaatccgccgagctgccgcctcccacggccatccctctaa

SEQ ID NO: 44131 - DNA, 1117 bp, Oryza sativa
  Clone ID: PAT_MRT4530_47221C.1
atggtgatctctgttcgcgcttcttccgtgcttgcttggaacgttctcgacgagtacgtcttgctcgctccttggttctatcgctttgcacgtcgttttcgtgtaataggcatggcaagcacaatgaagaagaaggtggagtccaagcataacaataaggacatgaagatggcgttgaagcatgatataccacttgaggttctgcaagaaggaatcccaactgttcttcgtggcgcgcctgacaacgaggttcaggctgggagagtcataagagtttctagcgccaccggcttgaaagaggctcttcagcaggcggggccgggagcgcttctcaaggtctaatgtcgtcagctacatacctccgtccgtcgcggctcagatccgtcaagctcagatcgcactccaaggccccgccccagccgatcaagagaagaaacctaccactgtcaagttcaaggttgatagtccgaatccgaatgcctccatcggcgaggaggaggagaagggcaacatcgccggtttcatcattgccaatattcacgttcttgaagctaaagagatggctatggtggccatggaaggcgacatgtccgtccttgaagagctccagaagagaatctcatcctctccagatctcagcccgcatgatgtgcaagtgcaactaccaacaaccgctaacaatcttggaaccgataaagggaaaaacattctgttctctctgaagaaacgatatctgttagctcatctgcaagcaggccacagcaggatggccacaaacatccttaaatacgtggatcttgcccagtacaattctttcatagaagaagccgaccctgaaaaggcgtcaaaagctatggctgtcaaagctcaatatgaattagaatatcctggaaagcacagcccaggatggatggctaagcaagtgttgggtgttgcagcccatatgtattgggagaaaaagaaggccaagataatgggcgaggatggcttatgggctggtgacaaaacgactgttctgaccaggctgaagaagcaagagcaaaaagatgggaagactcgccaacaagaggtcgctcataggcgccgccctagcaggttaatcgatctgacaatttaa

SEQ ID NO: 44132 - DNA, 5304 bp, Oryza sativa
  Clone ID: PAT_MRT4530_47222C.1
atgtcgaacgaggtgaaccatgtagggaaggcttccatgtttaatggcacaaactactccacttggaaaattaaaatgtctactcacctcaaagctatgagcttccatatttggagtattgtggatgtaggctttgatatcaccggcacacccttgacggagagtgatcaccgtaacctccaactcaatgcccaagccatgaatgccttgttcaactctttgagccaagaggagttcgatagagtgagcaaccttgagaccgcatatgagatttggaacaagttggcggagatccatgagggtacaagtgagtacaaggatgccaagcttcatttcctcaagatccaatatgagacattctccatgttgcctcatgagagtgtgaatgacatgtatgggaggctcaatgtcattgtgaatgatctcaaggggcttggggcaaactacaccgatcttgaggttgcccaaaagatgcttagagccctaccggagaagtatgagacccttgtcaccatgctcatcaactccgacatgtcaagaatgacacccgcaagcctcttggggaagatcaacaccaatgacatgtacaagttgaagaaggagatggaggaagcctcaccctccaagaagtgcgttgctctccaagccaaagttgaagacaagagcaagagcaaggtgaatgaagtcaatgaggacttgagaaaggagagaggaaggggctccaactcaaataggagaagaaatagaagacccaacaagactctctccaacttgaggtgttttgagtgtggtgagaagggacactttgcttccaagtgcccttccaaggatgatgatggagacaagtcatccaagaagaagactggaggctacaagctcatgaagaagcttaagaaggaagggaagaagattgaggctttcatcggggaatgggactcaaatgaggagagctccgtctcatccgggtccgaggaagaaggtggtgatgatgcaagctccaagaagaagaagatggccgttgttcccatcaaggaggctccatcactcttcgctccactttgtctcatggcaaagggctcctctaaggtaacatcccttagtgatagtgagagtgatgatgattgtgatgatgtttcctatgatgagcttgtgagtatgtttgaggagctccatgcttatagtgagaaggagattgtcaagttcaaggccctaaagaaggatcatgtttctttggaggtcttgtatgaggagttaaagacctctcatgagagactcaccatttctcatgagaagcttaaggaagctcatgacaacctcctttccactactcaacatggagctcacattgatgttggcatatcttgtgatttgcttgatgatagtgctacttgccatattgctcatattgcatcatctagcatttctacctcttgggatgatcttatggatatgcctagccctagctctagctctagctcttgtgtttctatttgtgatgcctcacttattgttgagaacaatgagcttaaggagcaagtggctaagctcaacaagagtttggagagatgcttcaagggtaagaacactcttgacaagattttgagtgagcaacggtgcatccttaacaaggagggacttggattcactccaaagaagggtaagaaaccttctcaccatgccactcgttttgtcaagagcaatggtaagtattgctccaagtgttgtgaggttgggcatttggtgaactaccgcaccggtgggagccattgggtgcttgatagtggatacactcaacacatgaccggtgatagggctatgttcaccacatttgaagtaggagagaatgaacaagagaaagtgacatttggagacaatagcaaaggaaaggtaattgggttaggtaaaattgttatctccaatgatttgtcaaatgaaaatgtctctcttgttaaatctctaaattttaatttgctttcggttgctcaaatttgtgatcttggcttgtcatgtgccttcttcccacaagaagttattgtttctagccttcttgacaagtcttgtgtgttcaaaggttttagatatggaaatctttatttggttgatttcaattctagtgaagcaaatttgaaaacttgtttagttgcaaaaacttcattgggttggctttggcataggaggctagctcatgttggcatgaatcaattgagcaaactttcaaaacgtgatctagttgtgggcttgaaagatctgaagtttgagaaagataagctttgtagtgcttgtcaagccggcaagcaagttgcaggttctcattctactaagagtatcatgtccacatctagaccattggagctcttgcatatgaatttgtttggcccaacaacctataagagcattggtggtaatagtcattgtcttgtgattgttgatgattattctcgctatacttgggtgttctttttgcatgataagtctattgttgccgagtttttcaaaaagtttgcaaaaagggcccaaaatgaatttagttgcactcttgtgaaaattagaagtgacaatggttccgaatttaagaataccaatatcgaggactattgtgatgatcttcatatcaaacacgaactttccgctacctactcacctcaacaaaatggtgtagtggaaaggaaaaatcgtacattgattgagatggcaagaactatgctagatgaatatggtgtttccgattctttttgggcggaagccataaacaccgcttgccatgcaaccaatagactttatttgcatcgtctcttgaaaaagactttctatgagctaattgttgggaggaagccaaatgtcgcctattttcgagtttttggttgcaagtgttatatttaccgaaatggtgttagactaaccaaatttgaaagtcggtgtgatgaagggtttcttctaggttatgcctcaaatagcaaggcataccgggtctacaacaagaacaaaggtattgtggaagaaaccgccgatgttcaatttgatgagactaatggctcccaagaggggcacgagaatttggatgttgtaggtgatgaaggcttgatgagagctatgaagaacatgtctattagagatgtcaagtctattgaagtggaagacaagccatccacctccactcaagatgagccatctacttccgcttcgccaagtcaagctcaagttgaagtggaggaggagaaggcacaagatccacctatgcctccaagaatacacaccgctctttccaaggatcacccaattgaccaagtgttgggtgacattagtaagggtgttcaaactcgatctcgtgtcgcttcgatttgtgaacattactcgtttgtttcttgtcttgagccaaaacatgtagatgaagctctttgtgatccggattggatgaatgctatgcatgaagagctcaacaactttgcaagaaacaaggtgtggactttggttgaaagacctagagaccacaatgtcatagggacaaagtggatatttaggaacaaagtggattggtgggaatttgagatgtccatgattggagagttgagcttcttccttggacttcaaatcaagcaactcaaggatgggacgttcgtgagccaaaccaagtacatcaaggatctactcaagaggtttggtttggaggatgcgaagcccatcaagacacctatggcaaccaacggacatctcgaccttgatgagggagattatgccggttgcaaagtggatagaaagagcacatccggtagttgccaaatgcttggtagatcccttgtgtcatggtcatccaagaaacaaaactccgtagccctctctaccgccgaggcggaatatgtttcggcgggtagttgttgtgcccaattgctttggatgaaacaaaccttgttggactatggcatatccttcaccaaaaccccactcctatgtgacaatgatagtgccataaaaatagccaataacccggtccaacattctagaaccaagcatattgacattcgccatcacttcctaagagaccatgttgccaagtgtgacatagtcattagccacataagaaccgaggaccaactagccgacatctttaccaagcctcttgatgaaacccgcttttccatgcctccccgcactcgccatggtcgtcgtgagcccacgcccgatcccgtcagtgagaatgaggaatcaagcggagatgagtatgttcaaagtgatgatgacaatatggaaaatgttgagggtgatgagatggaagtaagtgatgatggtgatgacaatgggagtggaaatggtgaagatgatgaggcaagtgatgatgggagtcctctcgattcctccatccaatttgtgcttaatttgaggaatgctcaacaatacactatcctccgtcatcatgatcaattccggaggcctaacgattgtaatgatccaagatttcatacacggttccaaaagtccgtgtatgcacaagtgtatgccaacaaagccttcgccgagcacaagtggatttcttggaggcacattggtgagacaccggagtttgagaatttgcaagagatgttccggaccgttgggattgatagaattgtcaccatgaagcaaccttttgatgaagatctcatccggcaattctatgccaccgtatgggtgtccggcgattgtgatgcaatgaagtggatgtcggggaccctccgatgctctatcaaccgccatgaattcaaggagctcttgcacattcgcttcaacaacggggatgaccttcatgatgagcacacccacaaccccttccccattgatcacttttctcagttttatgaagaagggagaaggcacacatatggcaaggtggcgggtttgagggctctcccaagtgtgatcaaccgcatagtaagggccaccatcctcccaagaggcggcaacaatgatgacatacgcggagttgcttggcatgttattgatgccattatggatggtcgtcggtttgatgttatcaaccttatgatgaaggagattgccatctcaaaggggactcttggacaaggaatctattatgctccctacataatgaggttgattcaaagcaagttgggacaaattggtcacaatttaaaagaacataaggagtacaagcctcgtctcaaactctcctcccctagagctcctcgtgtgcgccaaccaacattcgatcaaggtgcaagctcaagtgcagcccccctcctcctcaagggtatgatccaagtgtttttttttccatccacaatatgcctactttggaatgcaacccaatga

SEQ ID NO: 44133 - DNA, 5928 bp, Oryza sativa
  Clone ID: PAT_MRT4530_47223C.1
atggatcggcaatggatgtacgctgaccggcggtccaaagagtttattgacggcgtgcattattttttgagagtggccaaagctaacaggcataagggttttatttgttgtccatgcaataagtgtaagaatcagaaggagtattctgcatccaggactattcatttccacttgtttgagtcggggttcatgccaagctataactgttggacatcccatggagagcaaggggttgaaatgaaaaaagataaagtggaagacgacaatattccggactttgctcagtacgctggatttgaaggaaatcaaacaggcgaggaggaaagggatgctgatggtaacgacgttgcggatgatcttggtcagatgttgcaggataccaaggagtactgcgaaagtgaaaagggggcccataaattggacaagatgttagaggaccacagaacgtcgttgtacccaggttgcgagcaggggcacaaaaagttggatccaactctggagttcttgcaatggaaggcaaaaaatagtgttagtgacaaggcatttggcgatttattgaaactcgtcaagaacattcttccggagggaaacaaattgcccaagacaacgaacaaggggaatgctagaatgatgcgatggcacgctgaagagcgtcaacaggacgagatgctgagacaccccgccgatgattcacagtggcgaaacatcaacagaaaatttaaagactttggaaaggacgcacgaaacatacggtttggtttaagtacggatggcatgaatccttttggagagatgagcaacggctatagcacttggcccgttacgatgtgtatctataacctccccccttggctatgcatgaagaggaagtacataataatgccgattattattcaaggccccaagcaacctggtaacaacatcgatgtgtacctaagaccactggtcgaggatcttaaactgctgtggaaaaaggaaggtgtccccgagttaccctattgggaattcttggacgtccgccacgcaatcgacgtgatgcacctcactaagaacctttgcgtaaaccttcttggcttcctaggtgtatatggaaagtcgaaagatacactggaagcacgtaatgatctgaagcatatggaacaacgcggcgaccttcactcagaaccaaaggagaaaggaagccattacttgagtccagccagctacactcttagcaaggctgagaaggaaaatatgtttgaatgcttggagagcataaatgtaccgtctggatactccacgaatataaagcgaataataagcacaaaggagaagaagttcacaaacctaaagtctcatgactgtcacgtgttgatgacacaactgctaccagttgtaataaggggtatccttccagacaatgttcgggcaacaataataaagctatgtgctttcatgaacgcaatttcgcagaatgtcatcgatccggatatattagaagcccttcagaatgatgtggtgcaatgtcttgtcagttttgagttgatatttccaccgtcatttttcaatataatgacgcatctgctttgtcactttgtcaaagagattggtattctcgggcctgtgtacctacacaacatgtttcctttcgagaggtacatgggcgttctgaagaaatatgttcgtaaccgtgctcatccagaggcaagcatcgccaaggggtatggaacagaggaggtcatcgaattttgcgtagaatttattgaagaccttcgcccaatcgggggatatgagatcaatgggtacacattctacacgagagcccaagacataaagtgcacgaaccaaaacagcgttgttcgtatcgatgccatgggacacgatggaacaactggcacgtattacggtgccatcgaggacatatgggaacttgactatggtcctctcaaggtccctccgttccggtgccaatgggttaggttgactggtggaggcgtaacgattgatgacagtgggatgacaatggttgatcttaacaaggttggatactcggacgaaccttttgtcctttccaatgatgtaacgcaagtcttttacgtgaaggacatgtctagcaaaggaaagaagggcagaggtgaagcatctaggcccccgttgttaattttggctcggcctgaccaggggcggtcagaccggccacatagtggcggtatgaccggcgtgccctggcagtcgacatctcaatactacaagtggtatcagagcttggtctctcttgattgggcttcaccgcctagagtgaagatgttgaacgaggtgaaccatgtagggaaggctcccatgtttaatggcacaaactactccacttggaaaattaaaatgtctactcacctcaaagctatgagcttccatatttggagtattgtggatgtaggctttgctatcaccggcacgcacttgacggggattgatcaccgcaacctccaactcaatgcccaagctatgaatgctttgttcaactgtttgagccaagaggagtgcgatagagtgagcaaccttgagaccgcatatgagaattggaacaagttggcggagatccatgagggcacaagcgagtacaatgatgccaagcttcatttcctcaaaatccaatatgagacattctccatgttgcctcatgagagtgtaaatgccatgtatgggaggctcaatgcctcatggggaaagatcaacaccaatgacatgtacaagttgaagaagaaggagatggaggaaacctcaccttccaagaagtgcattgctccccaagccgaagttgaagacaagggcaagggcaagtgctttgagtgtggtgagaagagacactttgcttccaagtgcccttccaaggatgatgatggagacaagtcatccatgaagaagagtggaggctacaagctcatgaagaagctcaagaaggaaggcaagaagattgaggtcttcatcggggattgggtcacaaatgaggagagctccgcctcatccgggtccgaggaagaaggtggtgatgatgcaagctccaagaagaagaagatggccgttgttgccatcaaggaggctccatcacccttcgctccactttgtctcatggcaaagggctcctctaaagtaacatctcttagtgatagtgagagtgatgatgattgtgattatgcttcctatgatgagcttgtgagtatgtttgaggagctccatgcttatagtgagaaggagattgtcaagttcaaggctctaaagaaggaccatgcttctttggaggtcttgtatgaggagctaaagacttctcatgagagactcaccatttctcatgagaagcttaaggaagctcatgacaacctcctttctacttatcaacatggagctctcattgatgttggcatatcttgtgttttgcttgatgatagtgctacttgccatattgctcatgttgcatcatctagcatttctacctcttgtgatgatcttgtggatatgcctagctctagctctagcccttgtgtttctatttgcgatgcctcacttgttgagaacaatgagcttaaggagcaagtggctaagctcaacaagagtttggagaggtgcttcaagggtaagaacactcttgacaagattttgagtgagcaacggtgcatccttaacaaggagggacttggattcattccaaagaagggtaagaaaccttctcaccgtgccactcgttttgtcaagagcaatggaaggctcatgatggtagcattgttgctagatatgtgggttctcctatactcggtggtgaactaccgcaccggtgggagccattgggtgcttgatagtggatgcactcaacacatgaccggtgatagggctatgttcaccacatttgatgtaggagggaatgaacaagagaaaggtgttagactaaccaaatttgaaagtcggtgtgatgaagggtttcttctaggttatgtctcaaatagcaaggcatatcgggtctacaacaagaacaaaggtattgtggaagaaaccgccgatgttcaatttgatgagactaatggctcccaagaggggcacgagaatttggatgatgtaggtgatgaaggcttgatgagagctatgaagaacatgtcaattagagatgtcaagcctattgaagtggaagacaagccatccacctccactcaagatgagccatctactttcgctacgccaagtcaagctcaagttgaagtggaggaggagaaggcacaagatccacctatgccacaaaggatacacactgctctttccaaggatcacccaattgaccaagtgttgggtgacattagtaaggatgttcaaactcgatctcgtgtcgcttcgatttgtgaacattactcgtttgtttcttgtcttgagccaaaacatgtagatgaagctctttgtgatctggattggatgaatgctatgcatgaagagctcaacaactttgcaagaaacaaggtgtggactttggttgaaagacctagagaccacaatgtcatagggacaaagtgggtctttaggaacaaacaagatgagaaagggttggtggtgagaagcaaggcaagattggtggcacaagatttcacacaagttgaaggtttggactttggtgaaacttttgcccccgtggcaagacttgaggctattcgcatccttcttgcatttgcatcatgctttgatataaaactatttcaaatggatgtgaaaagtgcttttctaaatggtgaaattgccgaacttgtctttgttgaacaacctcccggttttgaagatcctaaaaatcctaaccatgtttacaaactctcaaaagctctttatggtttaaaaccagctcctagggcttggtatgaaagattgagagattttcttttgccaaaggatttcaaaattggaaaagttgacaccaccctttctacaaaaatcattgatgatgatttcgttgtgtgtcaaatttatgttgatgatatcatattcggttctactaatgaagtattttgcaaggaatttggtgatatgatgtctagggaatttgagatgtccatggttggagagttgagcttcttccttggacttcaaatcaagcaacttaaggatgggacgttcgtgagccaaaccaagtatatcaaggatctactcaagaggtttggcttggaggatgcgaagcccatcaagacacctatggcaaccaacgggcatcttgaccttgatgagggaggtaaaccggtagatttaaagctttatcattctatgattggtagcttgctttaccttaccgcatctaggccggatatcatgtttagtgtttgcatgtgtgcacggtttcaagccgctcctaagaagtgtcacttagtagccgtgaaaaggattctaagatatttaaagcattcctctactattggcttgtggtacccaaaaggagctaaatttaagattgttagctattccgatttggattatgccgtttgcaaagtggatagaaagagcacatccggtagttgccaaatgcttggtagatcccttgtgtcatggtcatccaagaaacaaaactccgtagccctctctaccgccgaggcggaatatgtttcggcgggtagttgttgtgcccaattgctttggatgaaacaaacattgttggactatggcatatccttcaccaaaaccccacttctatgtgacaatgatagtgccataaagatagccaataacccggtccaacattctagaaccaagcatattgacatacgctatcacttcctaaaagaccatgttgttgccaagagtgacatagtcattagccacataagaaccgagaatcaactagccgacatatttaccaagcctcttgatgaaacccgcttttgcaagttgagaaatgagttaaatgtcatagacttctctaatgtggcttga

SEQ ID NO: 44134 - DNA, 3127 bp, Oryza sativa
  Clone ID: PAT_MRT4530_47224C.1
ttaggtggcaacaggcggcctgtcacacgcctcgccccatcccgtcagaatgatgagagcttcctggctctcgtctctagccgaagctggcgtgctgactcctggagttggtatgtcagtcccggtcaaatccattccaggcttcagcgcaagcgtggcaagaaaatcgctggccattgaatgaaggatgaaacgggcgtccaccgggagagctgacgagcggagcaggaggcatgtgtactgcttgtcagaggtcatttccggcgccagctccaggccggtcagaccgagcctatatggccggtcagaccgcctgccccagccgactccctcatcaaggtcgagatacctgttggttgccataggtgtcttgatgggctttgcatcctccaagccaaacctcttgagtagatccttgatgtacttggtttggctcacgaacgtcccatccttgagttgcaccaactcgttctcatcctgtttgttcctaaagacccactttgtccctatgacgttgtggtctctaggtctttcaaccaaagtccacaccttgtttcttgtaaagttgttgagctcttcatgcatagcattcatccaatccggatcacaaagagcttcatccttactaatgtcacccaacacttggttaattgggtgatccttggaaagagcggtgtgtatccttggtggcataggtggatcttgtgccttctcctcctccatttcaacttgagcttgacttggcgaagcagaagtagatggctcaccttgagtggaggtggatggcttgtgttccacttcaataggcttgacatctctaacagacatgttcttcatagctatcatcaagccttcatcacctacatcatccaaattctcgtgcccctcttgggagccattagtctcatcaaattgaacatcggcggtttcttctacaatacctttgttcttgttgtagacccagtatgccttgctatttgaggcataacttagaagaaacccggtcatgtgttgagtgcatccactatcaagcacccaatggctcccaccggtgcggtagttcaccaccaagtataggggaacccacaaatctagcaacaatgctaccatcatgagccttccattgctcttgacaaaatgagtggcacggtgagaaggtttcttacccttctttggaatgaatccaagtccctccttgttaaggatgcaccattgctcactcaaaatcttgtcaagagtgttcttacccttgaagcacttctccaaactattgttgagcttggccacttgctccttaagctcattgttctcaacaacaagtgaggcatcacaaatagaaacacaagagctagagctaggcatatccacaagatcatcacaagaggtagaaatgctagatgatgcaacatgagcaatatggcaagtagcactataatcaagcaaatcacaagatatgccaacatcaatgtgagctccatgttgagtagtggaaaggaggttgtcatgagcttccttaagcttctcatgagaaatggtgagtctctcataagaggtctttagctcctcatacaagacctccaaagaagcatgatccttctttagagccttgaacttgacaatatccttctcactataagcatggagctcctcaaacatactcacaagctcatcataggaaatatcatcacaatcatcatcactctcactatcactaagagatgttaccttagaggagccctttgccatgagacaaagtggagcgaagagtgatggagcctccttgatggcaacaacggccatcttcttcttcttggagcttgcatcatcaccaccttcttcctcggacccggatgagacggagctctcctcatttgagtcccattccccgatgaaggcctcaatcttcttgccttccttcttgagcttcttcatgagcttgtagcctccactcttcttcttggaagacttgtctccgtcatcatccttggaagggcacttggaagcaaagtgccccttctcaccacactcaaagcacctcaagttggagagagtcttgttgggtcttctatttcttcgcctattggagttagacccccttcctctctcctttctccttcccaagagatcattgaacctcctagcaagaagggcaatctcttcctctaagtccttattggcttcattcaccttgaccttgcccttgtcttcaacttcggcttggaaagcaatgcacttcttggaaggtgaggcttcctccatctccttcttcttcaacttgtacatgtcattggtgttgatcttccccaagaggcttgcgggtgtcatccttgacatgtcagagttgatgagcatggtgacaagggtctcatacttctccggtagagctctaagcatcttttgggcaacctcaagatcggtgtagtttgccccaagccccttgagatcatttacaatgacattgagcctcccatacatgtcattcacactctcatgaggcaacatggagaatgtctcatattggatcttgaggaaatgaagcttggcatccttgtactcacttgtaccctcatggatctccaccaacttgttccaaatctcatatgcggtctcaaggctgctcactctatcgaactcctcttggcacaaagagttgaacaaggcattcatggcgtgggcattgagttggaggttgcggtgatcaatctccgtcaagggtgtgccggtgatagcaaagccggccttgacatggcggtcagaccggcgatgccagccggtcagaccggccaggtggagagggtgcggccaccgccgccgctgctgcctccgccggtcagctgctggccgcgggagcccgccgaatcccctcttgccggatctggcggaggggagggcgcaacagccaccaccactgccgttgccgcctcccccaggcagccgccggtcgtgggagcccgccggatttgccgtcttcacgcaaccggtctttccgtcacctcggtacgtgttcaatcgaatgatggtcaccaaggtagagttccttggagtgattgcccgaaccatcttcttgaccacaacctcatcggtcatgtccttggagccaagtcccttgatctcgttgacgatcttg

SEQ ID NO: 44135 - DNA, 6036 bp, Oryza sativa
  Clone ID: PAT_MRT4530_47225C.1
atgtcgaacgaggtgaaccatgtagggaaggctcccatgtttaatggcacaaactattccacttggaaaattaaaatgtctactcacctcaaagctatgagcttccatatttggagtattgtggatgtaggctttgctatcaccggcacacccttgacggagattgatcaccgcaacctcaaactcaatgcccaagccatgaatgtcttgttcaactctttgagccaagaggagttcgatagagtgagcaaccttgagaccgcatatgagatttggaacaagttggcggagatccatgagagtacaagtgagtacaaggatgccaagcttcatttcctcaagatccaatatgagacattctccatgttgcctcatgagagtgtgaatgacatgtatgggaggctcaatgtcattgtgaatgatctcaaggggcttggggcaaactacaccaatcttgaggttgcccaaaagatgcttagggctctaccggagaagtatgagacccttgtcaccatgctcatcaactccgacatgtcaagaatgacacccgcaagcctcttggggaagatcaacaccaatgacatgtacaagttgaagaagaaggagatggaggaagcctcaccttccaagaagtgcattgctctccaagccgaagttgaagacaagagcaagagcaaggtgaatgaagtcaataaggacttggaggaagagattgtccttcttgctagaaggttcaatgatctcttgggaaggagaaaggagagaggaaggggctccaactccaataggagaagaaatagaagacccaacaagactctctccaacttgaggtgctttgagtgtgactcaaatgaggagagctctgcctcatccgggtccgaggaagaaggtggtgatgatgcaagctccaagaagaagaagatggccgttgttgccatcaaggaggcaccatcactcttcgctccactttgtctcatggcaaagagcccctctaaggtaacatctcttagtgatagtgagagtgatgatgattgtgatgatgtttcctatgatgagcttgtgagtatgtttgaggagctccatgcttatagtgagaaggagattatcaagttcaagaccctaaagaaggatcatgcttctttggaggttttgtatgaggagctaaagacttctcatgagagacttaccatttctcatgagaagcttaaggaagctcatgacaacctcctttccactactcaacatggagctctcattgatgttggcatatcttgtgatttgcttgatgatagtgctacttgccatattgctcatgttgcatcatctagcatttctacctcttgtgatgatcttatggatatgcctaactctagctctagctcttgcgtttctatttgtgatgcctcacttgttgttgagaacaatgagcttaaggagcaagtggctaagctcaacaagagtttggagagatgcttcaagggtaagaacactcttgacaagattttgagtgagcaacagtgcatccttaacaaagagggacttggattcattctaaagaagggtaagaaaccttctcaccgtgccactcgttttgtcaagagcaatggtaagtattgctccaagtgtcgtgaggttgggcatttggtgaactaccgcaccggtgggagccattgggtgcttgatagtggatgcactcaacacatgaccggtgatagggctatgttcaccacatttgaagtaggagggaatgaacaagagaaagtgacatttggagacaatagcaaaggaaaggtaattgggttaggtaaaattgctatctccaatgatttgtcaattgataatgtctctcttgttaaatctctaaatttcaatttgctttcggttgctcaaatttgtgatcttgtcttgtcatgtgctttcttcccacaagaggttattgtttctagccttcttgacaagtcttgtgtgttcaaaggttttagatatggaaatctttatttgggcgattttaattctagtgaagcaaatttgaaaacttgtttagttgcaaaaacttcattgggttggctttggcataggaggctagcccatgttggcatgaatcaattaagcaaactttcaaaacgtgatctagttgtgggcttgaaagatgtgaagtttgagaaagataagctttgtagtgcttgtcaagccggcaagcaagttgcatgttctcatcctactaagagtatcatgtccacatctagaccattggagctcttgcatatggaattttttggcccaacaacctataagagcattggtggtaatagtcattgtcttgtgattgttgatgattattctcgctatacttggatgttctttttgcatgataagtctattgttgccgagcttttcaaaaagtttgcaaaaaggggccaaaatgaatttaattgcactcttgtgaaaattagaagtgacaatggttccaagtttaagaataccaatatcgaggactattgtgatgatcttggtattaaacacgaactttccgctacctactcacctcaacaaaatggtgtagtggagatgaaaaatcgtacattgattgagatggcaaggactatgcttgatgaatatggtgtttccgactccttttgggcggaagccataaacaccgcttgccatgcaaccaataggctttatttgcatcgtctcttgaaaaagacttcctatgagctaattgttgggaggaagcctaatgttgcctattttcgagtttttggttgcaagtgttatatttaccgaaagggtgttagactaaccaaatttgaaagtcggtgtgatgaagggtttcttctaggttatgcctcaaatagcaaggcataccgggtctacaacaagaacaaaggtattgtggaagaaaccgccgatgttcaatttgatgagactaatggctcccaagaggggcatgagaatttggatgatgtaggtgatgaaggcttgatgagagctatgaagaacatgtcaattggagatgtcaagcctattgaagtggaagacaagccatccacctccactcaagatgagccatctacttccgctacgccaagtcaagctcaagttgaagtggaggaggagaaggcacaagatctacctatgccaccaaggatacacaccgctctttccaaggatcacccaattgaccaagtgttgggtgacattagtaagggtgttcaaactcgatctcgtgtcgcttcgatctgtgaacattactcgtttgtttcttgtcttgagccaaaacatgtagatgaagctctttgtgatccggattggataaatgctatgcataaagagctcaacaactttgcaagaaataaggtgtggactttggttgaaagacttagagaccacaatgtcatagggacaaagtgggtctttagaaacaaacaagatgagaacgggttggtggtgagaaacaaggcaagatttgtggcgcaaggtttcacacaagttgaaggtttggactttggtgaaacttttgcccccgtgacaagacttgaggctatttgcatccttcttgcatttgcatcatgctttaatataaaactatttcaaatggatgtgaaaagtgcttttctaaatggtgaaattgccgaacttgtctttgttgaacaacctcccggttttgaagatcctaaatatcctaaccatgtttataaactctcaaaagctctttatggtttaaaacaagctcctagagcttggtatgaaaggttgagagattttcttttgtcaaaggatttcaaaattggaaaagttgacaccacccttttcacaaaaatcattggtgatgatttctttgtgtgtcaaatttatgttgatgacatcatattcggttgtactaatgaggtattttgcaaggaatttggtgatatgatgtctagggaatttgagatgtccatgattggagagttgagcttcttccatggacttcaaatcaagcaactcaaggatgggacgtttggcttggaggatgcgaagcccatcaagacacctatggcaaccaacgggcatctcgaccttgatgagggaggtaaaccggtagatttaaaactttatcgttccatgattggtagcttgctttaccttactgcatctaggccggatatcatgtttagtgtttgcatgtgtgcacggtttcaagccgctcctaaggagtgtcacttagtggccgtgaaaaggattctaagatatttaaagcattcctcaactattggcttgtggtacccaaaaggtgctaaatttaagcttgttggctattccgattcggattatgccggttgcaaagtggatagaaagagcacatccggtagttgccaaatgcttggtagatcccttgtgtcatggtcatccaagaaacaaaacttcgtagccctctttatcgccgaggcggaatatgtttcggcgggtagttgttgtgcccaattgctttggatgaaacaaatcttgttggactatggcatatccttcactaaaaccccactcctatgtgaaaatgatagtgccataaagatagccaacaacccggtccaacattctagaaccaagcatattgacattcgccatcacttcctaagagaccatgttgccaagtgtgacatagtcattagccacataagaaccgaggaccaactagccgacatctttaccaagcctcttgatgaaacccgcttttgcaagttgaggaatgagttaaatctatgcctccccgcactcgccatggtcatcgtgagcccacgcccaatcccatcagtgagaatgaggaataaagcggagatgagtatgttcaaagtgaagatgaaaatatggaaaatgttcagggtgatgagatggaaggaagtgatgatggtgatgacaatgggagtggcaatgaggcctaacgattgtaatgatccaagatttcatacacggttccaaaagtccgtgtatgaacaagtgtatgccaacaaagccttcgccgaacacaagtggatttcttggaggcacattggtgagacaccggagtttgaagatttgcaagagatgttccggaccgttgggattgatagaattgtcaccatgaagcaaccttttgatgaagatctcatccggcaattctatgccacctggatgtcggggacccttcgatgctctatcaaccgccgtgaattcaaggagctcttgcacatccgcttcaacaacggggatgaccttcatgatgagcacacccacaaccccttctccattgatcacttttctcagttttatgaagaagggggaaggcacacatatggaaaggtggcgggtttgagggctctcccaagtgtgatcaaccgtatagtaagggccaccatcctcccaagatgcggcaacaatgatgacatacgcggagttgcttggcatgtcattgatgccattttggatggtcgtcggtttgatgttatcaaccttataatgaaggagattgccatctcaaaggggactattgaacaaggaatctattatgctccctacataatgaggttgattcaaagcaagttgggacaaattggtcacaatttaaaagaacataaggagtacaagcctcgtctccaactctccactcctagagctccttgtgtgcgccaaccaacttttgatcaaggtgcaagctcaagtgcagcccctcctcctcctcatgggtatgatccaagtgattttttccatccacaatatgcttattttggaatgcaacccaacgagtacttcaacccggtacttggggctattaataccctgagtgaaagcattcaacgcttgtctaccgggcatgaagctttgcatgaggatgttcgtggcttgcgcaccgatgttggcaacttgaatacttcggtgggaagattgcatactagggtgggtgtcttggattctcgagtccaaactttgaagagtacccaagcatttgtgtatcatcgtcgtcgtgatgctcatcatccttccacttcggcgcgtcctccttctccaccacaagaatga

SEQ ID NO: 44136 - DNA, 4931 bp, Oryza sativa
  Clone ID: PAT_MRT4530_47226C.1
attatgtgtgcgcatggatgtctacctatggattaaaaattgacggcacaaagctaaaggaagagaagacggtaaacttgtgttttcatttgaaattgattgaggctttgttcaactctttgagccaagaggaattcgatagagtgagcaaccttgagaccgcatatgagatttagaacaagttggcggagatccatgagggcacaagcgagtacaaggatgccaagcttcatttcctcaagatccaatatgagacattctccatgttgcctcattagagtgtgaatgacatgtatgggaggctcaatgtcattgtgaatgatcttaaggggcttggggcaaactacaccgattttgaggttgcccaaaagatgcttagggctctaccggagaagtatgagacccttgtcaccatgctcatcaactccgacatgtcaaggatgacacccgcaagcctcttggggaagatcaacaccaatgacatgtacaagttgaagaaggagatggaggaagcctcaccttccaagaagtgcattgctctccaagccgaagttgaagacaagggcaagggcaaggtgaataaagccaatgaggacttggaggaagagattgccctttttgctagaaggttcaatgatcacttgggaaggagaaaggagagaggaaggggctccaactccaataggagaagaaatagaagacccaacaagactctctccaacttgaggtgctttgagtgtggtgagaagggacactttgcttccaagtgcccttccaaggatgatgatggagacaagtcatccaagaagaagagtggaggctacgagctcatgaagaagctcaagaaggaaaggaagaagattgaggccttcatcggggaatgggactcaaatgaggagagcttagcctcatccaggtctgaggaagaaggtggtgatgatgcaagctccaagaagaagaagatggccgttgttaccatcaaggaggctccatcactcttcgctccactttgtctcatggcaaagggctcctctaaggtaacatctcttagtgatagtgagagtgatgataattgtgatgatgtttcctatgatgagcttgtgagtatgtttgaggagctccatgcttatagtgagaaggagattgcaagttcaaagccctaaagaaggatcatgcttctttggagatcttgtatgaggagctaaagacctctcatgagagactcatcatttctcatgagaagcttaaggaagctcatgacaacctcctttccactactcaacatggagctcgcattgatgttggcatatcttgtgatttgcttgatgatagtgctacttgctatattgctcatgttgcatcatctagcatttctacctcttgtgatgatcttgtggatatgcctagctctagctcttgtgtttcgatttgtgatgtctcacttgttgttgagaacaatgagcttaaggagcaagtggccaagctcaacaagagtttggagaggtgcttcaagggtaagaacactcttgacaagattttgagtgagcaacgatgcatccttagcaaggagggacttggattcattctaaagaagggtaagaaaccttctcaccgtgccactcgttttgtcaagagcaatggtaagtattgctccaagtgtcgtgaggttgggcatttggtgaatgattgccccggtggtaagctttctaagacatgcatgtttgattctcattatatgcttaggaaggctcatgatggtagtattgttgctagatatgtgggttcccctatacttggtggtaaaaagaataccatttgggtgtccaaagctttgatctctaacctccaaggacccaaatatgtttggattattctcgctatacttgggtgtttttttgcatgacaagtctattgttgccgagcttttcaaaaagtttgcaaaaagggcccaaaatgaatttaattgcactcttttgaaaattagaagtgacgatggttccgagtttaagaataccaatatcgaggactattgtgatgatcttggtattaaacacgaactttccgctacctactcacctcaacaaaatggtgtagtggagaggaaaaatcgtacattgattgagatggcaaggactatgcttaatgaatatggtgtttccgattccttttgggtggaagccataaacactgcttgccatgcaaccaataggctttatttgcatcgtcttttgaaaaagacttcctatgagctaattgttgggaggaagccaaatgttgcctattttcgagtttttggttgcaagtgttatatttactaaaaggatgttagactaaccaaatttgaaagtcggtgtgatgaagggtttcttctaggttatgcctcaaatacccgggtctacaacaagaacaaaggtgatgaaggcttgatgagagctatgaagaacatgtctattggagatgtcaagcctattgaagtggaagacaagccatccacctccactcaagatgagccatctacttccgcttcgccaagtcaagctcaagttgaagtggaggaggagaaggcacaagatccacctatgtcaccaaggatacacaccgctctttccaaggatcacccaattgatcaagcgtcgggtgacattagtaagggtgttcaaactcgatctcgtgttgcttcgatttgtgaacattactcgtttgtttcttgtcttgagccaaaacatgtagatgagctctttgtgatccggattggatgaattctatgcatgaagagctcaacaactttgcaagaaacaaggtgtggactttggttgaaagacctaaagaccacaatgtcatagggacaaagtgggtctttaggaacaaacaagatgagaacgggttggtggtgagaaacaaggcaagattggtggcgcaaggtttcacacaagttgaaggtttggactttggggaaactgttgcccccgtggcaagactagaggttattcgcatccttcttgcatttgcattatgctttgatataaaactatttcaaatggatgtgaaaagtgtttttctaaatggtgaaattgccgaacttgtctttgttgaacaacctcccggttttaaagatcctaaaaatcctaaccatgtttataaactatcaaaagctctttatggtttaaaacaagctcctagggcttggtatgaaagattgagagattttcttttgtcccgatacaccaaaagcacactttgtcgggttcatcttcaggccatatttcccggttctctcaaaaacctttctcaaatcggctatgtggtcttctatttctttagacttaacaaccacatcatcaatatagacttcaaccaaccagccgatcaaatcatgatatatatataattcatagctctttggtacgtgagccaaaccaagtatatcaaatcgtaagccaaaccaagtacatcaaggatctactcaagatgtttggcttggaggatgcgaagcccatcaagacacctatggcaaccaacgcacatctcgttccatgataggtagcttgctttaccttaccgcatctaggccggatatcatgtttagtgtttgcatttgtgcacggtttcaagccgctcctaaggagtgtcacttagtggcctacccaaaaggtgctaagtttaagcttgttggctattccgattcggattatgccggttgcaaagtggatagaaagaacacatccggtagttgccaaatgcttgctatgcctccccacactcgccatggtcgtcgtgagcccacgcccaatcccatcagtgagaatgaggaatcaagcggagatgatatgttcaaagtgaggatgaaaatatggaaaatgttgagggggatgaggtggaagtaagtggtgatgacaatggcagtgatggtggtgatgtcaatggcagtggcgatggtgaggatgatgaggcaagtgatgatgggagtcctctcgatcccaccatccattttgtgctcaatttgaggaatgcccagcaatacactatccttcgtcatctgatcaattccggaggcctaatgattgcaatgatccaagattccatacacggttccaaaaatccgtatatgagcaagtatatgccaacaaagccttcaccgaacacaagtggatttcttggaggcacattggtgagacaccggagtttgtggatttgcaagagatgttctgggccgttgggattgataggattgtcaccatgaagcaaccctttgatgaagatctcattcggcaattttatgccaccgtgtgggtgtccggcgattgtgatgctatgaagtggatgtcggggacccttcggtgctctatcaaccgccgtgaattcaaggagctcttgcacatttgcttcaacaacggggatgacctccatgatgagcacaaccacaaccccttcatgattgattacttttctcagttctatgaagaagggggaaggcacacatatggaaaggtggggggtttgagggctatcccaagtgtaatcaaccgcatagtgagggccaccattctcccaagatgtggtaacaatgatgacatacgcggcgttgcatggcatgtcattgatgccatcatggatgatcgtcggtttgatgtcatcaaccttatgatgaaggagatagccatttccaaggggactattggacaaggagtttactatgccctctacataatgaggttgccgcctcctagacggcttgtggaggagttgcccggtgacctctccgagaagattatggaggaggcccggtgccggtttgtgagtggtttggagttcaccaccttcggagtgaaggaagaactaccctagtgatcgaggcttgggtagtcctcttcgtgggccggctcccgccttgcccaccccttgacgaagggggcgtgcggtggcttcgtggt

SEQ ID NO: 44137 - DNA, 4428 bp, Oryza sativa
  Clone ID: PAT_MRT4530_47227C.1
atgtcgaacgaggtgaaccatgtagggaaggctcccatgtttaatggcacaaactactccacttggaaaattaaaatgtctactcacctcaaagctatgagcttctatatttggagtattgtggatgtaggctttgctatcaccggcacacccttgacggagattgatcaccgcaacctccaactcaatgcccaagccatgaatgccttgttcaactctttgagccaagaggagttcgatagagtgagcaaccttgagaccgcatatgagatttggaacaagttggcggagatccatgagggtacaagtgagtacaaggatgccaagcttcattttctcaagatccaatatgagacattctccatgttgcctcatgagagtgtgaatgacatgtatgggaggctcaatgtcattgtgaatgatctcaaggggcttggggcaaactacaccgatcttgaggttgcccaaaagatgcttagagccctatcagagaagtatgagacccttgtcaccatgctcatcaactccgacatgtcaagaatgacacccgcaagcctcttggggaagatcaacaccaatgacatgtacaagttgaagaagaaggagatgaaggaagcctcaccctccaagaagtgcattgctctccaagccgaagttgaagacaagagcaagagcaaggtgaatgaagtcaatgaggacttggaggaagagatggtccttcttgctagaaagttcaatgatctcttgggaaggagaaaggagagaggaaggggctccaactcaaataggagaagaaatagaagacccaacaagactctctccaacttaaggtgttttgagtgtggtgagaagggacactttgcttccaagtgcccttccaaggatgatgatggagacaagtcatccaagaagaagagtggaggctacaagctcatgaagaagcttaagaaggaagggaagaagattgaggctttcatcggggaatgggactcaaatgaggagagctccgcctcatccgggttcgaggaacaatgtagtgatgatgcaagctccaagaagaagaagatggctgttgttgccatcaaggaggctccatcactcttcgctccactttgtctcatggcaaagggctcctctaaagtaacatcccttagtgatagtgagagtgatgatgattgtgatgatgtttcctatgatgagcttgtgagtatgtttgaggagctccatgcttatagtgagaaggagattgtcaagttcaaggccctaaagaaggatcatgcttctttggaggtcttgtatgaggagttaaagacctctcatgagagactcaccatttctcatgagaagcttaaggaagctcatgacaacctcctttccactactcaacatggagctcacattgatattggcatatcttgtaatttgcttgatgatagtgctacttgccatattgctcatgttgcatcatctagcatttctacctcttgtgatgatcttatggatatgcctagccctagctctagctctagctcttgtgtttctatttgtgatgcctcacttattgttgagaacaatgagcttaagagggacttagattcattccaaagaagggtaagaaaccttctcaccatgccactcgttttgtcaagagcaatggtgaactaccgcaccggtgggagccattgggtgcttgatagtggatgcactcaacacatgaccggtgatagggctatgttcaccatatttgaagtaggagggcatgaacaagagaaagtgacatttggagacaatagcaaaggaaagcttttcaaaaagtttgcaaaaagggcccaaaatgaatttagttgcactcttgtgaaaattagaagtgacaatggttccgaatttaagaataccaatatcgaggactattgtgatgatcttggtatcaaacacgaactttccgctacctactcacctcaacaaaatggtgtagtggaaaggctttatttgcatcgtctcttgaaaaagacttcctatgagctaattgttgggaggaagccaaatgttgcctattttcgagtttttggttgcaagtgttatatttaccgaaagggtgttagactaaccaaatttgaaagtcggtgtgatgaagggtttcttctaggttatgcctcaaatagcaaggcataccgggtctacaacaagaacaaaggtattgtggaagaaaccgccgatgttcaatttgatgagactaatggctcccaagaggggcacgagaatttggatgatgtaggtgatgaaggcttgatgagagctatgaagaacatgcctattggagatgtcaagcctattgaagtggaagacaagtcatccacctccactcaagatgagccatctacttccgcttcgccaagtcaagctcaagttgaagtggaggaggagaaggcacaagatccacctatgcctccaagaatacacaccgctctttccaaggatcactcaattgaccaagtgttgggtgacattaatgaagctctttgtaatccggattggatgaatgctatgcatgaagagctcaacaactttgcaagaaacaaggtgtggactttggttgaaagacctagagaccacaatgtcatagggacaaagtggatctttaggaacaaacaagatgagaacggattggtggtgagaaacaaggcaaggttggtggcgcaaggtttcacacaagttgaaggtttggactttggtgaaacttttgcccccgtggcaagacttgaggctattcgcattcttcttgcatttacatcatgctttgatataaaactatttcaaatggatgtgaaaagtgcttttctaaatggtgaaattgccgaacttgtctttgttgaacaacctcccggttttgaagatcctaaaaatcctaaccatgtttacaaactctcaaaagctctttatggtttaaaacaagctcctagggcttggtatgaaatattgagagattttcttttgtcaaaggatttcaaaattggaaaagttgacaccactcttttcacaaaaatcattggtgatgatttctttgtgtgtcaaatttatgttgatgacatcatattcggttctactaatgaggtattttgcaaggaatttggtgatatgatgtctagggaatttgagatgtccatgattggagagttgagcttcttccttggacttcaaatcaagcaactcaaggatgggacgttcgtgagccaaaccaagtacatcaaggatctactcaagaggtttggcttggaagatgcgaagcccatcaagacacctatggcaaccaacgggcatcttgaccttgatgagggagctatgcctccccgtactcgccatagtcgtcgtgagcccacgcccgatcccgtcagtgagaatgaggattcaagcggagatgagtatgttcaaagtgatgatgacaatatggaaaatgttgagggtgatgagatagaatccgtgtatgcacaagtgtatgccaacaaagccttcgccgaacacaagtggatttcttggaggcacattggtgagacaccggagtttgagaatttgcaagagatgttccagaccgttgggattgatagaattgtcaccatgaagcaaccttttgatgaagatctcatccagcaattctatgccaccgtatgggtgtccggcaattgtgatgcaatgaagtggatgtcggggagcctccgatgctctatcaaccgccgtgaattcaaggagctcttgcacattcgcttcaacaacggggatgaccttcatgatgagcacacccacaaccccttccccattgatcacttttctcagttttatgaagaagggggaaggcacacattggaaaggtggcgggagattgccatctcaaagggaactattggacaaggaatctattatgctccctacataatgaggttgattcaaagcaagttgggacaaattggtcacaatttaaaagaacataaggagtacaagcctcgtctccaactctcctcccctagagctcctcgtgtgcgccaaccaacttttgatcaaggtgcaagctcaagtgtagtccctcctcctcctcctcatgggtatgatccaagtgcgtttttccatccacaatatgcttactttggaatgcaacccaacgagtacttcaacccggtacttggggctattaataccctaagtgaaagcattcaacgcttatccaccgggcatgaagcattacatgaggatgttcgtggcttgcgcaccgatgttggcaacttaaatacttcggtgggaagattgcatgctagggtgggtgtattggattctcgagtccaaaccttggagagtacccaagcttttgtctatcatcgccgccatgatgcttctcatccttccacttcggcgcgtcctccttctcctccacaagagtga

SEQ ID NO: 44138 - DNA, 4382 bp, Oryza sativa
  Clone ID: PAT_MRT4530_47228C.1
cagatcggcagagcacaaagttgggggatttcgcctccaacggctagttttggttggtgggagtataaatactccccctccagcagcaagggggctctcttggcacccaattcaattgcatacaccccttgcacatctctcacacccacttgagctttgtgttcatccatctagtgtgttagagggttaattagccaagagtcaagtgcattgcttccatttgtagagctagtgtggcacttgattgatcatctccatgccgggtcattgctcgttactcttggaggttgccgcctcctagacggcttgtggaggagttgcccagtgacctctccgagaagattatggaagaggcccggcgccggctttactatcaccggcacgcccttgacggagattgatcaccgcaacctccaactctatgcccaagccatgaatgctttgttcaactctttgagccaagaggagttcgatagagtgagcaaccttgagaccgcatatgagatttggaacaagttggccgagatccatgagggcacaagcgagtacaaggatgccaagcttcatttcctcaagatccaatatgagacattctccatgttgcctcatgagagtgtgaatgacatgtatgggaggctcaatgtcattgtgaatgatctcaaggggcttggggtaaactacaccgatcttgagattgcccaaaagatgcttagggctctaccggagaagtatgagacacttgtcaccatgctcatcaactccgacatgtcaaggatgaaacccgcaagcctcttggggaagatcaacaccaatgacatgtacaagttgaagaagaaggagatggatgaagcctcaccttccaagaagtgcattgctctccaagccgaagttgaagataagggcaagggcaaagagagatgaatgggctctaactcaaataggagaagaaatagaagacccaacaagactctctccaacttgaggtgcttgagtgtggtgagaagggacactttgctttaagaataccaatatcgaggactattgtgatgatcttggtattaaacataaactttccgctacctactcacctcaacaaaatggtatagtggagaggaaaaatcgtacattgattgagatggcaaggactatgcttgatgaatatggtgttttcgattccttttgggcggaagccataaacaccgcttgccatacaaccaataggttttatttgcatcgtctctttaaaaagacttcctatgagctaattgttgggaggaagcctaatgttgcctattttcgagtttttggttgcaagtgttatatttaccgaaatggtgttagactaaccaaatttgaaagtcggtgtgatgaagggtttcttctaggttatgcctcaaatagcaaggtataccgggtctacaacaagaacaaaggtattgtggaagaaaccgccgatgttcaatttgatgagactaatggctcccaagaggggcacgagaatttggatgatgtaggtgatgaaggcttgatgagagctatgaagaacatgtctattggagatgtcaagcctattgaagtggaagacaagccatccacctccactcaagatgagccatctacttccgctatgccaagtcaagctcaagttgaagtggaagaggagaaggcacaagatccacctatgccaccaaggatacacaccgctctttccaaggatcacccaattgaccaagtgttgggtgacattagtaagggtgttcaaactcgatctcgtgtcgcttcgatttgtgaacattactcgtttgtttcttgtcttgagccaaaacatgtagatgaatctcattgtgatccggattggatgaatgctatgcatgaagagctcaacaattttgcaagaaacaaggtgtggactttggttgaaagacctagagaccacaatgtcatagggacaaagtgggtctttaggaacaaacaagatgagaacgggttggtggtaagaaacaaggcaaggttggtggcacaaggtttcacacaagttgaaggtttggattttgttgaaacttttgcccccgtggcaagacttgaggctattcgcatccttcttgcatttgcatcatgctttgatataaaactatttcaaatggatgtgaaaagtgcttttttaaatggtgaaattgccgaacttatctttgttgaacaaccttccggttttgaagatcctaaaaatcctaaccatgtttaaaacaagctcctagggtttggtatgaaagattgagagattttattttgtcaaaggatttcaaaattggaaaagttgacaccacccttttcacaaaaatcattggtgatgatttctttgtgtgtcaaatttatgttgatgacatcatattcggttctactaatgaggtattttgcaaggaatttggtgatatgatgtctagggaatttgagatgtccatgatcggagaattgagcttcttacttggacttcaaatcaagcaactcaaggatgggacgttcgtaagccaaaccaagtacatcaaggatctactcaagaggtttggcttggaggatgcaaagcccatcaagacacctatggcaaccaacgggcatctcgaccttgatgagggaggtaaaccggtagatttaaagctttatcgttctatgattggtatcttgctttaccttaccgcatctaggccggatatcatgtttagtgtttgcatgtgtgcacgattttaagccgctcctaaggagtgtcacttagtggccgtgaaaaggattctaagatatttaaagcattcctctactattggcttgtggtacccaaaaggtgctaagtttaagcttgttggctattccgattcggattatgccggttgcaaagtggatagaaagagcacatccagtagttgccaaatgcttggtagatcccttgtgtcatggtcatccaagaaacaaaactctgtagccctctctaccaccgaggcggaatatatttcggcgggtagttgttgtgcccaattgctttggctgaaacttttggccaaaatgagattgagaaggaatttgagaaaaatttcaaaacaaatttgtggcggtctgaccggccccaaagtgtcggtctgaccgaattgaggccggcggtctgaccggccatgggtcgtcagtctaaccgacttgaggccggcggtgatgcctccccgcactcatcatggtcgtcgtgagcccacggccgatcccgtgagtgaggagtcaagcggagatgagtacgctcaaagtgatgaagaggttgaggccaatgttgagggggctagtgaggaggaaagtggagatgatgtcagtggaagtggagaggatgaggatgaaggaagtgatgatatgcacattgatccctccatccagtttgttgtgaacatgagtaatccatcgcaatataccatcttgaggcaccatgatcagtttttgaggcctcgggacaccccggatccccgttttcacattgctttccagaagatgtgggtcgctggagactatagtgagatgaagtggatgtccgacaccctccagtgttctatctctaggtggcaattccgatggctcctcaatatgaggagcacacccacaatccgctcttcatagactatctctctcagttttatgaagatggagtgcggtacacatatgggaaggttgccagcttgaggactatccccagtgtggttaacaggattgtgagagctaccatcctccgtcgccttggcaacaatgatgacattagggggggtggcttggcacgtcatcgatggaattatttagggccgtcagttcgacattgtgtctctcatgatgcaagagattgccatctccaagaggaccttcactcagggaatctattatgccccttacatcatgaggttgattcaagacaagctttgaagaagcacaagcagtacaagccccgccttcagcttggagctccccgtgctcctagggtggcgccctcctctcatcctggagctagctcaagctcagcacctcctcctcctcctgggtatgatccaaatgctttcttccatccacagtatgcttattttggaatgcaacccaacgagtacttcaacccggtacttggggctattaatcccctaagtgaaagcattcaacgcttgtctaccgggcatgaagctttgcatgaggatgttcgtggcttgcgcacggatgttggagacttgaatgcttccatggggagattgcacactagagtgggtgcattggattctcgagtccaaatgttgaagagctcccaagcatttgtgtatgatcgtcgtcgtgatgctactcatccttccacttcggcgcgtcctccttctcctccacaa

SEQ ID NO: 44139 - DNA, 183 bp, Oryza sativa
  Clone ID: PAT_MRT4530_47229C.1
atggctatcaccacctgctgcctccctcacttccaggaagcacacaacaaacgaagctgccacgtgcaagggggtggccagggtgccatgtttggttcagccgaaccaggccgccaccttcagccatcgaccttcttcaaggaggttggcatgtggggccttatggcgatgcactgtggataa

SEQ ID NO: 44140 - DNA, 1314 bp, Oryza sativa
  Clone ID: PAT_MRT4530_4722C.1
ctggaggcgcctcctcggcgggcgagtgcgctcccctcgcctctttgtgtttttttttttatcaataatgaggctgagaataaatgaccacaagcaatttttaacaaactacaagagtacatgtttgacacaaatacacaattcaaatctaaaacactaaagagtccagtacaggtgcacttagaagggcttgaagaagcataagctattacagttagtttctactactaacagaaaatctagaattgatgccattgacatacaccaaacaacacattaaagaccctaaagctggtcctaaactgaaaaccaacagctgaatgcatatccattgggcattctatctcatgagggtctttacagcgagtcaaattcttggttcttcagacataagccatagagggatccaccatcaagctctggctctcttgctactactgctgcagttcgggcacttgtagtgcttgatgtgctcagccttggcaggggttatcttgacacacttaccgtggaaccatgtctcacaagcatcgcagcagatccagaactcatcctgtccatagttgtcaccacatgcaccacataatgtgttttcgtgatcttcttcttcctcctcttcctcacctccgctatcatcctcatccttcggaggtggcatctttggacccctagagttgggttccggctggcgcgatggcttcgtgccggatttattgctcttgccactggtcttgggggttttttctttgctctgcttctttgcagtcccagtgacaacctcatatatggttggaaggttgttaatcatgctaaaaagccgtttcctggattctttgtcaaacccgaatcttgctccaaagtaaaaggctactgctagcagccaggtatcactatgaaccgcaacaagtgacagccagtctttctcatccatcccatcccgagcaaaattaattcccagagctggttctggaagctctggaggaacctcctcagcaggcaagttcacttcccatgtctcattgggaagaccatataaacacaaattctctttctctgggtcgcactgctggtagaacttctccacatctgtggtcagcgccttgatcatcccggcccgccgcgcgcggaagtcccggaacacgtcctccggcgtgcggtgcgccccgcctccgtccattccacccaccaccaccaccaccccaccgccgccgcgccctcctcctccgccgctcccgcccgccgctagggttagggttttggaagagagagagatagagagagcgcaaagcgaagcacaaaaaaaaaaagcttacc

SEQ ID NO: 44141 - DNA, 377 bp, Oryza sativa
  Clone ID: PAT_MRT4530_47230C.1
cccacgcgtccgcggacgcgtgggcaagcattatacaacaaaaatttaaaagaactaatgtcctgcaacaatgaagatcattttcgtctttgctctccttgctattgctgcatgcagcgccactgcgcagtttgatgttttaggtcaaaatattaagcaatatcaagtgcagtcgcctcttctgctatagcaacaagtgcttagcccatataatgagttccctaggcagcactatatcattgcggcaagccccctcttgcaatcaactgcgtgtcaagtgagaaaaaaccaaatcttgctacaacctccgctagggggcgccacaatcttactaccaggacactaacatttgccaggccataacacatcatttcccc

SEQ ID NO: 44142 - DNA, 3026 bp, Oryza sativa
  Clone ID: PAT_MRT4530_47231C.1
atgtcgaacgaggtgaaccatgtagggaaggctcccatgtttaatggcacaaactactccacttggaaaattaaaatgtctactcacctcaaagctatgagtttccatatttggagtattgtggatgtaggctttactatcaccgacacgcccttgacggagattgatcaccacaacctccaactcaatgcccaagctatgaatgctttgttcaactctttgagccaagaggagttcgatagagtgagcaaccttaagaccgcatatgagatttggaacaagttggcggagatccatgagggcacaagcgagtacaaggatgccaagcttcatttcctaaagatccaatatgagacattctccatgctcaatgtcattgtgaatgatctcaaggggcttggggcaaactacatcgatcttgaggttgcccaaaagatgcttagacctctaccggagaagtatgagacccttgtcaccatgctcatcaactccgacatgtcaaggatgacactcgcaagcctcttggggaagatcaacaccaatgacatgtacaagttgaagaaggaggagatgaaggaagcctcaccttccaagaagtgcattgctctccaagccgaagttgaagacaagggcaagggcaaggtaaatgaagccaatgaggacttggaggaagagattgcccttcttgctagaaggttcaatgatctcttgggaaggagaaaggagagaggaagaggctctaactccaataggagaagaaatagaagacccaagaagactctctccaacttgagctccaagaagaagaagatggccgttgttgccatcaaggaggctccatcactctttgctccactttgtctcatggcaaagggctcctctaaggtaatatctcttagtgatggtgggagtgatgatgattgtgatgatgtttcctatgatgagcttgtgagtatgtttgaggagctctatgcttatagtgagaaggagattgtcaagttcaaggatctaaagaaggatcatgcttctttggaggtcttgtatgaggagctaaagacttctcatgagagactcaccatttctcatgagaagcttaaggaagctcatgacaacctcctttccactacttaacatagagctctcattgatgttggcatatcttgtgatttgcttgatgatagtgctacttgccatattgctcatgttgcatcatctagcatttctacctcttttaatgatcttgtggatatgcctagctctggctctagcccttgtgtttctatttgtgatgcctcacttgttgttgagaacaataagcttaaggagtgtcgtgaggttgggcatttggtgaatgattgccccggtagtaagccccctaagacatgcatgtttgattcccattatatgcttaggaaggcttatgatggtagcattgttgctagatatgtggattcccctatactcggtggtaaaaagaatgccatttgggtgcccaaagctttagtctctaatctccaaagacccaaacaagtttgggtgaactaccgcaccggtgggagcctgtcacaccctgaagttcttttcccaagcctaaattgaatatttaattggcctcaagaaaatatcggtgtaaaagcaagagagaaaccctaaataaattaatgcgaataatagtcggaattggcatgtgggacagagccattggatgcttgatagtggatgcacttaacacatgaccggtgatagggctatgttcaccacatttgaagtaggagggaatgaacaagagaaagtgacttttgaagacaatagcaaaggaaaggtaattgggaggctagcccatgttggcatgaatcaattgagcaaactttcaaaatgtgatctagttgtgggcttgaaagatgtgaagtttgagaaagataagctttgtagtgcttgtcaagccggcaagcaagttgcatgttctcatcctactaaaagtatcatgtccacatctagaccattggagctcttgcatatggatttgtttggcccaacaacctataagagcattggtggaaatagtcattgtcttgtgattgttgatgattattctcgctatacttgggtgttctttttgcatgataagtctattgttgccgagcttttcaaaaagtttgcaaaaaaggcccaaaatgaatttagttgcactcttgtgaaaattagaagtgacaatggttccgagtttaagaataccaatatcgaggactattgtgatgatcttggtattaaacacgaactttccgctacctactcacctcaacaaaatggtgtagtggagaggaaaaatcgtacattgattgagatggcaaggactatgcttgatgaatatggtgtttccgatttcttttgggcggaagccataaataccgcttgccatgcaatcaataggctttatttgcatcgtctcttgaaaaagacttcctatgagctaattgttgggaggaagccaaatgttgcctattttcgagtttttggttgcaagtgttatatttatcgaaagggtgttagactaaccaaatttgaaagtcggtgtgatgaagggtttcttctaggttatgcctcaaatagcaaggcataccgggtctacaacaagaacaaaggtattgtggaagaaaccgccgatgttcaatttgatgagactaatggctcccaagaggggcacgagaatttggatgatgtaggtgatgaaggcttgatgagagctatgaagaacatgtcaattggagatgtcaagcctattgaagtagaagacaagccatccacctccactcaagatgagccatctacttccgctacgccaagtcaagctcaagttgaagtggaggaggagaaggcacaaaatccacctatgccaccaaggatacacaccgttctttccaaggatcacccaattgactaagtgttgggtgacattagtaagggtgttcaaactcgatctcgtgtcgcttcgatttgtgaacattactcgtttgtttcttgtcttg

SEQ ID NO: 44143 - DNA, 1464 bp, Oryza sativa
  Clone ID: PAT_MRT4530_47232C.1
atggctcgctccggcgattgctgccccgtctgcgccgcccccatcgccagcctcatccgggagtacaatgtcctggtggataccaccggagagaagcaatatacgatcggcaaattcaccaccggtgtgccgcccttctccgatagggagaatgcggggagccgcagctggtctcttcatcccgagggacagcaaggacggcaacctaccggcaatatatgggagaattgcagcaacagaaagtcatgtattttggaagatgatacaggtgactatcagtaccaaggtcaaattcagggcttacaatctgcagcctcgacatattatttgttgatgatgcatggcaaggatgtacacgctgttcccgctgattcctggtataacttcagtaaaatttcacagtacaaacagctgactttggaagaagctgaagagaagatgagcaggaggagaagcacagcaactgggtatggacggtggatgatgaaggcggctacaaatggagctgctgcttttagttcagatgtgacgcagctcgatgatgctaatgaaggagaaacagatcaggttcacctgaagaaaggcaacaagaatggggatgaaaataaatctgataaaggcagtggggaagaaagagcgcatgtgcctatgacaaagggtagggaggaggaaggtagtaaagacagagactttgatttggatgatgaaattgaaaagggtgatgattgggaacatgaagagatctttactgatgatgatgaagctgtggacgttgacccagaggaaggaggtgatttagctgatcctgaaatccctgctccaccagaaattaagcaggatgataatgagaaacatggaggggtaggcctgagcaaatctggtaaggaactaaagaagttgctccgccgtgccgcgggacaaaacgagtctgatgatgacgatgaagacacggatgaagatgagtcaccatcgccagtacttgctccgaaacagcaggatcaactcaaaagtgaaccacaggaagacaaccattctaaaccaacagttctcggacatccttatagcactccacatgtttccaaatccaatcaaaagaggagacaaaggggtgatgattcaaaaacttgtgctacccctaaaaagccgaagatagagcctgataccaagaagatagtcgtgaaggaggagacctcgtgttccttggaaccaacttcagaaccatttgcctcagcgagaagtgatacaaatgtatctcctattacagtggaggaaatcagggtggtacttcgtttatatgcacctatcgcaatgcgagatttttcaaaagattttatgcccagattttcgcctcgactaagaagtccagaggacagggaagtttttctcgccaatctgaggaaaatctcacacctgcagaagatcaatggccagaagtacatcatccttctagaggaatataaataa

SEQ ID NO: 44144 - DNA, 696 bp, Oryza sativa
  Clone ID: PAT_MRT4530_47233C.1
atgtcgaacgagatgaaccatgtagggaaggctcccatgttcaatggaacaaactactccaattggaaaattagaatgtccgaagaagaaggtgatgatgatgcaagctccaagaagaagaagatggccgttgttgctagcaaggaggctccatcactcttcgctccactttgtctcatcgcaaagggctcttctaaggagattgtcaagttcaacgccctaaaaaaggatcatgcttctttggaggtcttgtatgaggagctaaagacttcacatgagagactcaccatttctcatgagaagcttaactcttgtgtttctatttgtgatacctcacttgttgttgagaacgatgagcttaaggagcaagtggccaagctcaacaagagtttggagaggtggttcaagggtaagaacactcttgacaagattttgagtgagcaacggtgcatccttaacaaggagagagttggattcattccaaagaaggggtttttagatttatatttgagtgatgcggaccacctcccacctcggcgccacctccttcggcttcgccgcatcctcaccgacctcgtccacccctccgtttcgctcgtcgaccgccggagcgccgccgtccccgtcgacccgagccgcgccgccgccttcatccgctccggctgccttttcgtcgtcgccgtcgaccaagggtga

SEQ ID NO: 44145 - DNA, 3299 bp, Oryza sativa
  Clone ID: PAT_MRT4530_47234C.1
ggagtttgccagtcaattctccatgattgcaaattgacattccttcagataatatgtgaccatgatctttttgttgagatgcctggtcgtgacccctctgatagaaattatctctcgtcagtacttattcaagagatttttctcacccttgaccatgatgatctatctcagcgagcgaaagcagcccgtattttggttgttctaatatgcaagcatgaatttgatgcacgatatcaaaaaagtgaagacaagctgtatattgctcagctgtatttttctcttataggacagattctagatgagatgcctgtattctataatctaaatgctgttgaaaagcgtgaggtgctggtagtcattttgcaaatcataaggaacttggacgacatgactctgatcaaagcatggcaacagagcattgctagaaccagattgttcttcaagctacttgaagaatgcattacccattttgagcacaacaaaacaggagacagcttgttactaggctcaagttcacggagccctgatgctgagcgccctgcatctccaaagtactccgatcgattatccccatcagttaatgcatatttgtctgaggcatcacgccatgaaataaggcctcagggaacaccagaaaatggatacatgtggaacagggttagtcctcaactgagctctcctaaccagccctattcattgagagaagcacttgctcaagcgcagtcttcaaggattggatcaaccgcgagggcactgagagaatctctacatccagtgctgagacaaaagttggaactgtgggaagaaaatctcagtactgctgtgagcctggaagtgttgggaataattgataagttttcagtcgctgcagcttctcgtagcatcactactgattacgcaaagctagattgtgtaacatctgtattaatgggtcttttatcaaggagccagcccttagctttttggaaagctttccttcctgtggtgtataatatatttaacctccatggcgcaacactgatggcaagggagaatgatcgcttcttgaagcaaattgcttttcatcttttgcgccttgctgttttccggaatgattctattagaaaaagggctgttgtcgggttgcagattcttgttaggaactcgtttaattattttaagaacaccacaaggttgagggtgatgttgacaatcactttgtcagaacttatgtctgatgtgcaagtaactcagatgaaatctgatggctctcttgaggaaagtggtgaaactcggcgccttaggaaatcactagaggaaatggctgatgtacgaagtaaggatctcttgaaagattgtggcctccctgttaatgcactggaggcagcgcctgaaggttcgactgataataggtggtcttgggtagaagttaaacatctatccaaatgtctagtccaggcccttgatgctggtcttgaacatgccctcttgggctctgaaatgactctggacaggtacgcggctgctgagggtttctataagctagcaatggcctacgcgcctgtgccagatcttcatataatgtggttactgcatctatgtgatgcacatcaggagatgcaatcatgggctgaagctgcacaatgtgcagttgctgtagctggtgttatcatgcaggcacttgttggaaggaatgatgcggtgtggagcaaggagcatgttgcttccctatgtaagatttgccctattgtgaacactgatgttagctcagaagcatctgcagcagaagttgagggatatggtgcatccaagcttactgtggattcagctgtcaagtatcttcagctggcaaacaaactttttgcacaagccgaactctatcacttttgtgctagtattcaggaactcatcattcctgtgtataaaagcagaagggcatatgggcatctggctaagtgtcatacatcactcaaggatatctatgagtcaattcttgaacaggaggctagtcctataccattcattgatgctacctactaccgggtagggttttatggggagcggtttggcaaactcaacaaaaaggagtatgtgttcagagagccaagagatgttcgtcttggtgacataatggagaagcttagtcatatctatgaggctaaaatggatggcaatcacaccttacacatcattccggattcgagacaagtcaacgctgatgagttgcaacctggtgtctgctatctgcagataactgctgttgatcctgtaatggaggatgaggacctagggagtagaagggaaaggattttctctttatctactggtactgtccgggcccgtgtgttcgaccgttttctttttgatacaccattcacaaagaatggaaaaacacaaggtggccttgaagatcagtggaagaggcgcacagtactccagacagagggttcctttcctgctttggtgaatcgtctgttagtgatcaaatcagaatctctagagttttctcctgttgagaatgcgattggaatgatcgagacaaggacagctgccttgcgaaatgaactagaagaaccacgcagttcggaaggtgaccaactcccaagactccaaagcctgcagaggatactccaaggaagtgtggctgttcaggtaaatagtggtgtattaagtgtgtgcactgcattcttatctggtgagcccgcaactaggctccgatctcaagaactgcagcagctcatcgctgcattgctggaattcatggccgtctgcaagcgcgcaatccgtgtgcattttagattgataggggaagaagaccaggaattccacactcaactagtcaatggctttcagtcgctcacagctgagctttcacactatattcctgcaattctttcagagctataactgtattctagcaagctggcaagtaggtagcatttgaatggttcattctttcagttggggctccccaccttgtccataattccgttagtttggttgtatagttctggaaaactaactaggcttttcaattctgttctgtttgcaatgccgtgccacgattttgggggtgtaaagcttgtgtaatccttagtgtgttgtatctctattaccttgtttatgcggtttgtagactaatagcaagctatatagcagtaactattcgagtggacagttgtgttcatctggagtgataaaaaaaggaaaagaaaaaaggtgttctttccttcccaaaaaaaaaaaaaaaaaaaaaaactaaaaaaaaaaaaacaaaaaaaaaaaaggacgcgcgccgaacaagagtgatacaagctgac

SEQ ID NO: 44146 - DNA, 1335 bp, Oryza sativa
  Clone ID: PAT_MRT4530_47235C.1
atggcacgaaccccacgcaagcgccgccgccgccgcggcggagggggccacgactacctctccggcctccccgacgacgtcatcctcgccatcctctcccgcctcacgacccgccaggccgtcacgctctccgccctctcccgccgcttccgcgtcctcccgtcccagttcggccgcgtcgactccgcgctcgtcgccgacccggccctgccgctcccgtcgctccccgcgcggccgtccttcatccgccgcctctccttcgccccccagacccgccggttctcctcctccgcgttcggccgcctcctcgacgccgccgccgaccgcggcctctccgagctcgccgtccgcctgccccgcagcgcgttccttccccagaacctcctctccatccgctccctcaccgtggtctccctcgactcctgcgcgctcccgcgatggtgccccgccgcgtgccctggcctccgcacgctcaagctccaccacgttgccatcccgcagcggatgatcagcgtcatcctcaaggccgcgcccgtgctcgagacgctggagatggtgtactgcatgggattcgccggcagctgcagtatggagtcctccacggtgaggaacctcctgtttaagtcggctctggagcagcgtgaggtcacggtgaaaatggcgggtctgaggacgatcacgctgtacacgcgccccaaggtgcagtcggttcggctggatcctgcaccggaaatcaggaaggcatacctgcacatcgccaggccgcgcgtcaaactgcagttcaggatacggccgttcttggatgctggcacggggttgacctgcctcacgctcaggggcatggccatcaagttgttgtcatctgaatataaagacactccaaacttggctgtacaatttgaagacttgagaatactgtcagtgagcttggatttctcaaatgaaagagaactcatcttccttctgaagctgcttgagagttgccccaacctgcaacagttgactctttcggctgttgatgcaaaagacgacactgcattgccaaattttgctgatcatgaggagaggctttcaaagttatcatgcctaactaagagtttggagcagctcaagtttcttggattcaggcctcaacggtaccagaaggaactctttatctttctgctaactcaagcaacgaacctgaagaagatggcggtggagttcccgaaagaccaagaagctgctgtgaggagaattttgtcagtgaggaaagcccccactcagaagaaaactaccaagtacaaacaatactacttggagttagagtatcctgtggagcccaactgctcatag

SEQ ID NO: 44147 - DNA, 114 bp, Oryza sativa
  Clone ID: PAT_MRT4530_47236C.1
atggcatccatccttgcagtttctgtctcactaggaactcgtgatcagtggtcactggtgagtccagtcacctttgacgggtggccggtcgtcacaggtgacacccacctctga

SEQ ID NO: 44148 - DNA, 488 bp, Oryza sativa
  Clone ID: PAT_MRT4530_47237C.1
atgttttagaccggaattaaaaagttcaaaaagcagcaaaacatgatttttggacatattggagtgtgttgggtgcattcgtggcaaaacttcacttcgtgattcacgcggcgaacttttatcaattactgccaatattggcacacgtgggtgcaatgttttagaccggaattaaaaagttcaaaaagcaccaaaacatgatttttggacatattggagtgtgttgggtgcattcgtggctaaacatcacttcgtgattcacgcggcgaacttttatcaattactgccaatattggctcacgtgggtccgatgttttagaccagaatgaaaaagttcaaaaagcaccaaaacatgatttttgaacatattggagtgtgttgggtgcattcgcggctaaaaatcatttcgtgattcgcgtggcgaactttttgggagtgttcgtgggaaaaaatcacttcgtgattcgcgcagcgaacttttgtcaatt

SEQ ID NO: 44149 - DNA, 564 bp, Oryza sativa
  Clone ID: PAT_MRT4530_47238C.1
atgggggtcgacatgtcgcagcagagaaggagaaccttcttgctcaacgccggcgagatcgaatctctgaagcagcgcatatcggagagcgacgccggccgcgagcagctgcgcaaccggctgtccacctacgtggccatctcctccctggcgtggacgtccatcgtgcgcgccaagtccctggacgccgccgacaaggtctacttcatggtgagcgcggactgccggcgccggctgcgcccgccggccgacaagggctacttcggcaactgcgtcaccacatgcgtcgccaaggccatctccggcgacctgtcggccggctccgacgacggactagccggtctcgcgcgcgccgccgcggcgatccagagggcgatccgggaggggtctggaggtcccgttcggcaactcggagcgctggctcgacggcgccacgaggacgaccccgccggtgaggtcgttcacgaggtcggggtcgtcgcaccggtgtcagtggtgctccgccgcgcgctcatggatgcgttcgccaccaacttccggcggcagctggtggcgtcgacctga

SEQ ID NO: 44150 - DNA, 318 bp, Oryza sativa
  Clone ID: PAT_MRT4530_47239C.1
atggcgctagctaccgtgtactgcgtacgcacgtgcggcacctcacgcaccgggacagcatgcagggaagcaggcgagcagcgggccggggttccactcccacatgagaatccatcctcgtacgtcgtccggtggcgaactgatggccggccaccatgcatgcgcctcggctcatccgtcgtcatcgacacactgtcacacgtgggcgggggcgcgctcccgctcgagctccatctatcccttggtgctgagatttcatctgccgtggtacaaactcgtcttgtatggagagctcagcgccacactccacagcgctga

SEQ ID NO: 44151 - DNA, 404 bp, Oryza sativa
  unsure (1)..(404): unsure at all n locations
  Clone ID: PAT_MRT4530_4723C.1
cgcgtccgcaacgagccatcgcagatctccatcgacacgaacgcttactgcctcgctcgctataccatcatatgccacgcgaaccgagttccgccgcatgtcccgcctgacatacttgacgatggctctcatcacattgcgcgcttcacctatgtcacccagtagatcctgcttggctactacacgacgtcaataacacatgttctaaggacagctagcctcatgaagccaaacatagctacacgaggatctaaatccaagaaggtttgccctaacgtcatcgccgagtacaccgtgcgngccctacaaaggactgtacctgctgccgtgcctgccattagcttcctatctggtggacagagcgaggaggaggcaaccgagaactctaacgccatgaacaagct

SEQ ID NO: 44152 - DNA, 2702 bp, Oryza sativa
  Clone ID: PAT_MRT4530_47240C.1
atgagctcaagatcagtgagagttgtcagcgtcacccatgtccagccagagcaaaccgccggagagatgccgccggcggccggcgaaagcggcgacgacgtcgtcaggctctccttctacgacgtcatgttcgtctccatgatgccgatccagcgtctcttcttctacgagggcgccgcgctcccgccgttcccgtcgctcgtcggctccctccggtcatccctcgccgccgccctcgccgccttcctccccctcgccggcaagctgacgttccgcgcggcgctcggcgacgttgtgctggattactccgccgccgccgtccccccgggcgtcaagttcgtcgaggccgagtacggttcatccgacgagatcagcgccttcgacgccatgcgtcgcctcgccggcgacgtcgagcacaacgtggaggcgttcatggagctcgtgccggagcttgaggtggagcaacttccggccccggtgctcgccgtgcaggtgaccaggccggcgttccggaacgacgacggcgacgacgcggtaggcgtcgtggcggtcggggtgtccgtgcaccacgcggtggctgacggccagtcgctgtggcagttcatgaaggcgtggtcggcggcggcgatggtgggctcgccggcggcgccgggcctcctgccgccgacgtttgaccgggcgttgattcgccatcccagaagtgaagagctcgccagcaagttccttcaattgagttctccgactctacctgaggtgaagctatcccgtgtggcggctgacgtcatcaagggccagcggacgaggaccttccttctccgcgccgaccaaatcagatcgctgaagcgtcgcatctcgcgacgcatcgccgccggcgagccaccgcgcgagacggcgtctccagtaacagcctacgtcgccatcgcgtcgctggtctggacctcggtcgtccgcgccaagccgcacgacgccgccgacgaggcctacctcatggtcaccgccgactgccgccgccgcctccgcccaccgatcgacccggggtacttcggcaattgcgtcgcggcgtgctacgcgcgcgccaacgtgggcgccctccgccgcggcggcggcgacaacggcggcgacgacgaggggctcgcgcgcgccgcggcggcgatcggggcggcgatccgcgagcagctggaggacccgctcggcggcgacatcgaggggtggctccagttccacctgagcctcccggcggcgaggctgacggcggtggggtcgtcgcaccggttcatggcgtacgagacggacctacgggtggggcgcgccgagccgcgtacgagctacgtgtcgccgttacgcgcgcgagactggtgatgctgctcggcgcggcgggcggcggcgtgcaggtgtccgtgtcgctcgacgaggcgcacatggatgccttcgagaccagctgcatcaggatgagcaccctagtgcgagtcctcgccgtctcccatgtccaccctgacgaggcggccgtcggagccgcatggccgccgccgaacaccgtcgagctctctttcttggacagcttccaagttgcccgcggagcgatccagcggctcttcttctacgagggcgacgacctcccgccattccagtctatcgtcggtgccctgcagtcctccctcgccgccgcgctccccgtcttcctgcccctctccgggaagctggcctacctcccggagtccggcgacgtcgtcatcgactactccccggacgccgtctcccccggcgtcaggttcgtcgaggccgagtactccggcagcgtcgacgacatgcgccgcctcgccggcgacgacgagcaccagattgaggcgttcttgcagctcgtgccggagctcgaggtgagcatgctcccggccccgcttctcgccgtgcaggtcactaggcctagagatgacaacgtcggcggcggcggcgccggcggcgcggtggccgttggtgtggccattcaccacggggttgccgacgggcagtcggtgactccactcccgatgggggtcgacatgtcgcagcagagaaggagaaccttcttgctcaacgccggcgagatcgaatctctgaagcagcgcatatcggagagcgacgccggccgcgagcagctgcgcaaccggctgtccacctacgtggccatctcctccctggcgtggacgtccatcgtgcgcgccaagtccctggacgccgccgacaaggtctacttcatggtgagcgcggactgccggcgccggctgcgcccgccggccgacaagggctacttcggcaactgcgtcaccacatgcgtcgccaaggccatctccggcgacctgtcggccggctccgacgacggactagccggtctcgcgcgcgccgccgcggcgatccagagggcgatccgggagggtctggaggtcccgttcggcaactcggagcgctggctcgacggcgccacggcgacgaccccgccggtgaggtcgttcacgaggtcggggtcgtcgcaccggtacatggcgtacgagacggacttcgggtggggcgcgccgagccgcgccgagctggccaccgtgtacggcgaggaggtggtgatgatgctgggcgcggcggacggcggcgtgcaggtgtcagtggtgctccgccgcgcgctcatggatgcgttcgccaccaacttccggcggcagctggtggcgtcgacctga

SEQ ID NO: 44153 - DNA, 1422 bp, Oryza sativa
  Clone ID: PAT_MRT4530_47241C.1
atgagctccctagtgcgagtcctcgccgtctcccatgtcctccccgacgaggtggccgccggaggcgcatggccgccgccgccgccgcacgtcgttgagctctccttcttggacaacctccaggtctccaaggcagcgatccagcggctcttcttctacgacggcggcagcctcccgcctttcgaatccgttgaccgctctctgcagtcctccctcgccgccgtgctcgccatcttcctgcccctcgccgggaagctggcctacctccccgagcccggcgacgtcgtcatcgactactctccggatgccgtctcccccggcgtcaagttcgtcgaggccgagtactccggcagcgtcgacgacatgcgccgcctcgccagcgacgacgagcaccacaccgaggcgttcttgcagctcgtgccggagctcgaggtcactaggcctagagatgaccacgccggcggcggcggcggcgcggtggccgttggtgtggccattcaccatggggtcgccgacgggcagtcggtgtggcagttcatcaaggcgtgggccgcggcggcgcggggaggctctccggccggccagggtctcgtgccgccgacgtttgaccgctcgaggattcggcatccaacggccgatagccatgagctcgcccacacgatcttgcacaagatgtcacccgcgcttccaatggtgacgccacgctcgaagccggctgacatggcgcagcagaggaggagaaccttcttgctcagcgccggcgagatccagtcgctgaagcagcgcatatcggagagcgaaaccggcggcgagctgctgcacaaccggctgtccacctacgtgaccatctcctccctggcgtggacgtccatcgtgcgcgccaagtgcggcgccctggacgcggccgccgacgacgtctacttcatggtgagcgcggactgccggcgccggctgcgcccgccggccgacgagggctacttcggcaactgcatcgccatagcaatcgccagggccagcgccggcgagctgctcgacgacgacggactagccgggctcgcgcgcgccgccgcggcgatccaggcggcgatccgggacgagctggagctggaggacccggtgggcggcgcggagcgctgggccgagcgtcttgccgcgatccccagggggaggctcacggcggcggggtcgtcgcaccggttcatggcgtacgagacggacttcgggtggggcgcgccgagccgcgtcgagctggtcaccgtgtacggcaacgagctggtggcgatgctcggcggcgcggcggacggcggcgtgcaggtgtcggtggtgctcgggcgcgcgctcatggacgcgttcgcggacaacttccggcggcaggtggtggcgtgtccaaactcaacagtgtcgcggtcccgccatcattga

SEQ ID NO: 44154 - DNA, 409 bp, Oryza sativa
  Clone ID: PAT_MRT4530_47242C.1
tttataggccggagaggcggtggaggaaggatggccggcgacggcgcggctcgtcgtcgagaaaaaggcggcgacgcgtgtcggcgtttaatttgctgtaatggcggctcggtggtcggcaacggctcgcggcggctcgtggcggcagcggattggtgcagcaaggtggcggcggcggattggctttgcggcggaggaggaaaggcacggcacggcgtcgacggcggcgcatcgggaaggggcgagcggtggcggcgcccatcgagagagagaggaaggaggcggcacggctgtgagccggctcggcgggcttcggctcagttgggccggcagcccaagaaggagggaggagaagaaaaggggaatgggccaaaagaaagggaaattggcccaaaataaaaaggaagtt

SEQ ID NO: 44155 - DNA, 664 bp, Oryza sativa
  Clone ID: PAT_MRT4530_47243C.1
atcaggatgagcaccctagtgcgagtcctcgccgtctcccatgtccaccctgacgaggcggccgtcggagccgcatggccgccgccgaacaccgtcgagctctctttcttggacagcttccaagttgcccgcggagcgatccagcggctcttcttctacgagggcgacgacctcccgccattccagtctatcgtcggtgccctgcagtcctccctcgccgccgcgctccccgtcttcctgcccctctccgggaagctggcctacctcccggagtccggcgacgtcgtcatcgactactccccggacgccgtctcccccggcgtcaggttcgtcgaggccgagtactccggcagcgtcgacgacatgcgccgcctcgccggcgacgacgagcaccagattgaggcgttcttgcagctcgtgccggagctcgaggtgagcatgctcccggccccgcttctcgccgtgcaggtcactaggcctagagatgacaacgtcggcggcggcggcgccggcggcgcggtggccgttggtgtggccattcaccacggggttgccgacgggcagtcggtgtggcagttcatgggtgtttttagcgcggcgctgtatccccgctgtggagtccccccaccttgtgttggcgcctgcggtcttagtccccttactt

SEQ ID NO: 44156 - DNA, 433 bp, Oryza sativa
  Clone ID: PAT_MRT4530_47244C.1
ggctccaattaaagttcttttttttttatacgaaaactgcaaaactttacaaaaacgcatgaataaacaaacaaaccttgccagaagacggctctggaaaataaatcctataggacttatgtcttccacccttattaaaccaggaccccggaaaggacaaaattttccctaaaaatacagaatattgctaccaaccattgggtattaatgcgtttctttttttggatacaacctggtagaaaccctttttaaccacttattgcccttgagaccccaccactccgggtggggctcaaaacttgaaagcacccccgcccctcccctttgggccaaagggcagggggggctggcactctttggggggtcaaaaacgaaatgacggggtcttggtggaggcgaacaaaggctttgcctggaatggactttgaccatg

SEQ ID NO: 44157 - DNA, 378 bp, Oryza sativa
  Clone ID: PAT_MRT4530_47245C.1
atgccgaccgggaaccccgcgccggtttccttccccgccgggccgcctctctactcccaaccctatataaaccctccccgcgcctccctcgtccgtttccgccactcgccgccctatctccccgccggaatcgagctcgcactgtcatcctctctcttcgccgtcgccgtcgacctccggccgggcctatccgctcgccgggaccgtcccccgcctcggcgtcgtctcctccggcttcgccacaccgccgccgatcccgtctaccgcctcgccgagctcgccgaccgccggacgccgctgtccccgtcaacccgagccgcgccaccgcctccctccactccggccacctcctccgtcgccgccgtcgccccgcggtga

SEQ ID NO: 44158 - DNA, 2919 bp, Oryza sativa
  Clone ID: PAT_MRT4530_47246C.1
atgagaagcgccggcaccatcagccagcagctcacccgctacgccgcggcgcaggcgctgctcccgggggcgcacctccacgccagcctcctcaagtccggctccctcgcctcgctccgcaaccacctcatctccttctactccaagtgccgccgcccctgctgcgcccgcagggtgttcgacgaaatccctgacccgtgccacgtctcctggtcatccctcgtcaccgcctactccaacaacggcctgccccggagcgcgatccaggccttccacggcatgcgcgcggagggtgtatgctgcaatgagttcgctctccctgttgtgctcaagtgcgtgccggacgcccgcctcggtgcgcaggtgcacgccatggcgatggctacggggtttggcagtgacgtcttcgtggcgaacgcgcttgtggccatgtacggtggatttggcttcatggatgatgcgaggagggtgttcgatgaggccggcagcgagaggaacgccgtctcctggaatggcctgatgtcagcgtatgtcaagaatgaccagtgcggcgatgccatccaggtgtttggtgagatggtgtggagtgggattcagcctactgaatttgggttctcttgcgtggtgaacgcctgcacgggttccaggaatatagacgctggaagacaagtgcatgctatggtggtacggatgggctatgacaaggatgtgttcacggccaatgcattggttgacatgtacgtgaaaatggggcgtgttgatattgcttctgttatttttgagaaaatgcctgattcggatgtggtctcctggaatgctttaatttctgggtgcgtacttaatggtcacgatcaccgtgcgatagagttgttactgcagatgaagtcttcagggctggttcccaacgtgtttacgttgtctagcatcctgaaggcttgtgctggtgctggggcatttgatttgggtcggcaaatccacgggttcatgatcaaagccaatgcagattcagatgattatataggtgttggtcttgtggatatgtatgcaaagaaccattttttggacgatgcaaggaaggtgtttgattggatgtcccatagggatttgattctgtggaatgcactgatatcaggttgttctcatggagggcgacatgatgaggctttctccctcttttacgggttgagaaaggagggtctcggcgtgaataggacaacattggctgctgttctcaagtccacagcaagcttggaggcagccagcgccacaagacaggttcatgctcttgcagtgaagataggtttcatatttgacgctcatgttgtcaatgggcttattgattcctattggaagtgcagttgtctcagtgatgcaatcagagtgtttgaagaatgttcttctggtgacattatagctggtacatccatgatcacagcactctcacagtgtgaccatggtgagggtgcaataaagctgttcatggaaatgctaaggaaggggcttgagccagatcctttcgtgctaagtagcctactgaatgcttgtgctagcttatcagcttatgagcaagggaagcaagtccatgctcatctgatcaagcgacagttcatgtcagatgcgtttgcagggaatgctcttgtgtacacttatgctaagtgtggtagcatagaggatgcagagttggctttctccagcctgccagagaggggagttgtctcatggtctgcaatgatcggagggctagcacagcatgggcatgggaagagagcattggaattgtttggcaggatggttgatgaaggcattaatccaaaccacatcaccatgactagcgttctctgtgcctgcaaccatgcagggcttgttgatgaggccaagcggtacttcaattcaatgaaggagatgtttggcattgacaggacggaggaacattactcatgtatgattgatttgcttggccgtgctggtaaactagacgatgcaatggagcttgttaacagcatgccattccaagcaaatgcctcagtttggggggcgctactaggagcctcaagagtccacaaagacccagaactgggaaagctggcagctgaaaagctcttcatcctagagcccgagaaatccggtacacatgttctgcttgcaaacacttatgcatctgcaggcatgtggaatgaggtggctaaggtgcgaaagctaatgaaagacagtaacatcaagaaggagcctgccatgagctgggttgaggttaaggacaaggtgcatactttcattgttggtgacaagagccacccgatgacaaaagagatatacgcaaagctagttgaattgggagatctgatgagcaaagctggttttgttccaaatgtagatgttgatctccatgatttagacaggagtgaaaaggagttgcttctttctcatcatagtgaaaggctggctgtcgcgttcgctttgctcagcactccacctggagcacccattagggtcaagaaaaatctgcgcatatgcagagattgccatgtggcatttaagttcatttcaaagattgtttcgagggaaattatcatcagagacatcaaccgattccatcatttcagagatgggacatgttcttgcggtgattactggttggaacaaaatttagctattgcaagtttacaacctggtgtctcttatagtatttacagggaaacgactaccattagtcctgcagctgagataacatcgtttgatggccatatgcctatttcgttatttacaagttcgtacaagagcttcacttttgcatcactgctggagatggtgacaatgaggttattatactacagggctcctctgattctgttggtattcaactcaagtattttatttccattaccctacatgaacttgtattttgttacaggtaactggtaa

SEQ ID NO: 44159 - DNA, 672 bp, Oryza sativa
  Clone ID: PAT_MRT4530_47247C.1
ctttaattaaggttccactgccgcagttgattcgttcagactcatagccatttgtatattgaagagtcatatcatgatttgccttgataagatcaacatggagaagtttttcaatatctgacttgcttatacttggataattctgaccacattatttggtgctaagaaaatggagtcttgatttacatttttcaagcaaaacaaaacgtacctggcaactcctgtccatggtttcaagatctgttgatattccttgtatgaacatctggttggccaagttatccatgagatgcagcacttcacttgtctgcatcctttactgatagagatctccgactggctgcaacctttgataagaacgtcatccttccctgtgttggtagctgaatcacatattggaaatgcatgctgggaggttcatcaaacttgaggatcctgactgtaaattctagtctctcctagatgtctatgtataatgttgactgcagttagctatgatgaaagtaaagaggtttttttttggcttatgtacatgtaagtctgttacactatcctagagcaggtagtactgtacatatgctgtactagtgctcctacatgtgtattgcttgttgtaatgcactgtgttgtttcatttttactaacatgtttagtttaaaaaaaaaaaaaaaa

SEQ ID NO: 44160 - DNA, 426 bp, Oryza sativa
  Clone ID: PAT_MRT4530_47248C.1
atggggaaacatttatacaaaacacttattccaagcacacgcaacggaacatagataaacaagtgaaatccaatctacgaaataatttaacccatggacaacactattgtggtaaaggtcgaatcattaccgcaaagcatatagggagatgtcataagcgtatataccgtaaaatcaatttttgacggaattaaaaagacatatctagtagagtcgtaaccatataacacaaccttaatcgaaatgtgtacatttgtctcatatacattatggggatgaggagaagggatatattttatacccgaggacatcaataggaggtattccataactattcgctacacgcctctctgccccttggccaaatgctttgccaacatctggatgctcttttgagtatttttccgccctttttgagagatcacg

SEQ ID NO: 44161 - DNA, 559 bp, Oryza sativa
  Clone ID: PAT_MRT4530_47249C.1
ctctacagcagctcatcactgctcaagagaaaggagacggcaacaatggcgacggcgaggttgctcctagtgctcacggtggtggcggcggcgggcagctgcttctgcagcgcccaggaggcgaagccgccgccgtactgcggcagcgtgaggacggccattgaggcgcacaacatcatcggctggaagacgttcacggcggattgcgccaaatacctcgccgactacctcaccggcgatcgatacccccgcgacgccgacgtggtgatcaacgaggccatcgcctacgccgagagcctcaagctctccggcagcggcaaggagatctgggtgttcgacgtcgacgaaaccgcgctctccacactgccctaccaagccaaccatggctacggagttcagccatatgatcaggcaagcttcatccagtacgtgtccgagggaagcgcaccggcgctgcaggggacgctgcggctctaccaacggctgctccagctcggtgttaagccagtattcctgactgaccgcaccgaggtccaaaggacagttaccaccaacaacc

SEQ ID NO: 44162 - DNA, 1070 bp, Oryza sativa
  Clone ID: PAT_MRT4530_4724C.1
tctctgcatggctccatgcctctccatggcgcctatgtatagcctctcctagtcctatctctcgtctcatcatcgtacacaaacagtagtacatgatgcaggacctgttctcggtgccgtcctgcttctcctccggcgagaagctgccggacatcccgagctccggcacggcggcggcggccgcggcggccaggcagagcgcggtgacgctggtctaccgggcggagatctccggccaccgccggcttgtcaccgtgacgtggtgcaggaacctgctcacgcacggcctgtcggtgtcgatcgaagggtcggcgggcaacggcaaggacaagatcggcagggagtacggcgaggccgccgtcgccgccacggcggcggacggcggtggcggcggcggcggcggcaagagctgcagcgcgtgcaaggtggagatgcagccgtggcacttctggcggaagtacggggcgaagcagttccaggtggacggcaacgccatcgacgtggtgtgggacctgaggagcgcgaggttctccgatgagccggagccgctgtccgactactacgtcgcggtggtcgccggcgaggaggtcgtcctcctcctcggcaacctcaagaaggacgcgttccggcggacggggtcacggccgtcgctgcaggacgcggtgctggtgtgcaagaaggagcacgtcttcagcaagaagaggttcgtgaccaaggccaggttcagcgacagggggaagctgcacgacatcagcatcgagtgcagcagcagcaacctcaccggcggcacggacgtcgacatggcgatcaagatcgacggctgcgtcagcgtcctcgtcaggcacctccagtggaagttcagaggcaacgagtgcatctccatcaacaagctcaaggtgcaggtgtactgggacgcccatgactggctcttcggcacagggatgaggcatgccttgttcatcttcaagcccgagccgccgtcgccgtcgccgccgggagcgagctctgaattcagcaccgatgaatattcagatttctgcctgtttctgtacgcatggaaggttgaatga

SEQ ID NO: 44163 - DNA, 194 bp, Oryza sativa
  Clone ID: PAT_MRT4530_47250C.1
gtgaacaaagcttgctccccttgggcctaacaggacaagctaaacaacactaacaatcctgagttaaataatttctaaacgaccaaatggaccaactgccaaaaaggaaaaaaatctagggatcctgctccttgagcactaggataacattgaacggtcccacctgaacatcatcagcggcaactactggatca

SEQ ID NO: 44164 - DNA, 1319 bp, Oryza sativa
  Clone ID: PAT_MRT4530_47251C.1
aggacctagcagaaggtgccattgtaaaagcatacaagccaagagagatgacgagtagcatgaagttgcccgctaccttcctctccttcagttcacatcagcccagaggaagctcccattgttctgtagcctctgctgcatatgctgctgaaccaagactcggcgaaggagcagtggtgtctaagaagacgccaagccgttctccctgcaggacgatggccaaggttgatgacaagaatgatctctgcagaatgaatcaagcaaagttcgagccttccatctggggagatttcttcctctcttactgcaacccgttggcttactctgacaatcagagatcgatggaagaacgggcagagtatctgaagaaagaggtggcaaaactcatagtaaattcaagaaccgatagccttccggagaagctgcatcttatagatgtactggagcgtctctgtgtggaccatctgttcgaagaggagattaacgctgtgatggatgaaattagcgacgccgatgtcagtgactgtgaactgcatactgtagctctgtggttttatcttctccttaaacatcgacacagagtttctccagatgtgtttctgaagtttagagatgaagatggaatttttgaggcagaagacgcaagggacctgctaagtctttacaatgccgctcatctcacgacacatggagagggaatacttgatgaagctatttccttcactaaaaggcaactaagatcattgatgcccaaagttgttgaagggtcactagctcatgacataaattctgcgcttgagatccctctccctagaagggttcgaatatatgaggccaagtattttatgtctacatatgagaaaggagcttcagtgaatgagatgattatggaacttgcaaagttgagctacaatatcatgcaaatccatcatcagcaagagctgaaaataattacaaggtggtggaaggatctgcaacttgaaacaaggctctccttcgcaagagatagagttgtggagtgctacttttggatagcaggagtatatttcgagccatgttactctcgaggtcgaattatattgacaaaagtgctagccattgtgtctattttggacgatatttatgatgtatatggatctccagaagagtgtgaacagtttaccaaatgtatagaaagctgggacccaaagatgggttgtaatctccccgagcttctgagatttgcgtttgaaaaaattttggatacctaccaaaacattgatgatgagtgtcgaaacatgaattcggcaataataaaagaggtagcgtacgagacctaa

SEQ ID NO: 44165 - DNA, 1707 bp, Oryza sativa
  Clone ID: PAT_MRT4530_47252C.1
atggaggagaaagtgggggagacggtggcagcggcggcggtggcggtggcgcctgtggtggcgggggaccaggacggagtggcgtactgcagcgagcatccgtacccgcctggcgcggctgcggcggctggggtggcagccggcggcggcatatgcgccttctgcctgcaggagaagctcggcatgttggtgtcttcgtccaagtccagccctttccacccgccgccggcttccgcctcctcgtccactccgaccagccacgtcgctgctgagtcgtcgtcgtcgtcactgcctctccacccttccgccgccgccgcggcgcgcaaggtgatcccggcctcggcggctggcgggctcaagaggagcaagtcggtggcgccgcgtccggaggagacgacgccggtgacggcgcccgctccgtccgcggtcaccgcggacagcccgaggaagaagagcttctggtccttcctctactcctcgtcctcgtcgtcgagcggcggccaccagggctcggcgtcgatggccaacggtggcggcggcggcggcgcgtcggtgaggaggaagtcggtgtcggtggcctcggcgtcgtcggcgtcgctgggacggaggctggaggcgatagtggagccggacagccccggccgccgtagcgagggctcgtcgtcgtcgtcgttcgggaggaaggtggcgcggtcgcgctccgtggggtgcggcagccgcagcttctcgggggacttcctggagcgcctctccaccggcttcggcgactgcgcgctccgccgcgtggagtcccaccgcgagcccaagcccaagtcgtccgccggcgcgctcgcccacctgggcggcaaccactccgccgccggcaacggcgacgacgacgagtacgagtccacccagcagcaccgcatcaagtgcgccgggttcttcggcggtctcggcgccgcgccgccgcccacgtcgtcctcctactggctgtccgctgccgacggcgccaccgccgccgcccccagcgcaagaacccacggcgcgcgtagccaccggagctgggcgtgggcgctggcgagcccgatgcgagcgctgaggccgacgagctcctcctccagcaaatccatcatggccgcgccccacaaccgcggcggcgtctccggcaacggcggcatggcgatggccgcgctagcgtgcccacaactggcacaggcacaggcacatggtgatggtggtggtgcatctggccaactcaggctcagggccacgtgcatcgtcggctatggttgggggttctcggttgctgccggtcacaatgaggattccaaacagtgcgccattgagaaccgaccacaggtccagctattggttgtttgtgtgactgctcaacctcggctttgctgtcctccggctatggtggcaggaagggaagcacttgcctgtcttcctatagctcaagtggtgtctaaatgtgatctttgcgctggctgtggttcagcaattatgatggcatggaggctaatcttcttttccttgcagctatgcaaaattactgacaagttcatcagactttacattaaaatcatacaatatcctacggctcctgcacatgttattccatctttagttccgaaggatagctatggattcttcattctttcctatggcatgtgtgctggctacatattgatgtcagtgatgatgagtttgcaagaaatctga

SEQ ID NO: 44166 - DNA, 1721 bp, Oryza sativa
  Clone ID: PAT_MRT4530_47253C.1
gtggtgatttttttttttttttttaaccttattaaccctctgtgtttcgtaatgtttacggattaattaactgttcacaatacaaatacagttggcacaaaatgtgtcctgcccaaaagcgggaaggcaggaagggaaaaatttgcaggaactaacgtgtggaatcaaagaatcgttgctgcatcctaccgatgataggctgtgttaagaaccaccccgcctcctctccatgcatgtgcgcgttcgtgcgtgcgtacgtacgtgttgtttgatttcagaggatcagaagtcgaagatcatcttgcggaacttctccatgtgctcggcctgcagcgagatggccaccgacaggctgccgtcgccgctggcgctggggagcacgaaggcgagcccctcgtacgcgatgccgccggggcccatgaacaccggccgcccccagccgaagtcggcgtcgtggatcggcagtcggacccagctggtgaggccgaggttggggcaccggaacgtgtgcgcgccgcggaccagcgccgacaggtcgggctgcagctccaggtagtccagcgccgaccggcagtagccgctgtccatcctgtccagcgccgactggatcgtcgccgcgccgtccgccagcgacccggtcaccctcccggcctcggcgagcggcgtcgccgtgaagatcacgttgccgaagtagccgtcgggcagcgacggctgcagccgctggcgtccgtccgtggcgcagtacagcttggtgggctgctccgcggggagcccccgcgccagcgacgcgcaccgccacacgtgcgccgcgagcaccgcgtacgtgctgtaccgcggcgcgccctcgccgcggggcagctgggaccggaggcggccgaggtcggagcgggacagcttgaagatgtccacggcggtgggcggcggcgccggcttggcggtcagcgcctgcggcggctcgggggccagcatggcgggcgccggctggtactcgacgtgcgggtgcgacggcgccggcgggtcgcgggcgcggacgagggtgcggtcgatgaacggcatgacggcgatcgggacgccgcggcagaggtccgcccacgagttgatgaagtgcaggccggagaagccgtcggcgacgtggtgctgcatgcccacgccgagggcgacgcctccgcacttgaagtgggtcacctgcatcaagagaatgaggagggcatagatggagccgaggtagaagatgtagaggttgaggacctggagctcgaggatgggggaggaggcgatgccgtcggtgtcgtcgacggtggggacgagggcctcgacgtccatgatgcgcgcgcagtcgccgtagttgtcgacgcggccgcccgcgtcgtgggcctgccccaacgccaccgcctagacgtggaacagcacctccgccagcgcctgcccctcgcgctcccgctccaagtcgatcccgccctccgccaccgccgcctccgccagcgcccgccgcaacatctccacgtcgaggtagcgcgccccctccgccgcccgcgcctcgccccaccgccacacgtacaccctcggcgtctccaaccgcggcaccaccagggccggcccagggttcttcagcttcacccgcgccggctcctgcgccggccggacattgggcgaccctcgcactttgatctgcatgcggtgtataagcatatgtggggtacgcccgcgcctctgcctcgtgc

SEQ ID NO: 44167 - DNA, 691 bp, Oryza sativa
  Clone ID: PAT_MRT4530_47254C.1
tcgctcaccaatccccaattccccatcgatccccattaccgcggagaaatcagaaatcggcgtctccacctcatcgcccatcgatcccattcagcttcgcccctccgttcttccccgccgactccttccctccgttctccttactgaatcagcgtcggctatggttgggggttctcggttgctgccggtcacaatgaggattccaaacagtgcgccattgagaaccgaccacaggtccagggttttggtaggtaatgcgcattgcggcggacgagctgaggcggcagggtatagcgcataaacttaagttttacgtccttcaacagttcaacgatgaatcgatctgtgcaagttatgcagctattggttgtttgtgtgactgctcaacctcggctttgctgtcctccggctatggtggcaggaagggaagcacttgcctgtcttcctatagctcaaggttcctaattgactgatgagaagaatgtaccgcctttcatgccagaagatgtttactgcttggagcaacaatcttatggaaaacctcttgatgattgtgatgacagctatgcaaaattactgacaagttcatcagactttacattaaaatcatacaatatcctacggctcctgcacatgttattccatctttagttccgaaggatagctatggattcttcattctttcctatgg

SEQ ID NO: 44168 - DNA, 1393 bp, Oryza sativa
  Clone ID: PAT_MRT4530_47255C.1
gcacgaggcacacaccccgccacatccgcctctgcgcgactgcgccccgtgcccccacgccctgcgcgaccagcagcagatcgagagggagacggcctgacctcttgtggtgatgcggtgggtcgcgtaggcgtatccaagatccggtggtgcggagctttgcttgcggggatcgatcgcaggaggtgaggtgacgggtgtgagaatggaggagaaagtgggggagacggtggcagcggcggcggtggcggtggcgcctgtggtggcgggggaccaggacggagtggcgtactgcagcgagcatccgtacccgcctggcgcggctgcggcggctggggtggcagccggcggcggcatatgcgccttctgcctgcaggagaagctcggcatgttggtgtcttcgtccaagtccagccctttccacccgccgccggcttccgcctcctcgtccactccgaccagccacgtcgctgctgagtcgtcgtcgtcgtcactgcctctccacccttccgccgccgccgcggcgcgcaaggtgatcccggcctcggcggctggcgggctcaagaggagcaagtcggtggcgccgcgtccggaggagacgacgccggtgacggcgcccgctccgtccgcggtcaccgcggacagcccgaggaagaagagcttctggtccttcctctactcctcgtcctcgtcgtcgagcggcggccaccagggctcggcgtcgatggccaacggtggcggcggcggcggcgcgtcggtgaggaggaagtcggtgtcggtggcctcggcgtcgtcggcgtcgctgggacggaggctggaggcgatagtggagccggacagccccggccgccgtagcgagggctcgtcgtcgtcgtcgttcgggaggaaggtggcgcggtcgcgctccgtggggtgcggcagccgcagcttctcgggggacttcctggagcgcctctccaccggcttcggcgactgcgcgctccgccgcgtggagtcccaccgcgagcccaagcccaagtcgtccgccggcgcgctcgcccacctgggcggcaaccactccgccgccggcaacggcgacgacgacgagtacgagtccacccagcagcaccgcatcaagtgcgccgggttcttcggcggtctcggcgccgcgccgccgcccacgtcgtcctcctactggctgtccgctgccgacggcgccaccgccgccgcccccagcgcaagaacccacggcgcgcgtagccaccggagctgggcgtgggcgctggcgagcccgatgcgagcgctgaggccgacgagctcctcctccagcaaatccatcatggccgcgccccacaaccgcggcggcgtctccggcaacggcggcatggcgatggccgcggtggcgacgagctag

SEQ ID NO: 44169 - DNA, 2682 bp, Oryza sativa
  Clone ID: PAT_MRT4530_47256C.1
atggacgaaccatcaattgtgaaacttccagaatatgaactgccagatgctttccgtggagaaattgatggcaaaggattagaagaaggagcaaccatagataacatggatccttcccgcccttttcttgttctcaatgtatttgattgggataaggtcgacgagtggatagctctaaaaactgcttggatcgccaagcggttaaaaaatgatataatcatcccggacccagtacctcagatcgggcgagacgccttctttgatattactccccgcttgaccactgtattggaaaaggatagcgtacggtgcttcctccccttgtttgtgcaatgtgagtcgatcatgacgtatcagtgtgccatcacctcagaaaccttaacccacatggtcaggcataatgccttgcgatgcgcaaaagttgtattggagggcaaggcagcagaactccgttgtaagcacgctaatccaaactgcatgaatccgtatggatattttgcactccatgaagctgctgaacggttctctgctgacatgaccaagttgctcttccgccatggtgcttcagcaaatgtacgcacagccagcgatgccggaattcagggactactaccgcttgatgttgcggttgaaaatgcttgcatgcacaagtatctggaggacaatctatctccgactccaatgcagtatcatgaggattacatctacaagctcattcatctcctctgcctacctgagatgaaggttttcttggatacgattagacttcttgccgagaaaacagataatcttgttgatgagctctggaattacatgaagaacggcaagcttgtacagaccgcagttttactcctggcagctcaaaaacatattcgcaagatcaaacctgatggattttgtattatcacgcaccatttatttaaagagtatgctaattccctaagatgtgccaaaggtgatactggagaggcgcagaagcagctggaggaaagggaagcacttctgagttgtaaatccgagctttttagtataattttgctagctggtgaggctcttgataactacattcaagcacattcagaggtgtcccatgcggaggttcttgcacgtgtctcatctattcttaaggaattcgggttttgccctaaggaaaaatgcattgacaacataaaactgtactgctccttttgtattcaaaatcataattttttgtctccttatatgtacgggacgtcttactgtgacatatttcacaaaggtgcttattggcatgtagctgttgataatcatgtttctgcaaactgttatgcggttcatgtttctctgagatttgggaggatggcaggacctcatggcccatgtcgtgtattcggctccttgaaccttattgatgtgcgatatctggacacgtgccatcgcatgagccgatctcgaaagaactctgagattaagcgtgcttggtctgcagcaatttcgggatgggtgaccgaccagaaaattcttctcgggtgcgaagcgtgcttggtctgcagcaatttcgggatgggtgaccgaccagaaaattcttctcggagcttcatcctggagaggccacgctacacatcacggctgcagttgaaagtggaggtgatggagaagcagagtatcgacttcggcaaggttttggaagagatccaggagtcactggtggtgctgaatctcaagcaaggagctgcgcgaggaagtgttcgatctgcgtcaacaaatggagctcatgaacaaggcttcaagttcgtctgcggcgaatccttccccaactcgagttccgttgatggacgaggagaggaaggctccgctactccctacgccgcctacgccacatgtggctgtgctaggaggaggggacaaatggcctcatggccgctgcgatgcaacagatcaccggggaagggtttcggggatggttaccaccctgatcccgactccggtcaagagtatgatttccctaccaatcctctaataatttcgagcaatctgaatttgggtgtggagaaattggatttggagacagcattggcaattgcttctttgcaagaggaggttattttggaatcctctgcagtgtcagtttcaaatccgaagaagattgacaatgggttgcagattcgaccaaatcttgcttacaagggtgctttacctttgcccttaccaccaaatcgtggggtgactactggcagtgtgtctcgaatggaagatcgcaagactcttgacaacggtaagttggtgaacggtactgataagatttctgcgctaaaggctcaacgcagagctcatggtttatgttatatttgtgctgagaaatggtctcctactcacaaatatgctaatactgttcagttgcatgctgttcaggaattacttaccaccctgggttctgaaattttgtatgatcaggaatttactgaagaatgtgaaggatctgacagtcagggcttaatggctatttcagttcagtcaatgcatgggtctgaaactatgggctgtatgcgtctgttaggatttattcaaggtagagaggtgctgatccttgttgattctggcagtacagctggtttccttagctctcaggttgctcagactatctcaatgcgtcacgcaattttgctggacctcatgttccacatagaccaaaaactatgttag

SEQ ID NO: 44170 - DNA, 278 bp, Oryza sativa
  Clone ID: PAT_MRT4530_47257C.1
cagccgacgaaggccacgcatcctcgcctgaagctccccccgtcggcgacggcattattcgcggtctccagtctccaccgcctacaggccgtccctgccgacgtcgccccgccatgggtcgtctccgtcccccgggcgctcctctgcatgaggccctccgctctccgcgccgcagctgctgctactgaggctttgagggagaacggagaaggcgacggtggcggtggggaagggagatggcagcggcggccggcggggattgggcatgcggcggcgga

SEQ ID NO: 44171 - DNA, 731 bp, Oryza sativa
  Clone ID: PAT_MRT4530_47258C.1
gaggagctcatcatcaaaggttataatggatcatcattcccatcatgggtagggtctctgcctttggacaggttagcttctatagaactaaaagattgccaaaattgcgaagaactgccgccacttgggtgcttgccatccctgaaacatgttgtgatacagtcactgccaagtgtccagctagttggacctgaatttcttggcgatgttggagatatcccttacaacaacaggaagaaagcctattttgcttttcctgcattggagtctctgaagttcagggatatgggagcctgggaggaatggtcaggtgtcaaggatgaacacttcccagaacttaagtatctcagcattgttaggtgtggaaagctgaaggtattgcccaacttcacttcaggaccaaagcagagaatcaggaattgtgagaaactactccagcctctatgccagaatatacactggaatttgatggaatacataccaccttcaagtgaactgtcgtacacatgcatggcagaaggtgatatttcaatcctagaagcttcctgttcatacagtacatagaacattggaaatggagggaggggcacccattattgtaaatgctcatggattggtgctattttgtcagaaaatcttatttccaggattgacatgaatttttcagtaagtacacatcgtatgaaattgttttgttccaaatgtacccgatcaaaaaaaaaaaaaaaaaa

SEQ ID NO: 44172 - DNA, 860 bp, Oryza sativa
  Clone ID: PAT_MRT4530_47259C.1
atggatcgggcatggatgtacgagattcgaagaactcatccgacattcgtgaatgaagcatccaaatttttttgccttggcaaaggcacatgctttaaggagaatatgaggcaaagtttttggccatgctttgattgcaagaatcagaaattattggcacacatagtggagcatggattcatgtacaactacaaggtttggccctatcaaggggacttcctactcctgaagatgacggtgaagagttcaatttccagatggatgagacataattttgcaatcatggatatatatgtctcctgagaaaggatggatgtagatggttccaccggtaatgatgattttgaggccgttttcgatctggaggacatgctatggcacattgaaccagagctactactacgtagagcacgaggtttagagaattgggagtcattaaagaagtcatcaaaagatcttctttacgatgaatccaatggatgtggtaaggacatcacagtgttgcgttcggtgcttaaactacttacttggaaggcaaagcatggatggtccgatagtagttttaatgatttgatgagtctcttgagagttttgcttcctaagcctaactttttgtcatccaacacgtatcaactgaagaaactcatatttccattatctctaggtgtccaaaagattcacgcttgtctaaatcactatgtattgtaccataaggaatttgcagacttggacggttgcccaacatgtgaaacaagtcggtacaaagagagaaacatgtcctttggtactgaggttgttgacctagattcatccgagcgtgcgtagaaaaatattcctccatggtgatgtggtacccgcat

SEQ ID NO: 44173 - DNA, 4029 bp, Oryza sativa
  Clone ID: PAT_MRT4530_4725C.1
tcaacacagtgggccagtaaactccttgtctaaacactttgaaggccaccgttcttgccgcttggtgcgcgccacatagcccctggtgtatttccttcgccatttcctcgccccggagcgatagagctggcccgagaccatcttatacttcgtggccctgatttgcaagcgctttgcttctgcttcgtcttccggaagccaaccagtttcaagatgttttacaaacggggttcgccagtcgtgtgggtcttcgcccggtgccatgacctccaagctgtccacgggcacacttggtgcaagtaggacttcgaaaaagatgccaggcaaatgtggtccgccataagcaacagatttcgccaaggcgtctgcttcctcgttctggcctctaggtaagtgttcgactgttatgccggtgaagtacttttccatggaccaaacggcctccaaatacctcttcattccttcttcttttgcctcgaaggatttgtcaacgtggcctgccaccaacttagaatcggttcggattagcaagcgccggactcccagtgctttcgcctttcttagacccagaagaatggctttgtattctgctgcgttgttggttgtgttgaactgcagccttgcagcataccgaattggcacaccattcggcgaaatgagtactgccgcaatgcctgcccccttatgcgaccacaaaccgtcggagcacatcacccaggatttttcgacgggctcgagctcggaggcgaatactgatgtccattcagctacgaagtcagctagcacttgagacttgacagcggtgcgtgcaacaaaatgcaagtcgaacggggatagctctgccgcccacttgctgagtcggccagtaacttccttgcctcggagtatttcgcacaaggggtactgtgatggcactgttactttgtgggcctcatgtacgctcgacgggtgcttcatttgctgaatagcgttgattttctcaggattcgcctcaatgcctctttcagaaacaaggaagtccaacagcttgcctgcgcgaacaccgaaaacgcacttctcgggattcagttttatgcccgttgtgcgcaagttgtcaaaggtctcctgtagttcagacgcatgatcgaaagccttgcggctttttacgacgatgtcatcgacataagcttccacgtttcgccccaactgcttacaaaggaccttgtacaccagcctggcgaaggttgctccagcattcctcaggccgaaagccatcctgaggtgacaaaatgtgccgaatggagtaatgaaggctgtcttggggatgtcgggcgggttcatgtggatctggtgatagccggaatacgcatcgaggaaactcataagttcgcagccagctgttgaatccacgagctgatcaatccgcggcaaggggaaatcgtctttcggacatactttgttcaggtctgtgaaatcgacacatatgcgccatttgccgtttgactttcgcaccagcactggatttgccagccactccgggtgatcgatttcttgaatgaccctagccctgagtagtttttggacctcggctttcgccgcctcttggcgatcagcggacatcttgcgcaacttctgttttcttggcttggcctccggcttgactgccaggtgatgcataatgagatctgtcgaaacacctcccacttcgacagggctccaagcgaagataccaatattcttcttgagcacctccaggatgctttcagcttcttcctcgcccatgttgccccctagtgacacgagctttgtggggtcggcatcatccatctgtacctttattatcttgccatgaggggtgggctttggcacgtgcttcggcaggtcatgcggttcggcctcaacattgtgcactgctctgttgattatggccagatcgccttttgaagcagccgaaggctgaagccccttgaccactatcactcctgccgggccgggcatcttgagcttgagataattatggtgggaaatggcttcgaacttgttcagggttgcacggccgaagatgccgttgtaattgtacgggatgtcgacaacgtcgaacagtacttgctcttcacgtctattctctcccgagccaaaagctatcatcgaaagtgcctggccaagaacttgaactgcctctccgccgaatccgcagagcgatgctggcgctggggtaagggcttgggtgggaaaccccatcttagcatatgcttcggcgaagataacatcggccgaactccctccgtcgaccaagattcgccggacttcgaagccagctatctcggttgagattactaggggatcttgatgtggcaacataactcctttggcgtcctccggcccaaaagaaattagttggttcagatactgcggtgccccttcacctgccgaagtgatgctgtggaccgttcggatctgcatcttcttctgccgtttcgacaactgggttggcaggtcagcccttgtaatcacttggattacccttcgctgtgcatcttggcgttgttcggctaagggtgcctgctcctgaactgcttctcgaggagcttcgacagttgctccctgctgtggccttgaatcttgcgcgttgccacattggctaatatttcggcattgctccgtggtgtgcgaagagcgtccgtggaaggcgcagtagaggtctttttggaccatcacagccttgcccgcacggtcggttctaaactttctccaggtcatgggggcttggccttgccttggcggctgtccctggatcaccggctgaggctggcgaatagccaggggaggtggttcggcgacttgaacttgtgcttgagcttgagcagcggcgacagaggctttatcgtactcagcttgtatagcttgccgtcgcttggaatcctcctcgccccttgcgaaaccgtcaatgatgcgaagtaggtgctcaagtgtctgtggttccttgttggcgattttccttgtgagttcgccctcgagcaaaccagccgaagcggcgtttatgaccgacgcctcggttatgtcttgaacttggcattgggcttgcgagaagcgacgcatatattcccttattgactctcccggcctgagtagcctaggacgggtgggaacttgaactacggtgggattggacgggtcttgattcccccactcagcggtagcccctttttgcctcccgccctgttcacggcaccttgctgcgggtacggcgtggcgaagggcgaaattacggcttgcgcatgagtttgggccatggtgttcggctgcccggctccgattggtaatgcttgctgagccgccatggatgggtcgaaaactggctgcgaccacatcatggcgacctgggttggtgctttgttccaaagcttggtattggtgcttgcggccgaacggttggcgcctaagcagcattgatgaagttgaactgcggtccttgactccacggcgaagcccccagacttggctggttcgacggcaaccaactgagagcaccttgacttgcattcccctctggacgagtcgaggaggttgtactcgaaatgttgtggggttgattgatttgttgaaggaaagcttggaattgtgcctgcagagccgaagccccttctgccattgcttgcgacacttggccaagtggttgaggatgtacttgggccgcagccagttgagcttgcagttgcaagtggggggccagatgcactgctgcagctgtcggctgcccgacgaagtacattgacgcctgcgcgacttgtggcggaaggggctggggtggcacttgcggatagactcgaggtgggacatatccagcagctggcttgtcgaaaggatctccgccctggtctgaagtgcccttgcggctgcagccgccttcgccacgtcggccacgttcggcacctgctcagaggtggcaggggccgaaggtggcaatgatggcacaggcgcagaagcagatggcgcccctccaacttcggtcaccaacgccgaaggctctgctccctcttcggcggccat

SEQ ID NO: 44174 - DNA, 162 bp, Oryza sativa
  Clone ID: PAT_MRT4530_47260C.1
cacgcaagtgagcaccaaccgcaaaattaaatgtgagcttaccatcaacttcaattaagccaaccccaaggcatttacaacatttatcccattccaggcatcagtattttgtgtggaattgtgacacggataacaaatcttgcacacaaggaaacaagctat

SEQ ID NO: 44175 - DNA, 516 bp, Oryza sativa
  Clone ID: PAT_MRT4530_47261C.1
agcaacaaatgtagcctctgatatctgttgacagcgaatctcatgcctgtaagtagcacaatttggtgacacatgattttcagagtccatgttacacaacgctaagtggtgaacaactccacagatgatcaggtctacagttacactagctcataggatgccagtaatcatgccaagcagatgctgctaaactctgcacaatattcggttctatgtgatgactgattcgtctgattaccttgctttatgcaccatgacaaggactggaaccaacgagtgacatttaggaatcatttggagtcgattggtatggcatcagcttcatcaatcagggccctgttgaggcggatacaaccagatcatgtcaatggttggggcttaaatacctaacagagaaaaaagaagacgctaggaatgcatccccagtgaagctgaaaggcaccacatgggatctgcttgcagttgcaggcgttatgtcactggagcttaacagcaaacaacactgcagaaagattt

SEQ ID NO: 44176 - DNA, 219 bp, Oryza sativa
  Clone ID: PAT_MRT4530_47262C.1
atgccgccactccagcgccgccgtgcgccaccgtcgctgccgccgtcgtcgccgctgccgccgtcgagaccgagggagccgtggatccaggtgaaggccaagacccgcaagaccttgagcaaggcaatctactggcggatgccctgtcaggagggccagaggctgacttgcagtctactggcggatgccctgataggagggcctgagattgacttgtag

SEQ ID NO: 44177 - DNA, 2509 bp, Oryza sativa
  Clone ID: PAT_MRT4530_47263C.1
atggagatacttagcccgtcgccgccgcccagccccggccccgcctccgcctccgcctccgcctccggctccgccatggattccttcatccacagaggtgccggctggcatttcccccgccgcgacaacgtcgacgcgcgggtccatgtcgccgtcgggaggtcgccggagaagacgttgggcctgctgcgatgggccttccgccgcttcgcctgcgcccaagtcgtcctcgtgcacgtccaccaaccttctccgctcatccctaccctcttaggcaagattcctgccgctcaagccaccgaagagctcgtgctgtcgcatcgcaaatccgagaaggacgaaatgaacaagatcctcctcacctacctcactttctgtcacagggcacaggttcaggcaagtcttcttgtcacggagaatgaacaaatccatgatggtattatcactttggtcaaagatcatgggattacaaagcttgtcatgggttctacacctgatacttgcttcaagttgaaagcgagctatggcaaagcatcttttatggcaaggaatgccccatcattttgtgaaatctggtttgtttggagaggaagacacatttggaccagagaagcagctgcagccattggcaacaatatctcagtttacaatgaagatgatgttatgatcaggaaaagaatcaggttcagctctactagtaacaatgctgaatccatacttgatgaaggatacatttcatacgaggcacaaacacctgctgatcgttatgaaatcaccatttcagataatggtcaaccgaatgattatgaatctcttgttgatgccaaccatttctgcaatattattgtaccaaatttgcaaaatgcacagtctgcatttaactcaacattccagcctggttcttctgtagacatggaatcattagtgttatatcctcaggaaatcttggataaaaatttcaagcaggtcattctagaagcagagagatcaaggaaggatgcttttgttgagcttctcaagcgcaaagatacagagtcaagagtagccggtgttattgccagggcaaaagcttctgagttcgctcaaaaacaagaaatgaaaatgcgggaggaacttgaagctttgttgacagccacaaaaaagcagcatgaagatcttgcagaaaataaagaaaaggctacagaagggttggactcttcgatgagaaaactagccatcctagatgcacgtgctaaaagcatagcttttcggatgaatgaagctgtggcagagctgaaattgattcaatcttccataggaacactcaatcaggaaattcccaaaagagagaagctagaacttgtacatactgaccaggttgaaagttcaactgtttgtgctgatgacttgtacaactttagagaattgactttgtcagatattaaagctgcaacatgcaagttctcagacagcttaaaagtactgccacgaggtcttggatgtgtttataaaggagagattatgaacagaagtgtaatgatttataagttgcactcgtgtatcattcagagttcgatgcagttccagcaagaggtccacctcattagcaaggtgaggcaccctcacctggtgactttgattggggcatgcccggatgcattgtgtcttgtctatgaatacgtgccaaacgggagccttcacgaccgcctttggagcaagtgcggcattcctcagttgccatggaaaatccgtgcacgtattgttgctgaaatctcaagtgctctattcttcttgcattcctgtaaacctcagatgattgtccacggtgacttgaagcttgaaaacatccttttagatgccaacctgcactgcaagatagctgattgtggtatttctcaattattcatggaagatgccaaggacgcagacccggaataccggagaagcaaaccattgacacccaaatctgacatatactcctttgggattgtgatactccagttactaactgggaagcaggctgcaggccttcccagcgaagtaaggcgtgcaatgtccagtggaaagctatggtcattgttagatccaacagctggagagtggcctctggaggtggctcgaaggttagcagagttggggctcaagtgcagtgaggcagcaagtccagagctgctgactccagaaactgtgcgagatctggaacagctccacctgatgagggataatagacaagtgccctccttcttcctgtgcccgatcctcaaggcagggacgaaacctccgaacatcgatagggcagaagcccataagtaagggcgcgccatttccgagttgatggacaatggccctccaatcacccccaaccacgcccttcgttttgccatccatgactggctctctcagagatcaactcctttctgattttccccagggatctggattttgtatgtacacatttgttatttcatagtcagtcttgttgttagtagcacatgcatgatgtaaccgaaatataatagagtaaatattt

SEQ ID NO: 44178 - DNA, 2322 bp, Oryza sativa
  Clone ID: PAT_MRT4530_47264C.1
ttatggttttcagagacgtaccagagccaacagcagcagcaggctcgccggacggccagccagccatggcgtcctacgacaaggccatcgagtcgtacaagagggccgtcaccacggcggcgtccctggcggcgtcggcgatgctggtgcgcggcgtcgtgaacgagctggtgccgtacgaggtgcgggacctgctcttctccggcgtcgggtacctgcggtcgcgcatgtcgtcccagcacacggtcatcatcgaggagaccgagggctggaccaacaaccagctctacgacgccgtcaggacgtacctcgccaccaggatcaacaccgacatgcagcgcctccgggtcagccgcgtcgacgagaccaagagcatgatgttcagcatggaggagggcgaggagatggccgacgtccatgagggctccgagttcaggtggcgcctcgtctgccgcgacaactccagcagcagcaacggcaacggcaacggccgtggcgggaacggcaactaccggctcgaggtccggtccttcgagatgagcttccacaagaagcacaaggacaaggccctcaactcttacctccctcacatcctggccactgcaaagaagatcaaggatcaggacaggacgctgaagatctacatgaacgaaggtgagtcgtggttcgccatcgacctccaccacccctcgaccttcaccacgctcgccatggatcacaagcagaagcagtcagttatggatgatcttgagaggttcatcaagcgaaaggaatactacaagaagattggcaaagcatggaaacgggggtaccttctgtatggcccacctggaactggcaagtccagcttgattgcagccatggccaattacctcaagttcgacgtatatgatctcgagctgactgaggtcaactggaactcaacccttcgacggttgctcatcgggatgaccaacaggtcaatcctagttatagaagatatcgactgcactctagagctacaacaacgggaggaaggtcaagagagttccaaatccaatccttcagaggacaaggtaacactatctgggctactcaacttcgtggatgggctttggtcaacaagtggggaggagagaataattgtcttcacgacaaactacaaggagaggctcgaccctgcgcttctgcgtcctggcaggatggacatgcatgtccatatgggttactgctgcccagagtcatttagaattctggcctctaactaccactccattgataaccatgccacatacccagagatagaagagttgatcaaggaggtcatggtgacaccagcagaggtagctgaggtgctcatgaggaatgatgacactgatgttgcccttgaaggccttattcagttcctcaagagaaagaaagatgttggcaaggaaggcaaagctgaaaatgtggagcaggtggtgaaggcagaagaaacagagaaagggatgatgaagaaaaatgatgtcccagagaatcaagatccccaagatgcaagcaaataatgatgcttaaacagtgtgcatagcatataattagtgcatcaaattctgtcagatgtatcgttttgactactagtaaaagatcatttttggaataataatgtactctagggaaatgacttgtgatactatttctattatcacaaaatacatagtaaggtttcatatgtagcagtttcaaagtaaagtattattcaatctaaacatgctacaatgtgcaaaccatcactgttgcaaaaaccatgacttttagaagacaaattgcctaccaaaatgctttctcataacagatcaagtttcagtatcggtgttcatcccattttcttctcgtagatcatactcaacaactagaccaagattatcaacaaatttgtggtacaccgggcaccctgcacactggaagaaaatattgttcctctttcataggcaaccctatttatcaaccgcttggtcctttctccacatgcattgcatgtaaattgaaccaagtaagcttcttcttggaagatttagatcaaaaagtgctttccgccggcgcagaccccgcgtccgaatcagcctccccggagcacgcagagacagccagtatcttacggagacacgaaaccctcaacccgggaaactccgccgtgcgcctgcgggaggaggaggaagcgagcgagacgcaggaaaggggcgcgcggcggcgggagacgctggccgcgaaacagcgccgccgccgccgccgccgggcagccgtacgccgcagccgtcgtcgccatcgccgggaggagggttcgcttctcctctcccctcttcc

SEQ ID NO: 44179 - DNA, 429 bp, Oryza sativa
  Clone ID: PAT_MRT4530_47265C.1
atgggtggcacggcgcggccgcagtcggcgaggcgggcggccgcggtggcgcgccggggaggttcaagaggacacggggaggatggatgcggtggggagctcaccgacgagggaggagcagcgttggcgacgcggagggagtcgtggcgaggtggtcgcgacggcgggacagggcggcaccgagtgggcgcggccagggaacaagagagggagacgcgaggatgggggcgccgcggagctcctcgtcgactcctcgtgctcgccggcctcccgggcacgcgcggcagcagaacgagcgacgacggcggcgagcagccaggcggcaggggcggcagtggcgcgtggcggtggtttcgtgggcagtgcgaaagcggcgacggcgtggatgcgttgggcggcgaaggcggtggatcggacggcgaaaattga

SEQ ID NO: 44180 - DNA, 505 bp, Oryza sativa
  Clone ID: PAT_MRT4530_47266C.1
atgcaaaatacatatgcaatctcacaaagaactctcagtaccagatctgcatccaggtcacccagtcgaggcgaaagtttctttattttcctacaaggactagtatctacccatgggtataaatatgtacacccggggtcattgtaatttatctctatgatcaatacaattcggcgcatcgccacttttttaccttttctactttattttatcgttcggcggaacttggcacctgacgcggggctgcatcggcttcgatctccggcgaatgggtaagtccaatgttccgctggcccaggcaattgtatcgtctacgtcggcgtcgttcaatgctgcatcagtacattcgacctcttggattgctctgatttggacaatatgtttgcctggctatttatcatgtgtctatattaatctagtcttagaatctcaatttagctctatcggttgtctctcgctttagggtttctgccggtatcggctaaatcgccctgctagattagat

SEQ ID NO: 44181 - DNA, 237 bp, Oryza sativa
  Clone ID: PAT_MRT4530_47267C.1
tccacgcgtccgcccacgcgtccgcccacgcgtccggagagaaatggcctctttcaagcagcagctgatgctcctcaggagggtgatggcgatgaagccctagacgaagaggctatccgggtttggccttaaaccctctgctgctttctccaggctccatgtgccgtcggcggtggtctccctgcagtcaagccgtcttgtcctgtgtgtgtttgatgaccctgacgcgactgactc

SEQ ID NO: 44182 - DNA, 1757 bp, Oryza sativa
  Clone ID: PAT_MRT4530_47268C.1
aggtcaagaagcaggttgatgagcagctgcagaaagggtacattcgaccaagtacttcatcttggggtgctccggtcatttttgtggagaaaaaggataagacgaagaggatgtgcgttgattatcgcgcactcaacgaggtcactatcaagaacaaatatcccttgccgcgaatcgatgatttgtttgatcaactgaaaggagctaaagtgttttctaagatagacctgcgatcaggctaccaccaattgagaattcgggaagaggatattccaaagacggccttcaccactcggtacgggctatatgagtgcacggttatgtctttcggacttaccaacgcacccgcattcttcatgaatctgatgaacaaagtgttcatggaatttctggacaagtttgttgtggtgtttatcgacgacattcttatctactcaaaatccgaagaagaacatgaacaacatctccgtctagtactcgagaagttgaaggagcaccagctatacgccaagttcagcaagtgtgacttctggttgacggaagtcaaatttctgggccatgtcattacagctcagggtgtggcagttgatccatcgaacgtggagttggttaccaaatggaccccgccgaagaccgtgtcgcagattcgaagttttcttggacttgcaggttattaccgccgattcatcgaaaacttctccagaatcgcccgacccatgactcagttacttaagaaagatgagaagtttaaatggacagctgagtgcgataagagttttgaggagctcaagaagaaattagtatccgcaccagttttgattctgcccgaccagatgaaagacttccaagtctattgcgatgcatcccgccacggacttggattggttcatgctttgaagatctggaggcactatctgattggcaaccgctgcgaagagtttgagcatctcaacgtgggaattgttgaacacggttttgtagccgctctggaggcacggcctacgctcgtggatcaagtcagagcagctcaagtaaatgattctgaaatagaagagctgaaaaagaacatgagagtcggaaaagcccgggatttccacgaagatgagcatggcacaatctggttgggagaaagattgtgtgtacctgacgacaaggaactgaaggatctgatactcaccgaggctcatcagacccagtactccattcatccaggcagcactaaaatgtatcaagacctcaaagaaaagttttggtgggtcagcatgaggagagaaatagctgaattcatcgcactctgcgatgaagaattggggacccgtttaaatttcagcacggcctatcacccgcaaactgatggtcagaccgagcggatggcaccgtttgaagctttatacggccggaagtgccgcacacctctcttctgggatcagacaggcgagcgtcaactgttcggaacagaggccgaggcccagccaggccgcccgccgccctcctctcccggggtcgccgacaggttgggcccacctgtcgggtccttcccccacctccggccgacgccgcgccagcaaccgccgcgcccgaaaccgccgccgcgtccacgcctccgcctcctccgggccacgtcgaccacgcccgcgcctcccccgtcgctccctctcgctttttccccatttcgcctccctctcccgagctccccatcgctcccgcgccgtgcgcccatccgccgctgcctctcccgctactccggtcgcctctag

SEQ ID NO: 44183 - DNA, 633 bp, Oryza sativa
  Clone ID: PAT_MRT4530_47269C.1
atggatgactttgtggcagagttggctcgcatgacactggtggtgggctaccccaatgtgcccgagtattcgactgttctgccgctcagtgccggcgagaacgacaccacctttggtcacatgtgtgccgtgatgaggggtatggacaggatgcactcggatctacgcaaggcgtccaaggccttgaatgacgggaagctcgtgaggatcatagctctgaaggatgaaatcgcgcgcctgaagaaggagaatgcgcagttgaagggtctccccattcccggaggagtccggatccgcaacacgccccgcaagtcgacgacggcacccgtgcgcattcagcttgcgcctaggaacccacctccgcctgcacctccagcagctcctccagttccgcccgcagtttcagaagttcccacagctcctgcagctccagctccagtcccagctcctgtcccagtgtcagctcccacgtccgctctctccttcgctcctgcatcagccgtcaggggtccagccagtggtaacgggggttggttgcctgctactcccagtggcagccacgaccacagcagtagcagttccagtggctcggagccgggcagcggcgagatgtcacgcccggaaattcactag

SEQ ID NO: 44184 - DNA, 5304 bp, Oryza sativa
  Clone ID: PAT_MRT4530_4726C.1
atggccgccgaggaaggagcagagccttcggcgtccgtgaccgaagatgtagaaggacaagcgccatcacagtcgccctcggcccccgcgccatcacaaccgtcttcggcccccgcaacctcagtgcaagtgccgaacacggccgacgtggcgaaggcggctgcggcggcaagagcactccagaccagggcggagatcctttcgacaaaccaactggtggtgcctcaagccgccccatcacagccggcggcgccaactgcgctcgccgttgtacaggcccaaatcagcctggaccccgaagcgcaagccgaagccgacatggaagccatgcggcagaacatgacacggctccaagacatgctttgccaaatgctagaacaacaacaagcatacgaggcgacaaggcggaccaaggccacgtcggctccaatccttcagtattcggcaggctatgccccttctcaagtccggccgcaagtggtgacccagccctctccgccactagccgcacagccgccggtgtacttcgtcgggcagcatcaaccacctggccaagcgacacaaacagtggcggaaggggcttcggctctgcaggcgcaactccaagctttccttcagcaactcaaccaaccccactacatttcaagtacaaccccatcggctcacccggtgccaaccgtttggcagcaagttccaaccccaggcttcggaacaaaccaagcaccaatccaagctgccatgatgtggtcgcagccaatctttgacccatccatggcggcccagcaagtaccaccagttggagccgggcagtcgaatgccgcggcccaactccacgcacaagccacgatttcgcccttcgccacaccgtacccgcagcaaggtgcggtaaacagggcgggaggcgaaaaggggctgccgctgagtgggggaatcaagactcgtccaatcccgccccagttcaagttcccacctgtcccgcgttattcgggcgaaactgacccgaaggagttcctctccatctacgagtcagcgatcgaagcggctcatggtgatgaaaataccaaggcgatggtaatacatctcgctctagacggcatcgcccgttcttggtatttcaatttaccagccaatagcatttactcatgggagcaattgcgcgatgtttttgtccttaactttcgaggcacctatgaggagccgaagacgcagcaacaccttcttggcattcgccaaaggccgggggagtcgataagggagtacatgcgtcgcttctcgcaagcccggtgccaagttcaagacataaccgaggcgtcggttataaacgccgcttcggccggtctgcttgagggcgaactaacaagaaaaatcgccaacaaggagccgcagacgctcgagcacctacttcgcatcactgacgggttcgcaaggggcgaggaggattctaagcgacggcaagctatacaagctgagtacgataaagccttcgtcgccgctgctcaagctcaagcacaagttcaaattgtcgaaccacctcccctatcagttcgccagtctcagccggcgatccagggacagccgccaaggcaaggccaagcccccatgacttggagaaagttcagaacagatcgggcgggcaaggctgtgatggctgtcgaagaagtgcaagccctccgcaaggagttcgacgcccagcaagcaagcaaccatcagcagccagcccgcaagaaggtccgaaaagacctctactgcgcttttcacggacgctctttgcacaccacggagcaatgcttaaacattaggcaacgtggcaacgcgcaagacccaaggccgcagcaaggaacaacagtcgaagcaccccgtgaagcagttcaggagcaaatacccctagccgaacaacgccaagatacacaacgaagggtaatccaagtgattacaagagctgacccgccaagcctgttgtcgaaacggcagaggaagatgcagatccgtatggtccacagcatcacttcggcgggtgagggggcgccacagtacgtgaaccagttgatctctttcgggccagaagacgccgaaggagtcctgttcccgcatcaagatccactggtaatctcagctgagatagccggttttgaagtccgacgaatcctggtcgatggagggagttcggccgacgtgatcttcgccgaagcatatgctaagatgggcttgccaacccaaactcttgcaccggcaccaacgtcgctccgggggttcggcggagaggcagtgcaagttcttggccaagcacttttgctgatagcttttggctcgggagaaaataggcgcgaagagcaaatactgttcgacgtcgtcgacatcccatacaactacaacgccatcttcggccgtgcaaccctgaacaagttcgaagccatttcccaccacaattatctcaagctcaagatgcctggcccaacaggggtgatagtagtcaaggggcttcagccttcggccgcttcaaaacgcgatctagccataatcaacagagcagtgcacaatgttgagaccgaaccgcatgagcggcccaagcacatgctgaagcccacccctcacggcaagataacaaaaatccacatgaacccgctcaacatccccaaaacatccttcatcactccatttggcacattttgtcacctcaggatgcctttcggcttaaggaacgcaggagcaaccttcgccaggctggtgtacaaggtccttggcaagcagctggggcgaaacgtggaagcttacgtcgacgacatcgtcgtaaaaagccgcaaggctttcgaccatgcgttcgacctgcaagagacgttcgacagcttgcgcgcggcaggcataaagctgaatccggagaagtgtgttttcggcgtccgcgcaggcaagttgttgggtttccttgtttccgataggggcatcgaggcgaatcccgagaaaatcgatgccatccagcaaatgaagcctccgtcaagcgtacatgaagtacaaaagcttacaggccgaattgcagcactcagtcgattcctctcaacggcggccgaaagaggtttgcccttcttcaagaccctccggggcgcgggaaagtttaattggacaccagagtgccaagcagcatttgacgagctaaaacaatacttgcaaagcccgccagctctgataagcccacccccaggaagtgaactgctattatacttggcagcttcgtcggtggcagtcagtgctgcactcgtccaagaaacagagtccggacagaaaccggtctacttcgtctccgaagcactgcaaggagcgaagacaaggtacattgaaatggaaaagctttcttacgctctagtaatggcttcgcgcaagcttaagcactacttccaggcccacaaagtcatagtcccatcacagtactccttgggcgaaatactccgaggcaaggaagtcactggccagctcagcaagtgggcggcagagctatccccgttcgacttgcattttattgcacgctctgctatcaagtctcaagtgctagctgacttcgtagctgaatggacaccagtacttgcccccgaccccgagcccgatgaccagttctgggtgatgtgctctgacggttctgcaggcgttgcggcagtcctcttttcgccgaatggtgtgtcgatttggtacgcggcgagattgcagttcgacacaaccaacaatgcagcagaatacgaagccgttctcctgggcctaagaaaggcgaaagcactgggagtccggcgcctgctaattcgaactgactccaagttggtagcaggccatgttgacaaatccttcgaggcaaaagaagagggaatgaagaggtatctggaggctgtttggtccatggaaaaatgcttcaccggcataacggtcgaacacttgcctagagaccagaacgaggaagcagacgccttggcgaaatccgctgcttgtggtggcccgcattcgcctggcatctttttcgaagtcctacatgctccaagtgtgcccatggacagctcggaagtcatgacaatcgaccaagagaaactgggcgaagacccatatgactggcgaaccccattggtgaaacaccttgaaactggctggcttccggtagacgaagcagaagcgaagcgtttgcaacacagagccacgaagtataagatggtctcaggtcagctttaccgctccggggtacttcaacccttacttcgttgcatctcttttgccgaaggcgaagaaatggcaaaggaaatacaccaggggctatgtggcgcgcaccaggctgcaagaacggtggcctccaaagtatttagacaaggagtttattggcccactgtgttgaaagtctgtgttgagcaaatcaagaagtgcgaaagttgccagcgtcatggccgaagccaagccgtgccccagtatgatctgcagcccattgcaccaatatggcccttcgccagatgggggctggacattattgggccattcccagtggcgcgaaatgggtataaattcgcaattgtagctgtggaatatttctctcgatggatcgaagtcgaaccccttggggcaatcacttcggccgcagtacagaagtttgtatggaaaaacattgtttgccgtttcggagtgccaaaagagttcattactgacaacggcaagcagtttgactctgataagttcagagaaatgtgcgaagggcttaacctggaaatcaggttcgcgtcggtcgcgcacccacagtcaaatggggcggccgaacgtacaaatggcaagatcctagaagcactaaagaaaagacttgagggggcggtgaaaggcaaatggccagaagaattgttatcggtcctttgggcccttcggacgacccccacaagaccaaccaagtttagctcatttatgcttctttatggcgatgaggcaatgaccccagcggagctaggggctaactcaccaagggttatgttctctaggggcgaagaggggtgcgaggtatcgctcgaactcttggaaggtgtaagggtcgaagcgctcgagcatatgcacaagtacgccacaagcacttcggcagcttacaacaaaaaagtccgacccacggagctaatgcctggtcatctcgtcctaaggaaaaaggcgaacccagtagcggttggcaagcttgaatcaaagtgggaaggaccatacatcatcaaacacaagtccacgacgggatcttttcgcctagcgacactcaaaggcgaggagttcgaccattcctggaacgtcgcctccctcaagcgcttctatgtctag

SEQ ID NO: 44185 - DNA, 2298 bp, Oryza sativa
  Clone ID: PAT_MRT4530_47270C.1
atggaggtcgtgctcctaaaagaaagggcaataacgacggctgcttctaaggcgcaagtcacacacctcggaaaagggaagagctactgcaatgctttatgcaccgagggcatgtgtaaagaattgcaacaggagcttgaacacctcaacttggggcttgtagaatacggcaccaaaatgtaccaagacctcaaagaaaagttctggtgggtcaacatgagaagggaaatagctgaattcgtcgcactctgcgatgtttgccaacgagtgaaggcagagcaccaaaggccagcaggtttgctccagcctcttcagattccggaatggaaatgggaggagattggaatggactttataacaggactgccccggacatcatctggccatgattcaatctgggaagaattggggacccgtttgaatttcagcacagcctaccatccgcagacagatggccagaccgagagggtcaatcagattttggaggatatgttgcaagcttgtgcgcttgattttggtggagcatgggataaaagcctgccttatgcggaattctcgtacaacaacagttatcaggccagtctacagatggcaccgttcgaagcgttgtatggacggaagtgtcgcacacctctcttctgggatcaaacaggcgaacgtcaactgttcggaacagaggtgttaacggaagcagaagagaaagtcagaaccatcagagagaggttgagaattgcccagtctcgacagaagagctacgcggacaaccgtcaaagggaactcacttttgaagcaggggattacgtgtatctccgtgttactccgctccggagagtacaccgtttccagacgaaaggcaagttggcaccacgcttcatgggaccatacaaaatcttggaacgaagaggagaagtggcttatcagctagaacttccatccaatacgatcggtatccatgacgtgttccatgtgtcccagttaaagaagtgcttgagggtacccgaagaacgagccgactcggagcacattgacatccaagaggatctgacctacgtggagaagccagttcgtatccttgagaccaccggcgccgccgcgcccacgttcccgcctcctccgggccacgtaggccacgcctgcgcatgcgccgtgtcccccgcaccaactccccctccctctcgcctgcgcccgcgcccgagatggctgggattcgaaattcaaatcccgcctctctctcctccccgactcccccacgttggccggcgattcccgcctctactggccacgtccgggctccccctcctctatttaagctccaccgccaccccctctctctttttccccatctcgccgagccctcccgtgccctctaacgccctagcgccgtcaccctcctcttcaccgccgccgccaccactccggtcgccgctagccgccgcgccgagccgcgccgacgacgccgccgcgttcgccgtcgtacgggccaccccgtccaccccttttccgccggattccgccgccggaacccactccgcgccgttcgccggtgagcgccgccatggccgccgccttcggccggcgtcctcgccctcttccaattccttctccctctctaaccccttttaccgtgttcgctatgtggttccggagatcgtcccgccgtcgccgccgccctccgtcgctcgccgtcgtcggtcgtcgtcggtgaggtttccctctcccttcctctctccctctcccatgccgcttagccgccgctctccgccgccggtcggtcaccgccggtcgccgtctcgcgccgccaccgcatgcgcgccgctagccgccgcgcgccatggccgccgggccggcttgcgccgtgcccgcgcgcgccggccgcgagccacacccgcggggccgtcggttcgggtgccgcgtggccgccgcgtctgcgccgcgtcggtgccacgtgtgcgccacgtggtgcgctggttttccccggtccgtggacccggtccgccgtggaccgcccccgagtcactgccatgcttcgtccgtgccgtcgaggatgcttgtggagtggtgttcccgctgcagtccaagtcaaggcttagctccagctatcctttaagttttccgctgcatttatccgaagcctacatccccagggctctgattatgggcgcccatccccagtcaatacgagttcatggcctcgccgatagtctgattgcgcagcctagtccaccaactatgggccacccaggtcaaattaggcctatccaccacaggcccaaccagagccacaactttaggacctag

SEQ ID NO: 44186 - DNA, 570 bp, Oryza sativa
  Clone ID: PAT_MRT4530_47271C.1
ctacgactgctcccgtgcgcattcagcttgcgcccaggaacccacctcctcctgcagctcctcccgcagctcctcctgcagttcctgtagcgcccgcagctccaactccagccccagctcctgttctagtgtcagctcccgcgtctgctctctccttcgctccagcgtcagccgccaggggtctagccagtggcagccacgaccgcagcagtagcagttccagtggctcagagccgggcagcggtgagacgtatctgccagactccaggagccgctcagaggaacctggcgacgagcaggaggacgcattcgactccaccgaccgcaggagccgttccgagcattaggctcgttttcccttagtttatcgacaggaatggcagccgtgcagcaggtgaggacagcaacagcgaagaacgcaccgatggtggacaccccaacagcgcctctggcaacggtccgccacgagcagcagcagcagtagcagtttggtccccctctcccccagttcaagctgccggagtttctacgtgtcaggctacccaccttctctagcaccaccaaccccat

SEQ ID NO: 44187 - DNA, 360 bp, Oryza sativa
  Clone ID: PAT_MRT4530_47272C.1
aaagaaaggcaaggtttttggaaaacattttaaaaggggggaaaaaaccacataaaattttttcccgggcccctttatgaacatggaacggggggggtcccgtttggaaaggaaaatgctaaagccggggcccagaaaatctgaaaggtcccaaacagattcgcctttagcagggacatctccaaggttttctcctttggcatgggcctaaaaaatgggagtccgggtggatgttaatgaaacacccgcaacatttttaacaacatttgctccccaggccaggggcaaaaaaaatgggggaagggctgcagttgctaactaaattccagctccaatctccagcaatggatcactagaaag

SEQ ID NO: 44188 - DNA, 2898 bp, Oryza sativa
  Clone ID: PAT_MRT4530_47273C.1
atggtctacaccaggaatggcacccgcacaacaggcgagggcagcaacggcgaagagcgcactgatggtgtgcaccccaacagtgattccgacaatagtccgccaccacttcccgagaatccgacgctggcccaagtgatggcacatcagactcagatgatggcagccatgatgcaacagatgcagcagcagcaccaacagatgcaccagaggatgcaacagcacgccgaacagcatcaccagcagtttggtccccctccccctcaatccaaactgccagaatttctacgtgtcaggccacccactttctccagcaccaccaaccccatggaggcaaatgactgggtccatgccatagagaagaagctgaatctcctgcagtgcaatgatcaggagaaggtcgctttcgccacacaccagctccaaggtcccgcgtcagctcggtgggacaaccacatggccacacgtccgccaggcacggaagtcacttgggcaaagttctgtcgcagcttcaggaaggcgcaggagaaattcctagcaggtctggatgatgagctaaccaaccagttgatatctggagactacgccgactttgaaaggctggttgacaaggcaatccgtcaggaggatcagcgcaacaaaatggacaggaagagaaaggcggcacagtttcggtccagccaaggaaaccatcagcgaccgcgcttcactcccggacagcagggtggacctaccaccatgatcgtccgccagcaccgcccgttcaactcaagcaactttcaccagggcgccagtggtagtcagaaccaccatggaggtcagccccaccgcggtgtagctccacgcccactagtggcaccagcacagtcagctccgcccgcgcaagccaagaaggagaccagaacaaagccagggtcctgcttcaactgtggtgagcttggtcacttcgccgacaaatgcccaaagcctaggcgtgccgggccaaggttcgtccaggctcgtgtcaaccacgcgtctgcagaggaggcgcaagcagcaccagaggtcgtactggaggtcaagaagcaggttgatgagcaactgcagaaatggtgcattcgaacgagtacttcaccttggggtgctccagtcatttttgtggagaaaaaggataagacgaagaggatgtgcgtcgattatcgcgcactcaacgaggagcacgagttatacgccaagtttagcaagtgtgacttctggttgacggaagtcaaatttctgggccatgttattacagctcagggcgtagcagttgatccatctaatgtggagtcagttaccaaatggaccccaccgaagaccgtgtcgcagattcggagttttcttggacttgcgggttattaccgccgattcatcgaaaacttctccaggatcgcccgacccatgactcagttacttaagaaagatgagaagtttaaatggacagctgagtgcgataagagttttgaggagctcaaaaagaaattagtatccgcaccagttttgattctgcccgaccagatgaaagacttccaagtctattgcgacgcatcccgccacgggcttggatggaaagccaatgtggtggcagatgcattaagcaggaaaagttactgcactgccctatgcatcgagggcatgtgtgaggaattgcagcagttgtttgagcgtctcaacgtgggaattgttgaacaggggttcgtagccgctctagaaacacggcctacgctcgtcgatcaagttagagccgctcaagtaaatgatcctgaaatagcagaactgaaaaagaacatgagagtcggaaaagctcgagatttccttgaggatgagcatggcacaatctggatgggggaaagattgtgcgtacctgacgacaaagaactgaaggatatgatactcaccgaggctcatcagacacagtattccattcacccaggcagcaccaaaatgtaccaagacctcaaagaaaagctttggtgggtcagcatgagaagagaaatagttgaatttgtcgcactctgcgatgtttgccagcgagtgaaggcagagcaccaaaggccagcaggcttactccaacctcttaaaatcccggaatggaaatgggaggaaattggaatggattttataacaagactgccccggacatcatcgggcgagcgtcaactgtttggaacagaggtgttagcggaggcagaagagaaagtcataaccatcagggaaaggttgagaattgcccagtctcgacagaagagctacgcggataaccgccgaagggagctcacttttgaagcaggggattacgtgtatcttcgtgttactccgctccggggagtgcaccgttttcaaaccaaaggcaagttggcaccacgcttcgtgggaccctacaaaatcttggaacgaaggggagaagttgcttatcagctagagcttccttccaatatgatcggcatccatgatgtgttccacgtatcccaattaaagaagtgtttgagggtacctgaagaacaggccaattcggagcacatcgatatccaggaggatctgacctacgtggagaagccaattcgcattcttaagaccagtgaaagaagaactagaaacaaggtcaccaggtggggcccacctgtcggacccgtctcccacctcgcgcccgcgccgccgcgccggcaaccgccgccgcgcccacgcctccgcctcctccgggccacggtcgtcgccacaccgcaccgtcgccgccgacgggttcgcgaggccgaactccaccccgtccgcccctcctccgtcgagggcatcccgaagctcgtccgccggttgccgtcgtcctcccgtggctcgccgtcgccgttcgacgtcgtcttcctccgcgccggccaccctcggtga

SEQ ID NO: 44189 - DNA, 480 bp, Oryza sativa
  Clone ID: PAT_MRT4530_47274C.1
tcaatcagattttggaggatatgttgcgagcctgtgcgcttgattttggaggagcttgggataaaagtctgccttatgcggagttctcccgaagaacaagccgattcggaacacattgacattcaagaagatctgacatatgtggagaagccagttcacatccttgagaccagtgaaaggaggactaggaacaaggtcaccaggttcccttgcaccgtgttcgctaggtggttccggagcttgtcctgtcgccgtcatcgccctccgtcgcttgccgtcgtcaatcgccgtcggtgagacacctcctcccctctccccttcctctctctctctcccgcgccacttagccgccgcgccaccacctagccgcttagccgccactatcgccgtccgcgccgtcgcaccgccggcgctcattacgccgccatcggtcgccggcgtctgccgccgccgccccgcgttagcgccgccgtgcgccat

SEQ ID NO: 44190 - DNA, 882 bp, Oryza sativa
  Clone ID: PAT_MRT4530_47275C.1
ccggccggggcccgtgccaccctccgccgccgcatccagctctcccggtcgccgccggccgtgggcgtccaccgcctccggcctccgaccctcccaccgtcgccgccctctgctcctcttatccgtcgcgcacgccctgcttccccgcctccggcggctaccgcctcctaacccctcctccatctttagaatccgaccacctccctgtcccatcccagtggctccggcggtggtgcgtcgccgccgccgaggtctccctctcaacgcaaggaccccttcctcccctagcccaaccccgaatccagtcaggctccagagatgctgaggaacatcctgtgccagtcgtggaggagaggggcttatgctcttcaagaaggcaaccatcctggggcacttcatgcttgttggagtagatttcacagcgggcagatgttaagctcttccaggagcttctttggtgtggaggactttatggacgaagacaacagcaaaccatacacatacaagaaggagaagagatcaaagaacccgcacaagcacatctccttcaagcagcgcaccatcgcctacatggagcccttcacgctcgacgtcttcatctccaagcgcttcgtctcggcgtccctcacccaccgcacgacgtgcaggcaggtcgcggtggccgggaccaactccaaggacatcaaggcggccctcaagtcgaggtcggacattccggcctgccttgccgtgggtcgcttcctggcagagagggccaaggaggctgacgtctacacctgcacttacacgccgagggagcgggacaagtttgaggggaagataagggcggtggttcagtccctgattgacaatgggatcaatgtgaaagtttacctggattga

SEQ ID NO: 44191 - DNA, 3373 bp, Oryza sativa
  Clone ID: PAT_MRT4530_47276C.1
aaggtgggttgtgagcatatggttttgatggttgtgctcatgacaattaaggaccggttcgcgagctactgttgtgaaacatttaccgtgccaaccacaagccagcatgggcaacggctttatcttttgtatagcatgatttattatggtgtgccagactgtgaagcggcgagaagtctgtgggggtcgctggggagtccattgcctctggttttgagggggagatcatgatccaggaacggtgcactgtgatgagttgtgttgtgcgaggggtattgtcacagttcctttccaagaaattccaggcgtgacacgtagctcctccagcacctcccgcagttcccgcagcgctcgcagctccagctccggttccggctcccgttccagtgtcagctccggcgtccgctctctccttctctccagcgtcagccgccaggggtccagccagtggcaacggagatggtcaacatcaggaatggcagccgcgcagccggtgagggcagcaatggcgaagagcacaccgacagtggatatcccaacagcgcctctggcaatgggcaacagggcagtaactgagtacctccatgagttcaatcgccaagcgcgatatgcaccggaggatgtccgcactgacgcggagaagcaggagaagttcctagcaggcctggatgacgagctgaccaaccagttgatctctagggattacgctgacttcgagaagctggtagacaaggcaatccgccaggaggatcagcgcaacaaaatggacaggaagagaaaggcagcgcagttccggtccaaccaaggaagtcaccagcgaccgcgcttcactcccggacagcagggtggacctaccaccatgattgtccaccagtatcgcccgttcaactcaagtagcttccaccaggtcgccagtggcagccagaaccacccgggaggtcagcccaaccgcagtgcagctccgcgcccaccaatggccacagcacaggcagctccatcagtccaagccaagaaggagactggagtaaagccagggtcctgcttcaactgtggcgagcatggccactttgctgacaagtgcccgaagctaaggcgtgctgggccaaggtttgcccaagctcgtgtcaaccacgcgtccgcggaagaggcgcaagcagcactagaggtcgtactggaaatccaaatatcaccatttctagccaacctcgtccttctcgaatccaaagacctagatgtcattcttgggatggattggctgaccaagttcaagggtatcattgattgtgcgaatcgcacggtcaccttgaccaatgagagaggggaaacagtggtgtacaagtcaccagtcgcactgaagcagggaatctccttaaatcagattgaggtggagaattcggtggtcaccgcggagaaaagttcgaggaaattggaagatatccccatagtctgcgagtattcagaggtgttccctgaggacctcactaccatgccacccaagagagagattgaattccggattgatttggcaccggggactgctccaatttacaagagaccgtacagaatggcagccaatgagctggcagaggtcaagaagcaggttgatgagcaactgcagaaagggtacattcgaccaagtacttcaccttggggtgctccggtcatttttgtggagaagaaggacaagacgaagagaatgtgcgtcgattatcgcgcactcaatgaggtcacaatcaagaacaaataccctttgccacggattgatgatctgtttgatcagctgaaaggagccaaggtgttttccaaaatagacctacgatcaggttaccaccagttgaggattcgggaagaggatattcccaagacagctttcaccactcggtatgggttgtatgagtgcacggttatgtcttttggacttaccaatgcacctgcattcttcatgaatctgatgagcaaagtgtttatggagtttcttgacaagtttgtcatggtgttcattgacgacatacttatctattcaaagtccgaagaagaacatgagcaacatctccgtctggtactcgagaagttgaaggagcaccagttatatgccaagttcagtaagtgtgacttctggttgtcggaagtcaaatttctgggtcacgtcattactgctcaaggtgtggcagtggatccatcgaatgtggagtcagttaccaagtggaccccacctaagacagtgtcacagattcggagtttccttggacgtgcgggttattaccgtcggttcattgaaaatttttccaggattgccagacctatgactcagttgcttaagaaagacgagaaattcaagtggacagccgagtgtgacaagggttttgaggagctcaagaagaaattagtgtctgctctagttctgaatttgcccgaccagacgaaagacttccaagtctattgcgacgcgtctcgtcatgggcttggatgcattctaatgagggcagagtggtcgcttatgcctcacggcagttgcgtctgcatgaaggaaactatccaacacatgacctggaattggcagcgaggcacggcctacgctcgtggatcaagtcagagcagctcatgtaaatatcctgagatagctgaactgaaaaagaatatgagggtcggaaaagcccgggatttccacgaagatgaacatggcacaatctggttgggagaaagattgtgcgtacctgatgacaaagagctgaaagatctgatactcaccgaggctcaccagactcagtactccattcatccaggtagtaccaagatgtaccaagatctcaaagagaaattttggtgggccagtatgagaagagaaatcgctgaattcgtcgcactctgcgatgtttgtcagcgagtcaaagcagaacataagaggcccgcaggactgcttcaacctcttcagatcccggaatggaaatgggaagagattgggatggatttcatcacagatggccagaccgagagcgtcaatcagattttggaggatatgttgcgagcctgtgcgcttgattttggaggagcttgggataaaagtctgccttatgcggagttctcctacaacaacaattaccaggctagtctgcaaatggcaccgttcgaagcgttgtatggccggaagtgccgcacacctctcttctgggatcaaacaggcaaacgtcaactgtttggaacagaagtgctaacggaagcagaggagaaagtcagaaccatcagagagaggctgagaattgcacaatctcgacagaagagctacgcagacaaccgccgaagggagctcacttttgaagcaggggattatgtgtaccttcgtgttactccgctccggggagtacaccgtttctag

SEQ ID NO: 44192 - DNA, 200 bp, Oryza sativa
  Clone ID: PAT_MRT4530_47277C.1
caaccaaaaaccatcaatcaagcgatcaaagaaccagatcgctgatcttggagatgaatgttcacgataaatgattgcatggctcgcacaaggacgattacaatacacgagcctaggcagtgggtacatctaccataaatctttgggtcctaacactaaccacaaacttagcatgacaaaagttggaccatgcatgccat

SEQ ID NO: 44193 - DNA, 165 bp, Oryza sativa
  Clone ID: PAT_MRT4530_47278C.1
atggctgccctagctaggtctatagaagcaggaaaccaagaagggaaggagagacagaagggagatgatttggagcaagaagagaggatttggagtaaggttggggtagatccaggagaaaacgaggtttctccaaaaccattaccccggtacagtggaatttaa

SEQ ID NO: 44194 - DNA, 615 bp, Oryza sativa
  Clone ID: PAT_MRT4530_47279C.1
atggcgaacggcgacggcaagccacgggaggatacggcaaccggcggacgagcttccggcggaaacagcggcggcaagaggttgcacggcgcgggagcgatgggaggctcgggagaggtcggcgaaatggggaaaaagcgagagggggcgacggagaagattaaattgggagagagagaaccggacgtggccgggagaggcgggaatcgccggccgacgtggggagtgggggaggagagagaggcgggattcgaaaatcgaatcccggccatctcggacgcgggcgcgggcgggagagagaggggagtgggcgcgggagacgcggcgcaagcgcggacgtggtcgacgtggcccgaaggaggcggagacgtgggcgcggcagcggttgcgggcgcggtggcgcgccgggagcggcgggaggtgggggaaggacccgacagtgctgcctgggtgaatggagtactgggtctgatgagcctcggtgagtatcagatccttcagttccttgtcgtcaggccgtgcctccagagcggctacgaacccgagttcaacaattcccacgttgagatgctcaaactcctgccgcaattcctcacacatgccctcgatgcatag

SEQ ID NO: 44195 - DNA, 5628 bp, Oryza sativa
  Clone ID: PAT_MRT4530_4727C.1
agcttgccaacagctactggattcgccttcttccttaagacaagatgaccaggcatcagctctgtgggtcgaacttttttgttgtaagttgccgaagtgcttgtggcgtacttgtgcatgtgctcgagcgcttcgactcttaccccttccaagagttcgagcgatacttcgcgcccctcttcgcccccagagaacatcacccttggtgagttagcccctagctctgctggggtcattgcctcatcgccataaagaagcataaacgggctaaacttggttggtcttgtgggggtcgtccgaagggcccagagaaccgatagcaattcttctggccatttgcctttctttagtgcttctaggatcttgccatttgtacgttcggccgccccatttgactgcgggtgggcgaccgacacgaacctgatttccaggttaagccctttgaacatttctctgaacttatcagagtcaaactgcttgccgttgtcactaatgaactcttttggcactccgaaacggcaaacgatgtttttccatacaaacttctgtactgctgccgaagtgattgccccaaggggttcggcttcgatccatcgagagaaatattccacagctacaattgcgaatttatacccgtttcgtgccaccgggaacggcccgatgatgtccagtccccatctggcgaagggccatattggcgcaatgggctgcagatcatactggggcgtggcttggcttcggccatggcgctggcaactttcgcacttcttgatttactcaacacagactttcaacacagtgggccaatagactccttgtctaaatactttggaggccacttttcttgcagcctggtgcgcgccacatagcccctggtgtatctcctttgccatttctttgccttcggcaaaagagatgcaacgaagtaagggttgaagtaccccggagcggtaaagttgacccgagaccatcttatacttcgtggctctgagttgcaaacgcttcgctcctgcttcgtctaccggaagccagccagtttcaaggtgtttcacaaatggggttcgccagtcatatgtgtcttcgcccaatttctcctggtcgattgccatgacttccgagctgtccatgggcacacttggagcatgtaggacttcgaaaaagatgctaggcgaatgtgggccaccacaaacagtggatttcgccaaggtgtctgcttcctcgttttggcctctaggcaagtgttcgaccgttatgccggtgaagcatttttccatggaccgaacagcctccagatacctcttcattccctcttcttttgcctcgaaggatttgtcaacatggcctgctaccaacttggagttaattcgaattagcaggcgccggactcctagtgctttcgcctttcttaggcccaggagaacggcttcgtattctgctgcattgttggttgtgtcgaactgcagtcttgctgcgtaccgaatcggcacaccattcggcgaaaataggactgccgcaatgcctactcccttgtgcgaccacgagccgtcagagcacatcacccagaattgttcggcgggctcggggtcgggggcaagtaccggtgtccattcagctacgaagtcggctagcacttgagacttgataccagagcatgcaacaaaatgtaagtcgaacggggatagctctgccgcccacttgctgagccggccagtaacttccttgcctcggagtatttcgcccaaggggtactgtgatggcactatgactttgtgggcctggaagtagtgcttaagcttgcgcgaagccaccggcgaagtataatagcagttcgcttcctggggggtgggcttatcagagctggcgggctttgcaagtattgctttagctcgtcgaatgctgcttggcactctggtgtccaattaaactttcctacgccccggaaggtcttgaagaagggcaaacctcttttggctgcaaggaaacccaacaacttgcccgcgcggacaccgaaaaagcacttctccggattcagccttatgcctgctatgcgcaagctgttgaatgtctcctgcaggtcgatcgcatggtcgaaagccttgcagctttttacgacgatgtcgtcgacgtaagcttccacattctgccccaactgcttgccaaggaccttgtacaccaacctggcgaaagttgctcctgcgttccttaagccgaaaggcattctgaggtgacaaaatgtgccgaatagagtgatgaaggatgttttggggatgtcgagcgggttcatgtggatctggtggtaaccggaatatgcatctaggaaactcatgagctcgcatccagctgttgaatccatgagctggtcgattcgtggcaaggggaagtcgtcttttggacatgctttgttcaggtctgtgaaatcgacacacatgcgccatttgccgtttgacttccgcaccagcactggattcgccaaccaatccggatggtcaatctcttggataacccctgccctgagcaatttttgtacttcggctttcgccgcttcttggcgatcggcagacatcttgcgcaacttttgttttcttggcttaatgtccggcttgactgctaggtgatgcatgatgagatccgccgggacaccccccacctcgtcagggctccaggcgaagatatcgatgttctttttaagcacctctagtatactctcaacttcttcttcgcctatgtcgccccccagtgatacgggctttgtggggtcggcgtcatcaatttgcacttttgttatcttgccgtgaggggtgggctttggcgtgtgcttcggccgttcatacggtctggtctcaacactgtgcactgctctgttgatcatggctagatcgccttttgaagcggccaaaggctgaagccccttgactactatcacccctgtcgggccgggcatcttgagcttgagataattgtggtgggaaatggcttcgaacttgttcagggttgcacggccgaagatggcgttgtagttgtacgggatgtcgacgacgtcgaacagtatttgctcttcgcgtctgttctctcccgagccaaaggctatcagcaaaagtgcttggccgagaacttgaactgcttctccgccgaaaccacggagtgatgctggtgctggggtaagggcttgggtaggcaaccccatcttggcatatgcttcggcgaagataacatcggttgaactccctccgtcgaccaggattcatcggacttcgaaaccagctatctcagctgagattaccaggggatcttgatgcgggaacataactccttctgcgtcttccggcccaaaagaaattagctggttccgatacttcttgtgggctggctgctgatggttgctcgcttgctgggcatcgaactccttgcggagggcttgcacttcttcgaccgccatcacagctttgcccgcacggtctgttctgaactttctccaagttatggggggcctggccttgccttggcggctgtccttggatcgccgactgagactggcgaacagagaggggaggtggttcggcaacttgaacttgtgcttgagcttgagcggtggcgacggaggctttgtcgtactcagcttgtatagcttgtcgtcgcttggaatcctcctcgccccttgcgaacccgtcaatgatgcgaagtaggtgctcgagcgtctgtggctccttgttggcgatttttcttgtgagttcgccctcgagcagaccggccgaagcggcgtttataaccgatgcctcggttatgtcttgaacttggcaccgggcttgcgagaagcaacgcatgtactcccttatcgactcccccggcctttggcgaatgccgaggaggtgttgctgcgtcttcggctcctcataggtgcctcgaaagttaaggacaaaaacatcgcgcaattgctcccatgagtaaatgctattggctggtaaattgaaataccaaaaacgggcgatgccgtctagagcgagatgtattaccttcgctttggtattttcgtcaccatgagccgcttcgatcgctgactcgtagatagagagaaactccttcgggtcagtttcgcctgaatagcgcgggacgggtgggaacttgaactgcggtgggattggacgagtcctgattcccccactcagcggtagccccttttcgcctcccgccctgtttactgcactttgctgcgggtacggtgtggcgaagggcaaaatcgcagcttgtgcgtgaggttgcgccatggcattcgactgtctggctccaattggaggtacttgctgagtcgccatggatgggtcaaaaattggctgcgaccacgtcgtggcagcttggattggtgcttggtttgttccgaagcctggagttggagcttgctgccgaacggttggtgcctgagcatgttgacgaagtcgaactgcagtccttgattccatggaaaaactcctaggcccggctgaatcggtggcaaccaattaggcacaccttgacttgtattcccctccgggtgggccgatggggttgtacttgaaatgcagtgaggttggttgagttgctgaaggaaagcttggagttgcgcctgcagagccgaagccccttccgccactgtttgtggcgcttggccaggtggttgatggtgtgcttgggcagcgactggttgagcttccagttgcacgtgaggggctgaatgcactgctgcggccgattgctgcccggcaaagtacaccggcgcctgtgcggcttgtggcggaatgggctgggtcgtcacatgcggatggacttgagatgggacataacctgccgaatactgaaggattggagccgacgtggccttggtccgccttgccacctcgtatgcttgttgttgttcttgcatttggcgaagcatgtcttggagccgtgtcatgttctgccgcatggtttccatgtcggcttcggcttgtgcttcggggtcagggctgacttgggcctgcacaacggcaggcgcggttggggccgctgccggctgcgatggagcggcttggggcaccaccagttggattgttgaaaggatctccgccctggtctggagtgcccttgccgccgcagccgccttcgccacgtcggccgcgttcggcacttgcacggaggttgcaggggccgaaggcagttgtgatgtcgcttgtcctcctccatcttcggcagtgggcgccgaaggctctgctccttcctcggcggccatgtctagtccggcgtcgctttccttccacctggcaaccttctccttcacgaccctcttcggtggcattcgctctcagtggtttcgctcggaggtccccacggtcggcgccagctgttgtcgaaatgacaaatgattacctttacgaaagggacatttacaggggtacataatgttataggggctcatgggcccctgatgggccgtctggcgatcgccggccctgtagcccttaggcttgataggccggaaaggcttcctcggccctcgccttgcacccttcgcctgagatagtcttcgccttacacccttcgcctgagacgcctctggcctggcagggcactcgtacgactcttcgcctcatgccgttcttgctccatagccttcgccac

SEQ ID NO: 44196 - DNA, 2873 bp, Oryza sativa
  Clone ID: PAT_MRT4530_47280C.1
atggccgagcacccacccaaccaccgcggagaaggcatggatgatttcgtggcagagttggcacgcatgacactggtggtgggctaccccaacacgccagagtacacgactgttccaccacttagtggcgagcttcctcaccgtgtccgcctggaggtccatggctacgtgggtacttgcctcgctaacatggtggttgaggcgtctggaggcacagcagatcacgcatgtcaggaggcagcatatctgatgatggccagactacgggagcgccacacctacatcttccacgacacggcgtaccggttccaccctcgtcaagccagcggcagcgatgtcagttccttccgtccgacagccggcgagaacgacagcacctttggtcacatgtgcgctgtgatgagggggatggacaggatgcactcagacctgcacaaggcgtccaaggccttgaatgatgggaagcttgtgaggatcatcgctctgaaggacgagatagcgcgcctgaagagggagaatgctcagttgaagggtcttcccgcgctaggaggagtccggatccgcactactccccgcaagtcgacaacggcacccgtgcgcgtccagcttgagcccaagaacccacctccgtcagcagctcccgcagctcctccagttccacccgcagctccagcagttcctgcagctccagcgccagctccagctcctattcccgtgtcagctcctgcatccgctctctccttcacgccagcatcagccgttaggggccccgccagtggcaaagggggttggttgcctgctacacccagtggcagccgcgaccgcagcagcagcagctccagtggctcagagccgggcagcggttgcttgcttgtgggtcagtcggcgatggtctacaccaggaatggcacccgcacgacaggcgagggcagcaacggcgaagagcgcactgatggtgtgcaccccaacagtgattccggcaatggtccgccaccatttcccgagaatccgacgctggcccaagtaatggcacatcagactcagatgatggcagccatgatgcagcagatgcagcagcagcaccagcagatgcaccagaggatgcagcagcacgccgaacagcatcaccagcagtttggtccccctccccctcaatccaaattgcccaagtttctacgcgtcaggccacccactttctctagcactaccaaccccatggagacgaatgactggctccatgccatagaaaagaaattgaacctcctgcagtgcaatgatcaggagaaggttgctttcgccacacaccaacttcaaggtcccgcgtcagcttggtgggacaatcacatggccacccgcccgccaggcgctgaagtcacttgggcggagttctgtcgtagcttcaggaaggcgcaggatgtccgcactgatgccgagaagcacgaaaagtttatggcaggtctggatgacgagctgaccaaccaactgatatctggggactacgctgattttgaaaggctggttgacaaggcaatctgtcaggaggatcagcgcaacaaaatggacaggaagagaatggcggcacagctccggtccaaccaagaggaggcgcaagcagcaccagaggtcatactgggtacgtttcctgttaactcaatccctgcaacagtactttttgattctggtgcaacgcattctttcatttcaatgaaatttgtggggatgcatgggttaaggaaagaagagcttagtacaccaatgagggttcataccccaggaaatagttcaacctcggtcagttttatcccttcagtgctaatagaaattcaaagatcaccatttctagccaacctcattcttcttgaatccaaagacctagatgtcattcttgggatggattggctgaccaagttcaagggagtcattgattgtgcgaatcgcacagtcaccttgaccaacgagaagggagaaaccgtagtgtacaaatcactagtctcaccaaagcaagggatctccttgaatcagattgaggcggaaatcccagtggtcaccgaggagaagaattcgaggaaattggaagagactcccatagtttgcgactatccagaagtgtttcccgaagacctcactaccatgccacccaagcgagagattgaattccggattgatttggcaccgggaaccgctccaatttacaagagaccgtacaggatgcagaggtcaagaagcaggttgatgagcagctgcagaaagggtacattcgaccaaatgaaggactttcaagtctattgcgatgcatcccgccacgggcttgggtgtgttctaatgcaagaaggcagagtggttgcgtatgcctcgcgacagttgcgtccacatgaagggaattacccaacccatgatctggaattggcagcagtggttcatgctttgaagatctggaggcacaatctgattggcaaccactgtgaagtatatacggatcacaagagtctgaaatacatcttcacccaaccggatctaaatctccgaccacgaagacggctggaattaatcaaagactatgacatgagcattcactaccacccggggaaggccaatgtggtggcagatgcgttaagcaggaaaagctattgcaatgccctatgcatcgagggcatgtatgaggaattgcagcaggagtttgagcgtctcaatgtgggaattgtggaacacgggttcgtagccgctctagaatcacggcctacgctcgtcgatcaagttagagccgctcaagtaaatgatcctgaaatagtagagctgaaaaagaacatgagagtcgaaaaggctcgggatttccttgaggatgagcgtggcacaatctggatgggggaaagatt

SEQ ID NO: 44197 - DNA, 318 bp, Oryza sativa
  Clone ID: PAT_MRT4530_47281C.1
aagcccctccccgccgactacctagtcctcgccgccgccgaccacacgctcgacggccgcgccgaggcgcactacacaacccactccgagaccaaccatgacctagggcaaaggatcaggggagggatgcaaatctactacaagaccttgaatggaaagaccataagcctcgaagacgagacgccagacaccattgacaatgacaaggccaagatccaaaacaaagagggcaaacccccaaacacaccaagtcctataatagccggaaagcaaccggaggaatgacacaccaatcacagaacaacaaacaatgcagaa

SEQ ID NO: 44198 - DNA, 687 bp, Oryza sativa
  Clone ID: PAT_MRT4530_47282C.1
atgccgatggagcaagtcttcgagcactacgacaaagacaccctaaagatggccatgctgaagcatgaagagactttcagacagcaggttcatgagctccatcgtctgtacagaattcagaagcttctgatgagagacctgaagagggagctcaagaaccagagcaacatgtcaacctcctccccgaacggattcgccgagtacagcagagccgcactggacgccatgcgctcctacgagcaatgctacggcgcggccactcgccgcggcgccgccgtccaccacgcggcggcggcggcccgcgcggcgctgagcctcgtgccggcggtcgagtacgcgcagagccccgaggaggaggacgcggaggagaccgacgacgaggaggaggcggcggcggcggagctggagctcacgctcgccgtgggcgacgccgccagtgccaagaagaggtacagccgcaacgagcaccactcccccgggcagagcttctcgtcgtcgtcgacggagtccgacgtgctcgtcacaggcgtccgggacgcggacgcggcctcgccgccgtaccaccacaagcggaggccgggtccggcggcggcgttcgacgtggtgcaggtggacgacggcgccgtgcaggcggcgccgccgccgccgccgctgctgttccactggctcagccttcggatggcgtga

SEQ ID NO: 44199 - DNA, 636 bp, Oryza sativa
  Clone ID: PAT_MRT4530_47283C.1
atgcaatctctgctgcggcgtgtccatcttgccggaagccatggctccgccgcgaaactgttgagctctgcagcctctgaaatcgcgcagtcgggcgctaagaatgaattggagccaacagttggctatactattaaacttgctctcaagaggcctgacaagacggctatgcacgctagagcaagtataatagagagctgtaactgtaagagcagattgactatatatgaattggagctagtagtgggctatactattaaacttgctctaagatggctaaatgctgaggtggatgagagaggagaggaaagagatgagaaacaggctatcttgaacatggaggcagctgacaaggtacttggggaaagagagattcctgatgtgcagcctggatgtattctccaaatgagactgcaagttcctgagaagaagcggcgcgagtctacgttgaaaggcattgtcatagcaagacgcaatgctgggatcaatacaactttcagactgcgtagattagtagctggtgttggagtcgattactctccaaacatcaaagaaatcaaggtcttggacaggaagaaagtcaggagagcaaagttgtattacctgcgggacaggatgaatgcacttaagaaatga

SEQ ID NO: 44200 - DNA, 2059 bp, Oryza sativa
  Clone ID: PAT_MRT4530_47284C.1
atgcagcttggtaggatagaggatacgcagagcaatccgattcaccgaccgattaaggatgttacagagggcaattacaaggctacggatgttgaggttattgggagcaatcacgctgttgatgaagatgctactgttgatgaagatgtatgtcaagccgggagcagcgctcgtcagattgggagtaggctcgccttgcatagaaactatgctgccaaggacatcaagtttggtgtcgaggcccgggccttgatgttgaggggtgttgaggagttggctgatgcggtcaaagtgacaatgggtcctaagggacgcactgttgttattgagcaaagctttggtgctcctaaagttacaaaggatggagttactgttgccaagagcattgaattcagtaacagggttaagaatgttggtgcaagccttgtgaagcaggttgctaatgcgactaacgacactgctggggatgggacaacatgtgctactgttcttacaaaagctatattcgctgagggatgcaagtctgtagcagctggaatgaatgcgatggatttgagacgtggtatctcgatggctgttgatgaagtagtgacaaatttaaaaggcatggccagaatgattagcacatcagaggaaatagcacaggttggtactatatcagctaatggggaaagggaaattggtgagctcattgcaaaagctatggaggtcggttggcaaagaggcagtcatcactattacggatggtaacaccctctacaatgagcttgaagttgtagaaggcatgaaacttgacagaggttatatctctccttacttcattaccaaccaaaagaaccagaaatgtgaactagacgatccactgatcttgatacatgacaagaaagtgtccaaccttcatgctgtggtgaaagtgttggagttagctctgaagaagcaaaggcctctgcttattgttgcagaggatgtagaaagtgaagcattgggtactctgattattaacaagcttcgtgcaggcattaaggtttgtgcagtcaaagctcctgggtttggggagagcaggaaagccaacttacaggacctcgctatccttactgggggagaagtcataactgaagaacttggaatgaaccttgagaattttgagcctcagatgctggggacttgcaagaaggttacagtatctaaggatgacacagtcatccttgatggagctggagataagaaggccattgaagagagagctgagcagctgagatctgcaattgagctaagcacttctgactatgataaagagaagcttcaggagcggttagcaaagctttctggtggtgttgctgttctaaagattggtggagctagtgaagcggaggttggtgagaagaaggatagagtgactgatgcactaaatgctaccaaagctgctgtagaggagggtattgtaccaggtggtggagttgcccttctgtatgcatcaaaagacctggataaattgcagactgcgaactttgaccaaaagattggtgtccagatcattcaaaatgctttgaagaccccagtgcacacaattgcttcgaatgcgggtgtagaaggatctgtcattattggcaagcttttggaacaggataatactgatctaggttatgatgctgctaaaggtgaatacgttgacatggtgaagtctggtatcattgacccactaaaagttatcagaacagctctggtggatgctgcaagtgtgtcctctctaatgactaccacagaatctattattgttgagatccccaaggaagaggaggcagcagccgcagcacccgcaatgggtggcatgggcgggatgggtttctagcttactctccggctcatgcaaagttattgtgtgataaatttattccctagattagattatttttgcggtgcggacatctttaactgatgaggtggctgtcagattttgattctgctgcaagagaattgtaacttgaagtagtagaattgaactttggaatttgggatgcataaaatccttctatataggtggtgcaagttggattttgtg

SEQ ID NO: 44201 - DNA, 251 bp, Oryza sativa
  Clone ID: PAT_MRT4530_47285C.1
tgagacgtgacaagggacagacggagaagaggggtccaaacggcttcctcgtcccattgccaggtcattacctgtaatgtgctgtgctgttgagatgccaacatgcctcatacattcgtggacgtacccttggcatcgccgtaggccggtcagttccgtgtcaagactctattcaccgagctgtgacacaacctccacttctcctgatgctgcaaggatcctgatggcctatttacttgcattcttggcca

SEQ ID NO: 44202 - DNA, 756 bp, Oryza sativa
  Clone ID: PAT_MRT4530_47286C.1
atgatccgctcaccacacgccgcgaattccctgcaacttttgcttgtcttcctgctggcgacgacgacgctactgacatcggcgaaggatttggctgcgccaagaaggcaagaagggcatggccgggtggttccatcaacggccaccctcgccggttgccagagctcatgcggcgatctgaccttcgtgtaccccttcggcatcggctccggctgcttccgaagtcccgacttcgagctcacctgcgactccaccacaagccctccgagactcctcttccacgatggtatcacccaaattgctggtagtattaacatcgtttctacagagtttatggacacagataacagtgttagcacccgcttttctcataccatctccatgagaaatgcatccgttgtgagctggtcgttatctccaaaattgcttgaacattctcttgatgctttttacctgacgctgtggggactacgtttctccggctgtgactttgatgtttattggttaaatcgtccatcaatcaacaaagcaactcccaactgcacagcaacctgtcctaaaggagagagcacgggtatggtgtctcctatgcagcattgcaacggcacaggatgttgcactatcgactttggtgccgagatcaatgcttattcatctactatcgaatttaaattcgtccgccaagcagaaaccaatctagaatcgtaccataaccgaagcttgcatgcctgcaggtcgactctagaggatccccgg

SEQ ID NO: 44203 - DNA, 1500 bp, Oryza sativa
  Clone ID: PAT_MRT4530_47287C.1
gcgcgccgcgcgccggcgccgtggcccccggaggtagcagccgaaggcgaccggagctcgcgcaacaggagagctgtctccatgaggaagctgtgcccgaacctggagcgcgatgacgcgctggacacggtgctcgaggtgcccatcccggaggagatgttctcacgcggcagcggcggtggcggctcccgcggctccaggttcggctgcaccaacgtcaagtcgtgggtgcggccgaacgcgtccgaccgctccggcggcgccggagagccgtgctccatgagccgcggcgagctgcagctcatgctcggcgtcatcggcgcgccgctgataccgctccccgtcgaccacgccaagcagtcgccctgctccgtcctctgcgaacagctcaaggccgatcccattgagtcgtccacggccaagtacataatacagcagtacatcgcggcgtcgggcggggagtgggcgctgaacaaggtcacgaacatgtacgcgatggggaaggtgaggatgaccgccgcggagctcaacagcagcgacgccgacggcggcggcggcggcggcggagggcaccgcggcgggaagaagagcagcaagaacggcggcgaggttggcgggttcgtgctgtggcagaagaagccggagctgtggtccctggagctcgtggtgtccggctgcaagatcagcgccggcagcgacggcaaggtcgcctggcgccagacgccgtggcatcagtcgcacgcctcccgcggtccgccgcgccctctccgccgatcgctccaggacaggacagatcggtcgagtacccgcacggccgagcgacatgattacgcctttgccgcactcattgggccgttggcattagctgtggtcaagggacttgacccgatgctgacggcgagcctgttcgcggacgcggtgtgcatcggcgagaggagcgtggacggcgaggactgcttcgtgctcaaggtggaggcggaggcgtcgagcctgcgggcgcgcaacagcagcagcgtggagatcatccggcacacggtgtgggggtacttcagccagcggacgggcctgctggtgcagctggaggactcgcacctgctgcagatcaagtcgagcggacacggcagcgtcttctgggagaccaccatggagtcgcacctccacgactaccgcgccgtcgacggcgtcaacatcgcgcacgccggccgcaccgccgtctcgctcgtccgcttcggggacagcagcgacggcaacacgcggacgcgaatggaggaggtgtggaacatcgaggaggtcgacttcaacatctggggactctccatggactgcttcctgccgcccagcgacctcaaggatagcaaggaggacaaggacgtctccgccgccgtcaagcccgcgcggccgccgccgataaggataccggcggtggccgtccgcgtcgggccatcgcaggtcgccgccgtcaacatggacgattccgactcgctcattgcgaggtcatga

SEQ ID NO: 44204 - DNA, 375 bp, Oryza sativa
  Clone ID: PAT_MRT4530_47288C.1
ggctcctcatgccccaattaatgtttttcacttttagcttaccgatttgttcccttagaattgacatgaaaaaaaatagccttgtttttttacattacacacgggttgatctgatgacattgttcctaacagttttagcaacacagtttttaattcagtattcattgtagtcgtcgtcgttcctgttgagaaaccgtttgacagcgccaacgattgtttcgggcccgatgaacagccccagcgtttcaaagccgccgccgacaccgacgggcacttttgggccgggagcgaaaaacgagaacggggaccaaccgtagccgtagccattgccgtaaccgccgaccaaaggcggggccaccggtgggttgatgtaaa

SEQ ID NO: 44205 - DNA, 873 bp, Oryza sativa
  Clone ID: PAT_MRT4530_47289C.1
atggaggtttggaacacggtggggcaggcggccatcggatggctggtggagagcgtcctcgggtcactgttcacggacaagctgagctcctggttgaggcgagttaatcttgacgacaatgtcgaggagctcgtgtcggagatgaggaacgtcgccgtggtgctcgaggccgccaaggggatgaaggtcggcgatcagaatgagccgatggctgggtctcttctccatctgaaagacctgctgtacgacgcggatgacgtgctggacaagctcgactactgtcgtcttcaagaacagatcataaaagatgctcgtggtgatgtcagcaagggtctcaagataaacggattaaagtctcctgaagcttcaaatctgagtcatcggagtacagcccgggccacaaattcaacaacaacgtcttatgttcttgagcccatagtgtatgggaggccaacagagattgaatctatcaaaaatctgatcatgagcaatagatccgatggcatgatcgtcctgccaattgtaggcaatggagggatagggaaaaccactctggcccagcaaatctataaggattcggaaattagaaagtctgcaatcaagatatggatccatgtatctgataagtttgacttgcacaaggtgacgagggagattttggagtgtgtctccaagaagaagcaaaaagaaacaagcaactttaatgttgagttatgtatgtgttggcccatgaggcccatatactactcatatgtacatgtatatagcagagttagagaaatgaaaaaagtagtgaagcttctagagaaaaattcccaaaacttcatggtatcagagccaatcggctggcggctggcgacgggcgacggctaa

SEQ ID NO: 44206 - DNA, 573 bp, Oryza sativa
  Clone ID: PAT_MRT4530_4728C.1
atggctgccgaagaaggagcagagccttcggcgtccgtggccgaagatggagaagcacaagcgccatcacaaccgccttcgggcccccgcgccatcagaaccgtcttcggcccccgcaacgtcagtgcaagtgccgaacacggccgacgtggcgaaggcggctacggcggaagggcactccagactagggcggagatcctttcgacaaaccaactggtggtgccccaagccgccccatcgcagccggcggcggccccaactgcgctcaccgttatacaggcccaaatcagcctggaccccgaagcgcaagctgaagccgacatggaagccatgcggcagaacatgacacggctccaagacatgcttcgccaaatgcaagaacaacaacaagcatacgaggcggcaaggcggaccaaggccaccatcaaccacctggccaagcgccacaatcagtggcggaaggggcttcggctctgcaggcgcaactccaagctttccttcagcaactcaaccaaccccactacatttcaagcacaaccccatcggctcacccggtggggaatacaagtcatg

SEQ ID NO: 44207 - DNA, 249 bp, Oryza sativa
  Clone ID: PAT_MRT4530_47290C.1
atgccgctgccgtcgcacatcgaggcgcatccaggccgccgcgccgccgccgtcgcacatcgaggccgtcgcccgtcgagcccgccgcgccgctgccgtcgcacatcgaggtcctcgccgtcctgcaatctctcgctgcccctgcctcttgccgccatctctcgctgctcttccccagcaatgtggcttgctcaaaagctcgatatggacgacggctttgtcaagatccctctgccttgtgacttgtga

SEQ ID NO: 44208 - DNA, 674 bp, Oryza sativa
  Clone ID: PAT_MRT4530_47291C.1
cctcaaattcgacggatcgcggtctgaccaaagtagttgcaccggtctgaccacctgaagaacgtcggtctgaccgagatcaaactctggtcgaaccgctgatatcacctgctgtcgcctgaagtcgcctgatgccgtcgccggtctgaccaccgcttcttcgccggtctaaccgccgtggtgtcgccggtctaacgctccctctctatttatacataaggtaggcagcctaaagccacaaaccaaactcatactagaagtcctaatccacctaggaaaccttcctgtacaagaaacaaactttacaaactccaatcattccaaattcggactccttccaaattcgattccgcatcccatatgcacacaatacctccatcgtatgccatatgtaatcttcaccaaccacgtgcattgaactctagcttaagtatcccgcatgatatctgaccgtcacggacgtcgccttatccccaagtcgactcccgatccatcaccggcaatactctcccgaggcatcaagtcacctacacatgaatcaaacaaagaaaccatattctgagaccaaggtatctccaacttgacttattgttatcaaacaacagtattacatacgcctcaaccctctgtccagcttaagcccgagttggtcggataggagtgagagatcgcga

SEQ ID NO: 44209 - DNA, 607 bp, Oryza sativa
  Clone ID: PAT_MRT4530_47292C.1
caccattttggaacatcaaacgctcacagcgtcgtgtatattactcaagccgtgcccgggttcaagttgtcaaacaacaatggaaagacagtgttcaacggcgtagcttcgccgcggacagctgcttattataccacacactatgcagttgtaaagaaggcacaaaaaggaagaaagggaattggtggcctttaaccaattgccaatttccaaaggaacccaattcccttaaccttcttaattggttaaaaccccaaccaatttcccaaggaaagaagttcccaattcctttcccgtggccttccttccccaaattgaattgtttcttaccataataccatattcccattcttccaagaagaagagcttccaagaagcttccaagccaataaccagaagaagaatgatttcggttcccacttcaccacaaccaataccaagagcctaccaagaccgtttataatccgccagaaccctcttagtcgccttccgaataaagaatacttaaataaataaatccaaccaatttttctgctatgtccttgtcccattctttcgactaatgatgataaacccttctctttacccttaaaaaaaaaaaaaaaaa

SEQ ID NO: 44210 - DNA, 242 bp, Oryza sativa
  unsure (1)..(242): unsure at all n locations
  Clone ID: PAT_MRT4530_47293C.1
tcgaggccattagcttcctcctcgtcgtcgtcgtcgtcccgcgtcttctccttcttcttggcgccgcgggttttcttgttcttggtggtggtggtggtcgtcgtcttcttgccgggtcggtcgtcttgctgggtggctngagggcacggaggagtttgaggaggagattggggttttcccggggactnctngccggtcancggttggcgggctcagttaaaacggcaagttcanttattggg

SEQ ID NO: 44211 - DNA, 328 bp, Oryza sativa
  Clone ID: PAT_MRT4530_47294C.1
aagcttgaatgatcccgaaaagcttttcgccatattacacaccatcacttgatgtgaaaagatggataatttgtgaacggactagggtacagccaaacaagccaacaagagccatacatgaccttgagcgccaacaaaagagggggcaacgcacaatagtacgaacggaaaggagcaaataacagccatgcaatgcacaggcccggtgaacacgttaaactacacagagatggatatattcggaatccttggcaagaacactgccaaagatggctagaccaacagccttactcggccggacgaaggttaaaatgatctggtctgccct

SEQ ID NO: 44212 - DNA, 249 bp, Oryza sativa
  Clone ID: PAT_MRT4530_47295C.1
atgcggggccatcagcttggcctggactttctcccgccggagattctcaatgacgtcctctcccacctccccatccacgacaccatgttggctttcaagaaggagcacaaggatttgaagtattgttggctagatctccatattgctaaaaagactatcactcctgatggtgttgtttccttacaaagatggtggataggagaagatgaggtggtgtttgaagctcgtgcagataaagatgaagattaa

SEQ ID NO: 44213 - DNA, 429 bp, Oryza sativa
  Clone ID: PAT_MRT4530_47296C.1
ttgtttttttttttttttttgttttttttttttttttttttttttttttttttttttttcacgttaattttctccaggggcattaattaacaactaattaaacaggggccgtttttacccctacccgtccacagtacatatccacttgaaaaaaagtttaaatgatgcccaagcccaacaatggggggaaaacctcgggagatcgaccgaccctcgaaattttacttttcgtcgacgtcgttaacaaacttgccggtgccggggttgatggcggcgataaaaaaaaaaaccaccttaaaaaggacgagcggttcaatctcgttgatggggaccccggtctcaatgttaacctgcgcgagggcccccttgccgggaataatctccccaataatggaaaaggcaatgccaagctgcgcaagccggccaaaa

SEQ ID NO: 44214 - DNA, 201 bp, Oryza sativa
  Clone ID: PAT_MRT4530_47297C.1
atggcaaaagaacagccagccaaccttgggaagtttatgacaaccttcatggagctcataaggctcatgatacagcagttgaaccagcaacaacagggaaatgatgctcaggcagccaacaatgacacaatgaacaccgggcttcgagttgagcatccaaaccggttgtcgtggggtaaagattttgatagaaggggttga

SEQ ID NO: 44215 - DNA, 1568 bp, Oryza sativa
  Clone ID: PAT_MRT4530_47298C.1
ggcctaaattggagtaaccatcattgccaattagagatagagactttccaagatcatgttgattcagctatgtatcacgcattaatcaataaatccggagttttggtcaatacattgtcaaatttgatcaagtcagtggttgatggatcaattgctgaggaaaagacaggaggaccaatctcttttccaggaggtgtttttcccaagtatagagaaatcaaaactaatattgggggtggtcagcctcaaggaaacctcatgtcaacatcaggatcattgtaacaaaagcaaccaccggcatcaaggactttaggaccaagcatcatgactccaccacaaccgatatacaatcagtatgagcaacaacatcaaggaggagttcaacaacaacccttggccgatatgattgcagatgcggtaagggaacagtttggaattaaacctaaagacagtgggatcatgtatcagcatccatatccagaatattttgacagagtaccattgccaaaccgatacaagattccagacttcttaaagttttcagagcaagataatgtgactacatatgagcatattagccgatttttggcacaatttggtgaagcatcggctatcgagactctgagagttaggtttttccctctatcattgtttggattggctttcacttggttttcttctttaccataaaattctatcagatgttgggctaatctagagaaacaattccataaatacttcttcagcagtgttcaagaaatgaagttatcagacttgactgcaatcaggcagagggctgatgaatcggttccaaattatattcatagatttagagatacaaggaatagatgtttcagtttaaattgattaaattacaactagttgatttagctttccagggattgattgggccaataagggagaaattttcatcttaagattttgagagtttagcacaccttgctcagaaggtatcggctcatgaacaaatattccaggaggttaaaaaggttcaagaaagtcaattatgtctatagttgtgtttcagactcagatgatgatcaagaccctgaaatcagcttggctgagtggtctaaggtcaagaagacaactatgtgtcaatgggtcaaggatacaaacaaggaggagaaatacgactttgacattaataaagccgataagatatttgacttattgttgtaagaaaagcaaattcaatttccaataggtcatgttctgccattggctgaagagctgaagaagaggaagtttgtaagtggcacaatacaggatctcatcatactaatgagtgcaagatgttcagacagcagattcaatcggccattgagcaaggaatgattaagtttgatgacggcaagatgccgataaagattgatggacattcttttcctgtaaacatgtaccagaagaggcatgacaagcaagtccagaggaattatcagaattttagtgacaaggttgatcctcattggaatttcgacttctttaggttttgttggaatgaagggatgaggttgccatcaatcatggcagttcatctgatcagg

SEQ ID NO: 44216 - DNA, 817 bp, Oryza sativa
  Clone ID: PAT_MRT4530_47299C.1
taattttttttttttgaatttgaaacccaactttgcataaacttgtgtcagcatcacacctgcttgcgtaatagagtttagaaaagtttctttattcatagattctgaccttgtgatcgccatggcgactggcctctctccctgagccaaacctctgggcactattcagctccggtgcatcgccggcgacggcgtccttgccggtgagcctctggacgacggacttgaagtcgtcggcggtgtcggcctccacgtacaccgtctcgatgatcttcacggtcaccggcttcgcttcatcctcccgcatgcagttggcagtggtgctctctggatttttacggaggaggaagaagaggtcgaggtggtttgcattggcgtctgctctttgggccccgtagttgacaagcgatgatccaggatctccattaagtacaacatctttctttactggcagttcagaagctcttgaaccctttgtgtcaccctcccggtagagcctgaggtagagcttgagaggctcgacatagtcctcgaatccgagcgtgcccattgaccagatcaggtcgtccccattgatggtcttgcgcttctccttgaggcacttgtcgcttgcttcgctggtgatgaagctgatgaactcggagacgcactcctggacggactccttggagtccttggcgatcttgccgttctccggcacggcccggcgcatgatgcggccgatgttggcgatcggcaggaaccggtcctgctccttccctactccgcctccgccgccgccgccgccgttctccgtcccgtcgaacccctccgacat

SEQ ID NO: 44217 - DNA, 2310 bp, Oryza sativa
  Clone ID: PAT_MRT4530_4729C.1
atggacgacgacgaacggcgcggctggagaccaaaccgtggcaacaacccactggttcacggtgacggcaaccttccggcgggatttggcggagggaaaccggtggccggggtggagatcaaccttgcggagcggagggaggtggcggcactgaccggagatggcggaggcgacggctactaccggctggagcggcggccggagttggagagagaaggcgactgcggggagacggctagggcaaaggttgaggaaatcggctcggaccagagaggatttggcggtggattggttaaggagggacacaaactggacttcgggaaagagagggagagggctgcaggccgagaggagattggcccgagagataaaggtcctggagctggggcgtcgacctgggcagcggcggcgctcggtggcgtggcgttgaaccagggcaatggcggcgaggtggtgccgctcggtgctggagctaggggcgcggggcgtcgagggccagcggcggcgcttggtggcggtgcggcgtcgagcagtgcggcggcgcttggtggcggtgcggcgtcagcggcggcgctcggcggcgtcgagctgggccggtggccaagcttgggcctggccacgctcgtgcaaatcagcctcccgagccaggctcactggaaacgctcgaatcgagcttctctcctcacccaggctgagcgcatgcaggggcggggatgcgcgggaggggaggtggcgacaggggcgacaggctctctgaggctaggtggcggcgggcggcgggctcgaggagaggaggcggtggagggctcgccggcgggagaccttgatctaccatggggagtagccctcccgggtggcggcaggggcggcgggcgcgccgcggctaggtggcggcaggcggcgccatggagggctcgcgaaggagacccggcagcgggctggccagagggaggcagtgggctcgccgacgggaggtggcgcgatggctcgaagagctggcgccgaccgtggggactccgagcgaaaccactgagagcgaatgccaccgaagagggtcgtgaaggagaaggtcgtcaggcggaaggagagcgacgccggaccggacatggccgccgaggaaggagcagagccttcggcgtccgtggccgaagatggagaaggacaagcgccatcacagccgccttcggcccccgcgccatcacaaccgtcttcggcccctgcaacctcagtgcaagtgccgaacacggccgacgtggcgaaggcggctgcagtggcaagggcactccagaccagggcggagaacctttcgacaaaccaactggtggtgcctcaagccgccccatcacagccggcggcgccgactgcgctcgccgttgtacaggcccaaatcagcctagaccccgcagcgcaagccgaagccgacatggaagccaggcggcagaacatgacacggctccaagacatgcttcgccaaatgcaagaacaacaacaagcatacgaggcgacaaggcggaccaaggccacgtcggctctaatcctttagtattcggcaggctatgccccacctcaagtccggccgcaagtggtgacccagccctctccgccactagccgcacagccgccggctcgggaccttcgccgtggagtaaaggacagcagttcgacttcggcaacactgctcagtcgaatgccgcggcccaactccacgcacaagccgcgatttcacccttcgccacaccgtacccgcagcaaggtgcggtaaacagggcgggaagcgaaaaggggctgccgctgagtgggggaatcaagactcgtccaatcccgccccagttcaagttcccacctgtcccgcgttattcgggcgaaactgacccgaaggagttcctctccatctacgagtcagcgatcgaagcggctcatggtgacgaaaataccaaggcgaagacgcagcaacaccttcttggcattcgccaaaggccgggggagtcgataagggagtacttgcgtcgcttctcgcaagcccggtgccaagttcaagacataaccgaggcgtcggttataaacgccgcttcggccggtctgcttgagggcgaactaacaagaaaaatcgccaacaaggagccgcagatgctcgagcacctacttcgcatcattgacgggttcgcaaggggcgaggaggattctaagcgacggcaagctatacaagctgagtacgataaagcctccgtcgccgctactcaagctcaagcacaagttcaaattgccgatccacctcccctttctgttcgccagtctcagccggcgatctag

SEQ ID NO: 44218 - DNA, 1290 bp, Oryza sativa
  Clone ID: PAT_MRT4530_472C.1
atgatgagaaggccaagaagcctaaacgcctctaccgccggcagcttccccttcctcctcgttcttgttgtcacctcctccttcctctccggccgttgcctcgcgacgacagactcccatcaccgtcgaccgcccgccggccgccacggcccaccaagacctgtttcgccgccatcgccgccggcgaccaccttcagcgtgttgcagtacggcgccgtcggcgacggcgacaaggacgatacaaaggcaagcgttcgtccacgcgtggtcggcggcgtgcgccgtgaggtcgtcgacggtggtggtgccggcgggctatcgctggacggaacgatcgtggccaacacggactcgggtgcgtggtgctccgggaacgcagtgcagcagtggctcgagttcaggagctgcaccgggctcaccatccagggctccggcaccgtcgacggccaaggcagccactggtggagcggcggcgcaccggcgacggacatcgacgcagatcgcgtcgggacaaacaacaggccaacagctttgagggtgtacgagagcacgaacgtggcggtgacagggataaccatacagaacagcgccaggttccacctcaccttcgacacctgccgcgccgtcgaggtgcgcggcgtcgccatccgatcgccgggcgacagcccaaacacggacggcatccacctcgccggctccgtcggcgtctccatccagaacgccaccgtggcgtgcggcgacgactgcgtctccatccaggacggctgctcgcgcgtgctcgtccgcggcgtcacctgcggcccgggccacggcatcagcatcggcgggctcggcaagggcggcgccatggccgtcgtgtcggacgtgaccgtgcaggacgtgtccctggtggggacgtcggcgggggtgaggatcaagacgtggcagggcgggtccgggtcggtgaggggcgtgctgttctccggcgtgcgcgtgtcggcggtgaagacgccgatcgtgatcgaccagtactactgcgaccacgcgacgtgcgccaaccagacggcggcggtggccgtgtccggcgtggcgtacagcggcatcacggggacgtacacgcagcggcccgtgtatctggcgtgcagcgacgcggcgccgtgcgccgggctgcgcctcgaggacatcaagctcgcgccggtgaaggagggcggctacggccgcctctacgggccattctgctggaaggcgtacggcgacgaggtgcgcccggtcgtgccaccggtggactgcctcatggccggagagccgtga

SEQ ID NO: 44219 - DNA, 1050 bp, Oryza sativa
  Clone ID: PAT_MRT4530_47300C.1
atggtggggcccacgtgggccccacatgtcatctccctctccccactcggctctccctcttcttcctcatcacgccgcagcatgctgacgacgacgacggcagccgaagcatcggcggagtggcggctgcggcaggccgcggcgaaggggcccacgaggagcggaggggcgggcggagcggcggaggcagcagggcgcgggcggcggaggtggccggaggaggagggagaggaggaggtcgccgccgagtttcgctgcctagaggacggcaacgaggtcggcctcttcgccgtgttcgacggccactccgacaccgacatcgccaccttcatccggccccacaagtcatctccctctccccacatgtcctcttgtgcggccgccgtcctccgcctccgccggccttcgccccaggccatgctgccaactacgacgacgccgcctcctctcgccctcccatggcgtcaccctccccttgtcgaactcgaactccgcgccgccacggccggctgtcccttctatctccatggagatggaggaggcggcgaggttgaggaggtcgccgcggggccaggcgaaccacggcgcggaggaggcggccacgcggccgacgctcgatccagcgaggctgtggccgtggcggcggtatggccgatgaaggcggaggcgccggtgggggatggtggcgctggtggcgagccggccccggaaggatggcgcgacgacgacggccgatgcggcggcggcgccggcgagcgtgaggaggccgcggggtcggcgtccaagaggcggcgcttcacgtggcgtggcggcgtcccagcgccgatgaagacggtgacggcaacaacttcgagggacggcggcggcggcctcggtggcgctcccgctaggcggaagcagaggcgaccgtgagaaggggaggtcggcgtggcggtgcgggtacccagcggcttggccacgctctgccgggcgccggccgtgagcgaggcagaagcagctgcagccgattcggctgtgcgcggaggcggcgcccgtgcagcggggaggcat

SEQ ID NO: 44220 - DNA, 1425 bp, Oryza sativa
  Clone ID: PAT_MRT4530_47301C.1
atgggcgccgcctccgcgcacagccgaatctgctgcagctgcttccgcctctctcacggccggcgcccggcagagcgtggccaagccgctgggtacccgcgccgccacgctgacctccccttccaccgaggccgctgccgccgcgccgcgtggggcgccgcctcctcgcgtggctgcctcttggacgccgacccccgcggcctcctcacgcccgccgccgccgccgccgcatcggccgtcgtcgtcgcgccatccttccagggccggctcgccatcagcgccaccatcccccaccgccgcctcagccttcgccagccataccgccgccacagccgccgcctcgctgggtcgagcgtcggtcgcgtggccgtctcctccgcgccgtggttcgcccagtcccgcggcgacgtcctcaacctcgtcgccttctccaactccatggagatagaagggacagccggccgaggcggcgcgccatgggagggcgagaggaggcggcgtcgtcgtatgaggcggcatggcttggggcgaaggccggtggaggtggaggacggcggccgcacaagaggacatgcggcgaaactcggcggcgacctactcctctccctcctcctcctccggccacctccgccgcccgcgccctgccgccgccgccgctccgcccgcgccctccgctcctcgtgggccccctcgctcgcggcctgccgcagccgccgctccgccgatgcttcggtcgccaccatcgtcgttggcatgttgcggcatgatgaggaaggagagggagagccgaatgggaagagggagatgacactgatgctcgctatttggttctggggcttcctatctcgcgcccgcgcgccaggaggccaagtcgcgcacatgggcccggcccactctccactagcgctctctcttctctttccttcggttccccccccccgtgccgccgccccggcatcaccggcgccgaaaggcatcaacgtgccggcgcggccccggccggccggcctcctcccctttgcctcgctttgctcccgctacgatcaccggccgcccgcccttgtccgccacccaccgccggtccgccgcctcctaggtcctctctccaaacccgatcccccacttccccctccccagcgccaccttcccccaccccaccccacgccgtcgctgttcctcccctcccgggctcttccgctcacctctccatcgcctcggtctcgcagcttccgcctcagtctccccgacttcccgttgtccgtcgccaaccgaggtgccgagccactgccgtcatttgccctcccgtctgctcaatccacggagcggcagagggtcgaggaaccgccgcgacaaggcaccacggccaccgcaaggcagacgccgaggcgccatcggccgctggcaccgggatcccatgacccctga

SEQ ID NO: 44221 - DNA, 1028 bp, Oryza sativa
  Clone ID: PAT_MRT4530_47302C.1
aatcactctgtcaaatgtactactccatagattaacttgcatgcacatcaaagctactgtctaagccaattgcttctccagaaatccatggattgaaagcaaaagtcaccaagaacacgccatgcatctgcttgcagcatgatgcaactatgctagctacccatgcatattcatgctaattctgaattttttttctctcgtctctacattatattttgcacttgcacctgaagcaatccagtattttaggtactatataatccataaaattagtgtaaatacgtacgtgtatatatatatacggtatatataccgtatacgtacgcgtggctagctgatggctttcttagccttggcggcggcggcgccgccgttcttgcggcggaggcggcggaggagatcctcgaagtcgtcctcgccgcagggcacgcggaggccgccggcctgggcgaagccgaactcgtcggcggcgcgctccatgaggtcccggaacgccggctcgcggaggtaccccgtgggcaccacgaaccgccgcgcctcctcgccgacgtacaccgcgaagtaccccttcggcacgccgccgccaccggccgtcggcgacgacgacgacgccggctgctgctgctgctccagcagcgtctcccggagtccatcgtcgttatcgccgtgatgcgccgccgccgacggctgatccttccccctcctcctcctcccgcccttcttgggcgccagcaagtagcccatcaccatcatcgccgccggccggcgaggccgcagcaagatcaaacaccacaccgcactacgtttcttggtcgtcgtcgatcggcggcgattctggtcgtatcatgagttggtggcggccatggcggctgctcgatcgatcgatcgagatcgctagctaagctcttaatttgattctttggatctttcggattggtggtggtggagaagcacaaccaccacgacgacgacgacgtggtctcagcttttctcgatcacttcaattcctatacgtggtggtgtcaaat

SEQ ID NO: 44222 - DNA, 462 bp, Oryza sativa
  Clone ID: PAT_MRT4530_47303C.1
atggctgcgaggtgggtgaggagatccggcgcacgacggcgggcgacgaggcggcggtggcggctacaaggcgggaaagggcatctggcgcccggcaacgcggcagcgagcgacgaggcggcggcgggcacaccctcgccttcctcgagctctgccacccagcgctcgcccacgacgcacgtgcacgaccgttgcatgcccgtgccgttcccgcctcgctaccgccttcccaggcccatcttcggccgtcgcagagctccgtcgggccgccacggccccaccctcctccgatcctctcccgccttgccctatcggccggcctatagtcaggggcagagaagagtgtcggtgatatgggaccgggagtatcatgaccagaggcttgaggcagacgcaatcgcccacgtggcctggaccttcggggggacgtcgggcccgagggacgacgtcccgagggttgag

SEQ ID NO: 44223 - DNA, 2971 bp, Oryza sativa
  Clone ID: PAT_MRT4530_47304C.1
gagagagagctatcttccatgtgtcatgactcaatggtagtagtaacattgttagtaaggagcaggtgtagcaaagctgtattgcaacatctcaacaagtggaagaacaaaaaagaaacaaaaaagaagaaaaagatatatcccagcagaggagagcagagcatggcaatgcagtgaagctccactatgccaaaacaactaaggagctcactgcctacacttgcttttcaataacccaaaaacactagtagtaatattatttcagtcctgctctgctaccttaggctcaatgtccttgagcaggccaacgatctgctgcatggccggcctcttggaggggagctcggcggtgcagaggtaggcgatcctcagggcctcctccatctgcctctccagcccggtgtcgcggatctttgggtcgatgatgcccggcccgaggtttgccttcaccatcgccctagcccagttcaccaggctggcttccttctggccggggtagtcgtcccccagtggcttcttgccagtgatcagctcgaacagcacgacgccgaagctgtagacatcggactttgctgtcgccatggcgttctccgagtcggagaactccggtggggcgtagcccggggaatggtgcagcaggttgttgtccgtgctggtcccggcgatcattgacagcccgaagtcagacagcctaggctccatcccacagtcgaagtagatgctgctcgccttcacgtcacggtggacgatctgagggatgcagccatggtgcaggaatgccagtgccctcgcggcgcctaatgcaatcttgtgccggaacatccatgtcgcggtaccctctggtgtgatgttttcggtggcaacaccgccattgttgtcttcccatgtgtcagtgctccaatcctcagtggtctggactcctagaggcaagtcatgaagtaggttgtgcagattgccgttctccatgtactcgtagatggcgattctctgctcccctgctaagcagtaaccagtcaaaggaaccaaattaggatgtttgatccgtcccagccgctcaagctctcttgcagcatcttggtcagccattgccgaaccatggaccaacaccttcacagcaacctgaattccaccagggagaaatcccctgtacaccggcccaaatctcccctctgccagcagagttcccctatcaaaatttgacgtcgccgccaagagatcggcgaaagtgaaactcagcaagggcttctcaaagatgacaactgggacagatgttgcgaccttcacatcggcaacccatgttgtcgagtcggtctggaatgcaaatgggcctgaaatccctggttcctccttgaatgacacctgcttgacagcaggcagcacatcacccctcttcctccgccgccgacatgcaactgccacgcagagcagaccaagaaccgagaagaagagcgaaagcacaatggccaacgccaacttcatccccttgcgtttgcccccacttctctggatacggtcaggattcacggcaatcggacaatcattcctggacctagcaaaggcagcggcaaacgcctcgggagagagctcggaggcgcaaacggtgaggttgttgtatgagaagttgaaccgctccatggacaccaacttcttcactaatgccacagggatctccccagtgaggttgttcaccgacaagtccagcacctgcaggcgaatcgagctcaagtctggcactactccactgatattgttccgcgacaaatcgagcaccttcaatctagacaattgggaagacaactccctaggaatttgcccatgcaacccggtgctcgacaaattgacaaactccaatccagagatctcacccatggacaccagcaaatttgccacggacaactggttgaatgcaagattcaaatgcttcaggttctgaaacctgttgccaacactgaattccccggtaagctcattgcctgataaatcgaggtatgccaaagatgagcctgcatatccactgctaaagtttagccccgagaagctgttgttgctgaggtctatcaccttcatctgctcatggaacgctccgatgacggagccccggagcctgttcccggacaggttgaggtaggacagtgacagtagcggcgagaggtccggcaagtcgccgtccagcgcattgccggagagatccatggaggagaggttggtccagccagagatgacggtgccgaggagctggccctggaacaggttgtggctggcgtcgagcacccggagcgcggcgatggagccgagcgccgggggcagcgcgccggagaaggcgttgtgggagacgtcgagcacctggagggcggcgaagttgacgatgttgttcgggaggtccccgcggatggcgttgcgggagaggttgagctccagcagcgaggcgcccacctcccacaggtcgttggggagcgcggcgaggcggttgccgctgaggtcaagcgaccgcagccgcgccagcttcccgacggtgtcctccgggacggcgccctccagccccatcccggcggccgagaactccaccacccgcccctcgccgtcgcacgccaccccgggccacccgcacaccgccgcgcccgacgccggcgccgcccgccccatcttggcgaagaacctcgacacgaagtaggcgtccgtgttcggctcctgcgccaccgccgccaccacggccacggccaagaacagcaccacccgagcacccatggccgcccgccgcggcgctgcacgcgtacggtgagatcttggcgctcgcgccgcgcgtgctagcaagaaccacccaccagctgctcgaccggttgttggcacggagcaagcgacaccggcggcggcggtggtgtcatgggagacagctcggaagaggcaagtggccgctgcccaccacctctctctctcctctggttggcaatggcgagctaatgcggtggagaga

SEQ ID NO: 44224 - DNA, 747 bp, Oryza sativa
  Clone ID: PAT_MRT4530_47305C.1
atggtgcccaaggccatcgccgtcgacggcgacctcttcctcttccgcatcccgatcgaccgcgtcggcaccatgtccctcactcacaacgactacttcgtctacgcggcgcggcctccccctcgccgcccgaccctagatctcctccccaacccgtcccacgacaccctgggagacagggagatcgccctactcagctgcagcggcggcgatggcggcggcgacggcgagccgtgttacgtggtggctgcgctcaggaccatccccggcagcacaaccatccacaggctgcatctctaccgctccaggccgggcggcgagcaagggagatggacctcgcggatggtgtccgtggacgaaccgccgccattgatgagggacgtggtgttccccatcccggagacgtcgcaccggcaagtgcaccacgtgacgagcaaggcgatcaggctgggatcgggcggagacggcacggtagggtgggtggacatctggcgcggcatcctcctctgcgacgtgctccacgagagccccaagctccgcgacgtgccgctgccgccgccggcgaaggggaacagccacagggccttccaaaaacaccaccgaccagtactgcgccgacatcgccgtcagccgagacaggaggttcatcagggagagaggaggggtaaaatggacctttcgcatggtccgatggcaagagtggcaaaaatggttccaatatcctgcaagcgtaaggcctcgtcgtag

SEQ ID NO: 44225 - DNA, 1292 bp, Oryza sativa
  unsure (1)..(1292): unsure at all n locations
  Clone ID: PAT_MRT4530_47306C.1
nacacaaggaggggaagaacccgagcgtccggcgccgagccggaggaatcctgaccggaggtcggcctcgccctcccctcctcgcgcgcgcgccgccgccgccgggaaggccggctggcgaggtagtcgaaaaatatcgcctctgaaggtcagcactgaggcatgggggagtgcagtgagcacaggtgttgggacgagctactaccggacgcactgggcctcatctttcgcaaactctcactcaaggatgtgctcaccgtggtgccgcgggtttgcaaatcctgggggcgggtggttgcagggccttactgctggcaggagatcgacatccaggagtggagccagcagcagagcaagccggaccagctcaagcgcatggttcgcatgctcgtcgcccgaagcggcggctcgttccaccgcattagcgtgtccggcctgcctggcgatccattgttcaccttcattggggaccatgcacggtcacttaaaaccatggagcttccaaggagtgatatcagcgactccttagtggaaaatgttgcgccaagattgtccaacgttacattcttggacataagcagctgtactaagatcggtgctcgtgctctagaagcattcggcaagcattgtaaatccctgatcggacttcggcgagtcatgcaccctacagatgttgtcggtagggccagtcaacatgatgaggctcgtgctattgcttgcaatatgccaaagctccgtcatcttgagatagggtacatgctcattgcaacgaaggctgttgttgagattgcctctcagtgtcatgatctcaaattcttagatctgcgtggctgctggaatgttgacgataaactattgcaagagagctatcctgggctgaaagtcgttggcccctatgtggacgactgctatgagaacagcttctgggaggagtgttccgatgactcggatgattccatctattgggagctcatggatgatgattattatgcggcggggagcgatgacgagggcatatgggacgatggtcaaggtcttgagggcttagaagtaaggttttatggtggtggatttagtgaaagccatgctggttttgattggccgccatctccatgaaagctgcatcaagatcttcagaaaagtgcctgtgtattcctgccgcttcctcttatgtgcttcaagttttaaacatcagcttccttagtactagtatgtgcttgtatttgtgtcatcccctagcttgcagatatttgaagccaactatctggtagtataaaatgtttggtgtttat

SEQ ID NO: 44226 - DNA, 331 bp, Oryza sativa
  Clone ID: PAT_MRT4530_47307C.1
atggtacctaaaatgaacggttttgtggttgggggtgattttgtaacccgattacaagttgatggaccttcggtgtacttttcctaggctaactaactaggcttgtgtagggacaaggctttggcccaaaaaaaaaaggaataagttcaccggaggtccctcaacttaacagcgagattattttgagatccctcaactataaaactagaaatgttcacccctaaactcactcaaaccgttcactggaggtcccataaatgttaaaaaaaaaaaaaatatagttacaaaattattttaaattaaataaaaaaaaaaaatgttcatttatttg

SEQ ID NO: 44227 - DNA, 286 bp, Oryza sativa
  Clone ID: PAT_MRT4530_47308C.1
tgagagtgaaaaagattttttggaagaagaaggaaaaaaatccacagctgtagttcaaaagctacaacaagagatcagggaagtagttagggacactggcactacaatacttgagaaggagaacgcttttgatgaaaaacttttgactgcattccgcgcggcaattggaaagcccgcagatgaaccagcggaagagctaatctttcactcataaaatcaaggggggattgcttcaaaagggcaagatacgtgagaatctgaccaaaagttgtatggatcatccgct

SEQ ID NO: 44228 - DNA, 1143 bp, Oryza sativa
  Clone ID: PAT_MRT4530_47309C.1
ccgcttctagaagtagtgggatcccccggggctgcaggaattcggcgcgcacagccgcagcagcagcagtcgcgcacacacgagccacgaagacgatggccacggccacggcgctctccctgagcggcggcgggggcgggggctgcggcggcaggtaccccgccacggtggcgcggcggtgctgctgcgccgtcccgcggtcgcggcggggtcccgcgccgcggcggcgcctgggcctggcggcgtccagggcggacgactcgtcgcccgcgccgttcgagatgacgctggagggcgcgctgaagctgctgggcgtcgccgagggcgcatccttcgacgacatcatgcgcgccaagaacgccgtcctcgcatcctgcaaggacgaccaggacgccgtcgcgcaggttgaggctgcctatgacatgctgcttatgcagagcttatcacagcgaagggctggcaaggttgttgataacagcatccgctatgctgacgtcaaacctgtaaaaagtgcaggttcaggcacagtaccacagtggatgcaagcaaccatgaagaacgcacccgtgacatttgaggctccatcttcgagcagcttgggtatccaatcatgcgtttatggtgcactgatggttttcacttatgctagtggaagcgctacatctttaccatcaacatacactagccctgatgtgcctggatttatcttagcaacaggatttggtgcttcattgtatttcctgacaaagaaaaatatgaacttaggtaaagcggcattgattactgttgggggtcttgcagtcggtgcgacagtcggatctgctgtggagaattggctacaggttgatgttgtgccctttctaggcgttcactcccctgctgttgttgtcagtgaatttattctgttctcccaattgttggtctcgctgtttgttagataggattaaaaacaagttgtcagcctggcctgtaattaaccgagatgagctagctccgaaaaagtcacgaaaatgcatctttctcctgaagatgccagcagctgtgtatagcaaacaatacatcgacgtcactatcctttatactttaaagataacttgtatctagtctcttttcagtccaaaaaaaaaaaaaaaaaaaaaaaaa

SEQ ID NO: 44229 - DNA, 536 bp, Oryza sativa
  Clone ID: PAT_MRT4530_4730C.1
ttgatttggtcttctcaagattcagtcatggcgatcgccgcatgcagggccaacgccaacgccaaccgaagccgccaccatcatcaaccgaggcggtgggaaaaaaattcctgccaatgctggcacgcacgcgcactcgctcgagaatccggcgggtgggactgaaaaaacaaaacaaaaaaaagcagatcgattttgtcatctgcggcgcaaagcgggtgtgcatttcttttcttttatccccacatccagtcaccgtgacgtggttcttgattcctcaggccgggcgattattctagctctagttgggatgattggattggatccccagccagcagcagcaagcaattcttggccatcggttgtgggtggctgttgattcatgcatcacgagcactcaataaagtatgcagatctgtgcgcccctctctgatttgttcatccaggcaaaagagtatcttgcttctgtgaggatactaaagcgtgaagtgtttgggttagcttttgattaagccatcgaaattttcagtgaactt

SEQ ID NO: 44230 - DNA, 444 bp, Oryza sativa
  Clone ID: PAT_MRT4530_47310C.1
tcgttagctctagcactcctccgaatctcgcgatggccctccgcccccgcgcgccgactatgtccggcgaacccctcaccggcggcggtggcggtggtgcaagtgggacgtccgatggagcaataggggacggagcggaggctgcgtgaggtgaacgacgggcgcggaggcgatggcgaactacctggcgcagatccagaccatcaagtgctcctgcgaccgcatcgtcgtcggcgctgaagatgggagagacctgtggatgaatgagaaagaaagctctcacgcaacccttaccaggcgaagaaggcctaggatcaataacaaggcgaggaatcatgtggatgtggaaaacgtaccagttgagtttatacagaccagtgattcgaggctacggagacggtttccacaagatcaatactcggtctggtcgcgggaaccatatgc

SEQ ID NO: 44231 - DNA, 239 bp, Oryza sativa
  Clone ID: PAT_MRT4530_47311C.1
ttgtctcgtgggtgctgatggctacgctgcgtccggcgccggcgtcgatggtcgttctctgcgcggtggtcgtcgtcggcgcggtattcgtcgtggtggcggagggcggcggcagcgaggaggcggcggcgtcgacagggaaagcagcaatggtgccaacgctgctcgtgttccgccactctctgatggagagggggagcaacaacaacctgtcgtcccttccccaaatacaactacta

SEQ ID NO: 44232 - DNA, 128 bp, Oryza sativa
  Clone ID: PAT_MRT4530_47312C.1
ctagtggatccccgtggctgcagtgaattctggcacgaggctgccggcatctgaggccaccctcgcgcgccacccgcgcttctgcagcatccaggtgttggactgagctggataagagcgctgaagcc

SEQ ID NO: 44233 - DNA, 375 bp, Oryza sativa
  Clone ID: PAT_MRT4530_47313C.1
atggcccatatcggcttcacctgcggggctgcgggccgcgccgacgctaattcggctgccgcgcggctgcgcctggaccgtcacggcccgcacgcgtctgtacaacactggttcgcgcgtgtggatcggtacgtggtgcggctcgcctcgcctgctcgtccagcgtggcggcgtccaccgcgaaggattgcgacggcgtgcgtgcgtgcgccggatgacattgtaatgcaagtgcgacgcgatccgtccaccgcgcgcggtgcgcccgtgaagtcggggccgtttcgactgccggcagatatgctgtcgctcgtcggtgtcggcgaggtgctcgcgacgcgcgacggtggcgttggaacggacacagcacagtag

SEQ ID NO: 44234 - DNA, 222 bp, Oryza sativa
  Clone ID: PAT_MRT4530_47314C.1
atggggcttctgtcgccgatgggcaagcctaccagaagtgttctgttggatctcgccgctggagctctgatacctgaaccagcaatcagcatcaagggcacattcatccccaaggctttccaagtgatcaacgatcctgctagtgtgagttctccctatgtattactctatattggcatttatccttttaagtgccatctccttcagacttcagagtcataa

SEQ ID NO: 44235 - DNA, 201 bp, Oryza sativa
  Clone ID: PAT_MRT4530_47315C.1
atggaggctaatgatttggctcagggggcatcgggatataagccgatgcggaaaaacaaaaggataactggagctaagcctggccttgaactgcagcggaaacaccactccacaggcatcctcgacggcacggacgaagcctactcctcggagaacccgccatcgaacacatactcaaactctggggttgggggaaaatag

SEQ ID NO: 44236 - DNA, 1107 bp, Oryza sativa
  unsure (1)..(1107): unsure at all n locations
  Clone ID: PAT_MRT4530_47316C.1
tttttttttttttttttttttttttttgtaaaaccttcagtatttgcaaatagcaagaaactcaagctttcttcaacattgcccggttcatgtaaaatcgaatatccgctgtgatgaagcagaacgtgcgacagtagcgctcaagaaagagggggaagaagaaagcaaaaaacatgactctacctaacaacaattgttactgctactgttctaacctggaggcctatacaaaccaaacataatgtatcagaatggccctcgaaacagcttgcacagatcatgatttatgggaattgctgccgattgtaggtgtcctcgtggacaaacaccggttcgctgctctgtggagggatcacaggttggcccatggcgatgccttggttctgctggggaccccaatttggtggacttttcgccgatgatagggcaacgtagtaaactattgccagtgccacgctggcaagtgagagcactgcccctccagaaaagacccctggcttgacaacgtagcagaagctgccaaagtacatgttctcctcaccccgttgatcgttaagtgcagctccggtcgggtcgagaccgggcgcgatttccgggggcgcccaagacacgatgaatgagatcnagagctacgctccagttagtgtctgagggaactggatgcctcttacaacagatgcaaccagccactgtatttataatagactgggcgaccataagagcaaccgcagatattaaccctagggctaaggctgggcttcttgggtatatgcattgacctggagaagaagtttgcacatctgaaaccttgacgcgtgtgccctccgccgcgaagccgagcgccgccgagaggacgccgaggaagccgaccaccgcgcacaccaccaccaccttcctctccatctcctcctcctcctcctctaccaatcaccaacctaacctcccacagctcaatccacctccctctatctactcctccttctcccccgattcctacagcgattttctctcgctccgccngctgcttcgccaccaatcggatagtaccaaaaattcgagctttgcctcgatgcctgctccccccggctccgcttgcttagagcgccg

SEQ ID NO: 44237 - DNA, 683 bp, Oryza sativa
  unsure (1)..(683): unsure at all n locations
  Clone ID: PAT_MRT4530_47317C.1
tttttttttttttttttttaaactagataaattgcaggcatattcattcaagcatcacaaactggatagagctattaaaagcagtactaatacaaacaaatatcttgagccagatacaacaccacgaccgttttctccattagccaagctcaaataaccgaaaacttaccattaagggagtaaaagtgtaaaactacaatacttacaactgaagtaatgcaatatgtcattacatacaataggtcaacagccacagtttaaagctcctcaaagattatcatctcatgatgttcaatagtctgtcttagcggacacaagttgatatgctctagccagcttcccgtcaccagaatcatttggctgccaagaccaagttgtaccattattcctcagctcagtcctcaacctcaccacaagcattaacaaaaccaacaacaatcccgcaaaaatgaaaccacacagcagtgagcgagtaaattctccgatccccttgctagccacatactccatgccccagagaaactgcaaaatccccatcgaataccagccattgtttagttcatcctcattatctctacgagccattaagaataccgtcacttcgtctgatcgactattcttcgagccaccaaatgggcatttcaggggccattcatcctcgaaatncaaacaaagtccgactg

SEQ ID NO: 44238 - DNA, 351 bp, Oryza sativa
  Clone ID: PAT_MRT4530_47318C.1
gggggcaaatctaaaaatacctatcatttaaggggcaaataagcccgattacgattcccattacactgataaccggtcaaggggggtcaaaaagggctgaaatgtttacaagggaaactggaaacttttataatggaactaaacgatgttcatcaacggacatgggacttgcataatttacttattagtacctactgaccaaaaaaaaattattgtcgttaaaaacccgggccttgtttttacccacaaaggtttcccgtccaatagatataacgatttggacaaactttaccctttttttaaaaggaaaaggtgcatttggtgatttgaaaacagggcttaccacttcaa

SEQ ID NO: 44239 - DNA, 732 bp, Oryza sativa
  Clone ID: PAT_MRT4530_47319C.1
atggcgtcgaggagacacgagcaggaacacgaagagtcatcgctgcaggcggcggaggcggagctgagctcggcgaggatcgtgctggagtccatcaaggaagagggcctccgattcacgacgtccatcgagcgaacgcgcagggagacggcgcgggtcaccgacgagatcccccgcctcacggagcaggagaaggcggcgagcgcgcagctggaggatgacgccgaggcggcggagaaggagaagacgctgacggagacggagaaccggcgcgccatgtccgacgcggagaacatcgacgccgagatcgccgcggcggagcagaggatcagagagtcggaacgtcacgaattcacgatccccaggttcgagtacgagtacctgacggggcgcgccgaggtggtccacgcggtggccgagatgaaggcggcggcggcggaggcgtggacggaagcgcggcgaaccagcgaggagatcgcaatgcgggccgaggcgatcgagagggagctcggagaagcgagcgccgccgatgcagaggtgacgaacacgccgaggaggccggtggaggcgagagggagcggctcggcggcgacgacgagaatggaaaagtcacggaggatgtcatcctcgtcgaagccgagggcgccgtcgtccaacgtcaagaggaagaggagagtcctgacactgaactgtctgaagcttctcgctgggaaatgcaggggtcagaattga

SEQ ID NO: 44240 - DNA, 1833 bp, Oryza sativa
  Clone ID: PAT_MRT4530_4731C.1
atgtcgtggcagagggttggtgccctgctgctaggggctcagtcctgcctgcctgtcccgggggttccggccgtaggtgggattgggtcggtactcttgtctatggctaggatgggttgggaactatgtcacgtcttccgtccgtataccgtggtggattttccccaaagtgaactagttgaactaagcatggctaagcaatccctagtcctaactctaatcatgttagaaccccaagttgacaaagaaacaaggtacaacaatagcgtggctatgataataggcttgggaggagaacttcggggtgtgacaccgttcgacttgcattttgttgcacgcactgctatcaagtctcaagtgctagctgacttcgtagctgaatggacactggtattcgcccccgagcccgagcccgtcgaacaattctgggtgatgtgctccgacagttcgtggtcgtacaagggggcaggcattgcgggagtcctcatttcgccgaatggtgtgccgattcgccatgttgacaaatccttcgaggcaaaagaagaagggatgaagaggtatttggaggccgttcggtccatggaaaagtgcttcaccggtataacggtcgaacacttacctagaggccagaacgaggaagcagacgccttggcgaaatctgctgcttgtggtggcccacattcgcctggcatctttttcgaagtcctgcatgcaccaagtgtgcccatggacagcttagagatcatggcaatcgaccaggtgaaactgggcgaagacccatgcgactggcgaaccctgtttgtgaaacaccttgaaactggctggcttccggaagacgaagcagaagcaaagcgcttgcaactcagagccacgaagtataagatagtctcgggccagctctatcgctctggggtacatcaacccttacttcgttgcatctcttttgccgaaggcgaggaaatggcaaaggagatacaccaggggctatgtggcgcgcaccaggccgcaagaacagtggcctccaaagtgtttagacaaggagtttattggcccactgtgttgaaagtctatgttgagcaaatcaagaagtgcgaaagttgccagcgtcatggccgaagccaaaccgcgccccagtatgatttgcagcccattgcgccaatatggcccttcgccagatggggactggacatcattgggccgttcccggtggcgcgaaacgggtataagttcgcaattgtggctgtggaatatttctctcgatggattgaagccgaacccctcggagcaatcacttcggcagcagtacagaagtttgtatggaaaaacattgtttgccgtttcggagtgccaaaagagttcatcactgacaacggcaagcagttcgactctgacaagttcagagaaatgtgcgaaggacttaacctagaaatcagcccgttcatgcttctttatggtgatgaggcaatgaccccagcagagctaggggctaactcaccaagggtgatgttctctgggggcgaagaggggcgcgaagtgtcgctcgaactcttggaggaggtaagagtcgaagcactcgagcacatgcgcaagtatgccacaaacacttcggcaacttacaacaaaaaagttcgaccgacggagctgatgcctggtcatcttgtcctaaggaagaaagcgaacccgattgctggtggcaagcttgaatcaaaatgggaaggaccatacctcatcaagcacaagtccaggacgggatcttttcgattggcgacactagaaggtgacgagttcgaccattcctggaacgccgcctctctcaagcgcttctatgtctag

SEQ ID NO: 44241 - DNA, 2016 bp, Oryza sativa
  Clone ID: PAT_MRT4530_47320C.1
tcaattctgacccctgcatttcccagcgagaagcttcagacagttcagtgtcaggactcttctcttcctcctcttaacgctggacgacggcgacctcggcttccgcgccgccgccgccgccgacgaggatggcatcctccgtgactttgccattctcgacgtcgccgccgacgagaatggcatcctccttgtcgtgttcgtcgcttctgcatcggcggctctcgcttctccgagctccctttcgatcgcctcggcccgcattgcgatctctttctcgctggctcgccgcgcttccgcccacgcctccgccgccgccgccttcatctccgccaccgcgcggaccacctcggcgcgccccgtcaggtactcgtactcgaacctggggatcgtgacgttcccggacgacgagctccgcggcgtcgcggccgcggcggtggccagcgtcgcgctctcgacgatcgccttcagcctcgccgtcgccgcggcctccgacgccctcgccgccccgagctcccttaccgactccctgatcctcttctccgcggcggcgatttcggcgtcgatgttctccgcgtcggacatggcgcgccggttctccgtatccgccagcgtcttctccttctccgccgccgcggcgtcgtcctccagctgccgaaggatcgccgccagcttggagatggtctcgtcggccctctcgtcggccgccgtgacggcctcgaggcgagacctcgccttgagcagcttggcgttcagctgctgcacatgcgcgctcgccgccttctcctgctccgtgaggcggcggatctcgtcggtgacacgcgccgtctccctgcgcgtgcgctcgatggacgccgtgaaccggaggccctccgccttgatggactccagctcgatcctcgccgagctcagctccgcctccgccgcctgcagcgatggctcttcgtgttccacctcgtgtcccctcgacgccattgcagtggcatccgttgctcgtaccaccgccagctcgctgtgccaggatcccgcgtcggagctcgccgtggccgccgtgcccacggcgagctcgactaggacgccgtgctcctcgcttgccccgtccgcatcgcgctccacgccaccgccgccgcgcgggccggagctcaccgcgctggacgtagacgcctccgcctccgcgtccctcctcccggccgtgcccttcgccgccatcgcggccatcacctcgcgctgcagcttgcggagctctcccttgacgcggtcgagctcctgcatcacctcgccgtacgccgtgccgacgccctcttggcgatgagccggagcgccgccggctgcctcggcggcgaggcctctcgccgtcttcctcctgctgccgccgccgctcgcacgcgttcgctgcctctggagctctgacctgcgagacctcgccttggcattggtctgctcgatctggcgctccagctccatggccatgttcatcgccctcgatagctcggattctactcgtgcttgctcctgatcctctgcaatggccttacgtcgatgcaatttacgcctgcttgatccaatcgattcttcgatttcaggagacaaattcgcaaggaacttcctgagttctttcccgcatgaaatgtcatacaggactgctgaaaagtgcgccactttggaatgcaatgtcagtgcaagttctctgaaggcatgttcagaaacaatcacttctgggatccgtggaggtgccctgtcaaagagaggtgcagcattggaccaaatgaagagcacaagcatcccaaggagtgcaatgtggcaaaggagtgttactaagttgtattcagccacatcaaataggaaccatatcaatgtggcgcctgcaaggatcccggccgataaattcctgtccctccatagcatgatgtccgcaactttccggccacccaggatcttatgaactggtttctgcctatgaaaaagccttatcaccggtcgatcatcatcagaatcactcgaaacatgaggaacattcat

SEQ ID NO: 44242 - DNA, 2296 bp, Oryza sativa
  Clone ID: PAT_MRT4530_47321C.1
acaagaatgtaagacattgtttatgttttagaagaacagtgcaagcatatacattatatatggaaagaataaataagatacataaataacaatggggatggtaaaaatgcacagaagaatgtggttggccgaaatggggtaaattttcacatcactcgcttatattcactcgccttcgcagagggcaaacaaatattgccttcttagctgtggctatcatgtgtcaattttggggatgttgaacttgcaggtaatattaaataattgaagtcatggtctagacctcgtattgtctcagtgaggactccagcagctgatggctggggcagatcatctccatcactcgtgtcccatccttgtaaattttgaaggttggaactgtcttgacattttctaattgtgtcactgtggggttctcagttatatccacctgctgtcctatgactgcattgttccttgtactcaattgtggtatagcagcagggtgatcatggaaacaatgaaaagggaagatctgcaataatattgtgcataacattatgaaatggaaaattctctcaagaaaaagcccctctggcaaggttgtagccatctggaattgttctgctcctacaagtgcttcaacctctcctccaaacttcatattggatacatcctcacctcgtgatgacctaagagcaacaagggcatggaaatgcccctctgctacctcagtgtcaccaggaagttccctcctaagaacctcataatctttcacggaatctgcccattgttcaatcttgccataggaagctgcacgccttaggagagccttccaatagttgggttgaatcttaagggcttcattgcagtcctcaatagacttctcccattgccctaacttgaacatgcaagcagccctattgcagtagaggactgaatttgcagggtgatgcttgagcccttcgccgtatgctaggaaagcttctgcaaattttccagaatgaaaaagttcattccctaaggttcgtgcttgggcaacagttctcacactcttatgcatggccatcacttcaacgtttccagaatctattttcctagctttctccattgatgacatcgcactatcaaaccttccaaaagctatgtcaacttgggcatgtacatagtagagatatgagttggactgaaatccacagaacatcatgtcctgggagcatgaggatgaacaatcaagcttggatgctctagagattgccaaatcagcctcatcaagttgattgatctggagaagagcttccgctctagaagcaaagagcattgcacaagagtctgctcctgccgcgattgcagcgttgcattccctcagcgcgcttttccagttgccaatcttgcgcgcatcagcgaatctccccaagtgtttatccactgcttctaatttgtgcaactctacaatgtccggctgcaggccacccatgccaatttgcttccgagcatcagcagtgcgcccaagccttatttgcagcgacgcgaggcgctggtgcgcgcggccgtaggacggatcgagccggatggcctcctcgcactcctcgacggcctcgccgaggcgggtgagcccgatgagcgccgcggcgcggttggcacggcacgcggcgctgtcggggcacagcgcgagcgcgcggtcgtacagccgcagcgcctcctcgaagcacccgttcttgtactgctcgttcccggcgcgcctaacctcctccgcctcggcgctcgccgccgcggacatcctgaccgcccgacgcgtggtcctcggaggaggagacggcggcgtggtggggaggcggccggaggggcatatgttccccgcggggaacgcgccggcggcgagcgccgaggtggccgtgctcgcgccgacgccgccgccaccaccacccgcgctcgacgagcacgacgtgtagatgagcgggccgaacccctcgccgacgccgtggtagtcaccaccaccacgccgcgcgggcctcggcggagcggagccggaggagccggaggaggaggtgggagtggggagcctggagtggacgaggggggagacgggggagaggcggcccggcgggagcgagtcgggcttgtcgcggagcgcggcggcggcgagggcgtcggagagggaggaggagccccccggcattggcgcccggtgggacatttcgccgagcgcctgggtggggggagggtgtgggctagcggcggagcatggcgtcgcgcgcggggtggtggtggtggttgaggatgaagagggaggggggaggaggaagaagcaaggaaa

SEQ ID NO: 44243 - DNA, 1275 bp, Oryza sativa
  Clone ID: PAT_MRT4530_47322C.1
ctgcaggaattcggcacgagggcctcgctcggttccaaacgcaaagcaaccaattccatttccgttcccctctcggcgaacagcctcgcctcctcctcctcctcgccgccgacgccgacgccgacgcctccccggcatttggttcgcgcgggtggtgccgtgagatacgtggtggacggggtagggatggagtcggacgcctccacctcgccgcgccggcggagcaccagctgctacagcgacagcggcgattcgtcatgctccgagccgttcagcgagtgcggcagcgacgacctctcgttcacgccggctgccgccgcgggaatccaccggctgctgctgtcgtgcgcggcggaggcgtcggacgggacgatctcgtcgctcgtcgcggagctggagtcgccgtcgtcgtcgctggactcgctacggcgcgccgcgatggagctccggctgctggcgaagcacaacccggacaaccggattcgcatcgcggcggccggggcggtgcgtccgctcgtcgcgctgctgtcgcacgccgacccgctcctgcaggagcacggcgtcacggcgctgctcaacctgtcgatctgcgacgagaacaaggcgatcatcgtggaggccggcgcgatacggccgctcgtccacgcgctcaagtcggccgcgtcgccggccgcgcgggagaacgcggcgtgcgcgctgctccgcctgtcccagctcgacggctccgccgcggcctccatcggccgcgcgggcgccatcccgctgctggtctccctcctcgagaccggcggcgcgcgcggcaagaaggacgccgctacggccctctacgcgctctgcagcggcgcgcgcgagaaccgcctccgcgccgtggaggccggtgccgtgcgcccactgctcgacctcatggccgacccggagaccggcatggtggacaaggccgcctacgtcttgcactccctcgtcggcatcgccgagggccgctccgccgccgtcgaggaaggcggcatccccgtcctcgtcgagatggtggaggtcggctccccgcggcagaaggagatcgccaccctctccctcctacagatctgcgaggacagcgctgcctaccgcaccatggtcgcccgcgagggcgccatccctcccctcgtcgccctctcccaatcctcctccgcccgccccaagctcaaaaccaaggcggaggcgctgatcgagatgctacggcagccacggagcgcgagcctgcgcgcgaggccaacggcggtcgttgcggcggagtga

SEQ ID NO: 44244 - DNA, 1029 bp, Oryza sativa
  Clone ID: PAT_MRT4530_47323C.1
atggcggatggatcgagcccgtcggccgccgccggttaccctttgctggtgcagcgaagcaatgccggctcgccggcgatggcctttagcctgtctgacgggaagacacacgacgacgtcagccttcccgagatgcactccagcacctacctccagacgccgcagggctgggtcctcgtcctgagctcctcgtcggcgccggagatgtcgacgttcctcctcgacccccgtgacgggaggaaggtcggcctgccgcctctcgacgagagcgagctcccgacggcgcgcaagtgcgtgctgtccgacaacgccccggacgccggcgccggcgtcgtcgtcctcagcctgcagggcccggccgtgtggttctgccgcgtcggcggcgagcggtggtcgacgcacacctacgacatgggctacttcagcctccccgtggagtaccgcgcccccaagaagcggcacctgttcgacgtcgccggcgtcggcgggaggttctacttctgcgaggacaaggacttcagcctcggcacgctcgacttcaccggcgacggcgaggtggcgctggtcgccgtgagcgtccccggcatcgacgacattttcccgtcccccgactcgagcggcatcgcggccacgtacctcgtcgagtcgcgcggcgacctgtacctcgccgccgtcgtcttcctcggcttccgagccgaagggccgccgcacaagttcagcgtctaccggatggacttctcggcggcggggccggcgtggcgcaggacggcggacatcggcggcgaccgggcgttcgtcctcggcggcggcggcggcggcaacttcggcgcgtcgtgctcggcgagcgggtgcggggtgcgggcgaactgcctctactggttcaactccttcagtccggatgactacaacctgcatgtgctcagcgtcggcgatggcggcgtcgagaccgtggcgccgccgccgttcgagcacgcctcttgtgtgcacaagccgttctggcttgttccaactactaataatactgcatga

SEQ ID NO: 44245 - DNA, 122 bp, Oryza sativa
  Clone ID: PAT_MRT4530_47324C.1
acgtttaaaggcacaaacccgccacactctagcggggggcaccacagacgccgtcgaggcattttcctacaccgacttcagacgactgtttatcgttcactcttacaagtttctttgttaat

SEQ ID NO: 44246 - DNA, 446 bp, Oryza sativa
  Clone ID: PAT_MRT4530_47325C.1
acgagagagaggggaaaagggaggagaggggatcctcaccggcgagcacggcggccggcgcgaaggatgaaggcggcggcgatgacccaacgagcggaggggcagacgggcacggagagagaggcgttccggcggcaggattggatggggatgcggcggccgaggtagctttggcggcggagaagctaacggcggcggcggattggctcggcggcggcgctagaggagatcggcgcgggcgcggtagaaggcatgcgagaacgcggcaaaaaagggaaaagggagagtgggacgcggggaacgcgcacgcggggcgggaaggcgtggggaagggagcggcgacgtgggcacggtgacgtggggcgagtggacgaggtggggcgccggcggtgcgggcggttggagctccggctccaacggtcggaggtaggagacgaccgacaggt

SEQ ID NO: 44247 - DNA, 595 bp, Oryza sativa
  Clone ID: PAT_MRT4530_47326C.1
gttcctctgctttaccaccaccacctcctccggcgtgacctccgcttttatgcttggcagcttgcttgccgagcagcatgctgacgtatcgtggtatagctctactgtcaacaacatctggagaacctatttcggtacctgcccgcgacatgcctatgtggacgtttggtggttgccgatggggacacgtccacggatgaagcgccgaagagcatcatgaataagagggccatggccgatctgggccaaggagaggaggcggagatcgtaggtgtgcaagtcatggccagtacctttattgtctccgctatcgcccagtgcgccctgatgtactgcttcgccgtctccgagctcgctccctaggtgctccactgctgactggagctccagcgtactgcgcccatacaagcgtacgcctggccttaccttctatactgtgcggacttattgcgagatcgacgccaccgtatctagggaagacgattgcgttaggtgagccgcgtcttatgcacgttaggacgaatatgggggatatatctgtttatagagaggtgccacgggtcctacgtgctatcgacaacgagatatcttgctc

SEQ ID NO: 44248 - DNA, 280 bp, Oryza sativa
  Clone ID: PAT_MRT4530_47327C.1
atggccacagccagcgacggcagcggcagcggcggcgagcagcggcgcctcctctccatccccaaggagggcgagcgcatcatcgcgccgacgcgccgccccgacggcacgctccgcaaggccatccgcatccgcgccggctacgtcccccaggaggaggtcgccatctaccagtccaagggcgcccagatgaggaagtcggggcccgacgtgccgccgggctacgacccggcgctcgatgctaagcccaagacgaaggcggccaagcggaacgagcggc

SEQ ID NO: 44249 - DNA, 407 bp, Oryza sativa
  Clone ID: PAT_MRT4530_47328C.1
tgggggccgaggtatttattttgggcagagataacctaatcgtctgcagcagataccttgaggattgttttaatcttcccctttgagacttagtcatatgtacaatttcaacagctgcaacaagaattggatgatttggaattcacctcacaaaggggtggtatatggacatttatatggaatactgagacttactcctctcagaaattttacaggtcaatgtttatggggattttggtcccaaggcccttcatatggatctggaagaccaagtgtgtcaaaaacatcgaagtgtttatatggttacttctttgtgacatgttgaatgccagagatatgttgaatacaagcattgtgctcctgaggatgctgatctatttgtgatttgtgtgaagacccgagagaaa

SEQ ID NO: 44250 - DNA, 951 bp, Oryza sativa
  Clone ID: PAT_MRT4530_47329C.1
atggcgtcgcgatccgcctccatcgtccaagccaacgtcacgagcgggtacaacctcctcacgatcgacggctacatggccaccacgccgatacccaccggagtgtacatgacgtcgagcgcgttcgccatcggaggccatcaatggcgcatcagttactaccccaacggcaagaactccggctgcgccgactacatctccttcgacctcatcctcgacgagaatgtcgccgcgccgcttcacgagcgggagcgcggcgaggggccgagccggttcgtcaagaggagaatcttggagaggtcgaggaggaggcatctgaagaacgattccttcatcgtccgatgcgacgtcgtcgtcaccgagttccgcccggcggaagtggcgcccggcagcgtcgatgtcgacgggccgccgtccgacctgcaccgtcacctcggcgacctcctccgcggagaaactggcgccgacgtggtgttcgaggtcggcggcgagaggttcgccgcgcaccggtgcgtgctcgacgcccggtcgtccgtcttcgacctagagctcttcggcgcaacgactgcgaaggaggtcgtcgtcggccaaagcaccggcatcgtccgcgtcgacggcatggaggcgcgggtgttcaaggcgttgctcttcttcgcgtacaccgactcgttgccggagatgatgacgacgacgaagaagaagatggaggaacaagcagccggcgacggcgacgacaggtacgacattgatgcgttcacagtggggaaggtcatcgcgctcgcggagcagcatgattgccgtgttctaaggaaacttgcctcgatttcttcatgcgtcgtcctggattttagaaggatgtactgttgggcaccggcgacggcggctccatcagctgctccttttcttttagacaagagttgtttgaaggcctcatcaaaaagtggtagctga

SEQ ID NO: 44251 - DNA, 6225 bp, Oryza sativa
  Clone ID: PAT_MRT4530_4732C.1
atggatgaggatgaagttagcttggaggagatggaggagtataacttggttgctagtaagctttttagaagcgaggaagatggttacaagttttacaatgaatatgcaaggtgtaaaggttttagcattagaagggacaaagtgaagcgatttagtggttacaggacgttaaaaaactttgagagaaccaataggaaaagggagccacgtgcgttgacccactgtggctgtaaggcaatgcttgaaattgagctcaatggagagaccggaatgtggtttgtatcaggttttgaagctagacattcacatagacttgctaaccctgacctggtagctttcttaagatctcatcgcgaggtaaatgatgctcaaaaagctgaggccgttgagcttggagttggcgggcttcgaacatgtcaaataattacataccatgtgaaccggtacagtcttccatttgttccttttgttggagctaaccatcatcgcagcacaattatttttgggtgtggtatattgtcaaatgagtctgtttcttcatatgtctggctgctacaaactcttttggaggcaatgcaccaaaaacatccgaaatcattgatcactgatggggatgcatcaatggcgaaggcaattacaaaggttatgcccaatactgatcatagattgtgtagttggcacattgaggagaacatgaaatgtcacctccgtcgccaaaagcttgcagattttaagaaattcctttatgatgctatggatgttgatgactttgagagatgttgggttgagtataaggccaagtatggattcaatgaaaataacttatggataagcatgatgtacgagctaaggaagaagtggtccactgcatatatgaaagggacacgcttccttggaatgcggagcaaccaacggagcgagtctttgaactcaaggttgcataggcatcttgatcgaaagatgtcgctggtcgatttggttgagcactatgagttttgcttgtcacgtatccgtaggaatgaagccgtgctggatgcgagagcgtcgcagtctgtctcgttcactacaatatgtgctgacccactagagaaaagtgcggcacgtatttacatgccggccatgttcaagaaggtctgggcagagataaggaagctatatgagtgggaagttttcaatgtggcaagacaagatggtgctggtgtgtttaccgttgcatcaaaagacaacaatgttgtgcaggttcatgtgtggtgtacttttgaggagcaatcgatgaatagtgccaattgcgattgcaaaaagctggagtgtgacggcatcccttgctctcatgtttgtgctgttcttaagtttcttggtgtcggcactattcctcattgttgtgttatgaccacacagatatgctctattcatgccctttatgacctcatcgcaaccttcagtgttcctcaacgagaagctgtacacaaatgtggcttcggaggattgctgaagatacataggataaatgtacaccgtattttgtgcatgtggattgcaaaccaattcgatacaaaggctgaagcattcaaaatccaaggtagctatctgagtctaaccaatagggacgctgaacatttgcttgacctgccatcacaaggagaagaaatatttgaaccaccacagaccaagaatagggacttgtttgatgaattcaagacaacatctaagcaaggggcacatataaaattatctctgcaagagtattttcaaacaaacaaaggtatacatgacgacaatttcattcatcgtttcgtgctctttgtgatcggtgttttcctgtgcccaactactcaaaggtatgtaagctcggcatacctaaatcttgtggaggatgtcaatgcaatcagtgcaattaactggacaagcctgaatttaaaccacctaatgaaaagcattaaaaatatttcaacaataaaaggagtcaatcttgaaggaaacctaccacttttgcggttatggtactgggagaagctacgagctgacaatttggatccaaccatagattatactatgcgcgacaaaccacttattcaatactgggacaagcacaaggcaaaaaaaagatataaaatcgatactacatatgactatgctggcgccgaccatggggactccgagcgaaaccactcagagcgaatgccaccgaagagggtcgtgaaggagaaggttgtcaggcggaaggagagcgacgccggaccggacatggccgccgaggaaggagcagagccttcggcgtccgtggccgaagatagagaagcacaagcgccatcacagccgccttcggaccccgcgccatcacaaccgtcttcggccccagcaacctcagtgcaagtgccgaacacggctgacgtggcgaaggcggctgcggcggcaagggcactccagaccagggcggagatcctttcgactaaccaactggtggtgcctcaagccgccccgtcgcagccaacggcgccaactgcgctcactgttgtacaggcccaaatcagcctggaccccgaagcgcaagccgaagccgacatagaagccatgcggcagaacatgacacggctccaagacatgcttcgccaaatgcaagaacaacaacaagcatacgagacgacaaggcggaccaaggccacgtcggctccaatccttcagtattcggcaggctatgccccacctcaagtccagccgcaagtggtgacccagtcctctccgccactagccgcacagccgccggtgtacttcgccgggcagcatcaaccacctggccaagcgccacaatcagtggcggaaggggcttcggctctgcaggcgcaactccaagctttccttcagcaactcaaccaatcccactacatttcaagcacaaccccatcggctcacccggtggggaatacaagtcaaggtgcgcccaattggttgccaccaattcagccaggttccggaccttcgccgtcgagtcaaggaccgcagttcgacttcgtcaacactgttcaggtgccaaccgttcagcagcaagttccaaccccaggcttcggaacaaaccaagcaccaatccaagctgccatgatgtggtcgcagccaatctttgacccatccatggcggcccaacaagtacaaccagttggagccgggcagtcgaatgccacggcccaactctacgcacaagcagcgatttcgcccttcgccactccgtacccgcagcaaggtgcggtaaacagggcgggaggcgaaaaggggctgccgctgagtgggggaatcaagactcgtccaatcccgccccagttcaagttcccacctgtcccgcgttattcgggtgaaactgacccgaaggaattcctctccatctacgagtcagcgatcgaagcagctcatggtgacgaaaataccaaggcgaaggtaatacatctcgctctagacggcatcgcccgttcttggtatttcaatttaccagccaatagcatttactcatgggagcaattgcgcgatgtttttgtccttaactttcgaggcacctatgaggagccgaagacgcagcaacaccttcttggcattcgccaaaggccgggggagtccataagggagaacatgcgtcgcttctcgcaagcccggtgccaagttcaagacataaccgaggcgtcggtcataaacgccgcatcggctggtctgcttgaggacgaactaacaagaaaaatcgtcaacaaggagccgcagacgctcgagcacccgcttcgcatcattgacgggttcgcaaggggtgaggaggattctaagcgacgacaagctatacaagctgagtacgataaagcctccgtcgctgctgctcaagctcaagcgcaagttcaaattgccgaacctcctcccctctctgttcgccagtctcagccggcgatccagggacagccgccaaggcaaggccaagcccccatgacttggagaaagttcagaacagatcgggcgggcaaggctgtgatggctgtcgaagaagtgcaagccctccgcaaggagttcgacacccagcaagcaagcaaccatcagcagccagcccgcaagaaggtccgaaaagacctctactgcgcctttcacggacgctcttcgcacaccacggagcaatgccgaaacattaggcaacgtggcaacgtgcaagacccaaggccgcagcagggaacaactgtcgaagcaccccgtgaagcagttcaggagcaaacaaccccagccaaacaacgccaagatacacaacgaaggaggaagatgcagatccgcatggtccacagcatcacttcggcgggtgaaggggcgccacagtacgtgaaccagctgatctctttcgggccagaagacgccgaaggagtcctgttcccgcatcaagatccactagtaatctcagctgagatagccggtttcgaagtccgacgaatcctggtcgatggagggagttcggccgacgtgatctacgccgaagcatatgctaagatgggcttgccaacccaagctcttacaccggcactaacgtcgctccgggggttcagcggagaggcagtgcaagttcttggccaagcacttttgctgatagctttcggctcgggagaaaataggcgcgaagagcaaatactgttcgacgtcgtcaacatcccatacaactacaacgccatcttcggccgtgcaaccctgaacaagctcgaagccatttcccaccacaattatctcaagctcaagatgcctggcccaacaggggtgatagtagtcaaggggcttcagccttcagccgcttcaaaatgtgatctagccataatcaacagagcagtgcacaatgttaagaccgaaccgcatgagcggccgaagcacacgccgaagcccacccctcacggcaaggtaacaaaagtgcagattaatgatgccgaccccacaaagctcgtatcactgggtggcgacatgggcgaagaagaagttgagagcatactagaggtgctcaaaaagaacatcgatatcttcgcttggagccctgacgaagtggggggcgtcccggcggatctcatcatgcatcacttagcagtcaagccgaatattaagccaagaaaacaaaagttgcgcaagatgtctgccgatcgccaagaagcgacgaagaccgaagtacaaaaattactccgggcgggggttattcaagagattgaccatccggagtggttggcgaatccagtgctggtgcggaagtcaaatggcaaatggcgcatgtgtgtcgatttcacagacctgaacaaggcatgtccgaaacacgattttcccttgccgcgaatcgaccagctcgtagatttaacggctggatgcgagctcatgagtttcctggatgcatattccggttaccaccagatccacatgaacccgctcgacatccccaaaacatccttcatcactccattcggcacattttgtcacctcaggatgcctttcggcttgaggaacgcaggagcaaccttcgccaggctggtgtacaaggtccttggcaagcagttggggcgaaacgtggaagcttacgtcgacgacatcgtcgtaaaaagccgcaaggctttcgaccatgcgatcgacctgcaggagacattcgacaacttgtgcgtggcaggtataaagctgaatccggagaagtgcgttttcagcgtccgcgtaggcaagttgttgggtttccttgtttccgaaacagggatcgaggcgaatccagagaaaatcgatgccatccagcaaatgaagcctccgtcaagcatacatgaagtacaaaagcttgcaggccgaatcgcggcactcagtcgattcctctcaaaggcggtcgaaagaggtttgcccttcttcaagaccctccgggacgcgagaaagtttaattggacaccagagtgccaagcagcattcgacgagctaaagcagcacttgcaaagcccgccagttctgataagcccaccccgaggaagcgaactgctattatacttggcagcttcgccggtggcagtcagtgctgcactcgtccaaaaaacagagtccagacagaaatcggtctacttcgtctccgaagcactgcaaggagcgcagacaaggtacattgaaatggaaaagcttgcttacgctctgtcacgcccggaatttctatccaaaattccaaacgcttacatgtgtgtgaaccctcgtccaggaatcagccgaggcacacaataa

SEQ ID NO: 44252 - DNA, 513 bp, Oryza sativa
  Clone ID: PAT_MRT4530_47330C.1
ttaagttattcattatatcttgtcatcatgattcatgagcgattttttaaatattctctcataagtatggataagtttgtaaaaatgcatggaagaaatattatagctatttttttgtcaggaatgaggcagatggttctgtgtttcttcttcgttcgcacttcaaatatgatcttaatatttcttcatttttttctctcttcaaagatgtttgtagcattcgtgtggcagaatcttatttatcatctagttagaaacttagaatagtgaacctaagtggtacagtatcccgttagaagttaattcacacaaatgcatatgaactgctttgcgaataatggaattcttcctgttcatgcttatgttatacatcatgacatcttttctgtttcaaacaaactatggatagtttgtaattttggttctgctttttttcttggtttcatgtaaacgtaacacaagggttaacattgttttggttgtctgtgatctttgtgactatattaacatcat

SEQ ID NO: 44253 - DNA, 360 bp, Oryza sativa
  Clone ID: PAT_MRT4530_47331C.1
atggcctgggaagcctcaagccgctccgtgacggcccaccaggctctcgttgatagtcttcggagagcctcccccatgctgccgccaccgccgccgccgacggcacgggcgccagatcccgccgccgcgggtgaccatgccgtcgccgtggaggccttccgcgccatggtccggcgaaggcgcgctcctgaatgcctgcacctacactgtcgtcatcgagcacctcgcctccgcgggattcgtggaccaggtggtcgacgactcgatgtgttccgcctcctcctgtcgctgcgcgcgcggcggaccacccggcagtacaacgtgctcgccgtggcgcttgcatcggcggggaagttttag

SEQ ID NO: 44254 - DNA, 1082 bp, Oryza sativa
  Clone ID: PAT_MRT4530_47332C.1
cagatccaagcccccgcgacgaggcgaggtgggagagggggcagaggcagagcgagatgagcgtggggcgtaaaaattcaccacgccaccatacgcatttactccgcttgcagccctacccccacgcggcgtcacgagggcccaatgccattccgccgcttccccgctgagagatcgatccccaccgcgccgccgccgccgcagccgcagccgcagccgtcgccatgtcctcctcatcctcttcgctgctctcctcgctcgccacgctcggcctcgggtactcgatcgccatcgcgctgggattcctcgtcctgctcgcgtcgctcctcctcgcgtcatacttctgcttccgccgcgggggcggcggcgggcacttctccggcgtgctcaccccgagctccagctccagccacctctccatcaccgtcccgcgcgtgctcttcgtcgcggaggggtccgagtcccccgacgcctactcctcgggcgtcgcggccgcgtcgtcccccgtggggctcgaccccgcggccatcgcgtcgtacccgaaggtccccttctacagcggcgccggcgcggacgccgacgccatgtgctcgatctgcctcagcgagtacgcggacggggagatgctgcgcgtgatgcccgactgcaggcacaggttccacgtctgctgcctcgacgcctggctgcgccggaacgcgtcgtgccccgtgtgcaggtcctcgcccatccccacgccggtggccacgccgctggcgacgccgctgtcggagctcgtcccgctctcgcagtacgccgccgatcggaggcgcagcagggggttgtgcttaggttatttagagaagttcgggaggtgcaaaaccactactcgggaccacgcattgggggagaaccgtagcctcgtgacgtgcttagggaaaaggagaggtcaaggagaacttgctgtggtgatcgtcgccgccaccgaggtcgcgttgccgctccatgtcgccgatgaggtcgtgtcgccgctccaagtcgccaccgctaagatccgccgctgccagtggcccctcgactgtcgcgagaagggggcgggagggtag

SEQ ID NO: 44255 - DNA, 1176 bp, Oryza sativa
  Clone ID: PAT_MRT4530_47333C.1
tttttttttttttttatcacaaaaagagcatcagcttgattgtattttttttactcagccagccagacaagttactttggaaagcaaaattgctctgtactgtacatgtaggacaggttaatctccaaatacaaggtaggagtatatatcaaaggcaaattgataaaagctgaagaatccgatctctcattcctcctcttagcctaacaaatgaaacatactaccaagtcttatcgtgtcatctggtatcagcgattctgcgcagaggggaagccttcacggtgagattttctggagacaaccatcatttcgaaagccagtaaataatcaaaaagatggtgcaggccgcgatcactgctgaaaggatgatagtgtcctttgatttcttcctcttgatggcaccaagtagtcctctaataacagggaacttttcacccaactgcttgacttttccttgaacatccccaaacaatgccctctgattggaaagggctacccttgtgctctgagcttggccaattacctcatcaatctggttaatgctgccatgaatcgaggccctctccctgagcaaatgcaccctcggcgacatgccgccagtagccttggactcagtaatgtcgtcccgcacagagctgaggagatcggcgtgctccctgatggagctcagattccccctcgtcctcctgaactcctgcgcgaactcgtggaggatgtcgcggtggcgggcgagcttctgcgagacggaggtggtgggggcggtggaggcggcgcagcggctcatggcgtcgttgacgtcctgcagcttgtcgagcagcgactggatctcgaactccatggacttccaggaggagcgctcgctcggggaggaggcggaggcggcgtcggcggcggaggaggagcgcgcggcgaggcgcgcgtaggaggagagcttgacgtcgaggtcaccctccagcttccgtgcctcccgccgcagctcctcccacccggactcctgcagctccagcgccgccgccgccgccgcggcgtccgacgccgacggcatcatcgccggcgagatccggcccgattcggctgcgggatccccctgcttccgcgattccggcccgcctcgcgatctggagaagaaaagaagaagccgcgccccgtccccctgcctgcagcccggggatccac

SEQ ID NO: 44256 - DNA, 2613 bp, Oryza sativa
  Clone ID: PAT_MRT4530_47334C.1
atggcaccgaagaagatcgctaaggagagagttgccaagcgaaaggagggcagcagtgagggggagatggccggcgaagaaggaccagacccttcggccttcgaagccgaagttggagccgcgccacttctggcggcagcgccatctctcccaccttcggcaccgaccacttcgacagatgcggagacggcgaaagcggcagccgcggcgaaggcgctccagattagggacgtaatcctttcgtctcaagcaccgggggcgtctcaagccgccgccttgatgcaacaagctacaacctcgaccgcaattaccaccttgcaagccaacgccaacgttgaagctcaagccgaagccgacaagggggctatgcgtcagaacatggccaagttgcaagatacgcttcgccagatgcaagagcagcagcaagcccgagggaagtcaaagttagggtgcgctggccggacagctgttgggccagttcggcatgccaagtcaggcaaaccagccagctcaaggggcttcgcctcaaagccaactaccacaattcgaccccagtaccgcggttcaagcacccatgaccttcatgcaaaccgtgccccccgggtacggaacggccccaatgcggaaccatgcctggacccaagccatgttcgacccgactatggcaatgcaagttgcttcgacagaccagcagacccaggcgttggtgttcggcacggggcatcaatcagcacctgcagctcaacctcatgtgcaagctgtaacttcgccattcgcgctcccatacccataactaaactcgccctcccagtatggggctacggtgaagccgggtggcgaaaagggtttgccactaagctagggaatcatcccattccccctcaattcaagtaccctcccatcccaaggtattcgggagaaacggacccgaaagagttcctttccatctacgaatccacaattgaagctgctcatggcgatgagaataccaaggcgaagaagatactaagcggatgcaagaaatacaagccgaatatgacaaggcggccacagccgcaaccgctgccgcgcaagcttgctcaagttcaagttcaggctcaagccgctggttcgacacatgtgttggttcgcccatcccttccggcaaatcaagggcagcctccaaggccgaaccaagcccccatgacgtggaaaaaattcaggaccgatcgggccggaaaggcagtgatggctgtcgaagaagtgcaagcacttcgcaaggagctcgatgttcaacaagcaggcagccagcaacaacctttccgcaggaagatcaagaaggacttgtactgcagctttcacagacgctcttcgcacacaaccgagcaatcacctcaggtcgagcagcgccaagatgcacagcgaagagtgatccaagtaatcacaaggtctgatcccccttcgcagatgtcgaaacgccagaaaaagatgcagcttcaagcagtgcacaacatcgtgtcggcaagtgaaggggtaccgagctacttggcgcagcaaatctctttcggaccggaggatgccgaaggagttttgttcccacaccaagacccgctggtggtatcggcagaaatggccggttttgaagttcggcgcattttgatcgatgggggcagctcagctgatgtcattttcgccagaacatatgccaagatgggattgccgactctggcattgtcccaagcaccaacttcgctcaagggattcgaaggcgaagtagtgcaggttttgggtcaagccctcctcaaagtcgctttcggcacacaagaaaacaagagagaagaagagatactcttcgatgttgttgacaacccatacaattacaacgccatcttcagccatggcactttgaacaaattcgaagcagtctcccaccacaactatgtcaagcttaagatgcctggttcggccggtgtaatagttgtcaaggggctccaacctttggccaccacagtggccccctttgatagggaagttcatattgtggatgccgaagggcaagaaagagcaagacccacgccgaaacctgctccgcatggcaaggtgatgcagctgcagatagacgataccgaccccacgaaagtcgtattgctcggcgtagatctgggcgatcaagagaagtcgaacggcaagtggcgaatgtgcgtcgacttcacagacctcaacaaaatgtgcccgaaagacgacttccccctccctcggatcgatcaactggtcgatttgaccgccggatgtgagcttatgaatttcttggatgcatactccggatatcatcaaatccacatgaactcggtggacatcccaaagacaaccttcatcatgcctttcggcaccttttgccatctcagaatgtcgttcggcttgaggaatgcaggggctactttcaccaggctggtgtacaaggtcttgggattgcaactggggtggaatgtcgaagcctatgtcaatgatattgtcgtgaaaagtcgcaaggcatttgaccatgcgtcagatctgcaagaaactttcgacaacctccgcgtggccggcatgaagttaaacccagaaaagtgtgtgttcggtgttcgcgctggttag

SEQ ID NO: 44257 - DNA, 209 bp, Oryza sativa
  Clone ID: PAT_MRT4530_47335C.1
atgcagccgcataaaccagaaacctgtccatctacaatgccaaagtttgatacgaaatcaggagaaaaaattggtctgctcgctgccccctacgtccttgccgactgggccgccaggagagtccccgccctcgccgccgcccgcggccgcccggagtcgccgcccgtctcccactccgccctcgagcccgcctggtgcgccgccggaag

SEQ ID NO: 44258 - DNA, 766 bp, Oryza sativa
  unsure (1)..(766): unsure at all n locations
  Clone ID: PAT_MRT4530_47336C.1
anaaaaaaaaaaaaaaatctcactttttttttngntttttcacaataaaaaaaaaatattttttttggggaagcaccgggcgataaaaataaaaaaaaggagtgggccggggcctttttttggtgcctggaccccccccaaaaaaaaaatttttttagtgggactaaattcaccttttttttacccccccggggggggagcgcaccccccccaaaaaaattaaaaagtttttttttaataaaaaaaaactcccaagagattttaaaggtttttcaacctttttgttttggggagtacaaattaacttcttctatgcggaaagtaaaaaaaaacctttcaattggtgtgccttacatttatatgtgttctcggagaaaaaacctaaataagttctggttttccttctttggaaattggggctaaaaggggaaaaggacataaaaaaaaaaacaacgtttagaggggccttttttttttaaaaaaaaaaattttttttttttttatttaaaaaagcgctctttttttttttatagggggcgtaaaaaaaaaaaaaaagggcataaaaaataagaaaaagaggggaaaaaaaccacttgtaaaatgttttttttttccccccccccacaaaatttttcatacctgaaaaaaaaaaaaaagatgttttttttttttcttatcaaccccaaaaaagattttttttgttaaatgtatttctctacaaaaaaaaatttggcgcgtttcttaaaaaaaaaaagggggggggggg

SEQ ID NO: 44259 - DNA, 145 bp, Oryza sativa
  Clone ID: PAT_MRT4530_47337C.1
gttttatcaagatagtcatcttgtatacctcgggggggctgttcatggaagtatggggctgtcctcaacaggctatcagatcagtctgcggctgactgccctaacaactcagacagacttaacaagctgcagaagaacctacagc

SEQ ID NO: 44260 - DNA, 1170 bp, Oryza sativa
  Clone ID: PAT_MRT4530_47338C.1
atgggtaaagtgggcactgcgggagtgggtaaaagcaggttggcttctcgaggaggcttgaagcagcttgcagagtggagtgcggagagcaggggaacacgaacgttgggatggcatgtagcgtgggccagcgccatcccagttttgaacgttggggacttggggtgtatcactacagctttgatgtaccgcacagcagtagttactcaagccaggctggtgctggctatgcaaagcaagcaatgtgaggacgaacacggcgataacagtgaaaaatgcagggagagatggagggatgtttcatttggtcacgtgagtgttgatgaaatcaagggacaaaaaaaattcaatgggaggtggggaagagagacaaaacggtggccggctggccgcaggcaggcaggtgaggtcgtgaggaggaggaggcggccacgagaagctgcggatgagaaagcgctcctggtggtgaagcgggctactactcgctctatgcgcgtcatcgggatgcgcggcagcacgatccgctggccctactaccatcaacgcacatcacgccgcactcgtgagccggacagccggccgccagccagcctagccccggtgtggcagtcggacgtgcaggcagatcaggcagcagcagcagcggcggtgaattgcgaacggacggatcgcgcattcattcgtgcctgcccgcgttgccctttcgctggtatcatatctaggcgcgtcacgatggaccacgggagcggcgcttttgttggtccacttccgtgcaggccagctagctcagctccgccggagccgagacgaaatggcaaggcagctggcgtccggggttaccgtgccccgacacctgaaaacggtggcaagggaaacctgcttccatccgcgatctgctcacgcgaggtcgcgagccccggttgcctgcaggccgtcctggttttctcacgttatccggcttcaagctttcatgtcctccgggactgtaatcacatcgacaacgatgctgtaaccattactccgtacagcacaatggcagcagaggactgggattggatgctcgagctgtcatctcgtaggacgtcgggctcgtcatcaaaccggctgctctgtgtctcgcgcgtgtctcccgtcctctaccccctcgttaattctcctgggaccggataa

SEQ ID NO: 44261 - DNA, 208 bp, Oryza sativa
  Clone ID: PAT_MRT4530_47339C.1
accacggcgcggtgagcccatgcatgccacagcccaagcccaacttggtgaggccagatgagtgaatttttggatgaaagtacatatgatgaccccgtgttgggatgttgatgattgtggtggcccaagtgtgactgctgggttgtggcctctgtgaatttgcaccttgagggattgctactctggacccggtgaaaaaggagcccat

SEQ ID NO: 44262 - DNA, 577 bp, Oryza sativa
  Clone ID: PAT_MRT4530_4733C.1
cccgggctgaggctctacttctctcgctctctcctcttcccttgcgacggccgccgccccgtcttgccctccacctgcttgcttctcctcgtcggcgatgacctctcccacacaccatcccttgcctcctgccgtctggtcgcccctctcccactccgttggtccgttgctgcccctacccgaggatgcaccacctttagatctggcgttggaggctagggttggcttgaagtggtggcttgcagcaggacacgggtgagcggcggcggcggcacagcagttgggcgtgggcgcatcgtggggaaggcagcaggtcgccggcggggtcgtgcggaggtaaggtcgacgcgcagcgtgtgggctttgacgccagtatgctgtcattgtatttggagaaaaaaaaaggccaggtacacttttttcccttttctgtatctcttatggtttgtggttgcaattgagcaatcaatctggtcaaaaaagcttgccattgatagaggctcccatttggctttttacgatttattgtcaaatgatagaggctcccattatctgaccatctaatgaataggtggtt

SEQ ID NO: 44263 - DNA, 471 bp, Oryza sativa
  Clone ID: PAT_MRT4530_47340C.1
atggcgcgggtcagccgtgggggcctgtacttcagctgggctttggctgtggtgacaggtgagttgtgcgccaacagtacaaccaacctactcgtacgagtaactactgctgtgcggtacatcaaagctgtagtgatacaccccaagtccccaacgttcaaaactgggatggcgctggcccacgctacatgccatcccaacgttcgtgttcccctgctctccgcactccactctgcaagctgcttcaagcctcctcgagaagccaacctgcttttacccactcccgcagtgcccactttacccattccgcccgcaatccctaaactgcccatgcctttacgcaggattcaccatgccatcgagccactgatctacagtatccgaggcgccagcttgaggggtagaatggtcagatgcccgctcagcaacagctgggagcaggcaggccacgcaaagccagctggccagtga

SEQ ID NO: 44264 - DNA, 1182 bp, Oryza sativa
  Clone ID: PAT_MRT4530_47341C.1
atggcacggtggtcctccccgaaggacccggcgctggaggccgcgctccgccgcaaccgccgctggatcgtgaacaaccagatcaagcgcctcctcctccgcttcccgtcccgcaccgcccccgtccgcctcctccagtcccgcttcaagacgctcgacctcctcggccgagccgccaactggctccgcaagtacccttcctgcttcgacctcttccacggcggcgccggcggcgatggcgatggcggggaggaggcctgcttcgggttcaccaagcggatggcggtgctggtcgacgccgaggaggcggccgtcgcggcgtccgagccggcgatggccgaccgcctcgcgcgggtgctcatgctcgcccgcggccgccgcctccaggtgtccaagctcgccgcgctgcggggcccgctcggcctccccgacgactacctcctccgcctcctccccgcccgcaccgacctcttccgcctcgccaacccttacccgcaccgccgcaacgccgccgagctggagcttctccggtgggtcccttccctcgccgtctcctccgtcgaggcggcggccgcctccgccgccgactcctccgccccgcggttcacctgctcgctgccgccctcctgggccaagtctcatgccaagatggaggaattcaattccacgccgtacatctcgccgtactcggagagatgggcggcgataggcacggacgccgacgccgagaagcgagcggtggcggtggtgcacgagctcctctcgctcacattgtggaaaaagatgtcggttctgaagctggagcatttcaggagggagttcgggttgccggaggacacggcgaggatgctgcatcggcatccgtgcctcttctacgtctcaaacaggtacaagatacacacggtggtgctccgggagggttacgaggggtcggagcttagggagaaggatccggtggtagcggcgaaggataggctcggggagctgatgcaggaggggctgcatgagtataatcagcggcggcgttcggataatttggagaagaagaggaggagaggagagattgagataaaggaggaagaggaggaggacgatgaggaagcagcgcggttggatagtgctgagaagagggaggagaggaggaagttttacaaggtgctgtttaatgatgataaccgctga

SEQ ID NO: 44265 - DNA, 428 bp, Oryza sativa
  Clone ID: PAT_MRT4530_47342C.1
gcacgaggccaggagtccgtgacgcaggcgctgcgccatccccaccgtccccgccgtcagccatccggcgtccacgccggtgcctgcgcgcatcctgtggctccgtgccggtctgccgcagccgcgctgagccgccgacactcacggccgccgtccgcatcccgcgtccgtcgtccgcgccggtgccgcaccgagccgggggccacgacggatggagcgactcgccgactcctattctccagtcctcttcttgtcgccgcctcgccggacgccggacgtaggccacccaaccagttgccggcttggcggtttgccgcagccgtaggcgtgcagcggcgcaacggcgctgcccgccttctcatctcctgttttcccatctccattcccatccggcctcctgctcaactgctccacgtctccaccgatcc

SEQ ID NO: 44266 - DNA, 589 bp, Oryza sativa
  Clone ID: PAT_MRT4530_47343C.1
cccacgcgtccgcccacgcgtccgcccacgcgtccgggctgctccgcctccgcctccgcatgtacgcctgattgatccccacccctctctccactgactgtgctatcgcgtttccggcggtggttgatcgaggcggtagcccgtgcggcgcgcgagattccgcccgtccacggatttccggtcgccatcgccggggttcgtcttctccggccagcccctcgccgcgcgaacctgcgccgcccgtcctcggccaggatctggtcggggatcgcttgtggtaggtgttagggggcacttgggtttggaggacagcatcgttgatgtgctttgactttgagttccttgctaatttagttatgctgattgttcccataatccctaaaatctcagcagttgcgttgcgtggtaggttatgtaaagcgcattcgttcggtgaaaattcatgcacatttgagcgatcgtacagtagtctgaagttggtgttttctatcctccggtaattatggatcactgcggcagaaatcttagtttcaaaattaaaaaccttggaacttaaacctgtgcccgggtgtgcaaacctgacagccat

SEQ ID NO: 44267 - DNA, 381 bp, Oryza sativa
  Clone ID: PAT_MRT4530_47344C.1
atggcggggcggttgcggcttggcacgacggcggcatggcggcgcggcatcggcgtggcgcgttgcgtggcggcggcgtggctgcgcggcatcggtgtggcgcggtggcggcgttgcacggcggcggtgccgtgccgcaacggcgtcgtggcgcggcttcattggcactgccagtgcgacgtcgtcgccggtgccggccgcatcgaggtcggggtcggcatcgtcggcgcggcagagtcatgttcggccgcgacgacgtcggcgacggcgtcggcaacgaggcagctggctaaagatattttcccgctaaagatattttctatctttactcccggttattctcatcaaccgggactaaagatattttcccgttatttctaa

SEQ ID NO: 44268 - DNA, 190 bp, Oryza sativa
  unsure (1)..(190): unsure at all n locations
  Clone ID: PAT_MRT4530_47345C.1
atcacaacaattgagcagcagcagcagaagcaattgagatttaattccatggcgatttcgaggtcagctccaatggaggagaggnntcagctgcagggagcaagaagatcagcggtcggggattatctggngcagcagcagcagcaggatggagtgtacctnatccacagccaggtgatgnggatcaaaa

SEQ ID NO: 44269 - DNA, 1163 bp, Oryza sativa
  Clone ID: PAT_MRT4530_47346C.1
gcacgaggcacgtctccgtctgtttgcggctcaaggtttcagcgatgggcgcctccacctcgcctcgtctcgccttgctagtagtggtcgcggcggcggcgttcgtcttcgtctcgccggcgatggctttcccgatgggattgccggcgacggcgaacccgttcccgaacccgtggtccgctttccagaacctctctgggtgccacgccggcgaggagagggaggggctagggaggctcaaggattacctcagccacttcggctacctcccgccgccgccgtcgtcgtcgccgtacagcgacgcgttcgacgactccctggaggccgccatcgccgcgtaccagcgcaacttcggcctcaacgcgacgggggagctggacacggacaccgtggaccagatggtcgccccgcgctgcggcgtcgccgacgtcatcaacgggacatccaccatggacaggaactcgtcggcggccgccctccgcggccgccacctgtacagctacttccccggcgggccgatgtggccgccgttccgccgcaacctcaggtacgcgatcaccgcgacgtccgcgacgtccatcgacagggcgacgctgagcgccgtgttcgcgcgggccttctcccggtgggccgccgccacgaggctgcagttcacggaggtgtcctcggcgtcgaacgccgacatcacgatcgggttctactccggcgaccacggggacggcgaggcgttcgacgggccactgggcacgctggcgcacgcgttctcgccgacggacgggcggttccacctggacgccgcggaggcgtgggtggccagcggcgacgtgtccacctcgtcgtcgttcggcacggcggtggacctggagtccgtggcggtgcacgagatcgggcacctgctggggctcggccactcgtcggtgccggactccatcatgtacccgacgatccgcacggggacgaggaaggtggacctggagtccgacgacgtcctggggatacagagcctgtacgggaccaacccaaacttcaagggcgtcacgccgacgtcgccgtcgacgagcagccgggagatggacggcagcgcggccgccgccggcatccggccgtggagtgggttcgttggattagttgtgccggcagttgtcctgctcttagctccgtag

SEQ ID NO: 44270 - DNA, 786 bp, Oryza sativa
  Clone ID: PAT_MRT4530_47347C.1
atggtgtggccggcgtctcggtgcgtcctgctggatccaggtgtgcccgactacgtgttctccatcgatcaaacgaaacaagggtgggcgtccatcgacctgaagaagaagaggtaccaagggtgtgggaggtacggccccttgttggcggagagcgtgaagctctatgcgcgcctcgccgaggagcacccggctctctctcggttggccgtctgcgccgacaagaacatcatccgcgacatcgtggcggaagaactcaagaagaagcaagctttcaaggtggcggatctgccgattcgcgccatcgagttcggcaatgtcgacgagatctcaggtgtcactgcccgcgtcgaggtcgcggacaagaacctcatggtcctctccctgtccttcgtcttcacatctagcaagctgaagcactacctcctctatgatgccattcacgcctccatgtccatgatccccatcccgaattggaaaccgcgcttccccaaggagacgccagcgtccttctgccaccacgtcaagttcacgtccagtagccatgctttccgggccgatctcaccaagggcgtcctgtgctgccgcatcaaggatctcatggatagcttcttcgtccattttgacttcattgagttgccccctgggtgcaagtctgacgcccttgatgactctgatactgggccagctgagatgttccgaaccatgggctgcggcactggggacttgatcaagttcgtctccatctccttcgatgattctgtgccggaggacgacatacggtga

SEQ ID NO: 44271 - DNA, 320 bp, Oryza sativa
  Clone ID: PAT_MRT4530_47348C.1
taagaaagcagaaccaacacaagggacggggggatttttcacttagctacgtggatctcccaccatgccggacaagtgcggcaactgcgactgggctgacacgagccagtgcgtgaagaaaggcaccagactaggcgtggtcatagttgaagccgagaagagtcactatgaggaggacgccgccggccaggagaacgggggttgcaagtgcggtaccagctgctactgtaccgactgccagcgggggaagtgaagacacaaagcaaccgaacactcgccgcgggggagtcacctactttaatgtagcccacattaaaaac

SEQ ID NO: 44272 - DNA, 1933 bp, Oryza sativa
  Clone ID: PAT_MRT4530_47349C.1
gggtaccgggcccccccactgaaagcactatagaatgagcatgagccatcccctttttttttttttttttttttgcaaaagcagttcacccaagataaattcaaattacttcagtgcatacataaggttgtgagatcgacaagcaaaaacatactggtaccaataaacagaagtattaaagaacccagcttgtgaacatcgaatgatggaattcagagtccgatctccctaatcagcatttgatctccctaatttgcctggcaaaacaaatctagctggctcccggaccacaccatttgcttccgtgatatctctctctgcatgctttcatcaacttcctccaatgctgactccatctcgacccaggattgcactttgcccgcatccatcttcctattgtcaggaacaaggcgctgactatcaaggtgtctgaagaattcacagcccaacaaaccagaaggaacaatcttatctgggcgccaggaaagagggttggacacaagcttcttgcttgtcatgttgaatcggcagacgtggtgcaccgcagggtcctcccaccgcatgattggcctggacagtatgaagtaaaggtctccaccatcgccttcctccatgctcagcagggggtacactggctcggtctccggtaatccatccttcttgaagtcatccagttcccacagagttccgaagcgcagctcctcgcccttggtccactgcaaggtacccatgtccagtgtccactccgtcaccgtcttgtcgtcctccggcacagaatcatcgaaggagatggagacaaacttgatcaagtccccagtgctgcagcccatggttcggaacatctccgctggcccagtatcggagtcatcaagggcgtcagacttgcacccagggggcaactcaatgaagtcaaaatggacgaagaagctgtccaagaggtccttgatgcggcagcacaggacgcccttggtgagatcagcccagaaagcatggctactggatgtgaacttgacgtggtggcagaaggacgctggcgtctccttcgagaagcgcggtttcctggtgtgccacggttcaccggagggattcgggtacatcttctctcgcggcggcggtggcggcggtggcagcaacgttggaggcgacgacgactttggaggcgtccacaggtagagcaagtcaatgcaggtggatcgtccttctctcttgtagggatagttcttggcaaagaggactagggcgtactcatcaccgtaccgcacagggagagggttcgacggtaagtagatatcgcagcaccaattcgggatggggatcatggacatggatgcgtgaatggcatcatagaggaggtagtgcttgctagatgtgaagacgaaggacagggagaggaccatgaggttcttgtctgcgacctcgacgcgggcagtgacacctgagatctcgtcgatcttgtcgaactcgatggcgcgaatcgccagatccggcaccatgaggccggggggtgaagattcggcggccttggaagctttcttcttcttgagttcttccgccacgatgttgcggatgatattcttgtcggcgcagatggccaaccgagagagagccgggtgctcctcggcgaggcgcacatagagcttcacgctctccgccaacaaggggccgtacctcccgcacccttggtacctcttcttcttcaagtcgatagacgcccacccttgttctgttggaccgatggagaacacgtagtcgggcacacctggatccagcaggacgcaccgagacgccggcgacgccatccctagggtttcggtggaaggggagaggaggagaaaaaggggaccggtaagattttgatgggagaagaagaagatttcgactcgcctactcttggccccgaggcaaacccgatccgactatagtacccggccgg

SEQ ID NO: 44273 - DNA, 4899 bp, Oryza sativa
  Clone ID: PAT_MRT4530_4734C.1
atgccacagaagaaggtcgtgaaggagaaggttacaaggcgaaaggaaagcgacgccggagtggacatggctgccgaagaggaagcagagccttcggcgcccgtggccgaagatggaggagcgccatctgcttccgcatctgcgccatcactactgccttcggcccttgccgcctctgtgcaggtgtcgaacgtggccaacgtggcgaaggcggctgcggcggcaagggcactccagaccagggcggagatcctttcgacaagccaactgctggtgccccaagccgccccatcgcagctggcagcggcctcagctccgctcgctgctgggcaggtccaagtcaaccctgaccccgaagcacaaaccgaagccgacatggaagccatgcggcagaacatggcacggctccaagacatgctttgccaaatgcaagaacaacaacaagcatacgaggcggcaaggcgaaccaagctcacgtgggccccaatcctccagtattcgacaggatatgtcccactccaacagcggatccggcccctcacatgcaagtgcaagctcagccggtcgctgcccaagtgcaccatcagccacctggccaagtgccacaaacaatggcagaaggggcttcggctctgcagtcgcagctccaagctttccttcagcagctcaaccaaccccacaacatttcaagtacaaccccattggctcgcccggaggggaatacaagtcaaggtgcgcctagttggttgccgtcaaatcagccagccaactttcgacccatccatggcccaaccccatgcacaagccgtgatttcgcccttcgccacgccgtacccacagcaaggtgccgtaaatagggcggggggcgaaaaggggctaccgctgagtggaggaatcaagactcgtccaattccagcccagttcaaattcccacccgtcccacgctactcaggcgaaactgacccgaagaaattcctctccatctacgagtccgcgattgaagcggctcatggcgacgaaaataccaaggcaaagaggccgggggagtcgataagggagtacatgcgtcgcttctcgcaagcccggtgccaagttcaagacataaccgaggcatcggtcataaatgccgcttcggctggtctgctcgagggcgaactcacaagaaaaatcgccaccaaggagccacagacacttgagcacctacttcgcatcattgcggtttcgcaaggggcgaggaggattccaagcgacggcaagctatacaagctgagcaaggctgtgatggctgttgaagaagtgcaagccctccgcaaggagttcgacgcccagcaagcaagcaaccatcagcagccggtccgcaagaagggagcaactgtcgaagcacctcgtgaagcagttcaggagaaagcacccccagccgaacaacgccaagatgcacagcgaagggtaatccaagtgattacaagggctgacccgccaagccagttgtccaaacggcagaagaagatgcggatccgaacggtccacaacatcacttcggcgggtaaagggacgccgcagtatctgaaccagctaatttcttttgggtcggaagacgccgaaggagttatgttcccgcatcaagatcctcttgtgatctcagccgagagagctggcttcgaagtccgacgaatcctggtcggcagagggagttcggccgatgttatcttcgctgaagcatatgccaagatggggttgcccacccaagcccttaccccagcaccagcatcgcttcgcggttttggcggagaggcagttcaagtccttggccaagcacttttgctgatagcttttggctcgggggagaacagacgtgaagagcaagtactgttcgacgtcgtcgacatcccgtacaactacaacgccatctttggccgtgcaaccctgaacaagttcgaagccatttcccaccacaattatctcaagctcaagatgcccggcctgacaggagtgatagtggtcaaggggcttcagccttcggccgcttcaaaaggcgatctggccataatcaacagagaagtgcacaatgttgaggccgaaccgtatgaccgaccgaagcacgcgccaaagcccacccctcacagcaagataataaaggtacagattgatgatgccaaccccacaaagctcgtatcactaggggacgacatgggtgaagaagaagctgggagcatcctagaggtgctcaaaaagaacattgatatcttcgcctggagccccgacgaagtgggaggtgtttggacagatctcatcatgcatcacctggcagtcaagctagatgccaagccaagaaaacagaagttgcgcaagatgtccgccgatcgccaagaggcggtgaaagccgaagtccaaaaactactcagggccggggtcattcaagagattgaccatccggagtggctggcgaatccagtgctggtgcggaagtcaaccagcaaaaaacgcatgtgtgtcgatttcacagacctgaacaaagcatgtccgaaagacgatttccccttgccacggatcgatcagctcgtggattcaacagctggctgcgaactcatgagtttcctggatgcatattccggctatcaccagatccacatgaacccgcccgacatccccaaaacagccttcatcactccattcggcacattttgtcacctcaggatgcctttcggcctgaggaataccggagcaaccttcgccaggctggtgtacaaggtcctttgcaagcagttggggcgaaacgtggaagcttatgtcgacgacatcgtcgtaaaaagccgcaaggctttcgaccatgtgtccaacctacaggagacctttgacaacttacgcgcagcaggcataaaactgaatcctgagaagtgcgttttcggcgttcgcgcaggcaagctgttgggcttccttgtttctgaaaaaggcatcgaggcgaatcccaagaaaatcgacgccattcagcaaatgaagcctccgtcgagtgtacatgaggtacaaaagctcgcgggccgaattgtggcacttagtcgattcctctcaaaggcagccgaaagaggtttgcccttcttcaagaccctccggggctcgggaaagttcaattggacaccagaatgccaagcagcgttcgacgagctaaagcaatacctgcaaagcccgtcagctctgataagcccagcaccgagaagcaaactgctactatacttagcagcttcgccggtggcagttagtgctgtcctcgtccaagaaacagagttcggccagaaaccggtctatttggtctccgaagcattgcaaggagcaaagacaagatacattgaaatggaaaagctcgcttacgccctgtaccccttgggcgaaatactccgagacaaggaagttactggccggctcagcaagtgggcggcagagctatccccgttcgatttgcgttttgttgcacgcactgctgtcaagtctcaagtgctagctgactgcgtagctgaatggacaccagtattcacccccgagcccaagcctgtcgaacaattctgggtgatgtgctccaacggttcgtggtcgcacaagggggtaggcattgcggcagtactcatttcgccgaatggtgtgccaattcggtatgctgcaaggctgcagttcgacacaaccaacaacgcagcaggatacgaagccgttcttctgggcctaagaaaggcgaaagcactgggagtccggcgcttgctaatccgaaccgactccaagctggtggcaggccatgttgacaaatccttcgaggcaaaagaagaaggaatgaagaggtatttggaggccgttcggtccatggaaaagtgcttcaccggcataacggtcgaacacttacctagaggccggaacgaggaaggagacgccttggcgaaatctgctgcttctagtggcccacattcgcctggcatctttttcgaagtcctgtatgcaccaagtgtgcccgtggacagcttggaggtcatggcaatcgatcaggtgaaactgagcgaagacccatacgactggcgaaccccgtttgtgaaacatcttgaaactggctggcttccggaagacgaagcagaagcaaagcgcttgcaactcagagccacgaagtataagatggtctcggcccagcgctatcgctccgggcccattgcgccaatctggcccttcgccagatggggactggacatcattgggctgttcccggtggcgcgaaacgggtataagttcgcaattgtggctgtggaatatttctctcgatggattgaagccgaacccctcggggcaatcacttcggcagcagtacaaaagtttgtatggaaaaacattgtttgccgttttggagtgccaaaagagttcatcactgacaacgacaagcggttcgactctgacaagttcagagagatgtgcgaaggacttaacctggaaatcaggttcgcgtcagtcgtgcacccgcagtcaaatggggcggtcgaacgtacaaatggcaagatcctagaagcactaaagaaaaggctcgagggggcagcgaagggcaaatggccagaggaagtgctatctgttctctgggcccttcggacgacccccacaagaccaaccaagtttaacccgtttatgcttctttgtggcgatgaggcaatgaccccagcggagctagaggctaactcaccaagggtgatgttctctgggggcgaagaggggcgcgaggtgtcgctcgaactcttggagggggtaagagtcgaagcacatgcgccagtataccacaagcacttcggcaacttacaacaaaaaagttcaaccgacggagctgatgcctggtcatcttgtcctaaggaagaaagcgaacccgattgctgttggcaagcttga

SEQ ID NO: 44274 - DNA, 440 bp, Oryza sativa
  unsure (1)..(440): unsure at all n locations
  Clone ID: PAT_MRT4530_47350C.1
cgggctgcaggaatcggcacgaggcacagatgatctgcaagactactacatggctggaattgtttgaaggcactctggggatagacttgtcaaattagtggtgaatatgtcttctgcagccatctgtctcctgatctactagaacaatgtgtgccacagaagggacccagcatacaacaaacaactcactgctggagttgttatcacccaaacaccaacaggaaattcttgtgaatttcaatggtcaggacaggttcatggatgtcatatatcaggacatctccaccgtcgaaactcgaaagacgcctatgggcaacagttcctggtgaaatgcacccacagaaagccagaattcttcatcatccagccagngatgatccttatttatggaccgcgtatcgcgaagaagaaaaaactctgtttttacatggtacacaaaa

SEQ ID NO: 44275 - DNA, 1042 bp, Oryza sativa
  Clone ID: PAT_MRT4530_47351C.1
aatcccaaagataggacctgcgtagagtggcatctgttatctgaggcctagtgtccttcctaatgatgcatacacctagtgtccttcctaggtctcaaataacagatgccactctacataggtcctatctttgggattgtatggttcagttgaagcctgttcgcaatatgagagtgtagagcgactcgtggtttgcggactacctccttcgagttgggaatggcattgaagaggtgaatgaggaaggacacatacacctgccttcggatatttgtgtgacatgcaaagggaatgactcggacctcgatgggctgataccgtgttccccaacctaaatgataaccttatggacccaaactacatcacatctagggccataatgtccactcagaatggtttcgtggatcgaataaacatgaaaatgattgagcgatttcgaggagaggtgatgacatatcatagttttgatcgagcagaggatgacccttgtaactattacccgctcgaattcttgaactctctaactccaaacggtctacctccacatgtgttaaagctgaagataaactgtcccatcatgctattgaggaacattgacccagccaacgaactttttaacaggacaaggctagtggttcgtgggttcagaagaaatgctattgacgtggagattgtggtatggaaacatgctggtaagagagttttccttccttggatactcctatgcccttcggatgatgagatgttcccgtttcgctttaagaggaagcaatttccaattagactgagcttcgcattgacgatcaataaggcacaatgacaaacaattccaaatgcaggtgtctacctcccgaagccggtgttctctcatggtcagctctacatcgcgttgtctagagcaacctctagaacaaacatcaagattctctccgtgcaggacaaagagaaggagaaaactgcaacatgcacaaagaatattatgtacaaggaggtcctcacaacatcattgactggtcggattcgaattcacctaacgttatgt

SEQ ID NO: 44276 - DNA, 156 bp, Oryza sativa
  unsure (1)..(156): unsure at all n locations
  Clone ID: PAT_MRT4530_47352C.1
gactgaatatccaggttgaatagaccaaaaggcccctacctacactggtttccaaacatggggngaattatacaagaagacaaagccaataaggggaacactttttctgatacatgccaccagggaggtagccaccacccaagatcgcccgaggtc

SEQ ID NO: 44277 - DNA, 675 bp, Oryza sativa
  Clone ID: PAT_MRT4530_47353C.1
atgggcgcctcggcctccgtcctctcccttcccacggcggccgccatcccgggagccgccaccgctatagctggcgccgcgggctgcttcgccctcggctacttcctcgccctcagccgcttcccccgccaggtcgtcgctgcctcccccgcttccggggagacctcggacgaggattccgaggaggattcggaagaagatgatgatgacgaaaactccggccgcagccgggcggcgaagcgggcgcccaagcgcgccgggctccggctgctgttctgggcgcgcaacgtggtgaccaagtccgactcggcgaaggaggccgagagggccaaggcacggaccgcggctagccccctggaggtcgagaatctcgctgagattatagaggatttcaagatggtgctggttgtgaggaatgatttgaagatggggaaggggaagattgccgcgcaatgcaggtgggagaggtgtggtcaagttaaggtggtcgtgaaaattgaaagcgaggaagatatgcttgttttacaaggaagagcaaagtctttgaatatcccaacacacataactattgatgctggaagaacacagatcgcaccaaattcaagaacagtcatggctattcttgggccagctgacatggtcgatgatgtcaccggtggtctgaagcttctataa

SEQ ID NO: 44278 - DNA, 348 bp, Oryza sativa
  Clone ID: PAT_MRT4530_47354C.1
ccggccggggatacacaaggtaggagctgcagcagtatcaaccatggcgatgatgcgatccatcatcctcctcctcctcgtcggcgtcgtcgctctccgcctccgccgacgcgaccttcctcgtcgcgaacaaaaaggattagctctcccgccagcaagtctggcggcaagcgccagagcgtctacctcgaactctacgaccagggatccgccactgcctatgatgtgagcattaacgatgatacttgatcagaggaagcattcgagcttgtctctggagagatggcaaagacattgcgaaggcttgaccctggaagtgatgcttcgcatgctatttgactaggctac

SEQ ID NO: 44279 - DNA, 760 bp, Oryza sativa
  unsure (1)..(760): unsure at all n locations
  Clone ID: PAT_MRT4530_47355C.1
gccgcgggctgcttcgccctcggctacttcctcgccctcagccgcttcccccgccaggtcgtcgctgcctcccccgcttccggggagacctcggacgaggattccgaggaggattcggaagaagatgatgatgacgaaaactccggccgcagccgggcggcgaagcgggcgcccaagcgcgccgggctccggctgctgttctgggcgcgcaacgtggtgaccaagtccgactcggcgaaggaggccgagagggccaaggcacggaccgcggctagccccctggaggtcgagaatctcgctgagattatagaggatttcaagatggtgctggttgtgaggaatgatttgaagatggggaaggggaagattgccgcgcaatgcagccatgcaacgttgggtctgtttaaaaaactccaacagagagctccaaaatcattaagaaggtgggagaggtgtggtcaagttaaggtggtcgtgaaaattgaaagcgaggaagatatgcttgttttacaaggaagagcaaagtctttgaatatcccaacacacataactattgatgctggaagaacacagatcgcaccagtttcaagaacagtcatggctattcacatggtagctgacatcatcgatgatgtcaccggtggtctgaagcttctataaattcttgttctcggtatcctcagacataggaaatttgagacaaacgcttaaatttgacaaaccacattggctgctgaagaacgaaccctgnaactcatcg

SEQ ID NO: 44280 - DNA, 225 bp, Oryza sativa
  Clone ID: PAT_MRT4530_47356C.1
agaacatatggcaataacgcgagcgatcagagattcagagacatgacgaagacacaggaaagatcagcgacaccattgagccgggaacaaagcagagggacaccagctacacctggatgacaccaaaccgaaacatcataagagcaggagagaccctaaaggcccaactccggggaagcacctaggacaaagccctgccaacctggtcacacactcggaggacag

SEQ ID NO: 44281 - DNA, 2325 bp, Oryza sativa
  Clone ID: PAT_MRT4530_47357C.1
atgaagaagcggaagaggcgcggcggtggcgcctccgccgccttcgaccggagcgtcttccccatcctgctcgccgccgccgcacgatccactcaccggcggactccacacggctccgactcgaccgtcgcccgcctcctccgccgcgcgctctcgcgctcccgcccgtcgcttcaccctctcccggcctccctcgtcgcgatcctccccctcctcctcacctccagaaattggcaatgcagctctgcttctgtggccgcgctgagctgcgaggtgctgggtgcagcggcgctccagtccatggaggctagcgagacgcttgcgtccgatgccgccattgccgattgcttggcacgggcgctgcggcgtgggagccagcgagtggcagaggctgcctgtaatgctataatggatctctctgcttcttctgctggcagggagcatcttgcgggctctgctgttctgcagagcatattatatctattttctcaggtggaatttatttctggagtcattgatatcagaagcactgagtgctcaaaaagtgcttctaaagcaaataaatccttctacttgatggttgacacattggtattcatggtgaattcctgtcaagttgataccttgcataatctgcaacaggatgtagttagaaaagttctgcctttgttgcataaaatctggaagaatgttgataaactgggatcgtcaactgactgcatcaactcgaagaatcaacttcaaaggaaagaacatgagatatctgaagctatttttaggctttcaatgaatattgcctgtccagcccacctggaacctgatgaagtcagacgaagcatttttggacaatcggtatctgactatgaaaattttctcctaaactactgggagaagtcgacttacttggtcactaggaaacagaagaatctgcatgtggatagtgtattcacttcactgcttaatgaatttgatctgaaaacacctgatactatcatccagtcacttgtaaatgggattgtttcttgccccgctattgcttcagatgaacttgacattagttcatttctccgtgaggttcaaggttccttgggtgccactgtgaagtataggcaagatatcagagttgtaagaataaatgaccaatgtgatcagacctcaataggttatgcgatggaggaacatttctttgatgatgggatgaccttccaggatgcagatgcattcgttgaaaaatgtaaggatgcatttaaaaatggtttctcagttgccttgcgtggtatggagttccgttctgaaaagattgctgctatagcttctgctgtagctgatttattcggtcaaccttctgtgggagctaatatatatttctcccctccaagagctcagggcctggcccggcattatgatgatcactgtgtacttgtttggcaactgcttggatgcaagaaatggatgatttggcctgacacaaagttacttttgcctagactatatgaaccttttgaacctttagatgacttggtggatgattgtggtgggaggatggaaattttgcttgaaggagacataatgtatgttcctagaggctttgttcacgaggctcacactgatgttgatgttggtggatttgaagtgaactcaactgttgattgctcactccatttgacccttgctattgaggttgagccacccttcgagtgggagggatttacgcatattgcccttcattgttggacggagaaacactggagctctccatttgttaagtcccaagaggaggcacgaacttcgttatttgctctcctgttgcatgtggcaatcaggctgctttcgaaaaatgatgcaaccttcaggaaggcatgcatggttgcagcaaagcttccaccatctagttcatgtacgacaactcactcgaaagctctcagaagcaaccaaagatcattttttgatgagataattaagaaaatcgacaggagctgcaacttcaaggaggcattgatgtgcattgggctcgcagtgagagagaaaaacgatgagcccttccaatggatgtgttggctccggcatctgccgcaacacggaggcacaaatgaccaagtcgatttctgcaacattttgggagcccttgaagagcttcttgaggcagtcagctgcaaccttgagcaatccttaactgaatttacagacttcaagttgaaattttgtaggtgcgtagcgtacgaagacgcgtgtgagagctttgaaatgttgcttcagatgtatagaacgactaggaatcagtacacgaggggaatgctagcattgcacaggaagcatgaaatttaa

SEQ ID NO: 44282 - DNA, 303 bp, Oryza sativa
  Clone ID: PAT_MRT4530_47358C.1
aatattcaacattatgctgttaatatatatgggggatatccagatttggatgattaacctatgttacaaattaacatcgctgttaaatttcagataacaatttacaacctatggaaatccattgaatggatgtgtgaaaaccaaatcaatgtactacaagcataatcctcttttataattccttctgaaagatcctcttgggtccatgcatagcaaggcttttaatacaagctgttaatggagcttcactttttacttatatcccacttgctccactacatgaagggaggtggctaagcttaa

SEQ ID NO: 44283 - DNA, 1218 bp, Oryza sativa
  Clone ID: PAT_MRT4530_47359C.1
atggcggcgatcggcaagggtgactggcggcgatcgagtgccccttcctccttccttccattggtgacaactcagtttcattccgttctgttggtgagaactgagaaatcagttctggctacctcggtgcaacaacacggcaagtttctttcctcttcttgtatgttagggcatggtgagcaaatttgtgggagaagtaaggacaatatcacatatcaaggtcgttcaagtatccatgaattcaacaaggattacttgagctatttcaagctgcgagatcagctgaaagaatttgggctcaaggaaaatgatagtttgtattacttgaagcctggatattttgcacccaatggtcttgtgcttttaatggatgacaaccaatgcattcaactattgactgattatgaaggaaaaagtagttgcagcctgtacattgtcctgggtcctgcaaggctagtgatgaatgatgaaattctagtgaacggtcctagtagaagaaaaggtagtgctgctataagagacatagtagcaacatcaaatagcgacgatagtgtggaagatgagacatactttgctctgaatgaaattgatgattactcgtcttttgttgagattgtacctgatcatgaggtagaaaacttgttgtggatgctggtgattatatatttgatggtgatggtggagatgatgagttgtactctgggaagaagcagcacatcggggcaaaacaagatggtaaattacctactaatggtagaagtaatgataatggcaataaccagatcaaggggcgttgacgacaattggtttgatgagggtaccatgaggcatccatatatccaagagggttgtgcatggtacatgtatggaagagtgatccctggtgagaagacattcaagttaaaaaagtttataaaagatcatacatgtggaaggtcccatgatgtgaagcaattggatgcaaagtggattgcaaaggactatgttgaagattttagaagtgatagagattggaaggatccagatgtgaaccttgtgtttgtaagaatgttcatatcatttaaagctcagattgatgggtttatagctgcctgtagaccttttataggtgtcgatggaacccgtgttaagctaccaaatagagcacagatcctagcagcaactggtagagatgccaataacaatatgtctctgtccactagtatttgcaatagttga

SEQ ID NO: 44284 - DNA, 627 bp, Oryza sativa
  Clone ID: PAT_MRT4530_4735C.1
cccgggctgcaggaattcggcacgaggagtttaccgttctggatgttgatggtgaagaaccacatactggtataattgcgtccatcagcaatgacaatcctgcaatgatatcctgcgttgatgatgagcgccttgaattccaagatggtgatcttgttgtcttctcagaggtccaagggatgacagaactaaatgatggcaagccaaggaagataataaatgcaaggccatattcattttgcatccaggaggatacaagtaaatttggtatttatgcaaaaggtggaattgttactcaggtgaaagagccgatcaacttagagttcaagagtctcagagattctataagagaaccagagaatttccttttgagcgatttctcaaagtttgaccgtcctcctcttctgcacttcgcatttctagctttggataagttcaggaaagaatttgggcgctttcctggtgctggctgtgaccaagatgctcaaaggtttattgagtttgttgcttctgtcaatgaagctacaattgattacaagatggatgagcttgatgggaagttgttacgaaattttgcaagtggttctagagctgttctaaacccaaatggctgcgatgtttggtggc

SEQ ID NO: 44285 - DNA, 1245 bp, Oryza sativa
  unsure (1)..(1245): unsure at all n locations
  Clone ID: PAT_MRT4530_47360C.1
gcacgagggtgacttgtaatcctcgttcttgatgaactcgacgacgatgtccttgtcgggctggatctggagcatcttgagggcgaggcataggaagggggtgggcttgcggctgcctccctacgttccgtctttttttttttgtttcatgtctttccctttcttgttttttttcttttttttttcttttttcttttcttctttcttcttactacttttctttcttacttccttccctcctttctctttccctcactttccttttcctcctctttcttttctcccccttctcttttttctttttttctcctccttcctctctttcccatctcctccctttccctcttccctattccctcttcatctttctcttttttttcttctactctttctttctttgttctctctcttcttttctgtttttgctgcttcttctcttatttcttcttctttcctcttttatctttctctttttatctctttctttcctctcccctcttccttgttatcttttcttttctctctttattatctcttcttctttctctacactctcctttcatctccttctttctctttcttgtttctttcttcttcctccctcgactcacctgtcctcgacctctcgcgctctgtcttattttgtatttcattgttatatgtcacttgttcctccccatcccttcctcttatattattctctcttttccttctcctcttcttctctttttcctctcgttatatgtcatctctttttttctccgcctctatactctcttatctttgtatctctcccatacctcccctctctttattttactctcctctcctccttcctttctccttctcaatcttttcttctattatctcttccttctttcttctctctctcccctctccactcctcttatttcttttcgcctctatcatcttgcttttcttattattcttctctctccttctcttctctctctttcttcctactctttcctccttttctgttttttctctttctccttttctctctttttnctttcttcttatttatcttatcatattttttatctctttatttatcttttcttatcttttctcttccttttttatcctatcgctcctttctctcttctctatctctttcttactctctttctctcctctcccctcttcttctctttcttctttctgttttattattatctctgctactactctctctatatattgttacctaacttctactct

SEQ ID NO: 44286 - DNA, 3016 bp, Oryza sativa
  Clone ID: PAT_MRT4530_47361C.1
gcgcgcccgcgccactttccccatctccgacacctctctcctctccgatttactcctctcctttttgccctatcgccttggcgatagggttccgcttcgctgctgcagcagcggcgtttcgcctgtaaatgcttcttgttgttgttggggggaggggtctcttttaggtgattgttcttgttcttcttcttcgacatggtggctttctatggactcggagatggagggtgtctcgtgtcggcgccggcggagctggccgggatgttctgccgcggcggcgtggtggtgcagcagcagcagaggaagcggtcgctggtggccgcgtcggcggtcgcggcggcggactgcgtcgtgagggcggcgaagaggcagaggcagcagcggcagccgccgtcgctcgacgcgctccccgacgagtgcctcttcgaggtcctccgtcgcctccccggcggccgcgagcgcggcgcctccgcctgcgtctcccgccgctggctcgccctcctctgcagcatccgggcttcccgagctcaaccaggccaccgctgctgccgccgcggcggcgccgccctcccttcccgacctcaacgaggagttcgtcatggaggaggacgacgaggaggaggagtcgtctcccgtggtggatccgtgcgtcgagagggtcctcgagggcaaggaggccaccgacgtccgcctcgccgccatggccgtcgtcgccggctcccgccgcgggctggagaagctcgccgtccgcgggagccacccgacgcgcggcgtcaccgaccggggcctcctcgccgtcgcccgcggcagccccaacctctgctcgctcgcgctgtgggatgtcccgctcgtcaccgacgccggcctcgccgagatcgccgccggttgcccctcgctggagcgcctggacatcacccgttgcccgctcatcacagacaagggcctcgccgccgtcgcgcacggctgccccaacctgctgtctctcactgtcgagtcgtgctccggtgtcggcaacgatggcctcagggcaattggccgatcttgctccaagattcaggcattgaacatcaagaattgcgcgcggatcggcgaccagggcatctccagcctcgtgtgctccgcgaccgcctcgctgaccaagatcaggctgcagggtttgaacatcactgatgcttcgctcgccttgatcgggtactacgggaaggctgtcacggatctcacccttgtccgcctcccggtggtcgcggagagagggttttgggtgatggccaatgctgccggcctgcagaatctgaggtgcatgagtgtcacctcttgccctggggtcaccaatctcgcgcttgctgctatcgccaagttctgcccgagcttgaggcagctttccttcaggaagtgtggacacatgacggatgccggtctcaaggctttcacggaatcggcgaggttgttggagagcttgcagcttgaagagtgcaatggggttactcttgttggtattcttgatttcctcgtcaactgcggtccgaagttcaggtccctctctttggtgaagtgcatgggtatcaaggacatctgctctacgcctgcgcagcttcctctgtgcaaatcgcttcaattcctgaccatcaaggactgcccggatttcactgatgcaagcttggctgtggtggggatggtttgcccttacttggagcaggttgatttgagtggtctccgtgaggtcactgaccgtgggcttcttccactgatcaactcttccgagggtggtctagtcaaggtcgatttgagtggttgcaagaacatcacagatgcagctgtttctaccctggtgaaggggcatggaaaatctctgaagcaagttagtcttgagggctgcagcaagataaccgatgctagcctctttgccatctccgagaattgcactgagcttgctgagctcgatctgtccaagtgcatggtcagtgacaatggtgttgctaccctggcatcagcaaagcacctcaagcttcgtgtcctgtcactgtctggttgctcgaaggttactccgaagagcgtgtcattcttgggcaacatggggcagtctttggagggtctcaatcttcagttctgcaacatgattggtaaccacaacattgcatcgctggagaagcagctctggtggtgcgacattctcgcataggcagacaagatggttcattgctggagggtgtcacctgtgcttgggtgaggcacctccagatgcagatatacatccttagaggtagcgcaaccagtcaatcgctgtgctagtcatgtttttggctagtgcatgagtcatggtgggttctggatttgttcgaggaccggttgtttccgaggggtgctttccgccaagtgctcgttttttcacagactgcctcaagaggcaatctgttttttgagccttcggctgccattgctggcattctgccccctctacccagacattggtccttgccgctatagtcacaacaccatgattgttttttaggttgccgtagtgtcccttgtccttttttctttactgcttgcttcctagtcatgaagttgcaggcaccggcatcggcacaggggggctgtcatggagttccgcagctcaactgccggtgtcaccagtagtcggcagcgccggtgttccaggctgccgacgacgctggagtgcctgcagacttaccctgtgtgtatggttactgagtctgttggtgtcttgaggtcatgtgtgatgatgttttcggtagtgtgtaagggtcatagagggttgattttttgttacaggtactcttgggaatgcctggtgttgggggatctggccattgcaaggcgcatactagagccttgtcatgacagccttgtatggttgttttttcaccagatccctgtttttaccggcatattgttgaggactgtaatctttgcaaccttctcagaataaattaagtatgtgtttatgtgaaaaaaaaaaaaaaaaaaaaaaaaaaaaaacctcgcccccgtgccc

SEQ ID NO: 44287 - DNA, 273 bp, Oryza sativa
  Clone ID: PAT_MRT4530_47362C.1
cggacgcgtgggctgatcaagcagacagcagatgcaaactgggcattgtagagtagcagcatggccttctgttttcagatggcaagttgtgctaacctggagagatctgaatgttcagagagtaacacatccttttctccttttttggtagtatcaagcagctggatgatgatttcattcagccttatcatgaatagggcttagttagtgtattatctggaacatcatttagcagaataattgatcagttagctttaaaaaaaaaaaaaaaaa

SEQ ID NO: 44288 - DNA, 1233 bp, Oryza sativa
  Clone ID: PAT_MRT4530_47363C.1
ccggccggagcccaaaaaaaaaaaaaaaatctcgtcatctccacgcgcggcatctgaaatccatggcccccgccgccgccgagcaggagctgctcctccacctgaagctcgccttcctcgcccgggagccccccgcctgcgtcctctccctcgccagaaaagctgggggaggttctgtcacgccacacgttcaaaattttattttggagagttgtactggcaataatgcagggggagatcaaaactgtagttatgttacaactattcttaaaaggattatagcagaagctgagttatcgtcagatattgtgattgatggactttatgaggaatttggccagttcatgtcgtcaaaatcaaataattcatccttaaataggactgagaagatctataaagaaatatcttttatttctcctacaaatgacaataaacgagtaagcttggttgctcgattatcatgttctatcaatatgctcgaaggtgatacagggtgctctctttggccatcaggtttattcctatctgagtttattctttcatacccaaaaattttctctaggaagtgttgctttgagctaggttctggtgttggtttggttggtgtatgtctgaactatgtcagcgcctccaaggttattcttactgatggtgatgcatctacactagaaaacatgaaaggcaacatggaaatgaataacttatgcgttgagcaggaaggttctcaacttccggaagagaacaagaataaggtacaatgcaaatatctttcatgggaagaaacatctgaaagcgatctatgggactgcaggccagacttagtccttggtgcagatataatatatgatccggtctgtgtgccgcaccttattagagtgctttctatgctattgagaagggggaataatcgaggaactaataatgtcgcaaacaaagaagaaaccagcaacgaattcagtagcgctgcgacagaagttcctgtcgcctacatagccacagttattcggaatgccgagacattcaactgttttgacaaagcagctgcggatgccaagttgtctgttgtcaacattaccaacagtgaagctcctttgagtcttcttccttatatgctctcatatgatagatcaagtgtacagctacttaaaattacattattatcctaagacactgattggaactccagcaaaaaaaaaaaaaaaaaaaagttgactgatcataaattcgtttttg

SEQ ID NO: 44289 - DNA, 855 bp, Oryza sativa
  Clone ID: PAT_MRT4530_47364C.1
atgggtaatggcagcattaaggcctacgcggccgttgttctgatcaggatcatgtactcggttatgcaagtcgtgagcaaggttgccttggatcaaggcatgagcccgttggtgtttatattctatcggcataccgctgctgccctcgtgttgatccctattgcttttgttctagagaggggaaaagctaaacgggtgacgttaaaaaatgcagggaaaatgtttatacatgccttatatggggtgacaggatgtggtgacttctttaaccttggtctgaattatgcttcagcaacttcatcatcagcattgtacaatgttcaaccagtggttggagtctatgaaactgaagagattccatggacatgcttatggaatgtgttccaggggccgttgatagaagacacttccaagctgatgaacaccacgatacagatctcattcgcgtcagtccaagcctttgttgtggctgttgcagccgagagggacttctccaagtggaagcttggctggaattttggccttgctgcaataatctacaatggtgtgattgtcactgcactttcatactacatgcaaatatggacgatcgcgaagagggggccagtgttccttgccatgtcgatgccacttactttgatattcacaatcatcatatcctcattcattttaggagaagcagttagcctagggagtattgttgctggaatactactaattggaggcttatttaatgttctgtggggtaaaaacttagaggaacatgatgaactgaacaagataggtccagctatacctgacttggagatgcaggataaagaggcccaagtgcctaatgaccgcgcaacaaattga

SEQ ID NO: 44290 - DNA, 435 bp, Oryza sativa
  Clone ID: PAT_MRT4530_47365C.1
atggcgctcgccgtgaagctcgccgtcctcctactacttgccgcggcagcagctggaggaagcagcacgacgaccgtgccgccgctggaggagaggctgggcgcggcgttcgacgggatggcggcggcggcggagggaggaggagggggagggtggatgatggagtgctggagcgcggtgacgaagctggggtcgtgcacgaacgagatcgtgctcttcttcgtcaacggcgagtcctacctcggcccggactgctgcgtcgccatccgcaccgtcacccgccgctgctggccggccatgctcgcctccatcggcttcaccgcccaggaggccgacatcctccgcggcttctgcgacgccgagctcgccgccccgcccccgccctccaccaacgcctcctccgccgcccccgcgccggcgccggcgtccgcttag

SEQ ID NO: 44291 - DNA, 285 bp, Oryza sativa
  Clone ID: PAT_MRT4530_47366C.1
gtggttttttaacaataggggatatcattacaataaacctttagtaccaagtgaacgactgaaatccaaagtttgttgttacccatatagacacaaaaggctagaaagaatgcattacaaatttgaacaaaaaaacaagcaaaccgggtttttattgaaggagcatcgtcccaaaatatgtacaaaaagaactaaaccttaaacacaatacaaattcaggggaaaatggggtccgacaagaaaacttcaaaaatgatctactttcccacggttgttgcagggttt

SEQ ID NO: 44292 - DNA, 322 bp, Oryza sativa
  Clone ID: PAT_MRT4530_47367C.1
atggagaagaaaagcttggcgaagtcatcggcaggcaagtccggggctcccaaagcggaaagcctatcctggagcgaagacgataccagcgacgtcgaagattggttccatcgcactcgtcgacggaaaactcggcgccacccctacctgacgcgccaactgtcaaaacatgaattcggcctaaaagtggatggatgcggagacaaaggatttagactggttcaggccctctcaataagagtacaagtgattgttgagtatcttcgggtctgggacttggtcaagggggttgatgaggaactagatcctgatcttccgatag

SEQ ID NO: 44293 - DNA, 1277 bp, Oryza sativa
  unsure (1)..(1277): unsure at all n locations
  Clone ID: PAT_MRT4530_47368C.1
cntantnnngngcccncnanaaaanncnnnannnangnntnancaacccannnnnnnaacanaanaaaaanaancnnntccccnnnangnnaaaaaaacnnaatnagaaanatnnnacnngtgtttnaaaanaaancgncnaaaangtnangtcncnananangnnnanaangttnggannaaatgntggggccctcnnaaaaccccanatggnaanaaggggntgnnnnnnaaagnnanaaaanantggnaaccccccagggttttcccnnggnanccncnntttnaaaannanagggcnaangnaattnncaancgnncccccnnaaaggggttaaaaagaggttttaggggaccctcccccgggatttttttttttttttttttttttttttttttgtaaaacagcacacttgcgtcaatgcattatggtgtgccaatgattaaggaaaacaggatcagatgttctcgattacagttcttacacagctaacagtactcgccacgaattttaaactgatgactcaatacagctagtatacaaaattgagatacacttttttttttattgaaaagcattcatgtaccacactatcacttgagtccatcaccaaggcctgctggcattcctaagctctgtgccagatcagccatcctctccttcattgcctggacactcctctgatgtgcatccttgtaggcgtcgttcaccagctcagaaagtttttcagcacccacttccattgcagcttcggtgatttcaactcttacaggctgctggttcccagaaagtgttaccttgattagttccccttcacagtaaccatcgatctcagtcgctgcaagctccttttgcacccggacagcctcaacttggacaaccatctgggccttcttcacagtttcataaagattttgcatatttccgaaaattcctgcctttgatggtgcttcttcaccattctcgtctttgtccttttttcccccaaataaactgtacacgcgaaaggatctattgctagcctttttcctattgtaacatggcaaacagaatgcaccttcgacatttatcttagaacgggtcgggttgaagaggagcggcgagaaggaggacttgaaggccaccggagagagggcggtggagggagccatcggcggcggcggcggcggcgagatgggcggcggtggaggaggaaggggggaggaaaaggctcgatttttgggatagaggatatcgttgaagagaaaaggtagcctgcagcccggggatccactag

SEQ ID NO: 44294 - DNA, 573 bp, Oryza sativa
  Clone ID: PAT_MRT4530_47369C.1
atggcggagagcaccctggccctgctcgccgaggtggccgccatttgcgaacaactcgtagacgatcccgacgccgccaagatcatgctggactccgtgctctccggcttcgcggccctcgacggccacatcaccacgttggagaatctgctcgatttttacctgcgtgcggcggacgagccgatcatggactggcccatggccgaggtggagcgggaggagcagcgcgccctcgaggaactctaccaggatctcagggcggacgccgatgtcctcatggagcaccgcaggcggctgcaccgaatcgtcaagctgctcgtcttcatccggacttacggcatcatcaagcgcgccttgcggcgcttcctccccgccgcggccctcaagttcgtggccggagccgccgccgtggtcgtgtacgtcgagtggaggcggggcacggtgcccgagttcgagaacctcggggggatcttcacccggttgatgtgcttcttcctcttgggctatcgggttcgtttgctttgcttgctccgtcttgttgtttcgccctctgcttctgatttagaaatttga

SEQ ID NO: 44295 - DNA, 2829 bp, Oryza sativa
  Clone ID: PAT_MRT4530_4736C.1
atggccgaagatggaggaggacaagcaccatcacaaccgccttcggcccctgcaacctccgtgcaagtgacgaacgcggccgacgtggtgaaggcggctgcggcggcaagggcactccagactagggcggagatcctttcgacaagccaactggtggtgccccaagccgctccatcgcagccggcgcaactccaagctttccttcagcaactcaaccaaccccactgcatttcaagtacaaccccatcggcccacccggaggagaatacaagtcaaggtgcgcctaattggttgccaccgattcagccgggcctgggagcttcgccatggaatcaaggaccgcagttcgacttcatcaatgctgctcagagaccaaccgttcggcagcaagctccaggcttcggaacaaaccaagcaccaatccaagctgccacgacgtggtcgcagccaatttttgacccatccatggcggctcagcaagtacctccagttggagccaggcagtcgaatgccatggcacaacctcacgcacaagatgcgattttgcccttcgccacaccgtacccgcagcaaagtgcagtaaacagggcgggaggcgaaaaggggctaccgctgagcgggggaatcaagactcgtccaatcccaccgcagttcaagttcccacccgtcccacgctattcaggcgaaactgacctgaaggagttcctctccatctacgagttagcgatcgaagcggctcatggtgacgaaaataccaaagcgaaggtaatacatctcgctctagacggcatcgcccgttcttggtatttcaatttaccagccaatagcatttactcatgggagcaattgcgtgatgtttttgtccttaactttcgaggcacctatgaggagccgaagacgcagcaacacctcctcggcattcgccaaaggccgggggagtccataagggagtacatgcatcgcttctcacaagcctggtgccaagttcaagacataaccgaggcgtcggttataaacgccgcttcggccggtctgctcgagggcgaactcacaagaaaaatcgccaacaaggagccacagacgcttgagcatctacttcgcatcattgacggctcaagcacaagttcaagttgccaaaccacctcccctctctgttcgccagtctcagccggcgatccaaggacagccgccaaagcaaggccaggcccccataacttggagaaaaagttcagaacagaccatgcgggcaaagctgtgatggcggtcgaagaagtgcaagccctccgcaaggagttcgacgcccagcaagcgagcaaccatcagcagccagcccgcaagaaggtccgaaaagacctctactgcgcctttcacggacgctcttcgcacaccacggagcaatgtcgaaacattaggcaacgtggcaatgggcaagacccaaggccgcagcagggaacaactgtcgaagcaccccgcgaagtagttcaggagcaaacacccccagccgaacaacgccaagatgtacagcgaagtgtaatccaagtgattacaagggctgacccgccaagccagttgtccaaacggcagaagaagatgcatatccgtatggtccacagcatcacttcggcgggtgaaggggcgccgcagtatctgaaccagctaatttcttttgggccggaagacgcagaaggagttatgtttccgcatcaagatcccctggtaatctcagctgagatagctggtttcgaagtccgacaaatcctggtcgacggagggagttcggctgatgttatcttcgccgaagcatatgccaagatggggttgcctacccaagcccttaccccagcaccagcatcgctccgcggtttcggcggagaagcagttcaagttctcggccaagcacttttgctgatagcctttggctcggggaagaacagacgcgaagagcaaatactgttcgacgtcgtcgacatcccgtacaactacaatgccatctttggccgtgcaaccctgaacaagttcgaagccatttcccaccacaattatctcaagctcaagatgcccagcccgacagtggtgatagtagtcatggggcttcagccttcggccgcttcaaaaggcgatctagccataatcaacagagcggtgcacagtgttgagaccgaaccgtatgaacggccgaagcacacgccaaagcccacccctcacggcaagataacaaaagtgcagattgatgacgccgaccctacaaagctcgtatcactggggggcgacatgggcgaagaagaagttgagagtatcctagaggtgctcaaaaagaacatcgatatcttcgcctggagccctgacgaggtggggggtgtcctggcggatctcatcatgcatcacctagcagtcaagccggacattaagccaaaaaaacaaaagctgcgcaagatgtctgccgattgccaagaagcggcgaaagccgaagtacaaaaattgctcagggcgggggttatccaagagattgatcatctggagtggttggcgaatccagtgctggtgcgaaagtcaaacggcaaatggcgcatgtgtgtcgatttcacagacctgaataaagcatgtccgaaagacgacttccccttgccgcgaatcgaccaactctgggggcgaagaggggcgcgaagtatcgctcgaactcttagaaggagtaagggtcgaagcgctcgagcacatgcacaagtacgccacaagcacttcggcaacttacaacaaaaaagttcgacccacgcagctgatgcctggtcatcttgtcctaaggaagaaggcgaatccagtagtggttggtaa

SEQ ID NO: 44296 - DNA, 239 bp, Oryza sativa
  unsure (1)..(239): unsure at all n locations
  Clone ID: PAT_MRT4530_47370C.1
ctgcgctaggtaccctctcgagggcacctgttatggcccccacgctgtttggttccngcttccaccccacgcgttacacacggtctgagggatttcgcagtgggaccacacagtttatagaaccctagtaccgtgccacgttaattaagttgttacccttgagaacatacgtggttcatcatgtatttcatcacatgaatcttttttagagcgtttgataaaaaaaaaaaaaaaaaaaa

SEQ ID NO: 44297 - DNA, 561 bp, Oryza sativa
  Clone ID: PAT_MRT4530_47371C.1
ccggccgggagctgtccaagttaaagcctcctgctcaacatcttgacaacggtgtacaatcttgaatcctcccttcttcatcaactatctctatcatatcaagatgaagttcatcgctacagttctctccgtccttccagtagtcctcgctctaccaacaggcgaagatgcatccatctcaaagcgccagagcgtgaacacagtgacagaccagctcctcttcagcgttacactcccacaattcactgctcgtcgcaacgcccgcgatcctcccactgtcgactggacctctgatggttgcacttcgtcccccgacaacccattcggcttccctttcgtccccgcttgcaaccgtcacgacttcggctaccacaactaccgcgcccagaaccgcttcacagtgagcggcaaggcccgtatcgacagcaacttcaagaccgatttgtacttccaatgtcaatcttcgagtgtttctggggtctgcagaggtcttgccgatgtctactacgctgctgtcagagcctttggcggagacgatgctacccctggcaagagagatga

SEQ ID NO: 44298 - DNA, 249 bp, Oryza sativa
  Clone ID: PAT_MRT4530_47372C.1
tgtggaattaattaattggattgagttgcataaactatacatataccgcttgttggctattgcaaggatgaaaaaatgagggggacctgtgacaaaatgttaagtgggttattattggtgcatgagaatgacaactgattggttatgttacagtatatagtttggtattttagtgtgtcccggtttgtcagtaggaatatataataatgtaatagatcgtgttgttatatatactgaataaactatata

SEQ ID NO: 44299 - DNA, 1291 bp, Oryza sativa
  Clone ID: PAT_MRT4530_47373C.1
gcacgaggcgctctcgcgcgggcggctcggggggcgaaaccctagccgcccgcgccgccactccccctcttctctcttcacctcgccgccgccggagctcgtcaacggcgagccgggaaggcggcggcgaggccttccactacagcaaccctttccttggcgcgaggaggacggagttgggctgacgacgtctaccaccacggccggaggcgacgacggcggggcagctcggggtggcggcggatccggcacttctttggccggatctggccgccccacgtccggatcggtaggccctgaggcagggcatgaagggagtgatggcagtgctaagggagctggcggcagtgggtcgtcttcctcgctgccggcctgcaccctcgcccttcctggagctcctccccttctctgtggggagtttctatattggattgaggcggcatccggttagcgaggggagctcagaccgccaacgggacgccgtccaattccgggttctccgttcggccaaagctggcaaggaggccggcgggtggcgggacggaggaggtctgggccagttctcagggtggcggcagctctatgcagcaagtgtggtgttcggccggtggaggggcgccggcgcggtgtggtggaggcctcgtgctgatctgcttgtgaggtggttcctgagttgatgagcgacaaacctcaagcaaggttgaaaggtttccgggtgaaagcctcgcctgatgattcatcgggctggcagcggctacgcttttgggcgtcgtaacccctttgagggcgctggcaaggatacctttctcccttggcgagttttctctaggtgaaaaccacatctccttagatgggcgatggcggcatccttgatgtcgtgacctccttgggggcatcgcttttagagtctcgtctttgtggtgttgtcgttggcctggcggcgatcggccacgcatagcgggggtcgtctcggtgctaggtttttctctgagtgggttgtgcttgtgtgattagcatgtggctttggttgtgcatttcgatgcacctccgacctcgacagcctctgtcgagttttttcttgtaactttattccttcttaatatctcggatggcctcctttggccttcccggcgaaaaaaaggagtgatagctactactcaatcacttagtcatgtacagctgttgtcgtgaaccaaagggaacaaatcaatgtaaattataacagaagcgtataatatgacaccagcacgggcgatagctactacagtatactcaaaaaaaaaaaaaaaaa

SEQ ID NO: 44300 - DNA, 2862 bp, Oryza sativa
  Clone ID: PAT_MRT4530_47374C.1
gcacgaggccccgcgtcgctctcgcgcgggcggctcggggtggctgaaaccctagccgcccgcgccgccactccccctcttctctcttcacctcgccgccgccggagctcgtcaacggcgagccgggaaggcggcggcgaggccttccactgtagcaaccctttccttggcgcgaggaggacagagttgggctgacgatgtctaccaccacggccggaggcgacgacggcggggcagctcggggtggcggcggatccggcacttctttggggcggatctggccgccccacgtccggatcgggagcgcgcgacggccagggctcgccggcggcgcgcggtcggccgcggggcgtcgcgggcaagcgcggggtggcggtgcggcgcggtctggtgacggcggcggatccggtggtggtcggatctggccgccctacccccggcgcgacggccggggctcggaggcggcgcgcgtgtcgcggctcggcgcgggcggccgtgggacaccatggtccagcacggggcggtggccgggggtcggcgcggcggcggcagccctcacggagggcggtgtcaactgcatccagcggcggtctgggcggatggacggcggcggtggcggcggcggcggcggccctcccggagggcgcggccagatcggcccgtggtcggcgcggcgcggcatgggcggtcggacggcggcggtctggccttctggtgcagcggtggtggcgttggggtgggcatggcggctcgtaggccctgaggcagggcatgaagggagtgatggcagtgctaagggagctggcggcagtgggtcgtcttcctcgctgccggcctgcaccctcgcccttcctgaagctcatccccttctctgtggggagtttctatgttggattgaggcggcagccggttagcgaggggagctcagaccgccaacgcgacgccgtccaattccgggttctccttcggccaaagctggcaaggaggctggcgggtggcgggacggaggaggtctgggccagttcccagggtagcggcagctctatgcagcaagtgtggtggtcggccggtggaggggcgccggcgcggtgtggtggaggcctcgtgctgatctgcttgtgaggtggttcctgagttgatgggcgacgaacctcaagcaaggttgaaaggtttccgggtgaaagcctcgcctgatgattcatcgggctggcagcggctacgcttttgggcgtcgtaacctccttgagggcgctggcaaggatacctttctcccttggcgagttttctctcttgtaagctgccgtgcagcgcacacgtgaatccggaggacgtcaggccttcggggcattggcactctagcccatcgtaggtgacattcacccgacaccagccgccgctcctcgagcaatcttcgcaatcgtccggccccgccgcggccgtgtagtcgagaagaaatccacccttgatgagccgctcgtagttcttcgccaccgcaccgtcgtaccccagcaccgggatcattgacaccgtgcagttccccggcagttgtctgaaatcgtcatcaggcttgtacttccccgcaagccaggcatacgagttggacgattcatttttcgcacaactcacgggcgcccaagagattggaagctgccgtcgactctggctgcagttgtagaggaagacgagctcccggtttatggggctaatcttgaactgcgtgaggccgaggtcggaggaggcgttgacaaaactctcgatgacgcactggccgtccgtcagctgctcgttggtgaccatgaaggagctgttgtggtagaagatgcgctggatttggtacgtccagatgccgttcttgagggaagcatttctatggtcgcacgtgacctgaaaagttcggtagccacactccggcggatgcttgccggcgagccagaatggatagccgatggtaaggttcccgcacctcgccggctcgcagaacggcgatgtggtgttggtcgtgtttatggcatcaacggtggagctagctattgggagagtgatcagcagtagcatggctggagatttcgtatcagcccgcgcggtgattgtcacggtccggaagcacgcgaaggtccagggctcgtgcgccgcgcgccggcggtggccgcaccagccgccggccttctcgcagtcgccgcactcgccgtcctccagtggcctccagccgagctcgaaccccatgttgagcgccggcacgacggcggcgtcgagcgggctgctgtaattccctccgaggagggaccgcctgagcaccggcatgccgacgacgtcctggcacagcgccgcgtacccgtacggcgtgcggtcgtcgccgtcgcggaagacgtaggagtggtggcggccgtcgccctcgaggcaggcgacgaggtgggccggcatgcccatgaaggagcagtggatgaagaaggtgaggttggcgtccctgtccgtcagcgacagcggcgaccccgccgggagggacaggttgcggccgacgagcgggcaggtgttcgaccgggagaacaccccgaggtcgaacagggacaccgtcctgtcgccgtacaggatgtgcgtcacggcgtactcccccgacgggagcgccagcaccggcgtgtcgcggcggcactccaggcgcaggctcgggtacccgcagtagtaggcgccgccgccgctcgtgttgtcgtcgatccagaacgggtaccggatgtcgacggcgtggccgcaccggtacgacgggcacgacggcgtggtggcgttcgggatgatctctgcggcttcatgggtggtgatgaggttgcttaggaacagcaagagccaaagaggagagcttgatgttggcat

SEQ ID NO: 44301 - DNA, 327 bp, Oryza sativa
  Clone ID: PAT_MRT4530_47375C.1
atggcagaagtggccaatgtgggaacaaagtcgtccatcaataacaatgaagacaccagtcggcggcgacgaaggcggtcgacggtgaaagcgaagatgcccactaatggcggcataataggccagtcgtccgtgcaggcggaaacaccagtcggcgaaggccagccggtcagtgaagacgtggacgcccatgaacggtggcggaaacaccagtcggcgaaggccagccggtcggtgaagacgtggacacccatcaacagcggcataatagaccagccgtgtaggtcgaggcaccagtcggcggcggggaaggcaagccggctgtga

SEQ ID NO: 44302 - DNA, 337 bp, Oryza sativa
  Clone ID: PAT_MRT4530_47376C.1
taatggatgactatgtcttcgccgacttattatttcactttcacggttgctattgactggatcaccgacattgttatcttcatcataggagttggtacaatgcatcttaaaaggtgtcaaacagtaaagctttatatagctgtcccgctgacttttttatataagtcaaggtgctgtttgggtttttaagcaattgattggatacaatatcattgctttttgccacccctccacagtcttcaaatttggtaaaagtacccgggagaccatggcgaagatgattgaagcactcggctttggagtaatctagttcgagagaagattatattttcgactg

SEQ ID NO: 44303 - DNA, 336 bp, Oryza sativa
  Clone ID: PAT_MRT4530_47377C.1
taatggatgactatgtcttcgccgacttattatttcactttcacggttgctatcgactggatcaccgacatcgttatcttcatcataggagttggtacaatacattttaaaaggtgccaaacagtaatgctttatatagctccccgctgacttttttatataagtcaaggcgttgtttgggttcataaagcaattgattggatacaatatcattgctttttgccacccctccatagtctttagatttggtaaaagtactcgggagaccatggcaaagatgattgaagcactcggctgtggagtaatctagttcgaaagaagattatcttttcgact

SEQ ID NO: 44304 - DNA, 632 bp, Oryza sativa
  Clone ID: PAT_MRT4530_47378C.1
ccggccgggattgaggtttctagaaaattttggcattcctatgagaagctatttcatattcaacttctggatcataggtttgcacatctgtgagtgtttaattctttattttccctttgaactaatcatgtgttttgtgggtaccctctttatcatcttcccacaatattatggtgtctttagtttttatgcagaaaagtttagaattgtgctttggctgaatccttgcttcacataatctgttactagagtcgcttaagtcctctcgtcatagtttgacatttcattatttattcactgatggagacaactttgtattgagtcatccagcaacggcaattggcgctcaatttggactctggaattcatagatgaattacagcttgtcgaaattaaagggaaaatacaggtaggtgctcattattttgaagagggaaatgtgcagctggatactaacatcgattgcaaggattccaccatattgcagtctcctgaggaatgtgcagtatcaataactaacatcattcggcatcatgagtcagaatatttgtcatcacttgaggaatcatacatgaatttgtctgatgcaaccttcaaggatcttcgaaggaaactccccgttactcgtactc

SEQ ID NO: 44305 - DNA, 1068 bp, Oryza sativa
  Clone ID: PAT_MRT4530_47379C.1
atgccggcggggcacgggttcgggaaggggaaggcggcggcggtggaggaggaggaggatgaggtgaacgggttcttcgtggaggaggaggaggaggaggaggaggaggaggaggcggcggtgtcggatgcgtcgtcgatcggggcggcgtcgtcggacagctcgtcgatcggggagaactcgtcgtcggagaaggagggggaggaggagggggaggaggtggagagcaaggcgaaggaggtggcggtggaggtggagggaggggggctcgggttccatggattggggactctcgaatccctggaggacgcccttcccatcaagaggggactctccaacttctacgccggcaagtccaagtcgttcacgagcctggccgaggcggcggcgaaggcggcggcgaaggagatcgccaagccggagaacccgttcaacaagcgccgccgcgtcctcgccgcgtggtcgcggcggcgcgcgtcctgcagctcgctggccaccacctacctgccccctctcctcgcccccgaccacgccgtcgtcgaggaggaggacgaggaggacgactccgacgccgagcagtgcagcggcagcggcggcggcaaccgccggcgcgagccgacgttcccgccgccgaggctgagcctgcacgcgcagaagagcagcttgacgccgaggagctcgaatccggcgtcgtcgtttagatctcctaggtcattctcactatccgatctccaaaatgcaggctcctataactagctcaagaaaaaaaaatctaggtttctgcttcttctcttgtctgaaaattttaggggtgtgagagaaatcatcagtgttgttgttactgctgctgctgctgctatatgatcaagatatatataacaaaaaaaaagaactccatttgtttgaaataaaaaaaaaagaagaacagccatcctcgcgctgatgagcagccttgtcgccctggcgcgcggtccccgcctcgaccgtgctgtgctcctaggtcattctcactatccgagcgcgggaatccgggccccaattcgccctatagtgagtcgtattacaatt

SEQ ID NO: 44306 - DNA, 450 bp, Oryza sativa
  unsure (1)..(450): unsure at all n locations
  Clone ID: PAT_MRT4530_4737C.1
ttggaccngaaggggccgatttntcattgggggaatgttcaaattactgagcagtataagctgnaacatggtggtnctcagcacaanggagtcttttcaaggcttgagtatcaatccaggccttactataagtggnngtntcatcatttaagccntacttacttntcaaggttgcgctccccngggtttcacgttcagtgataactatcgtgnatgcagaatcggtcaacattatgcttagatcccatattgcnntgagtgatttcggcaacatnnttnagancttgcaaattgcagcccngatatccntcantttgcntggtntgncacnctangtnccnncnttggncnaanggtttcccccattgcaaganntnactgcnattgaatctagattggtgctncgacgctacaagacaagnccgtancttntngagatggcnccgattg

SEQ ID NO: 44307 - DNA, 273 bp, Oryza sativa
  unsure (1)..(273): unsure at all n locations
  Clone ID: PAT_MRT4530_47380C.1
aaccaaaccaaaccaaaaccaaaagcgaaacacagaggacaacacaaagcacggccggggggcggcgcaccgcgcacgacggcgacgagacgcgtggcgganaacaaaaccagcccccgcattgccccgaggcggcgccgcccgagctcgantccgcccaatctcgccggtggggcctcgatctgagccgaggccgnngtgcgccggcccgggcggcgaggaatggggagcntggacggagatttcnaggggctccaggcagcggatcggcgt

SEQ ID NO: 44308 - DNA, 972 bp, Oryza sativa
  Clone ID: PAT_MRT4530_47381C.1
atccgaagtcccaactcccaaccactgctctctcccgcgagataaagaggtgtgccttcgtcttcctcttgacactccatccggcccccttttctagctagcggcacgcgagaaaccaaaactactacgagtcctgctgcttgaagggaaaaaaaatgaacgctagttgttgtgttgaatcttttatacttgttcctgatgagaagaaagcacaaagtagctcttgatttgttggtgtaccattgagcattgaagccaatatggccgcgctgccattagccaccgccgaagtgtgcgacgcaaactcaaatccaatcatcgccggcgagctccgcgccctccctcccatcttcaaaatctacgggaggcggcaggttttcgccggcccagtcgcgacggtgaaggtgttcgaggacaacgtgctggtccgcgagctcctccaggagaagggacatggccgggtgctcgtcgtcgacggcggtggtagcgtgcgctgcgccctcttgggcggcaacctcgcgcagctggcgcagatcaatggatgggtcggcatcgtcgtcaatggctgcatcagggatgtggatgagatcaatggctgtgacgttggtgtccgtgctctcaattcgcaccctatgaagtcggggaagaagggcgccggtgagaagcgtgtgcctgtgaccattgaagggaccaggatttgcgacggcgagtggctctacgctgatgctgatggcattctcatctcgaggactgaattgactgtgtgaagttcctgaatgtgtcgatctgtacgtacgagtagttggtgcataaaaggggtgatgattaattgattatgccctcctccttgtgttgtatctaaaaataaatgtaatgctgcagccaggttccttttgcccaagcctctcccaattctactgccttaaggattttcaacgttaaggcctggtttagttcccaattttttttccc

SEQ ID NO: 44309 - DNA, 228 bp, Oryza sativa
  Clone ID: PAT_MRT4530_47382C.1
atgcggtgcccgttagtcggaggcgcatccgacagggataaaggcaagggacccggggaagacagcgcccagcggttggaggagtcgccagggcttgatgacgtgaagctggcgatgatgacgacaaagcctgatggctgcaagggcttcggcttgatggaggaaggggcgacgcggacaacgttgttgcggcggccttcgggtgatgggagtacgaggccgtgctag

SEQ ID NO: 44310 - DNA, 1101 bp, Oryza sativa
  Clone ID: PAT_MRT4530_47383C.1
atggcttctgctttctcctccactgtcggagccccgggaagcgggttggtggtgaagaattggctgaggacggcggggtacagccaccatggaggcaggtccaggtgcaggtgcaggaagatcatggcgatggcgggcggcagcagcaaggaggttgacgaggagaagcagacagagcaggatcggtggaagggactcgcgtacgacatctccgacgaccagcaggacatcaccagggggaagggcctcgtcgactccctgttccaggctcccatgggtgatggcacccacgaggcacgagtacctcagccagggtctcagaacgtacaacctggacaacaccatggacacatctccaagaacttgatgaagctgcccaacatccagggcaagtcgttccagtgtgatctcgtcttcgccaagatggggatcaacctcatcatgatgagcgccggagagcccgcgaagctgatccggcagcggtaccgcgaggcggcggacatgatcaacaaggggaagatgtgcgtgctgttcatcaacgacctggacgcggggcggcacgacgcagtacacggtgaacaaccagatggtgaacgcgacgctgatgaacatcgcggacaaccccaccaacgtgcagctcccagggatgtacaacccccgtccccatcatcgtcaccggcaacgacttctcccgctcatccgcgacgggcgcatggacaagttctactgggctcccacccgcgaggaccgcattggcgtgtgcaggggcatcttccgcagcgacaaggtccccgacgcgttcccatcgacttcttcggggcgctgcgggcgcgggtgtacggcgacgaggtgcggcggtgggtggcggagatcggggtggagaacatcggcaggaggctggagaacgtcaagagggtgcggctcgccgataagtacctcagcgaggcggcgctcggagacgccaaccacgactccggcgagttctacggcaaggccgagcagcagtcgcccgtccccgtgccggcgggatgcaccgaccaacgcgccgccaactacgaccctaccgccaggagcgacgacggcagctgcgtctacaactga

SEQ ID NO: 44311 - DNA, 1723 bp, Oryza sativa
  Clone ID: PAT_MRT4530_47384C.1
tttgcgacggcggcagctcggccaccgccgcgggatcgccgccatgccgcactcactctccctcctgctcgcgcccagccgcgcgctctccctctcctccccaccgctccgcctcgccccaacgcacccaccacttcgcctgcaccacgacggcggccacctcctcgtgggcacgacgaggcggcaggctccctcgcctcgccgccgccgtctccatgccgccagggcttccgcgccgtccgccgccgcggcgtcccccgtagggcctgcgggcgagggtggcgaggtggggggcagggcgaggaaggcggcggggtaccggaacaggttcctggacctggcgcggctgggggccgtggcggagagcgcggcggaggcgctcttccgcagcgagattcgccggcggctggccgtcacggccgtgctcatcctgctcagccgcgtcggctacttcgtcccgcttcccgggttcgaccgacggctcatccccgattcctacctcagctttgcaccccttcctgcagatgacctcggtgatttttcatccgaattgaagctgtcatttttccagctcggaatcagtcatcagatttcagcatctattgtcatgcaggttctattttatcccttgtttggtcctgctcttttgttttccaatggcaacgttctctgtcatgttcttccatcacttgaaaaactacgaaaggaagggttagatggacatgagaagatcaaaggctatatttggtggctgtcgctgggttttgcacttgtggcggcttttacagtgtcatgctactcactgcaatattctatatatgctgcaagttacagagttaagcatgtaatgataacaagccttttccttgttcttggtgcaatgacaatgacatggatctgtgacactatatcggaatctggatttggacatggctcttccttgattatctgtgtgggaatattgactggttatacagacacactccacaagatgttaactcaattttcaggaaattggtacagctgttggccctacatcttggggatagctgggacttttattttggttaccatgggagcagtactggtgactgaagggtgtaggaagataaagcttcagtactatggatttaaattggcttctggtgcaaggagtgagagctccccagttacagaggtagagccatatatcccttttaacataaatccaactgggatgcagcctttgcttaccacctcatacttattagcttttccaagcattatggccagcatttttggtacgcaattttgggaaagtttgaaggaaacgttgaatccaaagacttcagttggtggtggtccatgggtttattatttgacatatgcatttcttgtcttcgtcttcaatatttttgacattgcaaacttgccaaaagagatatctgactacctgaataaaatgagtgctagagtaccgaagataaagcctggaagagcaacagtagagtatcttacaaaaatacaaacatctacacgtttctgggggggtatattgctgagcttgttggcgacttcctctttattacttgaccgatatctcaggcagataaatgagggattttctataggtttcacgtcggtgttgattattgtgggctcaatcatcgagctgagaaggtcttatcaagcatacaatgtgatgccagcactaagcaaagttctaaggagatatggtgcctga

SEQ ID NO: 44312 - DNA, 292 bp, Oryza sativa
  Clone ID: PAT_MRT4530_47385C.1
acggagcaagaggctcacatcgtgctcatcttgcatgggacctatggccatgaccggggccagcctgctcaagacctcattcgctggcgcgcgcctgcccggcgccgcgcgtaagcccaccgtatctgtagcgccgcgcaccggcggagtcatctgtaactccatatcgtcgtcggggtccactccatcctaggacctaaacgccatcaggtgaagacccatcaaggcgtgcatcgtatgtcgtgagatgaccacgcggtacgtgaccgacatgagtcacctactgccgaca

SEQ ID NO: 44313 - DNA, 440 bp, Oryza sativa
  Clone ID: PAT_MRT4530_47386C.1
gggacagctcggcgtactcctgcggctgattgggcaagagcctggattgaatgacggggggatatcttgtcactgacaagcacgaagattaacatggtcaatgcccagaactacccagtggatgtatctgcacagaatagtaaatgcgtgcgtaccagcgaggttgagtcaccctttacatgtgactatacgcagactgaaatgggtgctgctgaggctgggcctgtcgatcgtgagaatgataggcgacatcattctgagttattttcagggtacactagcgacagcattactggatacaatcgtgatcggaggaagacatgtatttctactggatctgaggctcccgttggacccatgtgagatgccattcgctcactcgctatgaggcatatatgtgaacaaactactgaccattgcgccattcctcttatggtgat

SEQ ID NO: 44314 - DNA, 467 bp, Oryza sativa
  Clone ID: PAT_MRT4530_47387C.1
tggtacactgcacaaacatgtgtacgccttgtgacaatagggaatccagatatttctaaaatggctgacgtggacgcgctgtaccctatgcagtcagcgccagttacccatctgacgggcgatattgcagaggaactatatgctgacacaacctcactgtgggagaagctgtgtgacaatatagctaggtcccgcgaggacatgatgtctgctctggaccgaatgcaatggaaattcaaacgtattatgcgggcggcatcgtgtaggcatgcatcagaagtccactatcccataggacacaggtttacagaccccctaccggaacgaccatctacctcttctaggccttccacttctagggcttccacatcggcaaaaccctcagcttccacacgtcctaggccgtcggcaaggcctgtagcaccgtctatgataatctgaccaaacaatgcaggtaaagcctatta

SEQ ID NO: 44315 - DNA, 420 bp, Oryza sativa
  Clone ID: PAT_MRT4530_47388C.1
cccatcgcgttcgcgactacctggggaaccccaacctggtgcacgcgcagagcatcctcgccatcggggcggtccaggtggtgctcatgggattcgacgagggctaccgcgtgggcggatgcccgctcggcgagggcctcgacaaggtgtacccaggcggcgccttcgacccgctcggtcttgtcgacgaccctgacaccttcgccgagctcaccgtgaatgagctgacgaacgggcggctcaccatgttctccatgttcggcttattcgtgcaggccatactcaccggcaagggccccataatgaactcttttcaccacgttgtcgaccccgttgccaacaacacctgggcatacaccacccaacttctggcccggcaagtgagcacaactgacacgtatcgagatggtgccaaccaac

SEQ ID NO: 44316 - DNA, 437 bp, Oryza sativa
  Clone ID: PAT_MRT4530_47389C.1
attaccatgatatccactaccgtagaattgattttttctatagagtaaagtccatcaccgatccctaaacttgtaccgctgtgtcatcccggtccctaaactcgcaaatcgaccgttcaggtcctcaaacttgttcgactgtgttatcccggtccctaaacttgaagatcacttgtttaggtcctccaacttgttcagttgtgtctcctcggtccctaaacttggatttgaatatcatctgggtcaaataggacgggaccggggtgacacaactgaacaagttggaggacctaaacgagtgatctgcaagtttagggaccgggataacacagcggtacaagtttagggaccggtgatggactttactcttttctatacaagggaccctataggttgcaggcggaccgtatctagtcgcgcttgcaaaaattgcccag

SEQ ID NO: 44317 - DNA, 1982 bp, Oryza sativa
  Clone ID: PAT_MRT4530_4738C.1
ctcccggctttccggacgcgggattcctcaacctctacatctctctcctccaatcccctcctctctctctatctctcttcccggcctgtgcagagacggaggcaggataggccggcgagcaaaggtactaaagatcatatctcttcaaactggttaggaagcttacttaatgaagacacaattggattgattttagtggccaaacccaagccaacatacagactgtgcgcatatggctactcgcattcctggtactgtagcagctagcggggtgtactacaatgatcaatacagaatgccatgtaagctgaaaggaattcattgcatggcattgaattgtataccgcaaaaagcgaaggtaaggaagtgcatgaatggatatcaatcaacattcaggttttgtgtaaatgagaaaaatggacaaaccaccggacagtcaaatggttccttgatccaacaaggccagaatttccggtgtcattcttatggttctcataacagcagtgaaactaaagagtgcagccttgaagatggcactgattcatacagggattttgaagaacattcaagaggagcctcccaattttcagataatcaagttgcagcaaagaaaaaatcagtcaaatctagtcaagggttggctgaagcttgcaaatttgtttacaacgatgcaaaatttgtgaatgaaagagctcaaaatgatattctcttgctttcacgtggcataacaaggctgaacaaacgtgcgtgccaggatgttgctgttttagggtcaggatttctcaagcttgatgcctgttacctctgtatgcatattcagatattaaaggaacaggctcagtcagacttgaagaaagcagcagatcagcattggagcgatggtgctttggaggcagatctgcgacgagctgactcggttgttagacgacgtgccatggaagatgctttcatggctttaaagtttgttcgggatatccatgacatgatggcaaacagattacaagagcaattcgcaaaggatggttcctcttctcctgctaattcaagaagtttcatcacccttgagaaaaatggaaataccttcgagctgtttcctcatgaagtttcaacggaccagattaccgccatagagcaagcatactggagtatggcatctgcgttgtctgaggctgatggtatcgactacacagatcctgaggagcttgagttgttagtagcaactctcattgacctggacgccatggatgggaaaaagagtgtttccttacttgctgaatgttcaagctctccagatgttaataccaggaaagctttagctaatgcactggctgcagctccatccatgtggattcttggaaatgctgggatgggtgcattacagagattggctcaagattccaattatgctgtagccagggctgcaacaagagccatcaatgaactcacaaagcaatgggagcttgaagaaggtgacagcctgaggtttgtactgaatcaaaatatggtttctaaagagacagccgatgacagtgcagcagcagatgacaccaggtgatcatgtgcaaataagaaggaaaaaattacactaggattaacagaaacttatacaaacatcacgtttcagagcatatatatggataaggtgaatgtctatctctgtcacagtttcagagcataatgtgctgcttggtatcaaaccagatcaccagaatcatcagaatgacagaatgcatgtaactgacacatcttttcagtgccaaactgccaaagaaattaggaactggtgtaaagataaatgtattccttcagtaagacatagtcaatagtgttagaataattgggctaggcccaacttatcctattaaatctcaaaggcccataataagtgttaaggataataataccacatcaggatttaagcgaggaatatcttaacctaaatagggagttattggagcccccctgttaaaaaaaaaaaaaaa

SEQ ID NO: 44318 - DNA, 476 bp, Oryza sativa
  Clone ID: PAT_MRT4530_47390C.1
ttgccctcatatttttaaccatttgatcatcaaaaattgccaacttaaggtagaactatatagagtaaagtccatcaccggtctctaaacttgtaccgctgtgtcatcctggtccctaaactcgcaaatcgaccgttcatatccttaaacttgttcgactgtgtcattccgatccctaaacttatagatcactcgtttaggtcctccaacttgttcagttgtgccacctcagtccctaaatttggatttgaatatcatctgggtcaaataggacgggaccggggtgacacaactgaacaacttggaggacctaaacgagtgatctgcgagtttagggaccgggatgacacatcggtacaagtttagggaccggtgatggactttactcaactatatatgtatgcctattgagaaggcaaggtttaaattatggcttggagcattatatcctttctcccgagtatatcaatatgcca

SEQ ID NO: 44319 - DNA, 2241 bp, Oryza sativa
  Clone ID: PAT_MRT4530_47391C.1
atggatggcttcaagctctccttgctctcctttcttccgttcgttttcgtcctcgcgatcgccgttgaagcgaccggcgatgagatcggcacgttcatcgtgcacgtgcagccgcaggaaagccacgtggccgccaccgccgatgaccggaaggagtggtacaagacgttcctgccggaggacggccggctggtccacgcgtaccaccacgtcgcgagcgggttcgcggccaggctgacgcggcaggagctcgacgccgtgtccgccatgcccgggttcgtgagcgcggtgccggaccagacgcacacgctgcagacgacgcacacgccgcagttcctcgggctgagtgctccgccgccgccgcaggggaagcggtggtcgtcgtcgtcccacggcggctcgggagctggcgctggcgtcatcgtcggcgtgatcgacaccggcgtgttcccggaccacccctccttcagcgacgccggaatgccgccgccgccggccaagtggaaggggcactgcgacttcaacggcggatcggtctgcaacaacaagctcatcggcgcgcgcaccttcatcgccaacgccacgaacagctcttcctcctacggtgaacggttgccaccggttgacgacgtcgggcacggcacccacacggcgagcacggcggcgggagccgctgtgccaggcgctcacgtgcttggtcagggactcggtgtcgcggcggggatagcgccccacgcgcacgtcgctgtctacaaggtgtgccccaacgagagctgcgccatctccgacatactggccggcgtcgacgccgcgatcgccgacggctgcgacgtcatctctatatcaatcggcggcccgtccgtaccgttccacgaaaaccccgtcgccgtcgggacgttcggagccatggagaagggcgtgtttgtcagcatggctgccggcaacgctggcccaaacgtgagctccgtgatcaacgacgcgccgtggatgctcaccgtcgccgcgagcaccatggaccggtcgatacgcacgacggtgcgcttagggaacgggctctacttcgacggcgagtcgctgtaccagccgaacgactcgccgagcaccttctacccactggtctacgccggcgcgagcgggaagccgtccgccgagttctgcggcaacggctcgctcgacggcttcgacgtcaggggcaagatcgtcgtctgcgagtcggtggtgagcgccggcggcgccggcatgatacttcccaatcacttccccgaaggctacactacgttggccgaggcgcacgtcctcccggcgtcgcatgttgactacgtcgccggcttagccatcaaggcgtacatcaacagcacggcgaacccggtggcgcagatcctccccaggggcacggtactcggcacgacgcctgctccggcgatggctttcttctcctcccgtgggcctagcgttcagaaccccggtatcctgaagcccgacatcacgggccccggcgtgaacgtgctcgccgcatggccgttccaggttgggccatcgtcggcgcaggttttccctggaccgaccttcaacatcatctccgggacatccatgtcgacgccgcacctcagcggcgtcgcggcgttcatcaagagcaggcacccgcactggtcgccggcggcgatcaagtcggccatcatgaccaccgccgacatcaccgaccgctccgggaaccagatactcgacgagcagcgagcgccggccaacttcttcgccaccggcgccggtcacgtcaacccggagagggccgccgaccctggcctggtctacgacattgctccttgcgactacgtcggctacctctgcggcctgtacacgagccaggaggtctcggtgatcgcgcgccggccggtgaactgctccgccgtcgcggcgatcccggagcaccagctgaactacccgtcgatctcggtcaggttcccgcgggcgtggaactcgtcggagccggtgctcgtgaggcgcacggcgaagaacgtcggggaggtgccatcggagtactacgcggcggtcgacatgctggacacaaccgtgaccgtccgcgtgttcccgaggacattgcggttcaccggagtgaaccaggagaaggatttcacggtggtcgtgtggccggggcagggcggcgcaagggtggtgcagggcgcagtgcggtgggtttcggagacgcacaccgtacggagcccggtctctgtcaccttcgcctga

SEQ ID NO: 44320 - DNA, 276 bp, Oryza sativa
  Clone ID: PAT_MRT4530_47392C.1
atggccatggccctcctcctgctggacgccgtcgtcgctttcgtcgtcgcgtggtacgtgagagcgacgagtgatcgatcgatccccgagaagatacatatggcgcagcgggcatctcggaggcgagggggaaacgccacggagatagcggccatgcaatggcaggctttcgatcagcaattctcgcgagacccaaggcgatggcatggcatgcatggtagtgttcatatgcgatgccgtgctgctgccgctgctgctagtgctgctagctactag

SEQ ID NO: 44321 - DNA, 330 bp, Oryza sativa
  Clone ID: PAT_MRT4530_47393C.1
agtaccatcagggtcacagcttgacaccctcaatgaccagcatccatatgatggcaatgatggtctctgtgggcctcctctcgaaaatagctgttcaagcagcagtgcctcaaagcaacgccatctgataagaagcaagcaaagtttgggcatggggccattctcccttggagttgtactgggattcatagcaggtctctgggtggttttctgtacccttctgttcaagaagtcgtggagggttgcctacttctgcctcttagacaacatgtataacaatgtttgtgtgattgtggttgttcaatggggaagattgccaggaagaacatg

SEQ ID NO: 44322 - DNA, 548 bp, Oryza sativa
  Clone ID: PAT_MRT4530_47394C.1
agatgaaaatatgcagcaattatgggccataggcaaaaacagttatgcacccatagacatatggagattgttgttcatgtacaacaaatgccgatctgttgccgcctcagcaacagcattacagatttaacagcagcgctatttgcacaacacgcgcacctgcctgtacacgacacaaacacaactgaaactgaagggaaaaaaaaagcatgcagaggagtaggacaaccagcactctactacgactaataagcacaaatcatcttgaccaatgtgaccaaccatctaccaggaggaagaaaaatattgtacaaaatgatgaccctttctggaaccaaagctactaccgcgtccgtcccatatagatcatgggattggatccctctgtgcaccggggggagcggttggcattggaaagttgagtgaagggtaacctccgacgaattgaggggcctccacatacgggctctggtaatacggggggttttggatcatatggatgctcccttggggacattggtgatgaatcaggagaactctcgtgccga

SEQ ID NO: 44323 - DNA, 297 bp, Oryza sativa
  Clone ID: PAT_MRT4530_47395C.1
gtttgtctcattaaaatctacagggcttcagaaaggtcgatcctgataggtgggagtttgcgaaatgagggttttctcaggggccaaaggcatctcctgaaaacgataaagagaaggaagcccccgtccaatgcacctccgtcacaacaacagtccctcacatcttgtctggaagttggtgagtttggattcgaggaagaaattgacaggctgaagcgtgataagaacatcttgatcacagaggtagtaaagctaaggcaggagcagcaggccactaaagatcatgtgaaagccatg

SEQ ID NO: 44324 - DNA, 477 bp, Oryza sativa
  Clone ID: PAT_MRT4530_47396C.1
atgtcaattgcatctgaacttgccgaaggcggagaagaggatccgaagatctcgagcttgatggacgtgaagaagctgtccaaggaggcgtgcatccacgcagcgcagaacgatcgcctcccgctccgcgtcgtcttgcaggtgctcttcttcgagcagctgcgcgcggcggtgggggccagcccggcggtagtgagcggcggcattgcgcggcatctggtggaggaggaagatgaggacaatgacgatgttagtagcggcggtggggactggagcaagtcccacccgctgtcgacgccaacctcctcagcccgcgagcgctcgccatggccgtcgagctggcaggaagaaagaagagggagatggtgtgagatgacgccacatctgatgagggaaacgatacggcgtgagataggagatggaaaaagggacggcagtggcatggttctaattttagaaattttcagtggcatgtag

SEQ ID NO: 44325 - DNA, 444 bp, Oryza sativa
  unsure (1)..(444): unsure at all n locations
  Clone ID: PAT_MRT4530_47397C.1
agctagctcagagngagtagcgcggngagcttgctgaagggagcggcaatgtcgaaggaggtgagcgaggagccggagcacgtgcggcccaaggactacaccgacccgccgccggcgccgctgttcgacgtcggcgagctccggctgtggtccttctaccgggcgctcattgcggaggggatcgccacttggcgtggcttatacatcaccggcgccaccgncattgcggacaaggggcaggcgnccgccgaccagggcggcggcggcggcaccctcggcatcggctgggccttcgggggcatgatcttcatcctcgtctacgtgcgccgccggcattttcggggggcgacattaccccgcggtgacgttcggactgctgctggcgaggaaaggggtggtgattcgcgcggtgattgtcattgtggaggaatgcctgggggggat

SEQ ID NO: 44326 - DNA, 3433 bp, Oryza sativa
  Clone ID: PAT_MRT4530_47398C.1
atgccggtgggagtgcaggcgcccgaggcgtcgccgggaaggtaccatcggcggcgggacgacgacgatggcaacggcaacgactgcagcgacgtgctcggcgtcgacgtgctggacgagggggccgaccccttcgacatccccgccaagcgcgcctccgtcgagcggcttcgccggtggaggcaagctgctcttgtgctcaatgcctctcggcgattcagatatactcttgatctgaagaaagaggaggaaaaggaacaaataaggaggaaaattagggctcatgctcaagtcatccgggttaaaggactcgcaaatttactgaaaacaaacacggagaagggagtccatggagatgaggtagatttggcatgcagggcaaatgcttttggggctaacagataccctcgcaaaaaggggagaagttttttgggcatcaaagaaggatggtacgacggtgcaagcattgcatttgcggtctttcttgtcatacttgttactgctgtgagtgactacaaacagtcccttcagttccagcaccttaatgaagagaagcaaaatatacaagtggaggttattagaggtggtagaaggattgaagtgtcaatatttgatattgtagttggtgatgtagtggctctaaaaattggtgaccaggtcccggctgatggtgttttggttagtggtcattctcttgccattgatgaatccagtatgactggggaaagcaagatcgttgtcaaggaccataaatcacctttcttaatgggaggatgcaaagtagctgatggttatggtaccatgttggtaactgcagtcggtctaaacactgagtggggcttattgatggccagcatctcagaagacaacaatgaagaaactccactacaggtacggttgaatggagtggcaactttcataggtattgtggggctttctgttgctgcaatggttctcatagtccttgttgcaagatattttacagggcatactacaaatccagatggctctattcaatttgttaaggggcaaacaagtgtgaaatctacaatttttgggacaataaagatactaactatcgcggtgactattgttgtcgttgctgtacctgagggactaccacttgccgtaactctaacgctggcctattcgatgcaaaaaatgatggcagacaaagctctggtgcggaggctttcagcttgtgaaacaatgggttcagctacaaccatttgtagtgacaagactggtacactaacactcaatcaggatggtagtcctattgagataacaggctcaccaactgaaaaggctattctttcttggggtgttgagcttcatatgaaatttgcggaggagaaatcaaaatcttctattattcatgtctccccattcaactcagaaaagaaacgtgccggtgttgcagtgattgtggatgattcagatattcatgtgcactggaaaggggctgctgaaattgttcttgccttatgtacaaattggcttgatgtaaatggcattagtcatgaaatgacacctgataaggctaatcagttcaagaaatacatagaggagatggccgaggaaagtcttcgatgtgttgcttttgcttatagaaatcttgatctgaattatgttccaaatgaggaagaaagaatcaactgggaattaccagataatgaactggctctcattggaatcgtagggatgaaggacccctgtcgccctggggtaagaaatgctgtagatctgtgcaaaaatgctggtgtaaagctcttctcatcactattacctgacaaactcctgcggtttttgaacaagcaggtacgaatggtaactggagataacctacaaacggccagagcaatagcacttgagtgtggaatactcacggactcccaggcatctcaaccagttataatagagggaaaagttttccgggcatacagtgacgctgaaagggaggcagttgctgatcagattagtgtcatgggaagatcttctccaagtgacaaacttctcctagtaaaagcactgaaaaagaaaggcaatgttgttgctgttactggagatggaacgaatgatgctcctgcattgcatgaggcagacattggtcttgctatgggtatccaaggaacagaagtagctaaagaaagctcagatataattattctggatgacaattttgcttcagttgtaaaggtggtccgctggggtcgttcggtttatgcaaatatccaaaagtttattcaattccagcttactgtaaatgttgcggctcttataatcaatgtggttgctgctatttcttcaggaaatgttcctctaaacgccgttcagcttctttgggtcaatctcattatggacacacttggtgcacttgcattggctactgaaccaccaacagaccaacttatgaagcggccacctgttggacggaaagaaccacttgtgactaacattatgtggagaaacttgttcattcaggctgtctttcaagttactgttcttctgacactcaactttagaggccgggatcttctgcatttgactcaagatactcttgatcatgccaataaagtgaaaaatacatttatatttaatacatttgtgctttgtcaggtgtttaacgagttcaattctcgtaaaccatatgaactgaatatatttgatggggtttcaagaaaccatctttttttggctgtagtgagcataactgtcgtgctgcaggtaataatcattgagtttcttgggaaatttacatcaactgtgagactcagttggaagctttggcttgtttctgttggtattggttttgtgagttggcccctggcttttgctggaaagttcataccggttccccgaactgaattgaaaacttacatctcaaggtgtttaccgggaaagaaagataacgaaggatcaactccacctccacctccacctccacctgtgtgattgtgcatgtccaagtgaccaaaattatcagctctgaaattagtggtggtgcacatagatgcttgtataattttgaaggttgacttctaaccatgctacctcttaggctgactgtatactgaggttgaagccaatccgacagatgtttcatcctctcttactcatgaattgggcctgacgccgatgtaaacaaagattaggaacttagacatacacttcactagttggctagggatgagtgtgggctgacccgtggatactcttttacccacactagttcaactaaatgaactaaatttcacttttagaatcacaaaaaatgaaatgtagttcgtttatttggactagagtgggtcaattagtacctatgggttggcccgtggccagtcttggccgcattcatgcatcatagtacgctactgagcacatcttctttcaaagtattacacggagatgtctaaaaatttgagctaaaaaa

SEQ ID NO: 44327 - DNA, 462 bp, Oryza sativa
  Clone ID: PAT_MRT4530_47399C.1
agccacacaaacttttgagacatttcatttatcaggggaaaacaatcacagggttcattatttttttttgaaaaaaaaaaaagatgggtaccgataccacagagggctaatggaaaggggggctaaaaaacaaatgggggaggcaactccctacataagatccccataggagggagcaacccgaacaaaaaacatctgaacaggcaagggaattcccggggggtcctactatatcgaagtccaacaagggggcttggttccaagtcccactagttttttattactgaaagaaagaaacccccccaggaaaaaaaaaagcctattgactggtcttgcacccacgaacataggggggcccggagttgatgtactttgcccaagatgggcggaactttgacattgcaatctccagccatggtttcatgttcccgttgtaagggataacgggggggttatttattt

SEQ ID NO: 44328 - DNA, 833 bp, Oryza sativa
  Clone ID: PAT_MRT4530_4739C.1
atgacccgtcaccgcagaggcaagcgcgggcgcgcgagccccgaccctccggcgaagcgccgccgccgcggccgcggccacggccacggccctggcccgccggagttagaggccgacgagctggaggctcctccggcgccggtacaggctccatcggcggcggcggcggcggcttcggagccgttgctagtgatggtcgcggggctgccgcccgggtgcggcgtgatggagctcaagtcgcggctcggggcgtacggccccatcgcgcgcacccgcatagacgccgcctcggccaccgggtacgtcaccttccgctccgccgcggccgccatggccgccattgctgcctccctcgaccccgacggtggcgtcaccgtcggatccaagaaggttttagttgtacaggcaagcgaggcgccgaatgacttgagaagtacagctcaagccaacccagtgggggagaatacgcatgatgcgacgaagaggaatgcaagcgaatcttcagcgttctcgagcacgaaagcggctccagaaggaacctacaaagctagagaaatagtcgcctacgatgatctgttctgaacttctaataaccagccttctttagggaggaggtgagacaaccattcaggtttgttcttgtacactgctagggtctttaggtgagtaagctatgggtattttttagtgtgtgaaggtaccttcagatgggtaggtgtttcttgtattcagcatgtattgtggaagttatcatcaaaacatgagaatttatgtatgttagattgttaatattgacagtgccttaccatcttctcaaaaaaaaaaaaaaaaaa

SEQ ID NO: 44329 - DNA, 348 bp, Oryza sativa
  Clone ID: PAT_MRT4530_473C.1
attaacaacacttcaacagttatgatgaaccacgctgcaatggatatggggtttccaggcgaacccaaacagggcttgacaaagcaccccacacgggccaaaaataagcccagcgcatagaccggaaaccatttttgtataaaaaggggaagaccttactattatatacattggagctgtgtctccaaatacagaacggggtccagcctcttatcacaaaagcgagggccatcaggaagtttgactggagaaccaaaacgaagttgcgggtcatcaaccaaaaggaatgtggcaccctttgggtaaaggcaagggggaggacctgggtggcgcccaaggttgggacct

SEQ ID NO: 44330 - DNA, 686 bp, Oryza sativa
  Clone ID: PAT_MRT4530_47400C.1
gcacgaggggcgtggtggtgcttgatctcaaatatcaaatatgtgtcctcccgttttcgtgcagtcgatctaacaccgttgtttcttgctaattcgttttcgttcccccggatcaaagaaactttattttacaacaacaacaacaacaacaacaaaaggatctttacatttccttttttaaatgatcttattaccttctctctcttatttttacagattttagaattaacctgtagcctctgtttgtttgtctgctccaatttctgcaggttcttgagtttgagttgggcaaggaggttgtgaacgtagcctgaacctgacctgagattgtgaacgtaattttggggggaaaggttgttctgtactgtctcttcaatctgtgagttcgtgacagggacctccaaagtagtgctgggatgtgtcgcgtttgggatattctgggtgctggccgtcttccccaccgtcccgttcatgcccgtcggccgtacggccggctccctccttggcgccatgctcatggtcctcttccgtgtcatctcgccggaggacgcctatgccgccatcgacctcccaatcatcggcctcctctttggcaccatggtcgtcagcatcttcctcgagagggctgacatgttcaagtacctcggcaacctggtctcctggaagagcaggggcagcaaggacct

SEQ ID NO: 44331 - DNA, 724 bp, Oryza sativa
  Clone ID: PAT_MRT4530_47401C.1
cggcacgagggttatatccacgagagtacgagagacgcgcgcgggcgcgagctgaggttgctgctgcagcgcaggcaaagaggggcaagctagcgcaagcgacgctaagcccgcgcgcgcctgcgtgcgtgcgtcgtcggagagcgcgggcgccaaacggcgccgcggcggagtacgtcgagcgtcgcgtggacgttggcagcggcaaggtttcctctggatacaccgttcttgagtttgagttgggcaaggaggttgtgaacgtagcctgaacctgacctgagattgtgaacgtaattttggggggaaaggttgttctgtactgtctcttcaatctgtgagttcgtgacaggttcttgcaaaaaccaaaacatcatcagtgaaaaattgttcgtagcattttagctctagtatagatcgatcaatcgatcgttcgttcgttcgatcgttcgaggacgagagatttgctaacatggcgttggcagggacctccaaagtagtgctgggatgtgtcgcgtttgggatattctgggtgctggccgtcttccccaccgtcccgttcatgcccgtcggccgtacggccggctccctccttggcgccatgctcatggtcctcttccgtgtcatctcgccggaggacgcctatgccgccatcgacctcccaatcatcggcctcctctttggcaccatggtcgtcagcatcttcctcgagagggctgacatg

SEQ ID NO: 44332 - DNA, 402 bp, Oryza sativa
  Clone ID: PAT_MRT4530_47402C.1
atggtggcagcagcatggggggaggcggaggccctcctgctcccacgtcgttgccgtcgctgcctcgtcgcctggtgcactagcgcctcccccatcagccttctccccttccgccggctatcatgcccaattgagaagaagtcctacattgagtcagctgccatgtctgataaggagtcaaaaccgccgagggatctagtttacactggttttgggactcggtgggtgagcgagctggtgcctacatcatcaatgttcatgagtgaggatgttgcattggctaccgatgccatatggttgggtgaaacatcaactgttggagctgaggcggcgttcgactgctggggccgacgatgcacggctctaggcgactggaagcaggcgagagctccgatccgatag

SEQ ID NO: 44333 - DNA, 2859 bp, Oryza sativa
  Clone ID: PAT_MRT4530_47403C.1
ctcgccaccaccaccactccgccgctgccgcctgcttttgcttctttccacttctgacttctccaagtccaaactccaaagttctcatcgttgcgcgtggcactgtggactctccactctccacgcccctactccgaggatacaccgtgagtaggcgtggtggtgcttgatctcaaatatcaaatatgtgtcctcccgttttcgtgcagtcgatctaacaccgttgtttcttgctaattcgttttcgttcccccggatcaaagaaactttattttacaacaacaacaacaacaacaaaaggatctttacatttccttttttaaatgatcttattaccttctctctcttatttttacagattttagaattaacctgtagcctctgtttgtttgtctgctccaatttctgcaggttcttgagtttgagttgggcaaggaggttgtgaacgtagcctgaacctgacctgagattgtgaacgtaattttggggggaaaggttgttctgtactgtctcttcaatctgtgagttcgtgacaggttcttgcaaaaaccaaaacatcatcagtgaaaaattgttcgtagcattttagctctagtatagatcgatcaatcgatcgttcgttcgttcgatcgttcgaggacgagagatttgctaacatggcgttggcagggacctccaaagtagtgctgggatgtgtcgcgtttgggatattctgggtgctggccgtcttccccaccgtcccgttcatgcccgtcggccgtacggccggctccctccttggcgccatgctcatggtcctcttccgtgtcatctcgccggaggacgcctatgccgccatcgacctcccaatcatcggcctcctctttggcaccatggtcgtcagcatcttcctcgagagggctgacatgttcaagtacctcggcaacctgctctcctggaagagcaggggcagcaaggacctgctcttccgcgtctgcatcgtgtccgccattgccagcgcgctcttcaccaatgacacctgctgcgtcgtgctcaccgagttcatcctcaaggttgccaggcagaacaacctgccgccgcagccgttcctcctcgccctcgccaccagctccaacatcggctccgcggcgacgcccatcggcaacccgcagaaccttgtcattgccgtggagagcggcatctcctttggacagttcttgcttggagttttcccggcgatgatcgtcggcgtcctgacaaatgctgccatcctcctctgttacttctggaagtacctttcagtggagaaggatcaggaaggcgggcagccggctgggccggaggtggtcgccgacgacgaggtcacctcacacaggttcacacctgcaagaatgtcacacgtctcatctctgaacccggatgatatggactgcataagtgagccaatcatcaggagcaacagcgtgaggagcaccagtgctaatgagaatctgaggagcaggagtgtgaattcggaggcggacatacagctcgcgatcaagtcgctccgggcatcgagcatgtcgcatgagatggtcgaggtctcaactgtcactgacaggagggatgaaggtgcatcctccaggaagttcacaagaactgctagccagcagaggagtgtgatcatagaggactcgccgccgtctcccgccagcaatggcgacaaggagaaggaagatgaggttgcggagaagagatggagggtgtttgtgtggaagactgctgtttatctcatcactcttggcatgctcattgcacttctcatggggcttaacatgtcatggacagccatcactgcggctcttgttcttctggcgcttgattttactgatgcacaggcttgtctggagaaggtgtcatactcattgctgatcttcttctgcgggatgtttattacggtcgatggcttcaacaaaactggcataccgaacacactttgggagctcgtgtgaaccgtattcacgaattgacagtgctcagggtgttgctcttcttgcgtgtggtgattcttatcctctcaaatgtggcctcaaatgttcccacagtactactgctcggcacaagagtggctgcatcagctgctgcaatctctcacgattcagagaggaaggcctggcttatcctagcgtgggtcagcaccgttgccgggaacctcacactactgggctcagctgcgaacctcatcgtctgcgagcaggctagaagagctcagttcttcggctataacctctccttctggagccacctccggttcggggtgccgtcgaccatcgtcgtcacggcgatcgggctgctcatcgtcaccagttactgaagaagaagaagaagaagaagaagctgacagcagcataaggtagcgtacaagaaggagatagatgaacgaaccctttggatcaataagagagagtacatgtaaaatttctaaaataggcttgtcctgtaaaactcgtgtgtgttttgtgtgtatctatgccacgctgctgcgtctgtgcccttgctcttttgttgtcgctaagcagacggtgattgagaaggatgcagatgtagcaggctaagcaacctgcattttcagtgtttttcatcagagtcggaagttgcaaatagggcgagtaaatgaagaatgctatgaccatctgattttagtttttatatttgtttcctactcaattaatttgtagccgcggtagaattttggaaatggtgtttgtacaactgcacatgtgcatggttactactagatcaaattgttttttccgcgggaaaaaggcccaaaaaaaaaaaaaaaaaaaaaaaaaaaaaaaaaaaaaaactcgagaccctgcagcccggggatccactagt

SEQ ID NO: 44334 - DNA, 626 bp, Oryza sativa
  Clone ID: PAT_MRT4530_47404C.1
ttaagagatgcttttcaacagctcaattggtactgtaccgacctcccgggtcagatcattacttctcggctcccagagccatttcacttgattaagcggctcccagagccttattcgtttttgcggactcccagagtccagctgcccagcagcaaagcaatccgcttccactcgggaagcctagtctcacatccgcccatgaccgtgggcacggtccagacactggctggtccacccggctccccttccccctctctctccctgcgcccctctcttgggccgcctccccgtagcccgtgccggcctaataagatcggcctagccgcgcaaatcctctcgggccgcgccaagtcgctcgagaaagtctgattcctatccctccttccggattttcgtcgatcgcgggttttctcgaagattcgtgaagctccgtgaagaccttgagctaggcaagtcaccctttgaccaattgctcccagtagtcgcactacttcctgtaggctgacataccctgatcccttgtcgctccaccattgtggtacttcggtatccgtgctctctcgcatgccaatagttgggaacgccggggcggggtcggacaaaccgggttctgtttgaacagccat

SEQ ID NO: 44335 - DNA, 2121 bp, Oryza sativa
  Clone ID: PAT_MRT4530_47405C.1
atggaggcgagctcctcttccacctcctccccgccgccgccgccgccaccctccataccggcctccagcgcctgggctgacgcctcgccgctcctcgacgccgcgtgccgtgatctccaggatggggaacttatacatggagagaactttagtctttttggtgcaatgtctgcattggagataatggatcctaaaatggattgtggaattgagaaaagtggatactactccattgatgaagccatagaagatggtattgccccagttccacttagtttggacagaacacttgacattcaacgcactcttgatgtcatggatcatcttttctcatgcgaggcaacatggcacaagggtcacactctagcacagactgtctttacatgtatctaccttatgagaatggagagaacttcatcacatgctatactaaatagcttttgcagaattttgcgtgctacctgttatgctgtggtttctgttgtttctactgcccgaactcatgaggaggaggacctctttactatgtcttttgggctgcctttaagagatgaaggtgatgaaaagtgcctgtcaattcttaactcagttgaagagacaatagctcgtcaattacgtgcttgtaaagcccaagcattgtccaggaaaaagacactagaaggtcttgaatccctacaggacaatcctgatctggaagaggattactgcagagcattgttatgcagattacgttttcgtaagcatttctaccatgttgttacatgcttgaggaaacctcatggaagaggattggagttggcacagaagcatgttgcgtcatgtttgactgagctcagtttgatgctcaactctcgagatttcctcaggtcacagtccaacaatacacagcaacaaggcgatgaaatctgcacaaccgcatcaggtgttcgtcctgttggctttgatgctagcttaaacagcaggcttctgagtccagcaccaccacgtgctgtcaaattacttagctggagtgatgcaataaggtactttgagaagcttctgcgcgatctagatatcatttgctcttcaccacttgatccggtgcttgagaatgtgcttcactttgttgtacagttccaaaaatcagtaccagatttggttcctagagcatttcttcagactttattagttcaagatggcaagctttatggtcgggacttgtcttgtgatgtgatttcaagggctttatcattaccagatattataggagataaggaattccagatgaatgagtttgtggtgcagctaggtcagttggtaatcaatttgcttaaaattctttgtacgaacactgcatggcaacggcgcaagcttgggaagagtttgcaggattggagtaccatttccatacagttggaatttgcgttgaaaagagaattcggtgaaactagaaatgtcttaccgcatgagaacatgtgcatgagagtatcaaagcaacttctggtttggactcaggaacatacatattgggttgcttatcggtttctcatattgggttttgaacttgacctgtattctccgagtgaatattgtatggtgtactgcacgaagaaaagggaaaaagaaaaaggatcattcaaaagactcctcaagggatacagcgtttccatcctcctgtctactgcttcagtgttatgttttactttcagaaggactttcaatggattttcaggcagcattttcccagttatccatattaatagtcattggaacatgaaactggagtttatagcattgagagggagattcattcagcatttcgatcttctccagaaagcacgtctccctgagcacattacctactacagttttagggaatcagcttctcatgcatccatagcagatctgaccaaatataacttttttaaagaaattcataagatcacgccgtccttgagaggcagttttgcaagtgaaccagaaaagctcgcggagatccgccagatagagcaggtggctgagcacaacagaatagccctaaacatcatcagccaagttggagctggtgatccatccctgagagtttcatttgagtttacacaccatccacactttgcagtcgcagttgtaaggagatcatag

SEQ ID NO: 44336 - DNA, 724 bp, Oryza sativa
  Clone ID: PAT_MRT4530_47406C.1
tgggggatctcggtgacatcagtacaggtttcgcatcagttaggagaactacctctactaccctttgattactaccctttcatctgcatttcaggcttttctgttgatcttcttttctgagctaggggacagaacatttttcatcgcggcacttctagcagctagaaattctggagcgatcatttttcttggcacatttggagcgcttgcggtaatgacaattatatctgtagttcttggacgagcatttcactatgttgatggcatcattccatttagttttggtggcacagatttcccagttgatgactttcttgctgcctgtcttttggtatattatggaattactacattgcttgatgcagcttcaggcgatgaagaaaagatgaacgaggagcaagaggaggctgagttagcagtttcaaaatttttgggaaatggtgcggggatcatatctgctgccagtactattgctagcacatttgttttggtttttatcgccgaatggggtgataaatcatttttctctaccatcgcacttgctgcggcttcatctcctctgggtgtcattgcaggatcacttgccggtcacgctgttgcaacattgattgcagttcttggtggctctttgctggggacgttcttgtctgaaaagattgtagcatacattggagggagcctctttttagcatttgctgctgtgacactagttgagatcgtgaat

SEQ ID NO: 44337 - DNA, 363 bp, Oryza sativa
  Clone ID: PAT_MRT4530_47407C.1
gccacgcgtgctaccacgcgtacggggagaggtcttgacatgcgcacattgatcgaagtaaggagatcacaactggcatataaactgtgtgatgagatggcttctgagatgttcagggagcatgcaatagacagttagcaaagaaaacatataaacagtcttgaacaacttgaataacacagcacaggttgttaaagaagacgagaagcatcctctcatttaatggtatgcttacagcactgatgaatattccgggagaagaaaggatcgacctgccttcttgggcctattacattcatgtgagacagtgatcatgaaaagagggttgaggatctaaagactctctatactgcctatgcaatg

SEQ ID NO: 44338 - DNA, 402 bp, Oryza sativa
  Clone ID: PAT_MRT4530_47408C.1
atgtggctgttgccgcaggaggaggtggaccggatcctcgccgagtccaacgagaccgtctgcaccgtgtaccgggagctgaagcgcgccaacccgtcgctggtgccctcgccggaggaggagaaggacgagtccaccatgctcctctacacctgcgcccgcaacgcctacgaggatgatgccaagttcgccaagttccaggcttgggtctgcgacgagtacgctcgaaaaggattcgtggaggtggactacgactacttcggtgagagggcagaggtgttcaggctctacgatgaagcacgggaggaggtgatgggacactgggatcatccttcagatagcgacgatgacgacgaagactggaagcttttcattagggcaattaggaggaccttcgtctga

SEQ ID NO: 44339 - DNA, 1318 bp, Oryza sativa
  Clone ID: PAT_MRT4530_47409C.1
ccgaggactacactaaccggcggctgcggcggcaactccggcggatccacccgcagctaggccgagtcgcgctgccggggaagaggcagcgggaaccctagccggccgagcctagcccgggggaggaggaggaggcaggatgctgttccaggtgggagggcagggggcgcggcccaccttcttcgagatgtcggccgcgcagcagctgccggccagcctccgcgccgcgctctcctactcgctcggggtttttgcactaagacggccgttgttacataaagttttagattacgaggatgaattctttgccttgttaatggctgtccttgagtcccatagtttgcgaacgacagatggttctttttcggagtcattgtatggtctcaggcggagacctgttaaggtttcagtaaagagaagtagttctggtgcagaatccaatgataaagcctatgattctgttctaaggaagcgccagaaagtcctttctgttgtttttttggttgttttgccatatttcaagtcaaagctgcagtccatatataacaaagaaagggaggccaggttgcaggcaagcctttggggtcagggtgatgttagattcgatgaagctgaccttgtttcagatcaaggggagacttctcaagcacaagtcgaggctacaactggagaagtatcaaatatggcacgtattaagaagaattttgcggcattaataggtgtttgctatccatggattcatgcgaccaatgaaggtctctcatttgcttaccagttgctgtatttgttggatggtactgcattttatagtccagcactgcatgctcttgggcttcatgtttgtcgtgctacaggacaagagctgatggaatcatcttctagggtatcaagaatcagaaatcgagaacttgagagacttcgtggtcctccatggctgaagaccatgcaaagggtgttacttaactgtatgtacactagcctagattatgcacaaactggtttgattgctgcagttttctttttcaagatgatggaatggtggtatcaatctgctgaggaaagaatgtcagctccgactgtatatcccccaccccctcctccacctctgccaaaggttgctaaagatggacttcccttgccccctgacaggacattgtgccccttatgctgccagaagcgcaataacccttctgttctttctgcttctggttttgtattctgctacagttgcatttttaagtcagtctcccagaccacaaggaactcagcccttctgacactcaaggcatggccatctactcaagaacagtgctgttga

SEQ ID NO: 44340 - DNA, 893 bp, Oryza sativa
  Clone ID: PAT_MRT4530_4740C.1
cccgatgcggatgaattggctttgctgcactccggggaccaatggtcgaaggagtttattgatggcgtgcattattttttgagtgtggacaatgcctacaagtctaagggttttatatgttgtccatgcacaaggtgcaaaaactagaagcattcttcatcaacagctcttaatatccacttgatgcaattgggattcatgcctagctataactgttggaccttgcacggagagttaggggttgcaatagaagaggatgaagaagaagacgataacatttcggactgggttcaatacggtggatttgcagaaaatacaataggcgtggcggacagtgctattgaagaaaacaagggtgcggatgatcttggtcggagttgtgtgacgtaaagaaggactacgaaagtggaaaggatgtccaaaaattgaagcgtatgttagcggaccacacaaaatgtcattgtacctagattgcgaacaagggcagaaaaagttgggtaccatgctgaaattcttataatgcaagacaaaaaatggtgtgactgacaagacatttggcgtgttgttgaaactcataaagaatattcttcccgaggaaaacaatttctcgaaacaacgtacaaagctaagaagttagtctgccctttaggactagaagtccagaagatacacgtatgtccaaacgattatttcatttattgcggcgtggagtacgagaacctagttgcatgcccagttcgtaaggcactacgatacaagatgactccagtgatgttgacggaaagccttcgaagaagagagttccggctaagatgatgtggtatttcactaccacggctgccctaccatctatttttaaaagtaaaataaatgtatttctttgggtcatataa

SEQ ID NO: 44341 - DNA, 480 bp, Oryza sativa
  Clone ID: PAT_MRT4530_47410C.1
ttgccccctgacaggacattgtgccccttatgctgccagaagcgcaataacccttctgttctttctgcttctggttttgtattctgctacagttgcatttttaagtcagtctcccagcataaaaggtgccccatcacattgatgcctgccacagtagaacaaatcagacgcctctttcatgatttgtagtttgattagacagaacacactcttctccccaaagatcaggggaagccggatataaagaatcgtactatgcagctattcatttttgttgaacagaccacaaggaactcagcccttctgacactcaaggcatggccatctactcaagaacagtgctgttgattcttcccccgttaggaaattctatgttcatacaaagcttgtattcgttttcttctgttgaaatcaaaaaaacatgcacagctcgagattttggtactgatgtgcaattactgtacaaatgtcattttgacg

SEQ ID NO: 44342 - DNA, 639 bp, Oryza sativa
  Clone ID: PAT_MRT4530_47411C.1
ccccaattcagatcctgatactgatactgtcggataacatatcactcatactatatcatggttccatattattgttatttgaattagattcacagaacgaataaactatttgtatctctagtatataaatatttaatataagaagaccattaaagtaacccaaagagatattatcacaggaaaatccttttaaaatattaccattgtggagcttccgtaaaaattaggtgatttaaaccccatccttttatccattccataatttggtaggttggaattttaataaataagatgtttcaataatatgtttttataaacattaaccgggccgggaataaccaagttcctttcaccatatccctttaccccattaaatttttttttatgggatttttgggatttcggaaaaaatatctgggattccattttctcttctcatattcttcccgcgagtctcgggtcaggtgggtggtcaggtaatacccatcccattttcaccccttgtaggaagtgaccaagcatagatcaggtgataaaatttaccaaaaaaattggcaattttgtatgagaaccatatgggtctctcgaagtaattagtaattgcttttagaatgttgtgtgcttaaaaaaaaaaaaaaa

SEQ ID NO: 44343 - DNA, 1791 bp, Oryza sativa
  Clone ID: PAT_MRT4530_47412C.1
atggccgccgccaccagtgaccacctctccggcctccccgacgacgtcctccggcacatcatctccttgctctccgccaaggaaggcggcgccaccgccgtgctctcgcggcggtggcgcccgctgtggcgccaggctggcaccgtcaacctggacacggagccctacttggacccggcggcgtacagaggcaacaacttcccggagcacaggcggagcgcgttcttcgaccacgccctggccgccctcgccgcgtgcgagagcccgaggatcctgagccttcgcctcgcgtcggaggagatcgagggaggcgcggccgaggagaagtgtgccggtgtggtcgacgccgtccaagacgccccggcggcggcgcgcgtcgaggagctccgcgtccgctgcgacgtctcgtggttctgcagctccttcccggggcactactcactgacatcgccggcgccggacttcgcatccgccgaccttcacttccacgaccaccggagctatggcgacaaagatcccaacaacttgaccgtacccttatggagctgcctccggcacctgcacggcgtgagggtcttgaagctgcagctagacttctatgcagagtacatcaccatggaagccgacgcttgcgacggcggcggcgtcgtccccgccacgttccctaaccttgagtatctcgagcttgacgcccattgcaaggatgatcacgacatggccacagaattgacagtagcaagcgttctccgatggtgccctgccatccgtgacctacggctcaggttgtcagtagccgatgctgaaggccgcgtcaatgtctacaacagcaaacggcacatgatccatcaggcgagattgatgaggaacagctttgaacaggatgtgcaaaccaaaattgatgttgatgtgaccaacattacaacatcatggattaaccgattacaaggtgccttgtccaatgaagctctgggtgaattcttccaactttgggatgaagttcgcgacgtgtcactgcagcagatggctgacacgatcaaatggaagttgactgctgatggtaatttcttagtggcctcggcgtatgatctatttttcatagcgacagaggattgttcctacggggacacgctgtggcactccagagtgccgtcgtgtgttcgcttcttcatgtggattgcactcaagggccgctgtctcacggcggacaacttggcgaagagaaactggccgcatgacgccatttgctccctatgccaacgcgagaacgaagactgccatcatttgcttgtgtcctgtgattatacggcggcggtttggcgcaagctgagacgttggtgcaacattaacattgcaatccctgcggaagatggcaggccgcttgcagattggtggatcacgacaagatggcgttttcagaacactagcaagaaagttaagaaagaggtccatccttcttcccagtacattcatgagcacaatgcacttaataaagcaagacaaggttttcctgttgaactgggaggcgtcgatgcttccaaaacaaaaattcttaggttggctcattctacaccacaagaaacgtggaatcttgtccctgctgctcaaggtattcagaataaccagacttattgctccctaaaagaatggatgtcatgtatcatgcagaatgaaagcaagacagaagcaaggagaaagatttggaaagcaaggaatgatctgaagtttcagggcttagttaaagagcccactcaggtgtgttttgcagcagaagccatggtacaacctttctga

SEQ ID NO: 44344 - DNA, 1231 bp, Oryza sativa
  Clone ID: PAT_MRT4530_47413C.1
atggccgccgccaccagcgaccacctctccggcctccccgacgacctcctccggcacatcatctccttgctctctgccaaggaaggcgccgccaccgccgtgctctcgcggcgttggcgtccgctgtggcgccaggcgggcaccgtcaacctggacacggagccctacttgtacccggcagcgtacagaggcaacaacttcccggagcacaggcggagcgcattcgtcggccacgcgctggccgccctcgccgcgtgcgagagcccgagggtcctgagccttcgcctcgtgtcggaggagatcgagggaggcgctgccgaggagaggtgtgccggtgtggtcgacgccgtcctggacgccccggcggcggcgcgcgtcgaggagctccgcgtccgctgcgccgtctcgtggctctgcgagcacggcagctgcgagcgctcgagctccagcggaacgtggcggctgcggctcggatccctgccctgcgccgcggccacgctccgcgttctgcacgccaacgacgtcggcgtcgaacgcctcggcgacggcgacgggcggcgtcgtcctcccgctcctgaaggagatgcggctggtgaaagccaccgtgtcaccggagacgctccagggcgtgatcgacgccgcgccgaggctcgccaaccttagagatcgctgcatcgagctcgacgtgtcccgcctacgctccttcgtaaacgaacgctccctcccggggcgcttctccttgacctcgccggcgccggacctcgcatccgccgaccttcacttccacgaccaccggagctatggcgacaaagatcccaacaacttgaccgtacccatgtggagctgcctccggcacctgcacggcgtgagggtcttgaagctgcagctggacttctatgcagagtacatcgccgtggacgccgacgacgctgacgacggcgtcctcgccacgttccctaaccttgagtacctcgagcttgacgcccattgcaaggatgatcacgacatggccacagaattgacagtagcaagcgtcctccgatggtgccctgccatccgtgagctacggctcaggttgtcagtagccgatgctgaaggccgcgtcaatgtgatctacaacagcaaacggcacatgatccatcacgcaagaatgatgaggaacagctttggacaggatgtgcaaaccaaaatttatgttgatgtgaccaacattacgacatcctcgccgtag

SEQ ID NO: 44345 - DNA, 365 bp, Oryza sativa
  Clone ID: PAT_MRT4530_47414C.1
gacacgagctgagatctttacaaaatggctacacgcttcaaagagatttctggcaatgagttactgtgagactgaactgtatcagagtgactacaggccagacagttttgtaggtgttgataggataaagctttacctgatatgtgtcttgtgttgtaccatataggtcaagaagagcaaatgagtattccatccgtgtacacctctgagcattatgctcaaattttgtgtcgtaagatgtaacgccccttgcaaggatgggaaaagaaactctcaaggtaaacgaatatgtgtattaccaagattctatatgcttctgtggcaaaaaaaaaattcaaaaaaaatgacaatcacaaaaaggtaag

SEQ ID NO: 44346 - DNA, 1605 bp, Oryza sativa
  Clone ID: PAT_MRT4530_47415C.1
atggctcctcgcaagccaaacccagcttcggcaaaaggaccagatcccggccaggtcgatgatgacagcaccgcttttttgggggtttctctcgtggacgatgtcgagctggcgaagttggtcaactctagggtgttggttgaggggcaagctttcgccccggggaaagccgtggtgctgaagcctatcgacaatcggacggtggtgttcgccgtcttttttgaggtggggctatggtttccgtgcaacgtgttgctgctggagatccttcgccttttccagcccagcgccgagctctttggcgccatatttttcaccaccgtgaactcgaagacggtgattaccccggctggaacgaagaagacagtgttcgggagcgtgaactttaacgttcgccccgagcggtccgatctctggccggtgaacgctgccatgtcgaagtgggacctccattggatggcgaggtggttctatcacaccatccccttcgcggctggttctaactcggcaaaagccctccggtgccggcgtagggcgattgcgccgaaccggaaacccaagatcgccgtggacggcgctatggaggcgcggttcgtcctactgcgcaagatgcgtggacaagtgaagcttgcccccaggaagcgaagggttcctgcttcgtcggactctgatgccgatgatgaggatgattccgaagaacgtgacggcgaggaggaaggagaggaagaagaggaggtggaggctgtggctgataaggccgtgaacgaggcgatcgaagaccacgtcgacacccccggctacactcctaccccaagtccaggtcacaacgagaccggggtggagtcgaacagctccccccttcgacgaaaggatttggaaggggcgaaggccttagttgcgttctcgtcgggcaaggcggcgaaaggaggtctggtcaagaagatctcaaaaaagaagggactcgtcgacatcgctcgcgtttttagcaacgacgagtcttctgacgagactccgacttcacctgctggccgcagtttggaccttttcgactgctccccttgctccgctcagcgttgctggggcaggcgtagcgccgccgccggggcttccgcctccgccgaacggatcgtgtcggctgtggcgagggttttcgggagccctgtgcgcgagccagctatttcgccgctggtcaaggcgaaggggaagtgtgcggccgccgaagcatctgcctcagagtattccctcgcggcgccccacttcgcccctggtgacttcgagacccgggcgaacctttttccctttgtggagggagtaagtaatcttatcttgcccgccggcaccccgagcctgttcaccgaacttaacgagttcaacaaggggtgttcctccattaaaagtttggcggttcggattcttgcggctcactgttcgatagagcgaaccgtgcgggcccgttttgacgattttaagagccgtcttcgggccaaggatgatgaaataagccgcaagaacttggaggtggagtccctggcccacaccctcaaggaggcgaaaattgaaatcaaacgccttcagtccgaattggacaaagggaaagaggcctag

SEQ ID NO: 44347 - DNA, 2586 bp, Oryza sativa
  Clone ID: PAT_MRT4530_47416C.1
atggaggcgttcggcgggttcttcgtggacgagaaggcggcgcgggtggagaacatcttcctcgagttcctcaggcggttcaaggaggcggatgcggcggaggcgttctacgagacggagctggaggcgatgcggtcgcgggagtccaccaccatgtacgtcgacttcgcccacgtcatgcgattcaacgacgtcctccagaaggccatctccgaggagtatctcaggttcgagccgtacctccggaatgcgtgcaagaggtttgtgatggagcagaggactggcgagaaccgtgcaccaatcatctctgatgatagccctaacaaggacattaacattgccttctacaacataccaatgctgaagaggttgagggagcttggaacagcagagattggtaagctcacggctgtaatgggggtggttacacggacaagtgaggtccggcctgagttactgcaaggcaccttcaagtgccttgactgtggaaatgttgtaaagaatgttgagcagcagttcaagtatactgaggagacatcaaaagaaatacctgctggttcactaccacgctccctggatgtcattctgaggcatgagattgttgagaaggctagagctggagacacggtcatatttactggaactgttgttgctgttcctgatgttatggctctaacttcacctggtgagagagcagagtgtcgccgggaggctcctcagcgaaagaatgggtctggtgtccaagaaggtgtcaagggcttgaaatcactaggagtacgagatctgtcatatcgccttgcttttgtagcaaactcagtgcaggtggcggatggaaggagagaagtcgacatccgggacagggacatagatggagatgacagcgaaagacagaagttcactgaagaagaggaagatgaagttgttaggatgaggaacgttcctgattttttcaataagatagttgatagcatatgtcccactgtctttgggcatcaagaaattaagagagcaatccttctcatgcttttgggtggtgttcacaagataacacatgaagggataaaccttagaggtgacatcaatgtctgtattgttggtgatccaagttgtgcgaagtctcagttcttaaaatataccgctggtattgttccacgatctgtttacacatcagggaagtcctcatctgctgctggtttgacagcaactgttgctaaagaaccagagactggcgaattttgcattgaggcaggagcactcatgttagctgataatggcatctgctgcattgatgaatttgataaaatggacatcaaagatcaggttgctatacatgaagcaatggaacagcaaaccattagcataacaaaagcaggaatacaagcaactttgaatgcaaggacttcaattttggcagcagcaaatcccacaggagggcgttatgacaagtcaaaaccactcaagtataacgtggcattgcctccagctattctttcaagatttgatctggtatacataatgatcgatgagcctgatgaaaacactgactaccacattgctcatcacattgtgagggtccatcagaaacgtgaagaagcacttgcccctgcatttagcacggcagaattgaaacgttacattgcttttgcgaacgtggaatcaagtgaagttgatctctctgatttccaagatgctgatgatggcacaaatgtaccagccgataatgatgctggtcagccaacagaaatggatgctgctcctcaacaagacggtccaggagatggtctggctggcatgaagcaaggggatctgataatttggtatgttgagcagcagaatgcccaaggagcctatagttctacagcagaggtgaaggaagaagtgaagtgcatcaaggccatcatagagggacaaaaagaacttcaggagccctctaaccgtagcctagaacgccacccatgcgccgggctcactgaccagatccaggactacggcatggggcggggaagaaggagagccgacggtgcagttcgggagagggtgcgcggggctcatgggcccctgatgggccgtctggcgatcgccggccctatagcccttaggcttgatgggccggaaaggcttcctcggccctcgcgggggcgaacttgtcatggcgaagtcgtcttccttcggcagtcgaagggcctcatgccatccgccaacaagcccctcacgggtaagggtgagattggagcttcggccgagaccgtgcaaaccatgtggtatgcgaaagggctggatcccggccgagtcgatgatgacagcaccgcctttttgggggtctctcttgtggacgacgttgagctggcgaagctggtcagctctggggcgttggtcgcggggcaagctttcgccccagggaaggccgtggtgccaaagcctatcgacaaccggacggtggtgttcgccgccttttttgaggtggggctacgcgccgagctcttcggcgccatattcatcgccaccgtgaactcgaagacggtgattaccccggctggaacgaagaagacggtgttcgccccgagcggtccgatctctggccggtga

SEQ ID NO: 44348 - DNA, 301 bp, Oryza sativa
  unsure (1)..(301): unsure at all n locations
  Clone ID: PAT_MRT4530_47417C.1
ctagacttaaattggagagaatgcatgacagcacaccacacattgacaccactgaggcaggcagtgcctctccaaaacaaaacgccacaaaactagcaagtgtgcttaaagaaaaattttaacctatcggcgagcattgtgcttgtgttgtgcagcggcacacgctgatagcgcgctctcccttcccctgcttcgaagggtccacgcagaaaatcccttggctccaagaggcaggcgcccggtgcacgtacgtacagtgngcgccagttgccaccaaggcgaacgcatggcgcctgctcct

SEQ ID NO: 44349 - DNA, 1140 bp, Oryza sativa
  Clone ID: PAT_MRT4530_47418C.1
atggcccctcgcaagccaaacctagcttcggcaaaaggaccggatcccggtcgggttgatgatgacagcaccgcctttttgggggtttctctcatggacgacgtcgaactggcgaagttggtcagctctggggcgttggttaaggggcaggctttcgccccggggaaagccgtggtgccgaagcctgtcgacaatcggacggtggtgtttgccgtcttttttgaggtggggctacggtttccgtgcaacgtgttgttgccggatatccttcgccttttccaggtggagcttccgcagttgagcccatcgccgctagttcggatctccatctttgactgggcatgccggacttccgggtttgagcccagcgctgagctcttcggtgccatatttttcgccaccgtgaactcgaagatggtgattaccccggctggaacgaagaagacagtgttcgggagcatgaactttaacgttcgcctcgagcggtccgatctctggccggtgaacgctgccatgtcgaagtgggaccgccattggatggcgaggtggttctatcacaccatccccttcgcagtgaagcttgcccccaggaagcgaagggttcctgcttcgttggactccgacgccgacgacgaggatgatgccgaagaacgtgacggcaaggacgaaggagaggaagaagaggaggtggaggctgtggctgataaggctgcgaacgaggtgatcgaagaccgcgtcgacacccccggctacactcctaccccaagtccacgtcacaacgagaccggggtggagtcgaacagctccccccttcgacgaaaggatttggaaggggcgaaggccctagttgcgttctcgtcgggcaaggcggcgaaaggaggtctggtcaagaagatctcaaaaaagaagggactcgtcgacatcgctcgcgtttttagcgacgacgagtcttctgacgagactccgacttcacctgctggccgtagtttggacttttcgactgctccccttgctccgctcggggttgctggggcaggcggtagcgccgccaccggggcttccgcctccgtcgatcggatcgtgtcggctgcggcgagggttttcgggagccctgcgtgcgagccagcaatttcgccgctg

SEQ ID NO: 44350 - DNA, 2835 bp, Oryza sativa
  Clone ID: PAT_MRT4530_47419C.1
atgccatccgccaacaagcccctcacggacaagggtgagattggagcttcggccgagaccgtgcaaaccatgtggtatgggctacggtttccctgcaacgtgttgttgccggagatccttcgcctcttcaaggtggagcttccacagctgagcccgtcggcgcttgttcggatcgctattttcgactgggcatgccggacttccgggtttgagcctaacgccgagcttttcggcgccatattcttcgccaccgtgaactcgaagacggtgattaccccaactgggacaaagaagaccgagttcaggagtgtgaacttcaacgttcatcctgagcggtccgatctctggccggtgaacgctgccatgtcgaagtgggaccgccattggatggctaggtggttctatcactccatccccttcgaggctggttctgactcggcgaaagccctccggtgccggcgcagggcgatcgcgccgaaccggaaacccaagatcaccgtggacggcgctatggaggcgcggttcgttctgctgcgcaaagtttgctcccgccttagctgccgtgacttggtagaggaattctgtatgcttcgcatctttcccctctcccaggcatggcaagtcacggttgatcaaggcgaagaggttgacggtttgccgaacctgattcttcctgaggggacgaacacgtctgggcgggcgaaccgggtttataacagcgagttgcctcctcgggcaaacccccacaaagcggacgacgatgcagggccttcgcgaaagcgaatgcgcgggcaagtgaagcttgcccctaggaagcgaagggtccctgcttcgtcggactccgacgccgacaacgaggacgatgccgaagaacgcgacggcgagaatgaaggagaggaggaggccgtggccgataaggccgcgaaagaggcgatcgaagatcgcgtcgatacccccggctacactcctaccccaagtccaggtcacaacgagaccggggtggagtcgaacagctccctccttcgacgaaaggatttggaaggggcgaaggctctagttgcgttctcctcgggcacggtggcgaagggaggtccggtgaagaagatctccaaaaagaaaggactcgtcaacatcgcccgcattttcagcgacgacgagtcttctgacgagactccgacttcgcctgctggccgtagtttggacctttcgactgctccccttgctccgctcggcgttgctggggcaggcagtagcaccgccgccggggcttccgcctccgccgaacggatcgtgtcggctacggcgagggttttcgggagccctgtgcatgagccagctatttcgccactggtcaaggcgaaggggaagtgtgcggccgccgaagcatctgcctcggagtattcccttgcagcgccccactttgcccctggtgacttcgagactcgggcagaccttattccctttgtggagggtgtgagcaaccttgtcttgcccgccggcaccccgagcctgttcaccgaacttaacaagttcgacgaggggtgttccaccattaaaagtttggcggttcggattcttgcggctcactgttcgacggagcgaaccgtgcgggcccgttttgacggttttaagagccgtcttcgggccaaggatgatgaaataagccgcaagaacttggaggtggaggccctggcccacaccctcaaggaggcgaaaactgaagtcaaacgccttcagtccgaattggataaggggaaagaggccagggccgaggttgatcgcctcaaggccgaactggagaaggagaaggcccattcggcggtgctcatcgattactacaaccttactgagccgaagatggaggctctttgccagaaggctagcagggccgaagcgagcgccgcggaggagtcgcagcggttttcgcgagagatggcgaagaccaccgaatctgcgagaatggcttgccaaacgctccgcctcgcccttaccgacatggacgcgaaggtgcggggggtccctgccgaggatgcctcagccttcgacttctccgagtggacccagcaggctggcggatcggtttcggactgcgccaccgcgtacggcgattgctgtgcgcgtgtatcggcggccttcaccttaggccttttgcagcagttcggctgtgagcacgttgccgagttccctacctatgcgaagggggactgggagattagtgcgcagaacattttgaccgctcttcgcgcgtggcgaaaacagttttggcagaaagacggccggtccgctgccaaggcgcaccttctggagcaactggcgaaggcggaggcggtagatcggtgcgaagaagagggcgcggtgggcaaagaggttggaggcgatgcccaggatcacccagagggggttcgccaaaagttgtgcattcggcccccttccgggagctggcgaagtcaaaacgagaaatttgtggcattgaaggacctgccgaaggtgcgatgtccatttcgccctgtttatcgcaaaatggagataaacggtcagagctataaggttatcaaagttgccaactggctacgagcgcaccccgggcgaaccttagaagattacgatcttgttcattcaagacgtttggaggatatggctcgcttttggcgaaaccatcagaagactaaacgtcaggaaacgatctttcagcgtcgttacagtttagtctgtgtttcgccccctactcctcttaaggttgtgtatgatattagtagtgatgacgaacctagttcgtctgaccattccttagagagggataatgattacgggggcgaagatgtaatttacttgtag

SEQ ID NO: 44351 - DNA, 513 bp, Oryza sativa
  Clone ID: PAT_MRT4530_4741C.1
atgaacggaagggaattcggcgacggctcaagtaggtggttgcagacagagcggctcaaaaccatcaacgtctgccaaagtgagacccaattgagtaaacaacgcgatagacaagacaaagctagccggcagaaattcctggtagccgctaccgatgtgcaacgcatggacaaagatggccatgcgtcgagagttggcgtgtaccccatacccctgtacccatacgggccacacacatccaccgtcgtcatccggtggattttctgcaatgccgcgctctctccgaagttacgacgttacgtagtaccacgacgtaccgcggccgcgataaaggatcgccggctggttgggcggggagcctttacgagtggccgggccgacgcacgttgcggcggtgcacgctaccggagaattcggcgctcgtttgcgtcccaattgatttggtgcccgtaccaccggcagccggagcccaatctgttccaggatcagatcgatcgagccccgagtcccgac

SEQ ID NO: 44352 - DNA, 532 bp, Oryza sativa
  Clone ID: PAT_MRT4530_47420C.1
gcacgaggctccctccccccctctctctcttcgctcttcgcatcatccgcctcgctttcctccctcccccgccgccgcgccgcgccgcgccgcccgaatccttcctgtgacggcgagccaccgccgcgctaaaacccaaaccctagacctagaccccactccgtcgcggccacctccccccggggccggtggcggagccatccgcgcgccgcgcgcggatccgtacgcgtcggccggatccaatgcggcggctgtgctgcggccgctgtagcgtgggtgagcgggcccgatctgaggtggtgggagggaggaagggatgtcgtccgcgccggcggcgggcggggcgttcgaccggtaccagcgggcgggcgcgccggcggccagcgggaacacggttttcaagagtggacctctcttcatttcatcaaagggaatcgggtggaaatcatggaaaaaacggtggttcatcctcacacgaacatcattggttttcttcaagagtgatcctagtaccttgccccagagaggtggt

SEQ ID NO: 44353 - DNA, 1335 bp, Oryza sativa
  Clone ID: PAT_MRT4530_47421C.1
atggcccctcgcaagccaaaccctgcttcagcgaaagggctggatcccagccgagtcgatgacgacagcaccgcctttttgggggtctctcttgtggacgacgtcgagctggcgaagctggtcagctctggggcattggtcgaggggcaggctttcgccccagggaaggccgtggtgccgaaacctatcgacaatcggacggtggctggcactgactcggagaaagccctccgttgccggcgtagggcgatcgcgcctagccagaaacccaagatcgccgtggacggcgctatggaggcgcggttcattctgctgcggaaggctgaaaacgaggcccgtaggatgatcggcgatatgtcggtcgtcgagtatagccagttgctaacacgacaagcggctgggcgggcgaaccgggtttacaacggcgaattgcctcctcaggcaaacccccacaaagctgacaatgatgcagggccttcgcgaaagcgaatgcgaggacaagtgaagcttgccccgaggaagcgaagggttcctgcttcgtcggactccgacgccgacgacgaggacgatgccgaagaacgcgacggcaaggaggaaggagaggaggaagaggaggaggccgtggccgataaggccgcgaatgaggcgatcgaagaccgcgtccggctacactcctaccccaagtcccgggttttcgggagccctctgcgtgagccagctattttgccgctagtcaaggcgaaggggaagtgtgcggccgccgaagcatttgcctcggagtattcccttgcggcgccccacttcgtccctggtgatttcgagactcgggtagaccttaatccctttgtggagggggtgagcaaccttatcttgcctgccggcaccccgagcttgttcaccgaacttaatgagttcgacgaggagtgttccgccattaaaagcctggcggttcggattattgcggctcactgttcgacggagcgaaccgtatgggcccgttttgacggttttaagagccgtcttcgggccaaggacgacgaaataagccgcaagaacctggaggtggaggccctggccaacaccctcaaggaggcgaaaactgaagtcaaacgccttcagtctgagctggataaggggaaagaggccaggggcgaggttgatcgcctcaaggccgaactggagaaggagaaggcccattcggcggtgctgattgactactacaaccttactgagccgaagatggaggctcttcgcctgaaggctagtagggccgaagcgcttgagagaggtggcgttccaggaatggtcgaactcctcgccttcgagtgtcgctag

SEQ ID NO: 44354 - DNA, 2274 bp, Oryza sativa
  Clone ID: PAT_MRT4530_47422C.1
atggcccctcgcaagccaaaccctacttcggcgaaagggccggatcccggccgagtcgatgacaacagcaccgcctttctggtccgctctggggcgttggtcgtggggcaggctttcgccccaggaaaagctgtggtgccgaaacctatcgacaatcggacggtggtggaacttccacagctgagcccgtcggcgcttgttcgggtcgctatcttcgactgggcgtgccggacttccaggtttgagcctaacgccgagctcttcggcgccatatttttcaccaccgtgaactcgaagacggtgattaccccggctggaacgaagaagacagtgttcgggagtgtgaactttaacgttcgtcccgagcggtccgatctttggccggtgaacgctgccatgtcgaagtgggaccgccattggatggctaggtggttctatcacaccatccccttcgaggctggttctgacgcgacgaaagccctccggtgccggcgtagggcgatcgcgttgaaccggaaatccaagatcaccgtggacggcgctatggaggcgcggttcgttctgctgcgcagggtttgctcccaccttagctgccgtgacttggtggaggaattctgtatgcttcgcatcttttccctctcccagtcatggcaagtcacggttgatcaaggcgaagaggttgacggtttgccgaacctgatacttcctgaggaggcgaacatgttgacccttgaccaggctgaaaccgaagcccgaaggatgatcggcgacgtttcggtcgttgagtatagccagctgctaacacgacaagcggctgggcgggcgaaccgggtttataacggcgaattgcctcctcgggcaaacccccacaaagccgacaacgatgcagggccttcacggaagcgaatgcgcggacaagtgaagcttgcccctaggaaacgaagggctcctgcttcgtcagactccgatgccgatgacgaggacgatgccgaagaacgtgatggcgagggggaaggagaggaggaagaggaggaggccgtggccgataaggccgcgaacgaggcggtcgaagaccgcgtcgacatccccagctacactcctaccccaagtccagatcacaacgagaccaaggtggagtcgaatagctctccccttcgacggaaggatttggaaggggcgaaggccctagttgtgttctcctcaggcaaggcggcgaagggaggtccggtgcagaagatctctaaaatgaaaggactcgtcgacatcgcccgcgttttcagcgacgacgaatcttctgacgggactccaacttcgcccgctggccgcagtttagacctttcgactgctcccctcgctccgcacggctttgctggggcaggcggtaacgccgccgcctgggcttcagcctccgccgaatggatcatgtcggctgcggcgagggttttcaggagccctctacgtgagccagctatttcgccgctagtcaaggcgaaggggaagtgtgcggccgccgaagcatctgcctctgagtattcccttatggcggcccacttcgcccctggtgatttcgagacttgggcggaccttgttccctttgtggagggagtgagcaaccttgtcttgcccgccggcaccccgagcttgttcaccgaacttaatgagttcgacgaggggtgttccgccattaaaagcctggcggttcagattcttgcggctcactattcgacggagcaaaccgtacgggcccgttttgacagttttaagagccgtcttcgggccaacgaggacgaaataaggcgcaagaacctggaggtggaggccctggccaacaccctcaaggaggcgaaaactgaagtcaaacgccttcagtctgagctggataaggggaaagaggccagggccgaggttgatcgcctcaaggccaaactggagaaggagaaggcccattcggcggtgctgattgactactacaaccttactgagccaaagatggaggctcttcgcctgaaggctaggcttttgcaacagttcggctgcgagcacgtcgccgagttccctacctatgcgaagggggactgggagattagtgcgcagaacatatcgcccgctcttcacacgtggcgaaaacagttttggcagaaggacggccggtccgctgccaaggcgcgccttctggagcaactggcgaaggcggaggcggcagacaggggcgaaggagaggacgcagcgggtgaagagggtggaggcaatgcccaggatcacccagaggagtga

SEQ ID NO: 44355 - DNA, 1920 bp, Oryza sativa
  Clone ID: PAT_MRT4530_47423C.1
atggcccctcgcaagccaaaccctgcttcggcgaaagggccggatcccggccgagtcgatgacgacagcaccgcctttttgggggtttctcttatggacgacgtcgagctggtgaagctggtcagctctggggcgttggttgaggggcaggctttcgccccagggaaagccgtggtgccgaaaccaatcgacaatcggacggtggtgttcaccgtcttttttaaggcagggctacggtttccctgcaacgtgttgttgccggagatccttcgcctcttccaggtggaacttacacagctgagcctgtcggcgcttgttcggatcgctattttcgactgggcatgccggacttctgggtttgagcctaacgctgagtttttcggcgccatattcttcgccaccgtgaattcgaagacggtgattaccccagctgggacgaagaagaccgtgttcgggagtgtgaacttcaacgttcgtcccgagcggtccgatctctggccggtgaacgctgccatgtcgaagtgggaccgccattggatggctaggtggttctatcactccatccccttcgaggctggttctgactcgacaaaagccctccggtgccggcgcagggcgatcgcgccgaaccggaaacccaagatcgccgtggacggcgctttggaggcgcggttcgttctgctgcgcaaagtttgctcccgccttagctgccatgacttggtagaggaattctgtatgcttcgcatctttcccctctcccaggcatggcaagtcacggttgatcaaggcgaagaggttgacggtttgccgaacctgattcttcctgagaggacgaacacccgcaggatgatcggcgacgtatcggtcgtcgagtatagccagctgctaacacgacaagcgtctgggcaggcgaaccgggtttgtaacggcgagttgcctcctcgggcaaacccccacaaagcggacgacgatgcagggccttcgcaaaagcgaatgcgcaggcaagtgaagcttgcccctaggaagcgaagggtccttgcttcgtcggactccgacgccgacgacgaggacgatgccgaagaacgcgacggtgagaatgaaggagaggaggaagaggaggaggccgtggccgataaggccgcgaaagaggcgatcgaagatcgcgtcgatacccccggctacactcctaccccaagtccaggtcacaacgagaccggggtggagtcgaacagctccccccttcgacggaaggatctggaaggggcgaaggctctagttgcgttctccttgggaacggtggcgaagggaggtccggtgaagaaggtctccaaaaagaaaggactcgtcgacatcgcccgcgttttcagcgacgacgagtcttctgacgagactccgacatcgcctgctggccgcagtttggacctttcgactgctccccttgcttcgctcagcgttgctggggcaggcggtagccccgccgccggggcttccgcctccgccgaacagatcgtgtcggctgcggcgagggttttcgggagccctattcttgcggctcactgttcgacggagcgaaccgtgcgggcccgttttgacggttttaagagccgtcttcgggccaaggatgatgaaataagccgcaagaacttggaggtggaggccctggcccacaccctcaaggaggcgaaagctgaagtcaaacgccttcagtccgaattggataaggggaaagaggccaggggcgaggttgatcgcctcaaggccgaactggagaaggagaaggcccattcggcggtgctcatcgattactacaaccttattgagccgaagatggaggctcttcgccagaaggctagcagggccgaagcgagcgccgcggaggagtcgcagcggttttcgcgggagatggcgaagaccacctaa

SEQ ID NO: 44356 - DNA, 148 bp, Oryza sativa
  Clone ID: PAT_MRT4530_47424C.1
agggaatagcctgggctatccaacatcagaatggagcggtggcttgctttgagcactctaatttcttcaaagtaacggcgccgagcggcacgatcccggccagttaaggccaggagcgcatcgccggccgcaagggtcgagcaggtcg

SEQ ID NO: 44357 - DNA, 2742 bp, Oryza sativa
  Clone ID: PAT_MRT4530_47425C.1
atggctcctcgcaagccaaaccctgcttcggcgaaagggccagatcccggccgagtcgatgacgacagcaccgcctttttgggggtctctcttgtggacgacgtcgagctggcgaagttggtggagcttccgcagttgagcccgtcggcgctagttcggatctccatctttgactgggcgtgctgcacttccgggtttcagcccagcgccgagctctttggcgccatattcttcgccaccgtgaactcgaagacggtgattaccccagctgggacgaggatgaccgtgttcgggagtgtgaatttcaacgttcgccccgagcggtccgatctctggccggtgaacgctgccatgtcgaagtgggaccgccattggatggcgaggtggttctatcacaccatccccttcgaggctggttctgaatcagcgaaaaccctccggtgccggcgtagggcgattgcgccgaaccggaaacccaagatcgctgtggacggcgctatggaggcgcggttcattctgctgcgcaaggtttgctcccgccttagctgccgtgacttggtggaggagttctgtatgcttcgcatctttcccctctcccagtcatggaaagtcacagtcgagcaatgcgaagaggctaacggtttgccgaacttggttcttcctgaggggatgaacatgctaaccctcgaccaaactgaagccgaagcccgcaagatgatcggcgatgtgtctgttgtcgagttcagccaattgctgacacggcaggcagctggtctggcgaaccgggtttataatggcgaactgcctccccgggcgaatccccacaagactgatgacgaaacaggaccctcgcggaaacggatacgcggtcagataaagcttgcccccaggaagcgaagggttcctgcttcgtcggactccgacgccgacgacgaggatgatgccgaagaacttgacggcgaggaggaaggagaggaagaagaggaggtggaggctgtggctgataaggccgcgaacgaggcgatcgatgatcgcgtcgacacccctggctacactcctaccccaagtccaggtcacaacgagactggagtggagtcgaacagctccccccttcgacgaaaggatttggaaggggcgaaggccctagttgcgttctcgtcgggcaaggcggcgaaaggaggtctggtcaagaagatctcaaaaaagaaggggctcgtcgacattgctcgcattttcagcgacgacgattcttctgacgagactccgacttcacctgctggtcgcagtttggacctttcgaccgctccccttgctccgctcggcgtcgctggggcaggcggtagcgccgccaccggggcttccacctccgccgaacggatcgtgtcggctgcggcgagggtttttgggagccctgtgcgcgagccagctatttcgccgctggtcaaggcgaaggggaagtgtgcggccgccgaagcatctgcctcggagtattcccttgcggcgccccacttcgcccctggtgacttcgagacctgggcggaccttattccctttgtggagggagtaagcaatcttgtcttgcctgccggcaccccgagcctgttcaccgaacttaacgagttcgacgaggggtgttccaccattaaaagtttggcggttcggatttttgcggctcactgttcgacggagcgaaccgtgcgggcccgttttgatggttttaagaaccgtcttcgggccaaggatgatgaaataagccgcaagaacttggaggtggagtccttggcccacaccctcaaggaggcgaaaactgaggtcaaacgccttcagtccgaattggacaaggggaaagaggcctgggccgaggttgatcgcctcaaggccgaactggagaaggagaaggcccattcggcggtactcatcgattactacaaccttactgagctgaagatggaggctcttcgccagaaggctagcagggccgaggcgagcgccgcggaggagtcgcagcagttttcgcgggagatggcgaagaccaccgaatccgtgagaacggcttgccaaacgctccgcctcgcccttaccgacatgggtgcgaaggtgcggggggtccctgccgagggtgcctcagccttcgacttctccgagtggacccagcaggctggcggatcggtttcggactgtgccaccgcgtacggcgattgctgtgtgtgcgtatcggcggcctttaccttaggccttttgcaacagttcggctgcgagcacgtcgccgagttccctacctatgcgaagggggactgggagattagcgcgcaggacatttcgccagctcttcgcgcgtggagaaaacagttctggcagaaggatggccagtccgctgccaaagcgcgccttctggagcaactggcgaaggcagaggcggcggacctttgtgaagaggaaggcgcggcggccggagggggtggaggcgatgcccaggaccacccagagggggttcgccgaaaatcatgcattcggcccccttctgggagctggcgaagtcaaaacgagaaatttgtggcattgaagggtctgccgaaggtgcgatgtccatttcggcctgtttatcgcaaaatggagataaacggtcgcagctataaagttttcaaggttgccaactggctgcgggcgcaccccgggcaaaccttagaagattacgatcatgttcattcaagacgtttggaggatatggctcgcttttggtga

SEQ ID NO: 44358 - DNA, 2336 bp, Oryza sativa
  Clone ID: PAT_MRT4530_47426C.1
aaacctttcgatcatctcttcgacttcgtcggagtcggagtccgagtccaccgcctcgccggagatggagcacgcctcctcgccgcgcgcccatggcgtggtggtgatcgcggtcgccccggaccacgacgacgacagcggcaagaaggggtggcgtctcgccgccgccgccgcccccgccttcggggacgaggcggggttcggggtggaggaagaggaggaggagggggaggaggaggaggaggaggtgaggtggagggagcggcgggtggcgtcgctgtggcgcgtggccggggcgctgctggtggtcgcggcgctcgcggtggcggggcactactgcctgtaccacgacccggcggcgttctcgcgggaggaggggaggtcgtcgttcttgctgccgctgtacccgaagtccagcgggggcggcgcggcgggggagtcggccggtagcgtcaagccggacggcgccggcgcggaggcgagggagaattcgtcggcgctgctcccgatcagaggcaatgtgttccccgacgggcaatattacacttctatgtacattgggaatcctccaagaccttattttcttgatgttgataccggaagcgacttgacatggatacagtgtgatgcaccctgcacaaactgtgcaaagggacctcatcctctgtataagcctgagaaaccaaatgtggttcctccgagagattcatattgtcaagaactgcagggcaaccagaactatggtgacactagcaagcaatgtgactatgagatcacttatgccgatcggagctcctctatgggaatccttgcaagggacaacatgcaactgatcactgcagacggtgaaagggaaaatttggacttcgtatttgggtgtggatatgatcagcaaggaaatcttttgtcgtcgccagcaaacactgatgggatcctgggcttgagcaatgcagcaataagccttcctacccagctagccagccaagggataatttccaatgtttttggccattgcatcgcggcagatcccagcaatggtggatatatgtttcttggtgacgattacgttcctagatggggaatgacatggatgcctatcagaaatggtccagagaacctatacagcacagaagtccagaaagtgaactatggagatcagcagcttaatgtgcgacgaaaggcagggaagttaactcaagtgatatttgacagtgggagctcatatacgtatttaccacacgacgactacacaaacctgattgcttcacttaaaagtctctctccaagccttttacaagatgagtcggatcgaacactaccgttctgcatgaaacccaattttccagtgaggtctatggatgatgtgaaacacctgttcaaacccttgagtctggtattcaaaaaaagattgttcatcttgccaaggacattcgttatcccccctgaggactacttaatcatcagtgataagaacaatatctgcctaggagtgttggatggaacagagattggtcatgactcagcgatagtaatcggagatgtttcccttcgaggaaagctagttgtatataacaatgatgagaagcagataggatgggttcagtcagactgtgccaagccacagaaacaaagtggatttcctttcctctttaaaagagtgctgcaaaatcaacttttgtaaatgtcacatagaaattgaaatttaccaccagctcgactgaccatgctttacttttggacgtgcaaattctacgttcaaagctgccataatcaatatcagtgaaagtaattaaacaggacatagggtaaaaagaagatgtaagtagagatagccagtaagtatgttgtacttagtaatttgtctcttctgtatacacaaagaagcagaattatgtatatgtattttgtagaatatatctcaaccacctgtaaagagtatatctcatccacttgtaagactaagtggtgaagcatatatcagtgaagccatggcatttctcgttcaaaaaaaaaaaaaaaaaaaaaaaaaaaaaaaaaaaaaaaaaaaaaaaaaaaaaaaaaaaaaaaaaaaaaaaaaaaaaaaaaaaaaaaaaaaaaaaaaaaaaaaaaaaaaaaaaaaaaaaggggggggccgttttaggggacccaagtttactaccccgggcttgcaaggtaaaagtttttttttggggccccctaaattaaattcacgggccgcggtttaacaacgtcggaccgggaaaaacccgggggttcccaaattaaatcgctttgaagaaaatccccttttgcccagttgggtaattaccaaaaaggcccgcccctatcgcctttcc

SEQ ID NO: 44359 - DNA, 2393 bp, Oryza sativa
  Clone ID: PAT_MRT4530_47427C.1
cctcatcccgagcctccccatggtcgtatcacccctccccgccgtcgcccttctctttcccccgcgccggccgcctccaaccgcctgtgcggccgcgcgtgagcgtcggtcggccgtgccgtcgcttccctcggctctgtgacgccgccctcttctccggcctcacctcctcctcgcccgaagctcgccagagcggtctccttgtcggtgtccagtaccttcctgcctccggccggctactgttcctcatcggtgcggcagccgtcgtcgtcatctccttccccggctccacgggccccttctgccatccccgtgcgccgtcggccgtgccaccaccacctccggcatcgcagcggcgagccagcgacgtcgtcttcggcatcgcctcctctccatcctggtcatcgcagacgtcccttgggtcggccgctcctcctcgccggctcctcgtctcgttgtgccgccaacatctctgtctggtgttgggaaagttgcgggaacatcaattgtatgccaagcttagcaagtgtgagttctggttgtccaaagtcaaattcttagggcatgtgatatctgctaaaggagttgctgtggaccccgaaacagtgaccgccgtcactgattggaagcaacccaagacagttactcaggttcgcagctttttgggtttggcaagatactaccggaggttcatcgagaacttctccaaaatcgctcgacccatgacacagttgttgaagaaagaagaaaaatttgtgtggagcccgcaatgcgagaaggcgttccaaactctcaaggaaaagctggtttcctcgccagttttaatcttaccggatactcgcaaggacttcatggtgtattgtgacgcttcgcgccaaggattggggtgcgtgctcatgcaggaaggtcatgtggtagcctatgcctcacgccagctacggcctcatgaaggcaactaccctacccatgatttggagttggccgctgtggttcatgctctaaaaatctggcggcattatctcattgggaatcgctgcgaaatatataccgatcataagagtttgaaatacatcttcacccagtcggatctgaatcttcggcagagaagatggttagagctcatcaaggattatgatgtgggaatccactatcaccctggtaaggccaacgtggtcgcagacgcgctgagtcggaaaagccgttgcaacactcttggcgtccgtggcattccaccagaacttcatcaacagatggaagccctgaacctaagcatagttgatcgtggattcttggctacgctggaagccaagcctaccttgctcgatcaaatccacgaggctcagaagaatgatccagatatgcatgggatcctcaagaatatgaaacaagagcaccaacgaccggccggacttctccaacctctccaagtaccagaatggaaatgggatgaaattgggatggatttcatcaccggacttccaaaaacccagggcggttatgattctatatgggtagttgtggaccgacaaaccaaggtagctcggtttattcctgtgaagaccacctatggagggaacaaactagctgaactctacttcgctaggatcgtgagtctccatggcgttcctaagaaaattgtatctgataggggaagccagttcacctatcatttctggaagaagctccaagaagagttgggtacccgcttaaatttcagcaccgcgtatcacccgcagacagatggacagaccgggcgtctaaatcagatcctagaagatatgcttcgcgcttgtgtcctagattttgggaagacatgggataagagtctcccctacgccgagttctcctacaataacagctatcaagccagcatacagatggcaccgtacgaagcgttgtatggccgcaaatgccggacaccactattgtgggaccaagttggggaaagccaagtgttcgggactgatatcctgagagaagctgaagctaaagtcagaatcattcgggataatctaaaggtggcacagtctcggcagaaaagttatgcagataaccgtcgccgtgatctggaattcgcagtggatgattttgtgtaccttcgggtcacgccattgcgaggtgtgcacaggtttcagacaaaagggaagctcgcacctcggtatgtgggtccctttcgtatcactgctcgacgcggagaagtcgcttaccagctggagctgcccgcctccttgggcaacgtgcatgatgtgttccatgtgtcgcaactcaagaaatgtcttcgagtgccatccgagcaggccgactcagagcaaatcgaagttcgcgaagatttgacgtatgtggagaagccagtgaaaatcctggacaccatggagcgcaggaccaggaactgg

SEQ ID NO: 44360 - DNA, 2502 bp, Oryza sativa
  Clone ID: PAT_MRT4530_47428C.1
atggcccctcgcaagccaaaccctgcttcagcgaaagggctggatcccggccgagtcgatgatgacagcaccgcctttttgggggtctctcttgtggacgacgttgagctggcgaagctggtcagctctggggcgttggtcgcggggcaagctttcgccccagggaaggccgtggtgccaaagcctatcgacaaccggacggtggtgttcgccgccttttttgaggtggggctacggtttccgtgcaacgtgttgttgccggagatccttcgccttttccagcgccgagctcttcggcgccatattcatcgccaccgtgaactcgaagacggtgattaccccggctggaacgaagaagacggtgttcgccccgagcggtccgatctctggccggtgaacgctgccatgtcgaggtggttctatcacaccatccctttcgcggctggttctgactcggcaaaagccctccggtgccggcgtagggcgattgcgccgaaccgaaaacccaagatcgccgtggacggcgctatggaggcgcggttcgtcctgttgtgcaagtcgtggcaagtcacgatcgagcaatgggaagaagctgacggtttgccgaacttggttcttcctgaggggacgaacacggctgggcgggcgaaccgggtttacaacggcgaactgcctccctgggcgaatccccaaaaagccgatgacgatgcgggcccttcgcgaaagcggatgcgtggacaagtgaagcttgcccccaggaagcgaagggttcctgcttcgtctgactccgacgccgatgacgaggatgatgccgaagaacgtgacggcaaggaggaaggagaggaagaggaggaggtggaggctgtggctgataaggccgcgaacgaggcgaccgaagaccgcgtcgacacccccggctacactcctaccccaagtccagatcacaacgagactggggtggagtcgaacagctcccctcttcgccgaaaggatttggaaggggcgaaggccttagttgcgttctcgtcgggcaaggcggcgaaaggaggtctggtcaagaagatcttaaaaaagaagggattcctcgacatcgctcgcgttttcagcgacgacgagtcttctgacgagactccgacctcacctgctggccgcagtttggacctttcggctgctccccttgctccgctcggcgttgctggggcaggcggtagcgccgccgccggggcttccgcctccgccgaacggatcttgtcggctgcggcgagggttttcgggagccctgtgcgcgagccagccatttcgccgctggccaaggcgaaggggaagtgtgcggccgccgaagcatttgcctcggagtattcccttgcggcgccccacttcgcccctggtgacttcgagacccggccggaccttattccctttgtggagggaattcttgcggctcactgttcgaaagagcgaaccgtgcgggcccgttttgacggttttaagagccgtcttcgggccaaggatgatgaaataagccgcaagaacctggaggtggagtccctggtccgcaccctcaagaaggcgaaaactgagccgaagatggagtctcttcgccagaaggctagcagggccgaagcgagtgccgcggaggagtcgcagcggttttcgcaggagatggcgaagaccaccgaatctgcgagaacagcttgccaaacactccgcctcgcccttaccgacatgggcgcgaaggtgcggggggtccctatcgaggatgcctcagccttcgacttctccgagtggacccagcaggctggcggattggtttcggactgcgccaccgcgtacggcgcgattgctgtgcaccagttcggctgcgagcacgtcgccgagttccctacctacgcgaagtgggactgggagattagtgcgcagaatatttcgcccgctcttcgcgcgtggcgaaaacaattctggcagaaagacggccggtccgctgccaaggcgcgccttctggagcaactggcgaaggcggaggcggcagatcagggcgaaggagaggacgcggtgggcgaagagggggttcgccgaaagtcgttcatccggccccctttcgggagctggcgaagtcaaaatgagaaatttgtggcagtgaagggtctgccgaaggtgcgatgtccatttcggcctgtttatcgcgaaatggagataaacggtcgcagttataaggttttcaaggttgccaactggctgcgggcgcaccccgggcgaaccttagaagattacgatcttgttcattcaaaacgtttggaggatatggctcgcttttggcgaaaccatcagaagactaatcgtcagggaacgaactttcagcgtcgttacagtttagtttgtgttgcaccccccactcctcttaaggttgtgtacgatattagtagtgatgacgaacctagttcgccttatcattccttagagagggatagtgattatggggacgaagatgtaatttacttgtaa

SEQ ID NO: 44361 - DNA, 174 bp, Oryza sativa
  Clone ID: PAT_MRT4530_47429C.1
atcatgatttgcaccggtcagcttttggtgatgagaactcgacaatgtgctaagaaaacattgtaggttggtgtcggcaaagtgtgctgtattatgaattgaagatcttaacatgttgacataacatatgaactgatattagctttattagtgtcttgtacctggatatagtaa

SEQ ID NO: 44362 - DNA, 430 bp, Oryza sativa
  Clone ID: PAT_MRT4530_4742C.1
ggtcgaaaataatactgtttttaatcttatttctagtgaaacagtctcagggtggttagggatttccataccgttttcaccctaattacctctctgttatcaactggaaccgaagaactccgaatacattttgctagggatttgaattccaaactggttccatttagaactcggctagtttaccgaaccgtttctcgattcgcataccggctcgataagtccgataactgaccaaattaccgccacatttatcatccctagctaacagatgactctgtaggagaacatggccatcaccgaaagcagtaaagggtaaaaaagagaagaggagggagagtacatgcagctgctgcaggctggagcctgcacgtacgctgttgaagaagccagacaccgcgaagtgagcgagccactgaaaaatctgtgtttc

SEQ ID NO: 44363 - DNA, 2646 bp, Oryza sativa
  Clone ID: PAT_MRT4530_47430C.1
atggccgcgaatgaactggccgaagtcaagaagcagttggaagagctgaaggaaaaggggtacatacggccgagcacttccccccagggtgctcccgtgatttttgtggaaaagaaggacaagacaaagaggatgtgtgttgactacagagccctcaatgaagtcactatcaaaaacaagtaccctcttccccggatcgatgatctgttcgatcagcttaaaggtgccactgtcttttctaaaatcgatcttcgctccggatatcaccaattgcgtatccgtgaagaagatatcccgaagaccgcattcaccacgcgttatggactgtatgaattcacggtgatgtcgttcggtctgaccaatgctcctgccttcttcatgaacttaatgaacaaagtgttcatggaatacttggataagtttgttgtggtcttcatcgacgacattctggtgtactcacaatcagaggaagaccatcagcagcatctccgtctagtgttgggaaagctgcgggaacatcaattgtatgccaagcttagaaagtgtgagttctgtttgtctgaagtcaaattcttagggcacgtgatatctgctaaaggagttgctgtggatcccaaaacagtgaccgccgtcactgattggaagcaacccaagacagttactcaggttcgcagctttttgggtttggcaggatactaccggaggttcatcgagaacttctccaaaatcgctcaacccatgacacagttgttgaagaaagaagaaaaatttgtgtggagcccgcaatgcgagaaggcgttccaaactctcaaagagaagctggtttcctcgccagttttaatcttaccggatactcgcaaggacttcctggtgtactgtgacgcttcgcgccaaggattggggcgcgtgctcatgcaggaagccgctgtggttcatgctctaaagatctggcggcactatctcattgggaatcgctgtgaaatatataccgatcataagagtttgaaatacatcttcactcagtcggatctgaatcttcggcagagaagatggttagaactcatcaaggattatgatgtgagaattcactatcatcctggcaaggccaacgtggtcgccgaccctctaagtcgaaaaagccattgcaacactcttggcgtccgtggcattccaccggaacttaatcaacagatggaagccctgaacctaagcatagttggtcgtggattcttggctacgctggaagccaagcctaccttgctcgatcaaatccgcgaggctcagaagaatgatccggatatgtatggactcctcaagaatatgaaacagggtaaagccgctggtttcacagaggatgaacacggaaccctatggaacggaaatagggtatgcgttccagacgactgggaacttaaacagttgatacttcaggaagctcacgaaagctcctattccatccatcctggcagcacgaagatatacttggacttgaaagagaaatattggtggattagtatgaagcgggaaattgcagagttcgtggccctttgtgatgtgtgccagcatgtcaaggcagagcaccaacgaccggccagacttctccaacctctccaagtaccagaatggaaatgggatgaaattgggatggatttcatcaccggacttccaaaaacccaaggcggatatgattctatatgggtagtcgtggaccgactaaccaaggtagctcggtttattcctgtgaagaccacctatggagggaacaaactagccgaactttacttcgctaggatcaaactccaagaagagttgggtacccgattaaatttcagcaccgcgtatcacccacagacagatgggcagaccgagcgtctgaaccagatcctcgaagatatacttcgcgcatgtgtcctaaattttgggaagacctgggataagagtctcccctatgccgagttctcctacaataacagctaccaagccagcatacaaatggcaccctatgaagcgttgtatggccgcaaatgccagacaccgctattgtgggaccaagttggggaaagccaagtgttcgggaccgatatcctgagagaagctgaagttaaagtcagaaccattcaggagaatctaaaggtggcacagtctcggcagaaaagttatgcagacaaccgacgccgcaacctagaattcgcagtggacaattttgtgtaccttcgggtcacgccattgcgaggtgtacacaggttccagacgaaagggaagcttgcacctcggttcgtgggtcctttccgcatcattgctcgacgcggagaagttgcttaccagttggagctgcccgcctccttgggcaacgtgcatgatgtgttccatttgtcgcaactcaagaaatgtcttcgagtgccgtccgagcaggccgactcagagcagattgaagttcgcgaagacttgacctacgtagagagacctgtgaaaatcctggacaccatggagcgcaggaccaggaatcgggtaatccgtttttacaaggtccaatggagcaaccacgccgaggaagaagctacttgggagcgtgaagacgagctgaaggcagcccatcccgatctcttcgccagttcttctgaatctcggggtcgagattccgtttaa

SEQ ID NO: 44364 - DNA, 458 bp, Oryza sativa
  Clone ID: PAT_MRT4530_47431C.1
aaaagccggatcaacacacgtcatacatattggaaggataaacggcccggaaacatattttggatatttttaaataaaaaaaatgcaataacgactagggaccccataagccaggcctggaggccttctgttcccttttttaaccggaaaactctttttttatgttttgcttcaaaggccgagatctgggaacccatctgaaattgtaacttcatttggccttcttaaactatgggtctggctacaaaattggccccttggtactgcgccttgatagggttgggagcccttggggggcccaatggaggccagaccttctcaaaggccttttgaattttgggatgccattcttggaaaacccaaaacaaaggggggaactggtccttttcctccagggggaaaccaaaaaacctttttccgggggccttccattcccatgcagagctttttttaggggg

SEQ ID NO: 44365 - DNA, 303 bp, Oryza sativa
  Clone ID: PAT_MRT4530_47432C.1
gctttcacgccttcttccacgtttttaccgggtagagtttattaaaattgaggtaaccgaagtcgaatacctttgtttcttcggcagactcaattgggacactcacgaccgatcactcgaggccgacttgcacaactacggcctgatcctcgactccaagatcatcaccgacagggagaccgggaggccacaagggcgtgagcttataaattattactccgagctgatgatgcgcgacaccatctttggcctcaacggattggagcttaacggccggtactattaccgacatttacgcccatg

SEQ ID NO: 44366 - DNA, 4218 bp, Oryza sativa
  Clone ID: PAT_MRT4530_47433C.1
atggttatgccgctctctctgtttgctggttctgtgtggggttttcagatggtgacgaccaggagaaatgctgccaccagtgatggcaaccaacttgaaggcagcaaccacaacaaccatggcagcccacctccacctcctccaccgcctccaccaccaccaccagacaccaacgccattctcacccaaatcctcacccagcaggccaacatgatggctgctttcctccaccacatccaaaatccgccacaacataatgctccaccaccacccccacaacactctaaactcgccgagttcctacgcatccgtccacctaccttctctagctccaacaaccccgtggatgtgttggattggttgcatgccgtggggaaaaagctagacactgtgcagtgcagcgatgaggagaaagtcgtcttcgccgcccaccaactgcagggacccgcatctctatggtgggatcatttccaggctacgcagccagaggggcagcctattacttgggcccgcttcaccgccgccttccggaggacccatgtgcccgccggagtcatggcccttaagaaaagggagttccgagagttgaagcaaggcaaccgctccgtgatggagtatttgcatgagtttaacaacttggcccggtacgccccggaggatgtgcgggaagatgaggagaagcaagagaagttcttggcaggaatggacccggagctgtctgtccgtctagtctccggtgactatccggatttccaacgtctggtggacaaaagcatccgcttggaagccaagcacaaggaactggagtcgcacaagcgtcgcttggcgaatttccgcaaccaacagggtgctaaccaaaggatccgctacaccaatccctatccagggggatcttcctcgcagcagcagcaacctcgctccgcgcctcgacctcaattcgtggtgcgcgtcccacagccgcagcaacagcagagccagcaagggacccatgcgccccgtcctcctacgccagccgcgcagtctggtcaaggccgcagggacgttcaaggtccgcagcgtctgtgcttcaactgcttcgagcccgggcactttgcggataaatgcccgaagtcgaggcgccagcaaggccaagcgcctccctgctccaacaacggtggtaaggatgtcattcggggtcgtgtgaaccacgtgacggccgaggacgtgctgacaactccagacgtcatcgttggtacgttcctcatccattccatccctgctaccattttgttcgactctggagcttcccactcgtttatatctgtgccattcgtggggagaaatcagttgggggtagaaaggcttaggaaccctctactcatcaccacccctggaggggttatgacagcaaagtattatagtcctgccgtccctatagaaattcaggggattccttttccctcggatctgattcttctagacaccaagaacttggatgtgatccttgggatgaattggttggctcaattccaaggagtagtggattgtgcaagacgcactgtcactctgtaccgagggccggaacaaccggttgttttctttgcacctccaacctctgtcagtagttcagaacttcatcagataggactgtcagaaatccccattgtcagagagttcggagacgtgtttccggaagaactacccggtatgccgcccaagcgagagattgagttccggatagatcttgctccaggaaccactcctctgtacaagcgaccctaccgtatggcagcaaatgaactggccgaagttaagaaacagttggaagagttgaaagaaaagggagctctcaatgaagtcaccatcaaaaacaagtaccctcttccccggatcgatgatctgttcgatcagcttaaaggtgccacggtattctccaagattgatcttcgttctggatatcaccagttgcgcatccgtgaagaagatattccgaagaccgcattcaccacgcgatacggactgtatgaattcacggtgatgtcgttcggtttaaccaatgctcctgccttcttcatgaacttaatgaacaaagtgttcatggaatacttggataagtttgttgtggttttcattgatgacattctggtatactcacaatcagaggaagaccatcagcaccatctccgtctggtgttgggaaagttgcggaaacatcaattgtatgccaaacttagcaagtatgagttctggttgtccgaagtcaaattcttagggcacgtgatatccgctaaaggagttgctgtggatcccgaaacagtgaccgccgtcaccgattggaagcaacccaagacagtcactcaaattcgcagtttcttaggtttggcaggatactaccggaggttcatcgagaacttctccaaaatcgctcgacccatgacacagttgttgaagaaagaggagaaatttgtgtggagtccgcaatgcgagaaggcgttcaaaactctcaaagaaaagctggtttcctcactagtgttaatcttgccggatactcgcaaggacttcatgaggagatggttagaactcatcaaggattatgatgtgggaattcactatcatcctggtaaggccaacgtggtcgccgatgctcaaagtcgaaaaagccattgcaacactcttaacgtccgtggcattccacccgaacttaatcaacagatggaagccctgaatctaagcatagtgggtcgcggattcttggctgcgttggaagccaagcccaccttgctcgatcaaatccgcgaggctcagaagaacgatccggacatgcatggactcctcaagaatatgaaacaaggtaaagccgctggtttcacagaggatgaacacggaaccctatggaacggaaatcggagttcgtggccctttgtgatgtgtgccagcgtgtcaaggcagagcaccaacgaccggccggacttctccaacctctccaagtaccagaatggaaatggaatgaaattgggatggatttcatcaccggacttccaaaaacccaaggtggatatgattctatatggcaccgcgtatcacccgcagacagatggacagaccgagcgtctaaatcagatcctagaagatatgcttcgcgcatgtgtcctagatttcgggaatacctgggataagagtctcccctatgccgagttctcctacaataacagctaccaagccagcatacaaatggcaccttatgaagcgttgtatgggcgcaaatgccggacaccgctattgtgggaccaagttggggaaagccaagtgttcgggaccgatatcctgagagaagctgaagctaaagtcagaaccattcgggataatctaaaggtggcccagtctcggcagaagagttatgcagacaaccgacgccgtgacctggaattcgcagtggatgactttgtgtatcttcgggtcacgcccttgcgaggtgtacacaggtttcagacaaaggggaagctcgcacctcggtttgtgggtcctttccgtatcattgctcggcgcggagaagtcgcttaccagttggagctgcccgcctccttgggcaacgtgcatgatgtgttccatgtgtcgcaactcaagaaatgtcttcgagtgccatccgagcaggccgactcagagcaaattgaagttcgcgaagacttgacctacgtggagaggccagtgaaaatcctggacaccatggagcgaaggaccaggaaccggtccgccgccgtcgtcgccccggaccttctcccgcttcggcgccgcctccttcggtttcgccgcaacctcgccgacctcgtccacccctccgtttcgctcgccgaccgccggaacgccgccgtccccgtctacccgagccgcgccgccgccttcctccgctccggtcgccgttcccgttgtcgccgtcgacccggggtgagctgtggaccgccgattcgtttcccccttcccttccctctctcgggcgccgctccgccgcgccggtggtcgccggcggcgaccatcgtggcgcgggtgcgccgcctcccgtcggctgtgccggcgtggccgccttcgggcgcgccccgcggctgccatgtggggcccggccgtcagccgcccgcgccctcggacgctgcagcttcggaagatccgctcttcgtgaaggttgaagcgacgtttgggaaagtgagcaaggcaagtcacatcatccttgaacatattgaatcctag

SEQ ID NO: 44367 - DNA, 423 bp, Oryza sativa
  Clone ID: PAT_MRT4530_47434C.1
atgacggttgcttttaaaggtaacatcaagggggagattgttggatcatgtgatgatcttggtgatgaacaattgtcaaagaccgggctaaggcggccggtcagaccggaggtgtcagaccgaccggcacgtggtctgacaggcagagttgacagagcttgggagaagttgaggtctagacggtcgaggatatcatgcgggatgctcaggctagagaacaatgcatgtagagaccgaagtactacgggcggtctaaccggcgagaggcgacggtccaaccggcgaatatacaccggtcagactggcggcgactgggcagtcagaccggggagctcgagcggtcagaccggcggcggcgttttgacagcagcggcgatggcggcgatctacatcgaaaagagggtaactttaatttccgcttaa

SEQ ID NO: 44368 - DNA, 5029 bp, Oryza sativa
  Clone ID: PAT_MRT4530_47435C.1
ttaaacggaatctcgaccccgagattcggaagaactggcgaagagatcgggatgggctgccttcagctcttcttcacgctcccaagtagcttcttcctcggcatggttgctccattggaccttgcaaaaacggattacccgattcctggtcctgcgctccatggtgtccaggattttcactggtctctccacgtaggtcaagtcttcgcgaacttcaatctgctctgagtcagcctgctcggacggcactcgaagacatttcttgagttgcgacacatggaacacatcatgcacgttgcccaaggaagcaggcagctccaattggtaagctacttctccgcgtcgagcagtgatgcggaaaggacccacgaatcgaggtgcgagcttcccttttgtctgaaacctgtgtacccctcgcaatggcgttacccggagatacacaaagtcatccactgcgaattccaggtcatggcgtcggttgtctgcataactcttctgccgagactgtgccacctttaggttttcccgaatggttctgaccgtagcttcggcttctctcaggatatcggtcccgaacacttggctttccccaacttggtcccacaatagcggtgtccgacatttgcgtccatacaacgcttcatagggtgccatttgtatgctggcttggtagctgttattgtaggagaactcggcataggggagactcttatcccaggttttcccgaaatctaggacacatgcgtgaagcatatcctcgaggatctggtttagacgctcggtttgaccatctgtctgcggatgatacgcggtgctgaaatttaatcgggtacccaactcttcttggagtttcttccaaaagtgagaggtgaactgacttccccgatcagatacgattttcttgggaacgccacgcagacttacgatcctggcgaaatagagttcagctagtttgtttcctccatatgtggtctttacaggaataaagcgagctactttggttagtcggtccacaactacccatatagaatcatatccaccttgggtttttggaagtccagtgataaaatccatcccaatttcatcccatttccattctggtatttggagaggttggagaagtccggccggtcgttgatgctctgctttgacacgctggcacacatcacaaagggccacgaactctgcaatttcccgcttcatactaacccaccagtatttctccttcaagtctaagtacatcctcgtactgccagggtggatggaataaggactttcgtgagcttcccgatttccgttccatagggtgccgtgttcatcctctgtgaaaccagcggctttaccatgtttcatattcttgaggagtccacgcatgtccggatcattcttctgagcctcgcggatttgatcgagcaaggtaggcttggcttccaacgcagccaagaatccgcgaccaactatgcttaggttcagggcttccatctgttgattaagttcgggtggaatgccacggacgttaagagtgttgcaatggctttttcgacttagagcgtcggcgaccacattggccttaccgggatgatagtggattcccacatcataatccttgatgagctctaaccatcttctcaccgcggctaactccaaatcatgggtagggtagttgccttcatgaggccgtaactggcgggaggcataggctaccacatgaccttcctgcatgagcacgcaccccagtccttggcgcgaagcgtcacaatacaccatgaagtctttgtgagtatccggcaagattaacactggcgaggaaaccagcttttctttgagtgttttgaacgccttctcgcattgcgggctccacacaaatttctcttctttcttcaacaactgtgtcataggtcgagcgattttggagaagttctcgatgaacctccggtagtatcctgccaaacctaagaaactgcgaatttgagtgactgtcttgggttgcttccaatcggtgacggcggtcactgtttcggggtccacagcgactcctttagcagatatcatgtgccctaagaatttgacttcggacaaccagaactcacacttgctaagcttggcatacaattgatgttcccgcaactttcccaacaccagacagagatgttgttgatggtcttcctctgattgcgagtacactagaatgtcgtcgatgaagaccacaacaaacttatctaagtactccatgaacactttgttcatcaagttcatgaagaaagcaggagcattagtcagaccgaacgacatcaccgtgaattcatacagcccgtatcgcatggtgaatgcagtcttcgggatatcttcttcacggatgcgcaactggtgatatccggagcgaagatcaattttggagaataccgtggcacctttaagctgatcgaacagatcatcgatccggggaagagggtacttgtttttgatagtaacttcattgagagctctgtagtcgacacacatcctctttgtcttgtctttcttctccacaaaaattacgggagcaccccagggggaagtgctcggacgtatatacccctttcctttcaactcttccaactgtttcttaacttcggccagttcatttgctgccatacggtagggtcgcttgtacagaggagtggttcctggagcaagatctatccggaactcaatctctcgcttgggcggcataccgggtagttcttccggaaacacgtctccgaactctctgacgatggggatttctgacagtcctatctgatgaagttctgaactactgacagaggttgggggtgcaaagaaaacaaccggttgttctggccctcggtacagagtgacagtgcgtcttgcacaatccactactccttggaattgagccaaccaattcatcccaaggatcacatccaagttcttggtgtctagaagaatcagatccgagggaaacggaattccctgaatttctatgggaatggcagggctataatacttcgctgtcataacccctccaggggtggtgatgagcatagggttcctaagcctttctacacccaactgatttctccccacgaatgtcacagatataaacgagtgggaagctccagagtcgaacaaaatggtagcagggatggaatggatgaggagcgtaccaacgatgacgtctggagttgtcagcacatcctcggcagtcacgtggttcacatgaccccgagcgacgtccttaccaccgttgttggggcggggaggcgcttggccttgctggcgtcgtggcttcgggcatttttccgcaaagtgcccgggttcgaagcagttgaagcacagacgctgctgaccttgtacgtctctgtggccttgaccaggctgcacagctggcgcaggaggacggggtgcacggggcccttgctggccctgaggttgctgcggctggggaacgcgcaccacaaattgaggtcggggcgcggagcgaggttgctgctgttgctgctgcgaggaggatccccctagatagggattggtgtagcggaccctttggttagccccctgttgattgcggaaattcgccaagcgacgcttgtgcgactccaattctttgtgcttggcctccaagaggatgctcttgtccactagacgttggaaatccggatagtccccggacaccagacgtacggacagctcagagtccattcccgccaagaacttctcttgcttttcctcatcttcccgaacgtcctccggggcgtaccgggccaggttgttaaactcatgcaaatactccatcacggagcggttgccttgcttcaactcccggaattcccttttcttaagggccatgactccggcaggcacatgggttctccggaaagcggcggtgaaacgggcccaggtgataggctgcccctcgggctgcgtagcctggaagtggtcccaccatagagatgcgggcccctgcagctggtgggtggcaaagatgactttctcctcatcgttgcactgcacagtgtctaacttcttccccactgcatgcaaccaatccaaggcatccacggggttattggagctggagaaggtaggcgggcgaatgcgaaggaactcggcgagcttagagtgttgcgggggtggtggtggaggtggagcattatgctgtggtggattttggatgtggtggaggaaagcagccgtcatgttggcttgctgggcgaggatttgggtgaggatggcgttggtgtctggtggtggtggtggaggcggaggaggaggtggaggcaacacccacgggggaaatcaaggccgacaacaccatcaaattcattaaagggatattttgcagatatgaattgcctcaccgcatcataacagataacggttcccagttcatcagcgccgatttccaggattactgcactggactgggactcaagatctgcttcgcctcggtttctcaccctcagagcaacggacaagtcgagagagcaaacggcatagtactacacgggatcaagacccgtgtctacgacaagctcatgtcacatgacaagaagtgggtcgaagaactcccctcggtactctgggccgtgcgcaccacaccgataacgtccaacaaggagacacccttctttcttgtgtacggctcagaagccatgctccctaccgagctacaacaccagagtacacgagtacagaagtactccggcgaggatcagaaggaacagcaaaacgacgacgtgaacctactcgaggaacctcgagaacgagttgccgtcagggcagctagttaccaacaagcccttcgccggtatcacgagaagcgcatccgagcacgcatactttcgatcggcgactacgtcctccggcgagttcaaagccaagcagggcgaaacaactctcacccaaatgggaaggaccgtacacgatcacacaagtcttgtggccaggcgcattcaagattgcagacggtgatggtcgcgagttagaaaattcttggaacattgaccaattgcgtaaattctatgta

SEQ ID NO: 44369 - DNA, 678 bp, Oryza sativa
  Clone ID: PAT_MRT4530_47436C.1
gaggtatagctaggtgatcgatcgatcgtgatcatgggaatggaagacgacgccgccgggcgcggcacgacggtgccgttccttgtggcggtgcggtttgtggtggccttagcggtgggcgcggtcaccttcgcggtgatcgtcatggtgatcgccatggtcagtcgcccggaggagattcagctctccatcgaccggggctacatcactgtgtatgatgactatggctcggaagtattaccgacagcgacgacgtcgctggcggcgattttagtacggttcgtccaaagccgccccagcacagcacaactcgccgtctccctaaccgcaagctactccagccagcgcgggcataaagacaagatcatcaactgctcagacatcaccatcggcctagtggacatgacgctgtcaccggcgtcgtgggcatccggccagatgccggcgaagatcaacgataccatcgtctggttcaaactcaacaacggcttcacgttgctcaaggatacgtcgcacacggaggcgatgacggtgaccatcacaaacagcagccagatcatggagtacatagagcaccggctcaaacaagaggacgtcttccacgtgttggtcatgtgcgtgccttggacggagtccgggcacctgcccagggtcgccgggcgctatctccgctactga

SEQ ID NO: 44370 - DNA, 390 bp, Oryza sativa
  Clone ID: PAT_MRT4530_47437C.1
atgggcacagttagtggcggtcaaatagccgttatgactaatgcgccagcctggccgcccggcggcaaccgtctggattcctcgtcgggcccacaactcggcacgggaagtcgtgaggcgccacgtcggactgccctcggggggccaatgtccgacgcggtgccgggggctactgtcggagatatgggcccgggggtaggcaaagtgaggggaagttaccttcccatccagtcacgtggctctacagcctggccctccccccgcgcctcgcgagtcgcagaagtagccagggggcctcggggtgccacgtcacgcccctcgggctctcgcgctgcctcccccgaggccctcgtgtcacgtcccaaaacgaccctaaaatatatcctctaa

SEQ ID NO: 44371 - DNA, 2763 bp, Oryza sativa
  Clone ID: PAT_MRT4530_47438C.1
cctgaagctgatcaagatcaaacagcagaaaaacgtcgctaattgagaggaccgtccgcgtcgctccccgcgtgagcgaccgggcgggcgtcaaccctagcgccgccgccgctttccctctccctcccccaccccgccgctgccggagcggccgggcctcggctcagtgtgcaaggacggcggcggcggggcagtttgccgtggaacggcgggcccggtcctgcgcggggaggtcggtcggcgttcggtggtggctgcggcgacccgacggcgagtcactctagcgacggcggcggggtgggacgacgaagagcagcagctccttggagacggcgggaggaagttgaaggccggagacggaggggacggccagatccggccgtctcctttctggatctggaggtcgtcggggtgggggtgatggcggcggggtggtgaaggtgagaccggcgccagtgctcggaagaaggccggaggggaaggggcggccagcggtctgcgatggtgatggccggtggaggcggtgcgccggtgctagccggcgtaggtggagcccagtttgggcaagatgcatgtggccggcggagacaagcactgaaattgctagataaagatgaaagtttcactatcaaacacaatatggtggggttccgattacaggcagacgtgggggttggtcgggcggtcgctactatggctcgtcgtttggaaagccgtagggcacggtgaacaatagtgttgtcggtggcttgttcgccggcatgtcccatgatcagttggggctcctcccgttcctggagctcctcccctcctgttgaccggtctgctctcagattccggttgtggggagttccttggcgaggggcggcctcagcactgcatgtgcctagcttctcttgcgtctgcgaggtgtttggtttggtggagttggtgcatgaaatccctacgacgcaacctgtcgatggtgtttggggtggagtcggagctgcttggccgggtgtggcaagctgggcaacgataacccccttgccccttctttttggtagcttcgttggggtggctgtgctgttggcttcctggcgtgtctttgggtaggtgtgttggggggagtcggagctgcttgtaggtgacaagctcggcaacgataaccctctcccgctttccttggtagcgttgtggaagccaggggtgtcgtagttggcagggagagcgagccggggcgttttgtcctgctcgttcttaggatagaggcaacgatggcgacgcctgtgggcgccgttttccttgttgaaggcatcgttctttgctctacccgttttcttcgggtgaaaaccctgttccgattttcggacggacgttgcttgcgtttcgacgctctgtttcctccttggaggcttcgtcttgaagaccctgctctacgttgtctgtggtctgttcataggaagtcggagtttttggctttgatgagctatgttctcctccagttgtgccgtcgcaagttttttctttgttctccttgtgggttttgcccggtttcccctttaaaccgtgcttatgtaaggtttttgggcccggtttcccctcaaaacctgggtcaagtctcttcttctttaatgaaaacaggctctccctgacctcttctgaggtttttcctcaaaaaaaaaaaaaaatcttacgcctgtatgcttcaagattgtccaataaatagcagtgctgaaaaggaatgggaattagatcgacaaggttcttgaagaatacgagtgtgtgctggttgctgaaatcaccatgtaggatacgcttcactcgcagctcgtgcacgtcttcctcccggctcatcagcatcgcgaggagggatacgtaagagcagacagtgtcttcaccatccatgccagtagaggccatgccagtagaggccgagaaaatctcgagtgccatcatattgatgagccagcatgcattttggtcgtccatgacgagaggtgccatgaagagcttgccgaacaaggcacctttgctgatgctcatgtcattaaaccatgttttcttgttggctaccaggttgatgcccatttctgcaagctcgatggcgctgctagtctgtgatattgaagtaattccttcagggggttcgagggccatgcttccattaggcatgctcagccctgattggtagtaccgaaggaagccaaggagatgtgatggtgtgtagctttcatccaagacgaatgatcacttttctaaatctgtgtaggcatcaaaactggtgctttcttgagagatgaactctcccacgggaacagacctaaaggtcatgagggcatccagcaccacccatgggagctggttctctagcagaaagatgtccctctccatgctagcatcgttggagttgaaccaactttctaatgatggagcaatgtcgtcagttgagcaaatgatatactggagaaagaagcaaccatcatggaacataatagccgcaaagtcaccttcgcctatgcttgccaccgtgtcatcatccacatagcagcttcgggcttcggctacaaccaagaggattctctggtagacctcctcaaccgagtggcctgactccccgcagaagtagtaggcggccgcacgcttgacctcctctgcctccttgaggtggggtgcgccatggtggtaaggaccgatggctacagctcttgggacgaagtagcggtcatctgtgctaattaagcttcgaaaaattgaagggtacctgtggatcttggttttgat

SEQ ID NO: 44372 - DNA, 544 bp, Oryza sativa
  Clone ID: PAT_MRT4530_47439C.1
aaaaaaagcggggacccaaataaaaattaaaacccaccccaaaaagggacggaaaacccaacccccccgaatggaccaaaaaaccccgccaaaccaaacaaaaccgggggggatctcttctaaccaacccgacccaaactaaaaaaaagacaaaccccccccccccctcctttttattaagggccccgacaactaaaaacaacggatccggggaaaggggaaggggaaacaccacaaatttaggaaagcgggccgaagccgggaaaaacaaccggttgggggggccccccgccggggaaccccaccttctggagggcctggaaaacgcccaggccctgaagaacggggccaaaaaaaaggggtttcccgcccagccagtgggggggcagggggcaaaaaaaaaacgggaccccgtaagggggggccccggggttccccaggaacagaaggccggggctgccggccttaaacttaaacacctggggggaaaacttcccgcggaaaatggacccccctccggggccgtggccggggggaaagcccc

SEQ ID NO: 44373 - DNA, 393 bp, Oryza sativa
  Clone ID: PAT_MRT4530_4743C.1
tacaagcctactactggaaggttcaaggtgagtggctgtggataagatagtacctagagaaatagatgcacatgacggtgaggtggtgccgaaagaggatgacgcacgggatgaggatgatgaccacgatgatgacattgaagttctaatggccgagatcgacagaatcaataaagatggaggtgacgacaaccttgtaacggaacgccccccagaacgagaggtggactctatgacggaagctgaactgatgcggggaaaccccctgatcaagatgaacaacgccggatccttcaatggggagagaaggagggatgaatgatgcgtgttcaacaaccaggctcgttgggagaccaagacaccgtaacggtcatgaacgacactatgacaagt

SEQ ID NO: 44374 - DNA, 615 bp, Oryza sativa
  Clone ID: PAT_MRT4530_47440C.1
atgaggaggaaggtgcaccggtacgtgatattcaagatcgacgacaggagggaggagatcgtcgtcgagaagaccggcgcgccgtgggagagctacgacgacttcacggcctcgcttccggccgacgccgtctacgatctggatttcgtcagcgatgacaactgcaggaagagcaagatattcttcatctcctggtccccttccctttcctgcatccgagccaagaccatatacgctgtgtggaggaaccaattccggcatgagcttgacggaaaaacctcagaagaggtcagggagagcctgttttcattaaagaagaagagacttgacccaggttttgaggggaaaccgggcccaaaaaccttacataagcacggtttaaaggggaaaccgggcaaaacccacaaggagaacaaagaaaaaacttgcgacggcacaactggaggagaacatagctcatcaaagccaaaaactccgacttcctatgaacagaccacagacaacgtagagcagggtcttcaagacgaagcctccaaggaggaaacagagcgtcgaaacgcaagcaacgtccgtccgaaaatcggaacagggttttcacccgaagaaaacgggtag

SEQ ID NO: 44375 - DNA, 796 bp, Oryza sativa
  Clone ID: PAT_MRT4530_47441C.1
gtgatggccggtggaggcggtgcgccggtgctagccggcgtaggtggagcccagtttgggcaagatgcatgtggccggcggaggtaagcaagttggtgaccggcggaggtggttgttgccggcgaagagggtgtcgaggtggccggagaagttgctggcctgcagggaggttgtgcttgggttggtcgggcggtcgctactatggctcgttcgtttggaaagccgtagggcacggtgaacaatagtgttgtcggtggcttgttcgccggcatgtcccatgatcagttggggctcctcccgttcctggagctcctcccctcctgttgaccggtctgctctcagattccggttgtggggagttccttggcgaggggcgggttgctagctgggttggcagatttgcttggagttcgagagcctcagcactgcatgtgcctagcttctcttgcgtctgcgaggtgtttggtttggtggagttggtgcatgaaatccctacgacgcaacctgtcgatggtgtttggggtggagtcggagctgcttggccgggtgtggcaagctgggcaacgataacccccttgccccttctttttggtagcttcgttggggtggctgtgctgttggcttcctggcgtgtctttgggtaggtgtgttggggggagtcggagctgcttgtaagtgacaagctcggcaacgataaccctctcccgctttccttggtagcgttgtggaagccaggggtgtcgtagtttggcaaggagagcgagccggggcgttttgtcctgctcgttcttaggat

SEQ ID NO: 44376 - DNA, 1504 bp, Oryza sativa
  Clone ID: PAT_MRT4530_47442C.1
tattttgacaatttaacaatacaaactaatcatgtttaagccaatcatccacaggtacccttcaatttttcgaagcttaattagcacagatgaccgctacttcgtcccaagagctgtagccatcggtccttaccaccatggcgcaccccacctcaaggaggcagaggaggtcaagcgtgcggccgcctactacttctgcggggagtcaggccactcggttgaggaggtctaccagagaatcctcttggttgcagccgaagcccgaagctgctacgtggatgatgacacggtggcaagcataggcgaaggtgactttgcggctattatgttccatgatggttgcttcttgctccagtatatcatttgctcaactgacgacattgctccatcattggaaagttggttcaactccaacgatgctagcatggagagggacatctttctgctagagaaccagctcccatgggtggtgctggatgccctcatgacctttaggtctgttcccgtgggagagttcatctctcaaaaaagcgccagttttgatgcctacacagatttagaaaagagatcattcgtcttggatgaaagctacacaccatcacatctccttggcctccttcggtactaccaatcagggctgagcatgcctaatggaagcatggccctcgaaccccctgaaggaattacttcaatatcacagaatagcagcgccatcgagcttgcagaaataggcatcaacctggtagccaacaagaaaacatggtttaatgacatgagcatcagcaaaggtgccttgttcggcaagctcttcatggcacctctcgtcatggacgaccaaaatgcatgctggctcatcaatatgatggcactcgagatttgctcggcctctactggcatggatggtgaagacactgtctgctcttacgtatccctcctcgcgatgctgatgagccgggaggaagacgtgcacgagctgcgagtgaagcgtatcctacatggtgatttcagcaaccagcgcacactcgtattcttcaagaaccttgtcgatctaattcccattccttttcagcacagctatttattggacaatcttgaagcatacaggcgtaagaggtggatctcccaagagcagctccgacttcctatgaacagaccacagacaagcgtagggcagggtcttcaagacgaagcctccaaggaggaagatagcgtcgaaacacaaacaacgtccgtccgaaaatcggagcaaggttttcacccgaagaaatgagtagagcacagaaacgatgccttcaagaaggaaaatggcgcccacaggcatcgccatcgttggctctagcccaagatcgagcaggacattcgcccccggagcgggccttgcgcttgcgcttgtcccgggcgtcctcgtgcctccgccgccacctgatctcctccatgacgccggcggcgcgccacctcccgcctgaacctctgcaacagctcctccccgtccacctcctcgtcg

SEQ ID NO: 44377 - DNA, 642 bp, Oryza sativa
  Clone ID: PAT_MRT4530_47443C.1
ttacatatctaattgcactgaacatttcgttgggtaccctctgatgacagatgaattctgtaagtttgttgaagattctgtatcaatatctgaatctccaggtgacaccttttccttggacgtgttgacagctcttctgattctgtattcgggtggaacgccgacgtccttagaagagtgttgaatagttgaactgaagacggtgatcatcaagtacgccatgtccagcgttgggatagaagataaccccctatgtggtcgttgagggcggctcgggggagaaaccctagcagcccgcaccaccaccttcgtccctctagccgcttcactaccagcggagcccgaggggctggcccggaaggcggcggtggagcttctcctcggcgtgggaggcagcgcccaaaatggccgccctggcaagcccggaatagccggaatcgggagaggatgagctcgcggtggcgcgaccctggagacgcggtctggcagaggctcacgaaagcagtggccggtggcaaagaaggctgaaggtcgcaaggacgtgcgactcttgtagcgaaggtagcaggtggctggagggaggcgcgggaaagcagccgcttggcaagcctgcggcggtggaggctgaccggcggggggcat

SEQ ID NO: 44378 - DNA, 339 bp, Oryza sativa
  Clone ID: PAT_MRT4530_47444C.1
tgttctactattatggaaggagggtaactgactacagaagtatagcccataccgggatggactgcgcgagcacctggggggtttcattacaagtgctgaagtgcacctgcggtctacccaggaggcgccgctacaccaactcgggcttcggcaacgtcagcaatggcggaaggatcaagtgcatgcaggtgtggccaattgagggcatcacagaagtccgagaccctatcgtacctgccaccactcaccgtggaggatcttttgaagctcatcttgttcctggctccatccaagagggagtcttgtctcgaggtcagcaaggttggcttctccctaccg

SEQ ID NO: 44379 - DNA, 494 bp, Oryza sativa
  Clone ID: PAT_MRT4530_47445C.1
aataagcttgcggcggcgcggtctccaagggcggcgagtacgccgggttcggcggcggtaaccgtgaccggcggcctccggtgaggacctcagtaactggtacgctcggacttcgtcgaggggtcgagcacgccatcctctgtcgatgcttcatgctgaccgcgtaagcgtatcctcaatggtcaacggggttgctggatgctgtagttggcagtagctgttgctgacttgatcataggggaaaagtcctgtagtgagagtccgcatagaccttccccatcaatgcaatggacttcacccctgacggaggaacgaggagcatccgcaggggagacacccagttggtgacttcgagttagaatggcatcgagcggtctctgtgtgtcttgggtgcttaccatccgttaacccggtatctacgttctgctctgccttttaatatggttcggtagcctggttgtcatgatatttgtggaggtcctgatggggggttc

SEQ ID NO: 44380 - DNA, 300 bp, Oryza sativa
  Clone ID: PAT_MRT4530_47446C.1
ggtaaactcttcataataatattattaagacattatagctgatgtcttttgatcacactgggaacaaaatattccttaataggcggaccacctcccgttaaggaaaaagtgaagggaattatttcttggtaatacctaaatccagatttaaaatttttggaacattccggtccgtccgtagtatacctcaacccgtcaccatcaataatcggggccaatttcctaaggtggtcctaatgcaaaaccgtgggcgtaaactgacaaatgaaccgaccgaccggcggatttagggctcccata

SEQ ID NO: 44381 - DNA, 230 bp, Oryza sativa
  Clone ID: PAT_MRT4530_47447C.1
ttcgaactaacggtaacttgtatttaacacaagccgattttcctacccatgatcaggagtgcgtatattttatctcactaaataatcgcatactaattaattcattatcgataaattttttttagttatcctggaaatctttaaaaagctttttttacatagcaaatcatcaaatatttcacacccgtactttttgttccttcaactcaactcaactacttttttttttt

SEQ ID NO: 44382 - DNA, 381 bp, Oryza sativa
  Clone ID: PAT_MRT4530_47448C.1
ggctcgcctgggctcagtttctcctcctcccacatcacgactcttcgacgattaccagcaaccaccaaggctacctctcatactgagtggcccgctatatccaggccggcggagacgtatccttgctcgacctgcaaccggactaccactgccgtaggcattgtttttgccgcctctccctattgcatatgtactctaatcatgcttcctgctaggagatggatgcctcttgcaactactacccttctcgcgctcgcttgtgcagccgtccgtgcgactattaccgagctcgttctgagtctgatcgatgcagtcagtccttcagttaccgtccaaactagatgaaccactgggacaactctgtgactgccaccgcctatg

SEQ ID NO: 44383 - DNA, 537 bp, Oryza sativa
  Clone ID: PAT_MRT4530_47449C.1
aacacaaaactacctttatttatttatcccctggaagggccaaataaaaaaccccaaccctttcagaaataaaaatagtcctgcccaccccgggggggtaaaaaaaaaaaaaaaacccccccaaaaaaaaattttttaacccaaggggcctattaaaaaaaaacaactgcccaaagcccccgttaaacaggaaaccccccaaggggaaaaacaccaataaaaagggcgatgacataaacctcgccaagggctgaaaaaccctgcttcccttggggcacggaagggaaaaaaaacgtcccccggaccccatttgccaaatctaaaggatccctttccggggaccatggaccgttaggcccaggcaaaagccactctttgaatattttgggggcagggaccccgatgcttaatttttgtaaaaaagcttctcaccaaaaaaacataaagcttcagggtaacctttccaaagccgaacagccacaagggcttgagtttccaaaagtaaaaggcggccaaaaaaacaagttatggcaccca

SEQ ID NO: 44384 - DNA, 590 bp, Oryza sativa
  Clone ID: PAT_MRT4530_4744C.1
ctagtggatcccccgggctgcaggggttatagcctatatgattaacttggttacctacacaccagccatgagaattaagtatgtaattcgaaatataaatttgtaatctcgtcaaattgaattaaaaaaaatttagtaaggcatttactggtaagaatacaaaaaattggaactccatgtttatccaggtaatctggctgcatgtggtaaccagtcaggccaagtgcctaggtttctttggtaaactggcttttgaaacctttgcttatatgcatcttttcattctcccatactgtgctgccatctagtgtttaatggttgatcacatgttttcaaaagtatgttgatagtagatagtggtgtaaccaagtcgacttaattataatccccaaccaatagattagtacctaaataatgttcaaaaactttcttgggtcagaacggagttcatttggaataagtgctgatatgaaccattcaactaaagctactttggactgttattgttaaccttgtggcttgtgcttatatttattaagtgtagtgacatctaatgatattatatacttctggcttaggaaaaactcttt

SEQ ID NO: 44385 - DNA, 502 bp, Oryza sativa
  unsure (1)..(502): unsure at all n locations
  Clone ID: PAT_MRT4530_47450C.1
aacgccggcatgccgtcgcccgccgctccgggcaactccngnttccngcaacntcagnaatggcggcacgatcaggtgcatgcncgtgtggccgattgagggcatcaaganttcganaccctctcttacctgccacgctcaccgtggangactcctgaacagatcgantacctcctccgttccaagtgggtgccctgcctcnanttcacaaggtcggatttgtctaccgtgananncacaagtcccccgatactacgacggcaggtactggaacatgttgaanctcccnngttccgatncaccgacccccccctgtnctcaagaactccaagaaggcaanaaggcttacctgatcatcgtccgtatcatccgcttcnacacgtcaggcnngtgcagctcatcancttcatcgcctacaaacccccnggctgcgaagaatctggtggcaactaagccctcatcntcatatatancccccnttaaatngttccanctctgattc

SEQ ID NO: 44386 - DNA, 699 bp, Oryza sativa
  Clone ID: PAT_MRT4530_47451C.1
ctggactccatctggcagagcctcgcagttttctttatcccttaccttgcatacagggagaggcaatcgacggggcgagtctgggagacctctggacactagctgttgtcattcttgtgaacattcaccttgcaatcgatgtcatcagatggaactggatcacgcacgcagcaatatggggcagtatagtcgcaacgctgatttgtgtcatggtcatagactccataccgatattgcctggtttctgggcaatatacaaggtgatgggaactggactgttttgggcattgctgctcgcggtaattgtggttggaatgattcctcattttgtcgctaaggccataagggagcatttccttccgaatgatattcagattgcgagagaaatggagaaatctcaagattctcatgatgtcactcatccagaaattcagatgagtacagtggcacgagcttaggttaggggtcacatactttttgttcattcagataggatagctctacacctttctttggttctttttactgtgtgtatactaggcaattctttctgtagtaagcacatttcttgttgcttgctgcctttgtcagctatccaaaggataggtttctttgtacccatgctgtgtatccgcctgccaaattttgttgatttataccaaaaaagaaatcatacaggagtaaactgtacattttcag

SEQ ID NO: 44387 - DNA, 210 bp, Oryza sativa
  Clone ID: PAT_MRT4530_47452C.1
atggccggggttttgaagtccagcgggaagtccagaaacataatccacccttccacagggttgggggaggctcaatgcaagccacagccataccttcattacgccttggaggatcctcttgaagacagagatcaacgtgctcaagctgatgatcccagggtccatacagttgtaaggttggagggaggaagagagcagggtcagggttga

SEQ ID NO: 44388 - DNA, 996 bp, Oryza sativa
  Clone ID: PAT_MRT4530_47453C.1
aaagcattttcatctctactactcctctcccgtgcaatctccagtgccctagcctagccgccgccgccgccacctcgcctcgccggcacgccaccgccggtcgtcgccgtcgccggcacgccgacgccgccgtcgacgccgccgatgtctcttcaaatgttccatccaaagtggctgaaatagagcaagggcaaaatagatctcattaagttcaagtcctagaagaagcagtcgaaactcgcatcactcaaagtctaagtctaaatccttgcaactgaaaaatgtcagcacctaattcacttcttcaccgtttaagcaatcatcgagcgtccaaagaaacttggcgaggtccagatagcgatgaccacgagcagaacgactcggcggcggcaagaacctccaggttgatgggcgacggctcaatcgaataatggctcactggaggaggcggaatcgacaatggcgacggcgaccggaggtgaagaagacggtgggccgatctccgcacttgctgcgccattgcctgggatttcttgaggggttttgaggaggacttcaaggagaagatgttggcgcgagggctcggcttggcttggtctacagcggttggaatgacgacgagaacccgacggctggcactcggtgttcgctccggagcaacgatggcgaggtccacgttcccgacgatccgcggcaccaaatgggatgaaacttagaggaatgaaatcagcttggagaggtgataatggaacgcaagtggaaaggcgacgaccgcggcacaatgtcgacggcgacggccgtcgtcttcatggccgatggcaaggatgagggcagcggaggcgaggcgatccctctctctcgatttggtctacacagaagtggtaatggagaggaggcgatgcagctaggaagagttgaaagcgagctcggcgttttgaggatggcgacacgtcgtgtacacgtgtcagccacgcccagaacgcctctcctccctct

SEQ ID NO: 44389 - DNA, 116 bp, Oryza sativa
  Clone ID: PAT_MRT4530_47454C.1
gaggaaaatgttgggacatgggaaacacccccaaagttaacagggaattacccaaaagacttataaatatatgggcatgtttcctgcccctattttaatttcgtgtacctggaaaa

SEQ ID NO: 44390 - DNA, 2236 bp, Oryza sativa
  Clone ID: PAT_MRT4530_47455C.1
atggcccccacctcgccggaggaactcaaatgcgctgccaacggcgggtgcgccgcggcctcgccggggggcaccccgcgcgccggccactacctccccgccgtgccggcggcggtggagggcgagctccggtggctgcggcggaaggtgggcgccatgaccaacgaggaggcggtggtgctagcgctgaaggagacggtgaggtacggcttgttcctggggaccttcgccggaagctacgtctccgtcgacgagtgcatcgccggcatctggggccgtaagagaacagcaaggtggagatcattattggctgggttaattgctggtccttcgatgctcttgacagggccaggcacacaacatactagcttggcaatatacattcttatgcgtgcagctgtccttgcatcccgttgtggaataaagagcaaaagatttggaaatatttgcaagcctttgacttggtcgcatggtgacatcttccttatgtgcctttcatctgcacaaattttatctgcctatattttaagtcaagaaagtttgccatcaacttataaagcatttctaaataagcatggtgggaaggatcttactattctgcaaggtgtgaaagaagtagtcaatcacactgctttctctaacctagcgggtattgagaagtactacaagtctgtgggtgttgacctaaagttagatccaaatatgaaagtcccttgctcgattgtgcatggaaatcaatcatgtgcagggcattttattacattcttgtttcaagcatatggaagagcagtacctgtctatgttccggtctatttagttcctgcacttgtagttcatcgacaggatttattgaaaaggccttacccaataatagggaagaatcttctaggaacagcgagatcaagcctgttcctctcagtgtactgtgcctctgcatgggcatggacgtgcctgcttttcagaatcttccagagctgcaatactccactcgttgtacttgccacgtttcccacaggtctggcactgctaattgagaagaagagcaggcgaatcgagatagccctgtactgcttcgcgagagctattgagagttttttcacatgcatgaccgatgcaggactttgccctccaattctgcagataaaacgagccgacgtggtggtattcagtatggctacgtcgatcatcatgcactgctatgctcaagaaagagaagtttttcggtccaagtacctgaatgtccttgactgggcactttacttttgtgttcctttccgtgagcaattactggagtactatgcaaataataaaagcaccggagatgtcgaagacaatatgttaacgtgcttagctgacctgttctctcagatcagcaaccagaagaagaaaacaggtgttatcgctcctaagcgtttcatacaacgactgaagaaacaaaatgagatttttcgcagctatatgcaccaggatgcacatgaatttctgaattttttgcttaatgagctagttgacatcctagagaaagaatctaaagttgttgcagaacctttgtgaaaattcctctttgaaaaagaattcaaacgggcctataaatgttcaactcaatggtactaaaaaagaaccagttcctactttggtccacaaatgcttccagggcatattgactaatgaaacaagatgtctaagatgtgagactgtgactgatagagatgaaacgttttttgacctaagtctggatattgaacagaatagttcaattaccagctgtcttaaaaacttcagctcgactgagactctgaatgctgaggataagttcttctgtgacaaatgctgcagtttgcaagaagcacagaaaagaatgaagataaagaaaccaccaaacattcttgtaattcatctcaagcgcttcaagtatattgaacagcttggtcgctacaaaaagctatcatatcgagttgttttccctctggagcttaaacttatcaatactgttgacaactcagacttggaatattccctttttgctgtgctagttcatgttggaagtggaccaaatcatggccactatatcagcttagtgaagagccacaaccactggttgttcttcgacgacgagaatgttgagatgactgatgagtccatggtacagacattctttggctcagcacaagagttcagtggtaacactgataacggctacatactcttctatgaaagccttgctgaaaaaagttga

SEQ ID NO: 44391 - DNA, 2355 bp, Oryza sativa
  Clone ID: PAT_MRT4530_47456C.1
atggaggaaccctcgcccgtcccgcccgcggcggctcctgcctccctcgccgccgcgccgcccaccaccgatgtcctctctcgccggagagcccatctcgacagcgcctcctaccgcgcgctctcccggctcttctcgcactgcctccacctgcaccctccgcggcacgcggcacgccccgacgcggaggtcgagcctgccgccgccgccgccatccctcccggcggctccggcgggcttccccatggggattcgccgcctcctgcagacgtgggaggcgatcgggggaagaacttagaggtggaggtggctctgggaaaccatgctccgcacgagacgccttcgacttcggcgtccccggacgccgccgtgaaccctaccaccgatcccggcgtggtgccgcaggggacggaggagggtagagtcgctggggtcgagcgggtggagggtgtagaagaggttgttttcgccggaggcacttccggggaggctgatgccgatggcgatgagttgggggctggggctggactgatgggggatgacgaggctttgaggtcgatgcaggcttgcttagacggggaggatagtgaattggtgattgaaatggttggtaatgacaatgagcaattgcaactcgatgcgatgatgaacaacttgtcagggttgattgatgatgctagtgcctgtgtaatgtcggcgcagagctgtggagtatctggagataaactgcagagtgatgacagagtagctgaggaggtgaaagaattgggagctgggattggcaatgacagatctgtgtgcagtttagatcatgggtcactggatggtggtggtggttttgaggaaggagagattgagggcgacacgcagaatttagatgcagatgattctggcaattcagagcttcaagatgatgtggaattggaagaggattttgatagcagaaggatagaggaggatgggtcatgtggccatgacttaaagagcaatttgcatttgatacctcaaaaaggaaatggcgacactgcacggaacatgctatgtaatagcaagggtgattctcaaatgcatgttgccagggcgcaagcagtcagttatgatgaagttctcgattggaatgagacacctttgcctgatgataaggctctcaaacatggaaacacaagaaagcgcaccttgacagaggagagaaaagctaagaagacgaaaactaaacgaattaagagagcattgcaacgggaagccgaaggggtgaaaagactgaaacttcaaccagttataaagcctaaagtggtgaaggtttgccacttctacttgcatgggaagtgccagcagggcaatttgtgcaagttctcccatgatacgacacctttgacaaaatctaagccctgcacgcattatgcacgtggttcttgtttgaaaggagatgattgcccttatgatcatgagttgtcaaagtacccttgccacaattttatggaaaatggaatgtgcatcagaggtgataaatgcaaattttctcatgtgataccaactgcagaaggtccgtccacaccagatgcaaagaaatctaatgcgtcatcagtacctgaaaaagcaaattgccaagagcaaacaagtcgtcagaaaacttcaacagtatacagtggtgaacctgcaacctctgttcctatcaaacatcattccatccttaaaaaccttgctggcatatcaggaaatgctcaaaaggatgttgtgtccactgagaagcataagaatccaactggtggtccacatcagaactttggaagacctcaacccgcagacgggaaaaaacttggcaagcacaatggacatagatcagctccactgttggatgaaaaagactcatcaaaacaagctaatctacatccatgttcagaaccaaagaaaaatagtttgcctaccactgctgcagtgcccagctcacatacttggatgttgttcagtgatgaacccgtgcccatgagattgtgcagcattttttgtattccgcacaccagttttattgctgtaactccatcttgcaagttgcaactgctgatgtggacttattttgcagaacttggggcaaatatttactgtcagattttgaagattggtaactatcaaatgaatgcacttctgttcaatccacaggcatacaacagcaaatcacaattcctaatcttcattagtttgcagcagcaagaagccaacagtgcagcaaaagggagtatgcccgtgtgcatccatcagctcgttttaagtatgttcctcaataaagatttgaattggaaagttggtgtttatctctttgtttgggattatgaaaatgctaagcgccatatgacttag

SEQ ID NO: 44392 - DNA, 1410 bp, Oryza sativa
  Clone ID: PAT_MRT4530_47457C.1
atggccagaaaattcaggagagagatagagagagagaggcgcaccttggccgccgcctgggaggagagtcgcgctcgcgtctctcgatctcgagtcgtcgaagggtgtagtagagtctcgttgaagaagaagaagaagaagtcattttacgtttttgccatcgacggggcttgggctgtattgggcctaatgtgttcgtcctatgggcctaggtatacgggccttcgcataccccattgtcatgggccgttcgctgtgaggatggcccacctgtcattgggaggaggtgatgtcaacgggccaagtcagaaaggaaagcttcggttgagcgaatgtgttggaaatggcagggatggggggattgggaagtgtgctgatgatgctgtgcctggatggtcattggcaagcctaaaaccctcatattatcatcatgtcttcagcaaggcagagttccatgtagttatccttggagttcacaaggctgggaagacgaccttgctagaaaaggtgaagtcaatctatttgaaagaggaaggccttccacatgatcgtatcgttccaacagttgggcttaatattggacgtattgaagatgccaatgtaaaacttgttttctgggatctgggaggccagcctggcctacgaacaatctgggagaaatattacgaagaggcacatgctgtcatatatgttattgactctgctgctgcatcatcatttgaagatgccaaatctgctctggagaaagttcttcatcacgaggatctgcaaggagtgcctctactcatatttgcaaacaagcaggagttaccagcagctgtgacagaggaagagctggctaggcatcttcaccttaaagggttagacgagaggccatatatgttccaggctggatctgcctacgacgggacgggaatcaaagctggtattgactggttggtggaagaaatggaaaggagtaaacgcaccgaggtgctgatggcgcgtacagaaacagctgagaagatttaacacaccataagccagaccccctgtcacagatgcatatgtcgtttgaggagtatggctcctataaatctcgcgaatataacaaattggcatcctcttgccttctccaggctacgcggtgagaagaaaaaatgtccttggttgtgcggtttcttgcaggctttgcagctgtacacttgggtaggaagcctgctgttgtaacgacagaggcggggtattccttggtttattgattctcataggctcatagcacacataaatgtacctaaagtcatgcgacttttttcttcatattgaacggaacaagaacgacaatgtagagcacagagaagttttgtacatctgtgagaagaaaaaaaatgcattttgtactttatcgttcaaaaaaaaaaaaaaaaaaaa

SEQ ID NO: 44393 - DNA, 1076 bp, Oryza sativa
  Clone ID: PAT_MRT4530_47458C.1
aaacaacaatatgtcgcgtgtcgagaggacgaaggagatcaagatcagcagggtggagcggatcgatgatgagccggagacgaagacgaaggtgatcatcaacgcggcgcggacgccgaggacggccggtggcggcggagcaccgccggagagggctgcagctgcaggaaggaatattgacaaggcctcccaggcgtacatcgacagcggtgatggtggtgtactggacggcgaagtccatgtccagagggtggacaagatcgtggtggtcatgaacggggtggcgccgacggcatcggagaagaaggccggggacggcctgatgaacatcgacgagatagccgcggatttcatccggaggaagaaagaggcgttccagcgaggcaacaataagcccgcaggccatcttgctagctagagcttgaaatccctcctaactgtgatagatatacctagctaggctgatctccatcatctgatcaaagaggggcggtgtagaaagggagggagaagatgttccgcactggagccaagaacatgagcagcgatctcccggttgaaggtgtggtgagggtgaggaaggtggagaagatccaggcttacaacctcgtcaccaagccatcagcgaccacaagcaggatatcgccgataacaggtcaggccgaaagcatggccgtcaccgttgttcgggttggagctgtggctggaaaaccagacgacatcgtcccagtggctagaatgaacaactaagttatgatcggagaaatagacggtgtacgtcatcgtctagtggctatacataacaactaattagcacgcatggtttactagggaaaatgtgagtttctacttgggataactagggatgatggttataggctctgtcatatgtcatgtgtaactggccagtcatctaccacggtgtcgctagatgccatgaacgtaataatccatatatgtataagtttattatatgtcaataattgtgtgacatgcttgtaatgacatatatataagatacaaaagtggctactaccagtcaagtaaagggctaaaaggccccattttgtgtcttt

SEQ ID NO: 44394 - DNA, 411 bp, Oryza sativa
  Clone ID: PAT_MRT4530_47459C.1
tgtctgattgctgtgaattttcctcacttctcttgttccatttcagctgttcttggtacacttggcacgttggctgtgtaccaagaacaaatcagattccacatatatataagttctttcttgatcgatcaatctttcctctaaccttttggtgtgtcacaaggtttgaggctgttgatgatcatctccaagaatcaaacatacccactctcccagccttttctgaccgattcctgatccaagattaacaccacacacaatccacaaaatccccaaaagtatcccaagaaacacctcatttcttgatcagaacactctgcagaagcaaaatggcgccggcgccgctcgccggcggcaggctggtggtggtggtagtggtggcggcggcgtgcatggcgcggtggtcggagg

SEQ ID NO: 44395 - DNA, 415 bp, Oryza sativa
  Clone ID: PAT_MRT4530_4745C.1
tttgttttttttttttttggttttttttttttttttttttttttttttttttttttttttttttttttttttttttttttttttttttaaaagggaaaacccaaaaccgcgcccttgaaatttaatggcccttcccgaagggggcatcccaggaccccaaaacccccaggtttttaaaaaccacccccgaaaaccgggcagggcaccccgggatgaaaaccccaaaaacttggggaaagaattgggggcccccccccttttacccacaaagagaaccgccccaagggggccccgactggggggaaaacccaaagggaaaagccgggcccaaaaagggggggggaacccagaaccggggggaattggtggagaacccccggggacccccccggtggaaaggggtttgtttggggga

SEQ ID NO: 44396 - DNA, 543 bp, Oryza sativa
  Clone ID: PAT_MRT4530_47460C.1
atgcattcgctatgctaggctgatagacagtaccaatgggactaccaacgccacatcaacgctgctgctgctgatgatgctgaattctgacatggctcggcatcgaggccgactacaagttgaacgaggaacgtaataacacacgtgtaggtgttccttgggaggctgccattccacctggaaacggtacaggtgaaagcgtactacacggataccgttgtgcttttgtactacttaattcagccggagcgcacccccggcgacgaccctttcatcctgtgagaaaacgtcgagcccggctcatacggcctgtgcgtgctcatatcccatactggaccgtttattacagaggcactggagacgacgtaagggctgcctcaattagtcatacttccaagatgcctggaccaatacgagcgaagtgatatttctggacgcgtcgggagtgacggcatatgttctacgcccgcgaggaacaagagaacaacgtaacgctcacacagacggaacagcaactggagctgctgatgaccacatggatga

SEQ ID NO: 44397 - DNA, 556 bp, Oryza sativa
  unsure (1)..(556): unsure at all n locations
  Clone ID: PAT_MRT4530_47461C.1
ancgggaanaaaanggngggggggntttccctcncagcttngccatcaggggngggggggggcnattgggcncttttttttannanaggaatatttttcnggcccnggganaaaagaaaatgttttntttatttttgncggcaaaagtttttnggnagttttnannnccccanaaatcagtanataacaatggcaagggcaaggttgggagggagtgagaanataanatgcatttgntgnaggnttgacnncnggatagactgngaataanccngtcctttttttttcccnttgttngnaaanaanatngnagnagngggnaaanatttttnaggagnangngggcataaatgttgatttanacngtactggaaaacnannanatagngtngnttnatttnttagtacgnaantagtagngcaaaccngnattttgaanatgngcggttttgacnataaaaaattgnnatcctaaccaaaaaaaaaaaaaaaaaaaaaaaaaaaaaaaaaaaaaaaaaaaaaaaaaaaaaaaaaaaaaaaaaaaaaaaaaaaaaaa

SEQ ID NO: 44398 - DNA, 576 bp, Oryza sativa
  Clone ID: PAT_MRT4530_47462C.1
ctcacctccgcccgcctcgtcgtctctctgacaaccgtacagccgcccgtcttccgctccgcgccgccgcctccgccgctgccgccgcgcgggcgtacgtgtctatggcgacgatgtctcgccgcgcactcggctctgcgttcgcgggattcacgcggacaccagctatgactccgacggccaccttgccttcctattgcgcgtccccggcgcgactcctgcgggctctctggagcgcgtgggtaggtatatggatagcattaaggaccagagacgcgctccatagcatgaatctgccgcgaaggtgtatgcattggtgactgaaaagccgaaaattcaaaaaaatgggaagagaaggcgccctaaaaattcaccccgtatgatccgctcttaaaatcccccatattagatgggttattacactgtctggcaatgtattgctaaatgtctgtctcgaattttgcacattcatttttgtttggtgtacatttcaatttgaataggcacagttttactgtggctaaattgattttttttcacttgcccctggattattggatgctgttgtaacatact

SEQ ID NO: 44399 - DNA, 330 bp, Oryza sativa
  Clone ID: PAT_MRT4530_47463C.1
catcctccctcctcttttttttcccggatcatctctttcagccgatgggagtcggatcttctccaccccgcgcgcgccatgggcaagaagcacgccgtcgccggcagcggtggcgggtggctcgccgtcgtctggaaggtttccgcccctccaaggacgccgccgacaagaagggtggcggcggcggcgatagggaggaggaggcggttgcggaggctgcgcctgaggttcttctgctggagcatttcccggtgggcggtacgttcctcgtcggttgaggggacgggcaatgatcagggtggcacggtggtggggaaaggggagggtgag

SEQ ID NO: 44400 - DNA, 137 bp, Oryza sativa
  Clone ID: PAT_MRT4530_47464C.1
atggtctgaaacgaagatcatgatccggtggatgcgatgacacagacacagctgaatcaagactctcaagcataactgcatgagaagcagctctctgactgaaggcaccaagacgagtgcacattgacataccatac

SEQ ID NO: 44401 - DNA, 470 bp, Oryza sativa
  Clone ID: PAT_MRT4530_47465C.1
ttttggttttttaattttttgtgtttttttgcatcagaaacttgcagttcaacaacagtggtctaagctgaaccattagtggcacacatcaagtggcatacatgatcaggagccaaattgtctggcaaacaacacaggtaggtaatagtttgcaaaatacaggcatgagcctgattgtctggcaatcaacacaacacaaaaagctagatacatgggctacttgccctgcaagaccacatattgcataaacatagcagcaaacatttcacagcttgtcagactcccatggcaacagaagaagtgctccaactgtcttctttttgggtctggcatttgagggttcttgagcagaaacacaaactgaagctttccctgaagtaacctttactgatgcacttgtggagcttatgtgtgacaaattctaggatgggttggcagctatgaactttcaatacttttgagcaatcctt

SEQ ID NO: 44402 - DNA, 424 bp, Oryza sativa
  Clone ID: PAT_MRT4530_47466C.1
aggaaaaagggctaactaacatatgattgcggccttaattaacaacaaaacgctaggacggaatcaaaccctctgatccaatttaccattcacttattaacattacaggacttccagacacatagtactgttgagcagagctaaattattcagacgcgcacgttgctgttattgaagccaacttctattaacccagaacacattggcgcttgatagccatatctctctcaaaaccaataacaatgcatactgttgatgtccttacccttccttacttccttagcagaagcatgctcacttcttggggtctcttgacgcgaaggcactgaggggcaccctagccatgctcaccctcaccctggattataccaaggcctgcatgatagtcgaaccagcacctgttgatgaaggccttttttgcctt

SEQ ID NO: 44403 - DNA, 300 bp, Oryza sativa
  Clone ID: PAT_MRT4530_47467C.1
atggcggcagtggcggcagcggcggcagcggccagcggcctgcagcgccctctcatgcgggggtggagctgggtttttgctgctacacaactccactccactccaaaagacccactgccctttaaatttttgatgtattcacacaaaaatgccattaaactacacctaaactcctcctcccatcttcttcggcaagatccggcggtgggcaggctggcggcgctggcgccggcggcaatcggcggcgatctggagccagaaggctgccaaacacttttgatgggtctgcaattccaatag

SEQ ID NO: 44404 - DNA, 615 bp, Oryza sativa
  Clone ID: PAT_MRT4530_47468C.1
atgatcttggagcagttcgacgagtcggcggcggagaaagcggatgcggcgatggtggtggcgccgccgtccaacttcgggatggtggacacgggggtgtaccggtcggggttcccggaccctgccagcttcggtttcctcaggggcctcggcctccgatctgtcgtgtatctgtgccctgaaccttacatggagacgaatgccgagttcttgaaggcggaggggatccgcctcttccaatttgggattgaggggaacaagttgtgtcttactacaggtgaagaagaccctaacgtgtccattcctgtggatgccatcatgggggctcttagggtcatacttgatgtaaggaatcacccagttctaatccattgcaaaagaggaaagcaccgtactggatgtcttgtgggctgcttcagaaagctgcagaattggtgtctctcatcagtctttgaagagtaccatcggtatgctgctggaaagtcacggttgtcagatctgaagtttatcgaatcatttgatgtcaactgcatgacggattgcctgctcaggctcatctaccactaccatggttgccttcagaaaagcaagcgcctggcatacagcgagagataa

SEQ ID NO: 44405 - DNA, 2796 bp, Oryza sativa
  Clone ID: PAT_MRT4530_47469C.1
ccggccgggcccccgcaaccgatttcgtcttcctcttccagagcctcccggataaataccccaactcctgcctccccacgctccccctcccgactccgagagattacttcctccaccttccatccatctcctcttctccccctctccctctctctctcgagatcgaacgaacgaagaaccctaggtcatccatggcgggggcgatccgcgtcaccatggaggtgggcgccgacggcgtcgcggtcgtcaccatctgcaacccgcccgtcaatgcgctgcatcccatcatcatccagggattgaaggagaagtacgcggaggcgatggatcgcgacgacgtcaaggccatcgtgctcaccggtgctggaggcaaattttgtggaggctttgatatcaatgtgttcacagaagttcacaagactggaaatgtatctcttatgcctgatgtatctgttgagcttgtgtcgaatttgatggaagcgggcaaaaagccttcagttgctgccattcaaggccttgctcttggtggcggtttggagttgaccatgggttgccatgctcggatatctacccctgaagctcaacttggactaccagagttgactctgggcataattcctggatttggaggaacccagcgtctgccaaggcttgtaggtctgcccaaagcaatagaaatgatgctgcaatcaaagttcatcacagcaaaggaagggaaagaaggtggtcttgttgatgccctgtgctcccctgatgagttgataaagatgtcacgcctttgggctctggagatagctaattaccgtaaaccttggataagatctcttgccagaacagataggcttggttcactgtctgaagctcgttctgtattaaatagtgcaagacagcaagcgaagaaggttgcagcaaacttgccacagcaccaggcctgcctagatgttatggaagaaggtgtactatgtggaggccatgctggtgttctgaaggaggccaaggttttcaaggagttggtgctatcaccaacatcaaaggcacttgtacatgctttctttgcccagcgtttaaccacaaaggtgccaggtgttactgatgttcaattgaaacctaggaaaataagaaaagttgctgttattggtggtggtttgatgggctctggaattgcaacagctcttcttgttagcaatacatccgttgtgcttaaggaagtaaatcctcaattcctgcaaaggggacagaagatgatagcagctaatcttgagggtctagtcaagaggggctcattgacaaaggacaagatgaacaaggccatgtcacttctcaagggtgcattggattattctgatttcaaggatgttgatatggtcatcgaggctgtcatagagaagattcctttgaaacaatcaatattttctgaccttgagaaagtatgcccaccccactgcatacttgcaacaaacacatctaccatcgatttgaatgttgtgggcgagaagacaaattctcaagatagaattataggggcacatttctttagccctgcccatattatgcctttgcttgaaattgtccggacggagaagacatcaccgcaagctattcttgatctcatcacagttgggaaaatgataaagaaagtccctgttgtggttgggaactgcacaggcttcgcagtcaatcgtacatttttcccttacacacagggttctcatcttctagttagtattgggatcgacgttttcagaattgatcgagtaataagcagctttggcatgccaatgggaccttttcaactgcaagatctggctggatatggagtggcattggcagtaaaggatatctatgcggctgcctttggaacaaggaatctggactctaatctggtggatttgatggtacagaatggacggcagggaaagagcaatggtaaaggttattacctttatgagaagggtgggaagccgaagcctgacccaagtgttcaggttgtgattgacgagtacagaagatgtgcaaagacaatgcctggtggaaagcctgttactttatctgatcaagatatattggagatgattttcttcccagttgttaatgaggcatgcagggtcatggatgaaaatgttgtgatccgagcttctgatcttgatattgcttctatccttgggatgggttttcccaagttcaggggtggtcttgtcttttgggctgacactattggagcaccttatatacattcaaagcttagcaagtggactgaaatttatggcgatttcttcaaaccatcatcctatttggaagatagagctaaaagaagcctaccattgagcgcaccaaacgcaacccagcaggcttcgtcgaggtcacgcatgtgagatgctatttcagctgatggcagaataattgcttgatgtgcatcggcaccctagttgaccctcatatctgggacctgaaaaaggaggtcagagcagtgttcaccatgtaatctcttttggatattttggcctttccggttttccgaactgggttgctatggcaatcggagtaataaatgttggcttcggatgccacaaaactgtaactttatggccgatagccttttactccagtgttacattaaaatgtatatggtacagtgtttttttaacttgtagtaaaataatatgcatgctctccgaataaaaaaaaaaaaaaaaaaatttatttcacttaaaacgtaagggggaaggcagtaatctgggggggggggggggggggggggggctttgattatcaatgtaaggtgtaaagtctatcatg

SEQ ID NO: 44406 - DNA, 2207 bp, Oryza sativa
  Clone ID: PAT_MRT4530_4746C.1
cacgaggatcaagtctgccaaagcatgcctctagatgctaaaccttcaaaagattcatggttgatggaggagaaagttaagcgaaaaattgagtcacttcaggcatatgcagttgatgcatgtgatgatgaacaaaggagaacggcaggaaacattctcaaggctatgggcttttcaaagacttcatcagctgctctaaagatccttataaatattggatacttccctgtgcatgtcaatcttgatctttacaggtatgatgttcgcatcaggtatactgaggaagttttgtcagctgcagaggaacttctggtagactgtcctgactcagacaaggatatcaggaaggatctctcaactttgaaagtgtatgctattgatgtggatgaagctgatgagcttgatgatgcactaagtgctgctagattacctgatggtaggataaaggtctggatacatgttgctgacccaacaagcttggttcaaccccggagcatcattgacagggaagcaatgcacagaggaacctcgatctttttaccaactgctacctttccaatgttcccagagaggcttgctatgaatgctatgagcctgcaacaaggcaggggttgtaaatctgttactgtatctgtgattttgccagcccggcgggggaattgcagaatatagtatagagaaaacaagcggaacccccgggcagcaggtaacatatgagagtgcaactgaactactgtatatgaacctggaagaagaggaagaactgagaattcttcaagaagctgcttcccttcgtgcacagtggcgtcgtagtcagggttcgattgatactgctatgatagaaccacgtatcaaggtggcaaatcctgatgatcctgaaccaaacattaatctatatgttgaagaccaatccaacccagcaatgcagcttgtatctgagatgatgatactctgtggggaggccgtggctgcttttggttctgacaacaatattgctttgccatacagagggcatccccagtctaacacagctgtgtcagcatttactcatctctctgaagggcctgccaggagttttgccaacatcagtgtgctccgtgctgcagaaatggatttccaaaaacctgtaccacatggtgtcctcggtattcctggttatgtacagttcacctcccctattcgaagatatgttgatctgctagctcattatcagataaaggcttttcttagaggtgaatctccaccctattcagctggtgacctagaaggaatgacctttattgcaagcatgcatgttaaagttgccaggagactccatagcaacaacttacgttactggttgttggaatacttgagaagacaaccaaagggaaagaagtataaagccctgattcttaagtttattaaggatcgtttggcaactttgcttgttatagaggttgggatccaagctacagccgtggtttcaactgggaaagtgggagatgaagttagtgtcgttgtggaagcagcccatccacgtgatgacatcttatcagtcacagagattacagaagtttaagatgagtaaaaatgcaatcccttgtttatgcaaactgcctcacgatctgaacttagaaccttggacaatactacagtactactgcagcaactttgtgcacctaggaaacatagctttgctatttggtcttgccaaggagcagaattgcacctgtcgtttcctctatagtgaaggtatgaagaaattgattctgatgtaaatgcaagaggtgacttgttacctatgcacctgaggcaacgatctccacttcgagaccatcttcttcagtttacaactacgaagtccatattgcttggaccaaacgagtacagttcaggggtatggtcacattttgaatcttttaacaggtaccagtagtctaacttgtacatccattttgagtccgagacaatcaggtgaaggaacagatctggtcatttgagttaagtaggacctttgctatgttcaggttcaaacgcggacttttggggataactgtatagttggatgcattttctactgttatgttaactagcatggtggcccgcgcagattatacggctagcatcattatattttctctcatataatagcatatatgttttctcattaaaaaaaacaaaaaaaataaaataacatcataattttaaaaaaaaaaaaaaaaaac

SEQ ID NO: 44407 - DNA, 709 bp, Oryza sativa
  Clone ID: PAT_MRT4530_47470C.1
acagcattccgtgtatattaactccaaggcccgagccccaggtttcataggttggtcaacacacacatggaaagacggtgttcaacggagagcttcgtcgtggacaagctacttattgtaccaccacacctatgtagttgtaaagataggctacctatagagaaggatgtgcttacattgctatgtcatagacctataccctaactctatggtaacgccccatttcgcaggaaagagttccatcttcccgtggctctccccacaacttgaatgttcctaagcaaattgcaattatccgccattcttccaaaggaagaaaagaaggcttccaggagggcttccaagcattacaccaggaagggaaggaattggaagtttccggggtgccatttccacctgccccctcccaataaccaagaaggcttaaccccaagaaccgttttattaattggttggccgggaatccctctttaaagttgggccaattccagaattaaagaagtaaccttaaagtaaagtaaattaaattaattgccaaccctttggcgttgcggcttatggtacggtaaaagtttcttaataatatcccgttctgaatctaagaccacccctcaagaggttctttctattttggtgtccccgtcccaaggtaccttgggtaccctctggagattcaccaatatgagacaaccgagaatggaccacccgg

SEQ ID NO: 44408 - DNA, 585 bp, Oryza sativa
  Clone ID: PAT_MRT4530_47471C.1
atggtgcatccgctggggaggacgagtatggggcggcagcgcatcgagatccgccgcatcgacaacaaggaaaggcggcaggtcaccttcaccaagcggaggggcgggctgttcaagaaggcgtcggagctcgccctgctcaccggcgcgagcgtcgccgtcgttgtcttctcccctgccaagcacgtctacgccttcggccacccgtccgtcgacgccgttctccgctcatacgcctccgtccccggggaggccgccgcggtcgcacccgtccccgtccacggcggcagcggcggcgaggacgtcgacctcctcgggctgaggctggcggcagatgataccggggcgcaggtcgcggcggagcatgcgcggatgcgcgacgtcgcggcgaggatcgtgcaggcgaaggccgggaggcggttctggtgggaggccgacgtggacgcgctcggggaggccgagttgctggagttcttcacggcgctcaagaagctcagggacaacgtcggccgccacgccaacgccctgctcgccccccagccgccgccgcttccgctgcagcagaagcagcggcgccggcggtag

SEQ ID NO: 44409 - DNA, 558 bp, Oryza sativa
  Clone ID: PAT_MRT4530_47472C.1
atggagaggcgaagaagacgctacgacgttgcaagcggcataggcccgcccaactatctgaggcagcgccgcgaggggcgtggatccgactactccatcccgctcgccgacgtgcacctgagatcgggagagcaggtctccggaacatctgccttcgacgtcctgaaccgggagaaggcggcaataaggtttttgggaccgccacctcggacctaccggactctgacgcgcacgctaccccaggcacacgtcccatcgctgcagcccgcgtccagacgagagctgtatggctcggccgacgccgacgccgacgctcgcccgacccacaccgcgcgattcgattcgcacgcccacgcccacgcacttcccgccgctcgcggtctctcctttaaacttcctggtgctgcggcgccttctgtttatgcggacacggccaaaggcagggcggtgtgtccagagcaaagggccgcacggtgggtggcaggttggcaggcgccgctgggcacagaatgcagcacaaaggctttattaacggtgtggggactggggattggctga

SEQ ID NO: 44410 - DNA, 352 bp, Oryza sativa
  Clone ID: PAT_MRT4530_47473C.1
cgcagacgtcggcggtggtgctgcttacattctccccgccgagcaatctttgcactagcgcatggcgagagatattacggctgggaccgccactttgcactaccctcgacgagcagctgtcgccgattcccaatcacggcagtcccccaggcaacaacatcagcagcaaccgcggttgagatggaagcagctgcctctgctcgaggagactgtggacgaggccatggacgcggcgccgctaccgacactcgaggagcaaatcgagaaggcggtgctgaacgactacaacctgacgctcccgcagagcgcgaccgagttcctgctgttgaatgaggcgctggacaagctctac

SEQ ID NO: 44411 - DNA, 212 bp, Oryza sativa
  Clone ID: PAT_MRT4530_47474C.1
cccacgcgtgacgcgtttttggtttatggggcgacaccaacaaaaaacgggcaggggcaaggagacacaaatcacaacatggggacatacacctgacacacccctaaggtccagccagggccagcggacacacaaagccccggctgagcaaaaccaaactctcccccagacagggcgagatggctttacgggctaaaagaaagggctcaccc

SEQ ID NO: 44412 - DNA, 1191 bp, Oryza sativa
  Clone ID: PAT_MRT4530_47475C.1
atgccttcctccgccgcctctcgccgtcgccgccaccgccaccgccacgccggcaagcccgactacccaccgtcggagctgccggacatcctccgcgtccgcgagctccgccttgcccctcgcgcctcttctctcccaaaccctaaccctcacaaaccccagccccaccccacgattccctcctccaccaccaccaccacctctggacgccgtcgcaaccgccgtggccgtggacgcggccgcgggcgcaaggagggggatgcgagggactgggcgggggggctgccgctggacgcgatcctggccatcttccacaagctcgaccacatcgagatcctgatgggggccgggcaggtgtgccgctcctggcgccgcgccgcgcgcgacgagccccagctctggcggcgcatcgacatgcgcggccacgccgacctctccttcgagctcaacctcttcgggatggcgcaggccgctgtgcgccgcagcgcgggtcagtgcgaggccttctggggcgagtacgccgccgacgaaaaattgctccatttcctcggcgaacgagcaccatctgtgaagagtcttcgtctgatctcttgctatgatatcctcaatgaaggattttcagcagccataaagaagtttccactgcttgaggagcttgagctttcgctttgttcaaatataggtgagagcaatgtgtttgagattgttggcaaagcatgcccacagctgaagcgcttcagatttagtaaagactgcttctacagctttgaagataatgaatacgagatggacgaggaagccctaggtattgcaactatgcatgagctacggtctctgcagctttttgctaataatctcaggaatgaaggtctggcagctatccttgacaactgcccctacctggaatccctcgacattcgtcattgcttcaatgtcaatatggatgacaccctgcgagcaaagtgtgccaggatcaagacactgaggcttccctatgactcaactgatgactatgacttccaagttcagaagcctatctcgcttgctgacttctactctgacagtgatgatgattgtgtttatggtggccccgactatattcttgactcagatgagtacgatgactactgtgacccttaccgctaccttgatggtgtctatgagggcgtcgcgtcagggcgagctcgatga

SEQ ID NO: 44413 - DNA, 518 bp, Oryza sativa
  Clone ID: PAT_MRT4530_47476C.1
gcacgagggcactcgctgttgctgtcggagttggcgcacatgaggaagctctacaacgacatcatcgtagttcctgcagaaccacgtggagccagtggcgccgccgccgctggcggccgccaccagctgcaggctggtggagctcggcccgtcgacgaccgaacgccgccgtagcgccgcctcgccgtccggtgacaacgacgacgacgcggcggtgcggctgttcggcgtccggctggacgacgaccatggcaagaagaggagggtgcagctggtgcaggaagacgaaggagacgagcagggaagcgaggggtagcttagctagctagctaaacttaggtcactgtagcacactagcacgtactcctacgtagcttgaatgcttaattgtagtgtacatagtgagaggtacgtttgtacgtacgtacgtagctgcagctgtataacctgcccagggtagctagatagcaggcattttatgtggctcagttaattgtttttgtttgatctgatatgta

SEQ ID NO: 44414 - DNA, 540 bp, Oryza sativa
  Clone ID: PAT_MRT4530_47477C.1
tttttttttttttttttcatggcaaagaccagcatgcattcagttaataatcggaactttttggatggttactgtaaaacaaatgagtgattgagtgaagagcgataggagattcattttacatcgagagagggcgcacaaaatcagcaacttcctcagggcacacatgttgtctccattcttttgatagtaaccagccttagtacacactttggtgcgggaataaaatcagcttccacctcacgctccagaatattcatgccagcttctttttcttccgatgtctccttttgcgacgtggtttatgagcatcagaatttgaactcaggttgctgttatgatctccaggctgatttgctgctctcctatttttgaaagtgccaccacttgtgctatttgaagtattgcttgagctggataacacgtgtttcacccctggtctagttctatttggtgctaatgaacgaggtggtggcataagaactcgagcatctctctgacgcgtgattcttttcatcgcttgacattggcagaaagctg

SEQ ID NO: 44415 - DNA, 1016 bp, Oryza sativa
  Clone ID: PAT_MRT4530_47478C.1
ccggccgggatagtagtatcgtcatcacgaaacaaattaaccatagcagcagcatatcctctcccatgcttccatggattccttctagcttcgccttagcttctcctcctctacagtctacacgcgcgcatgcatagcatctatagagagagaacaaattaattattaggatttagtcgcaatggcattagccatggcgcccaggctagtccaccacccttgctgcatgatgctctccaagaacccaagaacgccgccgccaccgccggcgatgcaccaccaccatgcccacaagccgctcatcaccgcgctcaccagcacgtcgtcgttcttgctccgctccgtcgacgtctccaaggacgacaagccgctggagacggcgactacgacaaccccgcctactccggcaccggcggcggcggctccggagaccgaacaagcggaggcggtggcgtcgccggagttggagttggagctggaggaggggccgaaggtggacccgcggcggctggaggagaagttcgcggtgctgaacacgggggtgtacgagtgccggtcgtgcgggtaccggtacgaccaggccgccggtgacccgtcgtacccggtgccgccggggctgccgttcgagcagctccccgacgactggcggtgcccgacgtgcggcgcggcgcagtccttcttcgagagcaagagcgtcgagatcgccgggttcgcgcagaaccagcagttcggcctcggcggcaactccctcaccggcgaccagaaagcgctgctcatctacggcagcctcctcgtcggcttcctcttcttcctctccggctacttcctccaatgaaccagtcaccccctcttcctaattctctacctctacctctacctctactgtgcctgtttctactaattaagtatatatcagtacgttttatttttattggctaattaattaattaatctgtgtgaatacatagtgctattccatctcgaattttgaatttagataaaaaaaaaaaaaaaaa

SEQ ID NO: 44416 - DNA, 522 bp, Oryza sativa
  Clone ID: PAT_MRT4530_47479C.1
atggatgccagcgatggatgggcgttgttgctggcagtgttgtggataatggaatacggatgtcggacagagaggctcttctcggcgctgcgaagtttcctcgcgggtgaaggctccgcgcaggcctttacgtgcaggcagatcatctgcccgctggtgaaaatgcgtttcggccacctgcaaaaatgtttttctaaaaatgatactaatacccaccttactacctactcccacaaggtgaaccagatttcaatggaggtcaccgacccttggccgcacattcctccgccgccgtccctcatctctccccacggtgcttctttttcatctttttccacttccaccgttcatgctgcggtgatcatcatcctctccatcgcggcgctggttggggcagtgttgctgtccatcggattgtatcttctctgctccaggtggatgaagcccaggatgatcgccggagagccgccgccgttgtgctcccacgaggtggtcgtgcagatggcgccgattcgggtgggc

SEQ ID NO: 44417 - DNA, 284 bp, Oryza sativa
  Clone ID: PAT_MRT4530_4747C.1
gtttgaaggacatttctttgtttatctcaatcagtggacagcgctaaggtttcaatcaatggccattcaatgtcctaacgtgttctacggaaggccgcgaagaagtctcggtccagttggacctggttcatattggtatgactaccgttctggattttgcggtgtcattggacatgagtgtagagacatcatccctccatttataaaggaatgtaattatgcaatgcctaaaaattgtgccggtgggaacacacgagatattgtcaatggtactgaactttatc

SEQ ID NO: 44418 - DNA, 162 bp, Oryza sativa
  Clone ID: PAT_MRT4530_47480C.1
atggccgacgaacatgctccaggagtggttcctccaccctccgatgggcagctgctgccctggctcctctaccgcgcccttgcatacatgatgcgtctccaatcatccaatgccgccgcgttccgctggctgtgggcactgggcacaggagtacatctatga

SEQ ID NO: 44419 - DNA, 534 bp, Oryza sativa
  Clone ID: PAT_MRT4530_47481C.1
gggcaaagaaaaaaaaatgtttcggatagcaaacatgcttaagtatcaacttacacgtgtgactgatctacttttggattcacaggtttgtttctgtactaggatttacgaaactagaggtatcaggatgacctatgtacattgccaatgagagaacttgcaagcgctgacaagtttttcctaagtatcaacaattgtttcctaattacccgcattggtacattgcatgcaatgctacagacagtaacaaaggtcatacaatacacatttgtatgatggaagatgaaagaaaacatacatttcagctgctcatcatgcccttgaatgtgatcccaagaggagagattcaagattcttaactgattgacaaacttcttcaagcttatggagcaagatactgtcacttttaggaattctgcccttggattcctggaaattatgcctggaggaggctgtcacctgaacatagaatcatttaatgttatgcaatgaacacacacctgaaccatttgactgtttttctcactacaccaa

SEQ ID NO: 44420 - DNA, 393 bp, Oryza sativa
  Clone ID: PAT_MRT4530_47482C.1
ttcttttccggtgcccggctggcggggcttggcgtcaagtttcaggcgtgcccaaagacggagctcaccttctacctggctcaagcgctagctcggccgccagatggacgcagccaacgcggaggccaagcacgtctactacctgccgatgagggccgacaacagtaacacagagagcgactgtaccaccattgggaagcagcgttgcccgctgtgatgatcttggcgaggggcttaagaaagctggcggtggatggatcaaacctcttggacgatgaagtcacaaaggcagagataacagtgccacgtgcttttagtgacgtgcaaccgacacttacacacgaatctgggcggattgcagcgttgctagatgtacgcattacaaaccaacct

SEQ ID NO: 44421 - DNA, 144 bp, Oryza sativa
  Clone ID: PAT_MRT4530_47483C.1
atggcgaggagaacgcacgtggaggagaaggtcgagccggggcagaaggcgaaaggcgtcgctttgcattgcgtcggcaccgcaggtgatgagcgacgagcgacgagcggcggcaaggcgagcaccgaacagcccaagccctag

SEQ ID NO: 44422 - DNA, 1789 bp, Oryza sativa
  Clone ID: PAT_MRT4530_47484C.1
ggaggccaggacagcaagaccaggcctgggctgtagctagctagctagcttgtagagaaagagagagaaacactggagctttagagagagtgcgggagtccgcgcggggctgaagaggaggaggaagagctagctatcctatggtgctagctgtagctagctccgacgactgaggtgaggagacgcaatggcggggagatgcgccggcggcggcgacggcggcggcgagggcatgctggcgcggctgcggagggcggcagccaggcggatcgggctctcctgcgcctccttcttctcccacgccgccacctccccttccccgcctcccaagaccatctcatgctcagcactgaatgcgcctgcagacagcactgatgaagaccaggaaaagctggaggagcccactagcacaagaatggctgacaagaatctctgtgcaatatgtctggagcccctcagcaccggcagcgttgatattgacaatggtgacaggccagcaatcttcacatcacaatgctcccactccttccacttcctatgcatcgcctccaacattcggcacggcaatgttacatgtcccatctgccgtgcacagtggtctcagctgccgcgtgacttgaaggtgccaccattgctgcagaacaaccagtctgacccaatcctccgcatccttgatgacaacatcgcgacatctcgtttcaacagaaggtcatccatccgtgctgcccggtacaacgacgatgatccggttgagccttacaccttgaccgagcatgtggatccatgccttcgcttcgctctgatcccatccccagtggcggctcaccatcatgctctcggacattacccttgtggccgtgtgatgccactgcagcagcattgccagtacagcagctcctccatgctctcaccgccacagattgcttcaccaagtgggcagaggcgcgcttacctctccgtcagtctcgcgccacagccagccatggacctagttctggttgccagccctaatgggccacatctcaggctcctgaagcaggcaatggcgctggctgtcttctccatgcgcgcaattgaccggttagccattgtcacaaatgccaccactgcaacccgcgccttccccttgcgccgaatgtcatcccatggaaagcgaatggcattgcaggtcattgaacacctctgctgtgttggtggtactgatcctgtaggggcattgcagaagggcctgaagatactagaggaccgggcgcaccagaacccaagcagttgcattcttcacctgtcagaccatccaatccgaagctgtttcggggtcgacatgaaccgtttcaacatcccggttcaccagttccatgtcggcctcggtttcggggtgcagaatggctttgtgatgcacgagtttgaggagctcttagcgcggttgcttggcggtgtcataagcgacacccagctcaggattggcgagcacggtggagtggtgaggctaggtgagctgaggggtggcgaagagaggaggatcccgcttgacctggtgtcggactgcggcttcatacttgttggctatagctatctggaaggtggaagggaggatcagttcaggacaggcgaagtcgctgtcggtttcgaagagaaaggcgataaccggtactgcggggtcagggatgccggtggtctgagtatcggcggtgagaggaggagcagctgctgcgccgagagatgggactaccttgatccgttcatggcgcggcgatgggcgaagcatttcaatgtgtatagggcctgagtt

SEQ ID NO: 44423 - DNA, 168 bp, Oryza sativa
  Clone ID: PAT_MRT4530_47485C.1
atgagggtctacatccttggggcgcgggttctgatgtaccatgagattgttgtgaactccaccatctccatcgagttatggccagatgaacctggtgggaaaaggcaaaatgccgggttctctggtagagggggcggcggtgcagttcgcatgcctcctgatctatga

SEQ ID NO: 44424 - DNA, 903 bp, Oryza sativa
  Clone ID: PAT_MRT4530_47486C.1
gatcgaaaacacaacaaattccagcgcaaacccggggggacgcgcacaaagccacacccacacgtgccgcatacaccatcgcggaccaaaggaaactgagaggtcgtcgtcgtcgtttgctccgggatcgagatgacggaggcgggcggcgagcgcaggatcggcgtggccatggacttctcgccgagcagcaagaaggcgctgcagtgggcggccgacaacctcctccgcaagggcgacaccctcgtcctcctccacatccggcaccacggccgcgacgaggccaagaacgtcctctggtctcacaccggatcaccgctgatcccgctcgaggagctcatggagacggcggtgaggcagcgctatgatataccttcggacgaagaggtgttcgacatgctcaacgccgtgtcccgggagaaggagctgtccgtggtgctgaagatgtactggggcgagccgagggagaaggtgtgcgaggctgtgggggagctcaatctcgaatcgctcgtcatgggcagccgtggcctcggccagatccagaggattctgctgggaagtgtgactaactacgtgctgtcgaatgcgtcttgccctgtgaccgtcgtcaaggcaaagtagtcgctactcttacagcaatgcaaacctgcatcctggacagaaacaatccatgtatattgcgtgttgtaccctaacttgtcacctaatagtactgcagggctgtttcatttgcagctgtattggagtatgtccgtatagttgaataatcctggatgtctttgtttgctgttgtacctggaagctggaagcctggaatcgtaatacatgttgttagttctgaacatgttactgctatctttaaaagaaagacttaattagccccaaaaaaaaaaaaaaaaaaaa

SEQ ID NO: 44425 - DNA, 348 bp, Oryza sativa
  unsure (1)..(348): unsure at all n locations
  Clone ID: PAT_MRT4530_47487C.1
acaaggctccctatgtagccaaggccaacaagctcaaggccgagtacaacaaggccattgctgcctacaacaagggcgagacactgccaagaaggacccgcaaggaggagaggaggcgcgaggaggatctacaagtccaagtccgggtaatatgaggttacgcgaggcangagagatgagcgtncgagtnaccttcagtgncaagatgggagcagaagcgtaagggcgcgggcgtctaaggagctatccatcatcatcatcgctactagattattcagttacttacatcgnatgtttctttttctctcgtctataacgntagcgtcttgttgngcactggtgggtgtt

SEQ ID NO: 44426 - DNA, 913 bp, Oryza sativa
  Clone ID: PAT_MRT4530_47488C.1
cgggccgcggggtggcggcccgcggcttctcgggtccggagcttgagcgggggcgggagcccccgtggtgggctgcagcaagagcgtgctctccgcgtgtgttcctctcggcgtcggctactcctcctcctccatctgctgctgcttcctcttcgtctccgttcctctccacggggcatgtgtcctcggctccgtccacgtccagatggactgtccaatacaagcagaccaggacataacattctatcgaaggacccatgtgcaaagcttcttggcttttgctagcactagatgcatcagaaggcaaaagaagttcaggtgataatgtggtaatggttgatccactggaagctaagcgcttagcagctcaacaaatgcaacaaattcaggccagagaaaagctgaagagacgtcgtcgagcagaagctattaatggtgcattggcaatgataggactgactgtaggattggtactggaaggtcagacaggaaagggtatcttggcacagctggctggatatctcacggctttgtctagtttattcgggcaatagcagatcatcatgattcatgagttcctttttttgcttttaacttcctcaaccaggaaagcttttgtctgaatctcatttgctggatccaaccaatttgtttatggttaatcctgtccatatttgcaatgacatgcagatttgcaggctagtgatccaattaattgtattgatctggcgcctgtcctgaaaattcatacacggtgtatcaagttaaaacattgtattctcccgcaaaaaaaaaaatcaatgctttgtattcatattcttttccatgtaaaaaaaaaattattatgacagtgtaaagcaactgaagagtagttcaattgatcattcataaaaaaaaaaaaaaaaaaaaaaaa

SEQ ID NO: 44427 - DNA, 799 bp, Oryza sativa
  Clone ID: PAT_MRT4530_47489C.1
ataggactgcacggagttcctgccggagaggtggatcaccagcgaagggaagctgcggtacgagccgtcgtacaagttcttctccttcaacgccggcccgaggacgtgcctcggcaaggagctggcgttcgtgcagctcaagaccgtggcggcggccgtgatgtggaacttcgccgtggaggtggtgccggggcacgccgtcgagccgaagctgtccatcatcctgcacatgaagaatgggctcgctgtcacggtcaagaggagggccaccatggctagctgctagctagctcatgagtcattagccatcagccatggctggttccgttcgtgacgtcctcgtcaatggccgcagcaacgtacgtcgtcagctaaacttacaatgacctaatgatcgtcatcgtataccacatcatttatggtaccaggactagagctacacgtaggtgacacgtatcagtatttcatcagttcgtatacgtattagtaagatgcacatcaaagatgtgttattcctttataaatggtgatgatgtcccttttttttttatttagaaaacgaacttaggcaactgtgcctcaaaaatgctcgggcctctcctatgcactatgcatgcttgcatagcttatagccgtatattggctatgtataggttggtgtgtccctgttagtgattatctgtttgtttcggttttatgcggcttgttgctttgcatttttgcttcatgttcttagaaattatatacgtgtaggtggataatgtgcaaaataaagtgtatccatcatgtatgtgccctt

SEQ ID NO: 44428 - DNA, 2224 bp, Oryza sativa
  Clone ID: PAT_MRT4530_4748C.1
aatacatcaattcactttcaatcaacaccgcataaattgacaaggcttgacgaggaacaatgcatcatgctttctatttcttttacactaagatttgaacatcatctgacgcccactctccttgtgtctgaaacagatcatccggagctaagcctacaactatggatgttcatttatccgcgttttataaatatgaaggaggtgccttcttacattactgagtacaggaattgctgccttttaaccaagcatctgccaccagggcaggcaaaaaaactgatagtcagcccatctgccaaagggtatttgaggcaaggcgacgtccagcataacaaaaattaagaggaaatgtggctcagctcacattgaagctcggccaaaagaatggattggtttctggtctgccacaataaatatttctcaggagatgcctgctgtgcagtgaactgcatcatgctcaaagaccgtatctgttattttcgatggaggccagtatcgaagcacagatctgccaagaatgttcttcacagggagcaagcatcttaatgtctgatctaacagagttggcactttactcaaatacttgatgccatcaaactgtgacactaacacttgatccatttcatagttgagtggctccagcacaaattcctcatcctggactactccattaaccaataatttaccatcacgtacttcaacggtatccccacccttggccacaattctcttgatgaatacatctcctgaactgcaccccaaggcctgcagaactgggggggcacggaagatcacaatgtccaaaatattaggctcccggaaaacgtatgaaaccttgtcggcaaggattcggtcaccaacatcgaatgtcggatacatagacttggatgggatggaccttggctcagctaaggatgatctatataacagtggcacagtcacagcggcaaagacagtcttggcatcatccgaacaggagctcacccaccttgatagccagttcctcctgctcacctctgcagcagcaccaagtgcaggactgctctttctcaccattccagcagcaccggagttaattgcgccactaccaaccaatggtttcacgcccacgcccacattagaagaggcaccactggagttgattacgccggagttgattacaccactaccaaccaatgctttcacgcccaccttagaaggggcagccaccgcaggcgagggcacatgtgcaggacggggcgaaggcgcaggtgcaggcttagttcgtgacacaggcgtagcagcaggcgcagcagtgggcgctttagctacatcaactgggcgagccgatttgcgggatggcgccgcggaggtgatgaggtcactgcaagggagccacttggtcgcctgcaggaatgggaggagcgccgcggggttgaacgctgacgatattgacggcgacgccgagagcgatgaggcgcccacgcggccagtagcggagcccatcccggaggtgaacaccgtcagcaacccgacggccagcaatgatggcgggtcattcaccggagccttcgttgcgcacgaccgcgagaggagcagcgaatggccccctccattggcggcgatggcggaggcggcggggagagcctttgccttgggcttgggcttgggcttcggatggttgtgatcgtcggcgtcatggtggtactcggagtggcgggaggaagcgaagaggcagaaggggcgggagagcgcgtcctggaggaagcgagccccagcccccggcgccgcaccggaggaggcggcggcggcggcggtgcagcgcaggccaaaagacgaggccaggctctgcgccacatagccggagtacgacatggtgatgcggatcgccatcgcgaagctggactcctgatctccgggatcttactggagatcgtcggtcactttcataccgtcagccgggacggcggcggcggcggagaggggcgcggggtatcggggggatctagggttctaccgagtaggaggcgaccgctacaggggttcgtcgcggtggcagcacgcagatcgaggatgcggcggtgggaagggtaggcctccggagatatgggaagtcgccgccggtggcggcggcggcggcggaggaggcgagggagggggcaagttggggggaaggagagaaggtgcctcggcgggatggtgggtggtggaagagacgcgtcggcttttttatgtcgcctcgtgc

SEQ ID NO: 44429 - DNA, 1874 bp, Oryza sativa
  Clone ID: PAT_MRT4530_47490C.1
ttttcctccacctaaacccccacatcgccctaggggcctgtttacccttcctacctggccgacgccgccaccgccgccgccatggccgccgccgccgccgccatccgccgcccgctcctccgctccgtcgccttctcctcctccaggtcccgctccctcctccacctcctctcccgccccctctcctactcctaccccccttccgcctcccccaaccatctccaccacccccaccagcagcagtggcagccatcgcctccgcctccgcctccgccgccgcaaggacctcctccccagtggtctcctcccggaaactaccaccagcagcaggcccctccccctgcgcgccactactacggccccccgcagcatcagcctcgctacaactacggccctccgcagccacaggcgccgccgccgccgcgcaacgactacgggccaccgccgccgccgccgcagcagcagcagcagcagcgggaggctgtggtggggccaggggagctgatcgggctcggacgggaggggcgagtcaaggaggcggtggagaagctcgacaagggggcgcgcgccgacccgcaggccttctacgagctcgccgcggcttgctccaaccccaagctgctcgaggagctcaggaagatccacgacttcttcctccgctcgcccttccgcgccgacctccaggtcaacaacaagatgctcgagatgtacgccaagtgcgccgccatgaaccacgcccgcaggacgttcgaccatatgcctgaccggaacatggactcctggcacatcatgatcgatggctacgcggtgaacgggctcggggacgttgcgctgcagctgttcgaggagatgaagaccaagtatggaattgcaccgaccgcccacactttcacgctcgtgctcaatgcctgtgccaactcggaggccattgaggaggcattcctgtactttgatgccatgtccagggatcatggcattgagcctggtgtggagcactatgttgggatcattgaggttttggggaagtcggggcatctcaacgaggctgtggagtacatcgagaagcttccgtttgagcccactgacacggtgtgggaatcgctcttgaaccttgcgcgcatgaatggagacattgaccttgaggatagggcagaggagttgctggtctcgctcgatccaaccaaagttaatcctaagaagctccctactccacctccgaagaggcgccttgggattaatatgcttgatgggaggaacaagctggtagagtacaggttgccgcccaagatcgaaaagaaggtggtgaacgaacagcggtatgtcccagacacaaggtatgttctccatgacattgatcaggaggcaaaggagcaggcactgctgtaccatagtgagaggctagcgattgcctatggtttgattagcaccccagcaaggactccgcttcgcatcattaagaacctcaggatctgtggagactgccacaatgctatcaagatcatgtcgaggattgtagggagagagcttatcgtaagagataataagcgcttccaccatttcaaggatgggaagtgctcttgtggtgattattggtgaacatggcttttgttcagctgaatacaatggtctgaaattgccaatacgatgtattgagcacttcttttttcttattattaggattgcagccatcctatatgaatatatgctggcagccatgcttttagcacataaacaatatccagttatctgatggtagtgttagtactcctgttatccatctcattatgatcatgaagatgaatgtgatgcttttaaaaaaaaaaaaaaaaaaaaacaaaaaaaaaaacctcagcccggggatccactagttctag

SEQ ID NO: 44430 - DNA, 450 bp, Oryza sativa
  Clone ID: PAT_MRT4530_47491C.1
atgtatgggagcttaaagaggggaggaggaggttacatgaaggtggctgtgctcgaatttaataaatctgtgaggaaatatccaaagagggggaaggcaacaacaccaacaccaatattgaaaatcttaccttcacttagtaacaaatatccaaagaggaggaagataacaacaccaacaccaataaccttcatttactatgaaatatctaaagaggggaaagataacaacaccaacaccaatgtgacgtactcagacattatgcaacaagagcagtttgcggtcgctgaaattagcaggataagtgatacaaagactctgatggagcaaaacttgtgcaatctaaagaaagcgatcaagtccccgagttcagacaatttaaggaggattgtggcattaacaagaagaattggtgagctagaagaggacaggactctacactgcagctga

SEQ ID NO: 44431 - DNA, 2424 bp, Oryza sativa
  Clone ID: PAT_MRT4530_47492C.1
caccaaacaccagatcaatcgcgtgtacaaactcatgcaagcatcgtattggaagcaaagggggaaggtaaagaaaattagattgggtattgacaacacgcatttcttcaaggctcatgctactcagaaccatcgaagaacttttattcgctctatcaaattaacagacatggaagtctctgaacactctgataaggccaccaccatgttcagttattacaatagcatcttgggtgcgtccactgagacttcatggtcttttgacctgcatactatttaccatggatgtgcaatggcgaatgctgatgaattagttcaacctttctctgaacaagagatcttccaggctatcaaacatatggataagaacagtgcccctggtcctgatggatttggaccaggtttcttccaagcagcgtgggcaatgatcaaaccagatattcttcatctattacagagcttttatgacgaaactgcggacatggaaagaataaacagggcattcatcgttcttatcccaaaaccgggcaaaacaaatactcctgacggttaccggccaatctccctccaaaattgctctgttaaaataatagccaaagtcatggcgaatagaatgcaaaggcaactcccacccctcatcgacttggatcagtcaggtttccttaagagggagaagcatctcggagaacttcatttatgcaagtgagcttctgcaatgttgtttcaaacgaaaatgcgcagctgcagtcataaagttggatttcacgaaagcttttgattcagttgcatgggatagcttggacagaatccttcaagctcgcggattcccattcctctggagatcttggacgaatagactgctacaaacttctaagtcagcaattatgatcaatggcgttcctgggaactggatcaactgcaaaagaggagttcgacagggtgacccaatgtcgccatatctgttcatccttgtcgctgatgtgctacagaaactcatccgacattcgggcgaaattaaacatcctatatatccggatcaaccttgtgcaaccctccaatatgcggacgacacaatcatcatctgcagagcgactgagcaagatttggcggcgcttaaaacctgtctaaatcactttgcagcagccaccggtttgcatatcaacttctctaaaagcaccctcgtcacgatgcatgtgccggatgaggtaacaaccgcccttgccaacatcctacaatgcaagactggtagtttccccctctcctacctcggactacctctctctcatagcaaactccacattgctgatctctggactccggcccatgatagctaaagctgatttctacctctcctcttggcaagccaaactcctcaactattcagagagaattgtgcttatcaacgcggttcttgatagcctcccggtctatgcaatgtcggcgcttctgcttcccaaaggaacaattgaagcttttgataaaaaacggagggctttcctttggtctggagatgattcttgtagtggctctagctgccttgttgcttgggataaagtgtgcactgccagagaagtgggaggtctagggattaaaaacatgcatgatcaaaactgtgccttgcttgtaaaaagacttcatcatcttcattcgacagactcctcttggggacggtggatctggcaagaacattctggctctgctctcttttgtgacaatcaattgggtccccactgggactccctatccactctcctaccgattctccagcgcctaacgcgcgttcaagttggggatggcacacgcacttcgttctggcatgactgttggtatggttcgagtactttcaaagatcgatttgctcccctgttctctcatgctctcaacagggaagcaacagttgcggtgttcctctcgaagccaattgaagatcagttcgcccccaggctgtcatccactgctgaaactcaattagcgagattgagagagatgctacaaaacttctacctcagtaactctactgatctatgtccgtcgcgtgatgctcccgggatccttcgcacaaagtttatctattcttctactcatatgggcctacctctgtgcaagaactggcgcttcatctgggacaatcgagctccgccgagagtacaattcttcgcctggcttctagctaaggatcggctccctaccaaggctaatctgcacaagaagaacattgttccaacagccgggtgcatcgtctgcaactgtgctgacgaaactgcaactcatctctttctccaatgccaattcgctcaggaattctggagagccttgcgtacatctgttgtttcgaatgttcaagatcttgctgacctcgttgctccctgccacttgcctgtcaagcacttccaagtttttttcttactttgtttctggggactt

SEQ ID NO: 44432 - DNA, 2616 bp, Oryza sativa
  Clone ID: PAT_MRT4530_47493C.1
gttgttaagggagctgaagctttcttctgaagtaattcagattagctctccatccttaactatttcatgtctcacgatagaggccatggggcgaactctttataatcccactgttggtgcaaacattacctttgcaataaaatgtttaggggatgaacaattggcaccaatagacaaaaccttcggagctcatctagtcctattatcgaaggttatgggattctacacagtgtgccgatccggcacaattatgtcaaagatatcctagacttccattttttcgatgtctctgactttgatcttctcatagcccaaaccatagataaacttctccttgaggcgtagcatactggagtccttgagatcaaactcggggaaattatgttttccgtcccgatcttgagatcaaaaaattctttgatgcaatccattcccgatttcgagccaattgaggaattgttggctatctctccatttgtgtcccccgaatccctcctcgaagatgatgccagtgcattcgtcgaggaggacgatcctagagaggtgattgagttacccaaaactaattcgccttctcaacctctggttaagctcaaacctcttccttcaggccttttgtcacacttcttgcacggtgatatggagttggctgtcatcataagggacaagctttccgatgccaagacctccaaatccacagccgtgttagaaaaacatcgctctattcaaggcaactcactatactcatcgcattcctttagatccttcttgtgcgccctctcgagagccacaatgaagactaaataatgccatgagagagttcgtgaaaataaaagtgttgaaactccaacatgctgggataatttatcccatcccatatagtgagtgggttagcccagtccaagttgttccgggaggtatgacggtcattgaaaactcgatcacacccctactaggaacgaccacttccccatgcccttcattgatgatatgctagagttgctggtgaatcactcatttttccgtttcctttatggctattctagctatcatcgaattcccatccattccaatgataaaagcaagacaacgttcatgtgtccttgtggaatgtatgcttaccgacggatgttgttcaggctgtgtaacgcacccgcgtcattccaatagagcatgatgtttttttctctgacatgatcaaggaaatcatgaatattttcatggatgatttttttcatcaatggaaaaacctccgatcattgtttataaaaaatagacaaagtcttgcaatgatgtcaagaggagggcttgttcagatcttatttagatggagctaaggttattgtttacactgatcatgctgtattaaaatacttgctcactaagaaagattcaaaaccttggcttattagatgggttctcctactttaataatttgatcttgaaattaaagataaatttggagtagaaaattacgtagcagttcatttgtcgcatatgctaagtactaacatgcatgaacagcaaataaatgattttctacgggatggcatgttaccaaagtaacatactcgcaaccctggtgtgcaaatattgtgaactttatggttgcatggtatgtaccactggggagaacaaaaggtgcatcatctatgatagcagaaggcacttgtgggacgaaccgtacttataccgagtctattcagacaaactactcaaaagatatgtaccgacagcaaaaagcatccagatcattgaaaaattccatgcatcaccatatgaaggccattgtggtgcatttcgcgtgcaagcagagatctggcggagtgcattcttcaggcccaccatgtatgaagatataaaagaattcatttaaagatgtgcaggatgctagaagcacggaggtatcactattcacgatgtgatgcccttaacatacaatattcaagtggaactatttgatgcatggatcatcgtttacatgggaccattccctaagtccattattgcgagtacatcctagtggctattatgtgtccaagtatggtaataagtgaaaaagggtctcacttcattaataagacattccaaaactttttacatgagcttggggcgtagcacaacattgcaaccccataccatccccagacaagtggtcaagcagaaacattcaacaaatagatcaagaacatttcgcagaataccatacatgagatggggaaggcatggaagaacaaactacactatgcattttgggcatataggaccgcatacaagacacctaaaggcatgtcaccttaccagctcgtatatggaaaaacatatcatttaccggtcgagctggagcacagagcacactgggccacccggacatggaatattgacctaggagaagccagacatcatagatagttgtagctattatagatggaggaattgagggataaagcctatcacgatgccaaaatgtataaggaaagaacaaaaagatggcatgataggcgagtcatggtgaaggaatttgaggcaggagacatagtattgctcttcaactcttgggtgaaactcttcgtgcatggaaatctttagacatagtggcttaaccccaaattagtt

SEQ ID NO: 44433 - DNA, 511 bp, Oryza sativa
  Clone ID: PAT_MRT4530_47494C.1
gcacatgctgccgcctttaccctcaaatccaccgagtgagccgaacatcaccgccctccacatgatccactaaaggggggggcttcctcctaatggcttctctaccaacaccaccaactacaccatgaaaattcccaacaactgacccaaaccgcaaaacgcccgcgtagactacatcgttcaacctcccctactgcataatctaaattggactaatatcctacaatcctaccaacttcttactcgacctgtacactggctactgctataggaatcataaggcaatgcctatcaacccttaaacaagactccacactcttaagcacctacttaaccacctcaagatggcctacatctttggtgctctgccttcacctcatcttacgacatcaacgaagtcgccctcgttcactgtacattgccagttatctattgtgctacaatctatctatgttgctgagcatgtaccaagcatgagatctaaaaaaacatcgtaccacgggcaaaatcc

SEQ ID NO: 44434 - DNA, 503 bp, Oryza sativa
  unsure (1)..(503): unsure at all n locations
  Clone ID: PAT_MRT4530_47495C.1
accatttttaacccacttataccgtgaaaaacaatgagcacagttcccgtttccgtttccgaatttcgatccggcactgctatgtcgctgcgctggatcgcttgatgaaggagacgacggcatcaagctccgcctccgccttgtctcccccggcggcggcggcggcctcctcgaggaagtagacgtggccctcgccgccggtctcgtacagcgccgcctcctccccttcccacgcgctccccctcagcacctccacgtacatccgagctcggtcacgcatcgtgtcgagctcccccacggtgaccagtgcccgccggcagccaagcgccgcccattcctccgccggagtggacagcgggttgatgaacgggtggtcgatcccgtacctcccggcgcacatgaagccccatgatctctccgcccgccgcgggagctcggnngtcacgcgttccgacggcatgagctccccgccgcggaagaatgggtggagaagcaccatgcct

SEQ ID NO: 44435 - DNA, 305 bp, Oryza sativa
  Clone ID: PAT_MRT4530_47496C.1
ctgctggcctgctgaagccgccgcgccggaattgccgggaccgaccacgccgctgagtagtgccagaggaacgcctaccactcgagggaccgcctcaaggaagctggggtcggagccatgctgaacgagcagagcagcaccggggagtccgaccggccaatggacgaggcggtcttccggaggtggcagctcgactgcaagggcaacatctctaagtgtttggtgatgcccaatgttgacataaactggtggcactacgtgcgactctaaaacctgttgagccaagctaaccgtgccctgcaaac

SEQ ID NO: 44436 - DNA, 198 bp, Oryza sativa
  Clone ID: PAT_MRT4530_47497C.1
atggtgatatctggtgcgtggggtatgctgcaggtgaaagggcggtgccgaggcggaggcgtcctggctggaggcggcgccgacacggtggaggttggaggtggagggtggaagcggcgcggtggaggcggaggccgagcggcggtgagcgcgaacgcgcggtggatggggaggaatgcggcgctgaggagggagtga

SEQ ID NO: 44437 - DNA, 1465 bp, Oryza sativa
  Clone ID: PAT_MRT4530_47498C.1
atgggaggcgggctgtgaaggattccgagggactggagcggccacgggagctatggcggctcgtcgtcgcactagcactcttagccgggccgccgtcgcctccgcggctccgacggaggtgtataaccatcaaggtacgatggtcgcggtgtcaactagcctgaatgggtgcctcctcatgggcgagttgcaagccatgatgcttcttcttatgggccgaagaggtcaattgagccaactacggacccgcagagtccgacagcggcagggtcatatcctcactatgaaactgcacagagttcgagccgtgctggaccttcttcctacttatgacaatcgaggtttggcccaatctgccttgtgagccccaaagacatggcgtttggctgcggcacaccagacctgctgtgattgtgggcagaacctcgaatcgtgcccaatatgtcgcagtccaatctccacaagaataaagctatactagcaatggcagtttggatcatttgcgaatgggtggcatactggagaccaccattgtgtcacattgggcgatggattgtattggatgcttcaagtgcaatccatgcaaagcctttgaacggcttgcagacaagcccgttaagtactgggtttgcatcgacaaggatcgcaaggccagcaatccactgctccaagattgtggagcaggggatgtctcaagtattgaaacccactaggaatgatccgaactccagtgcaagaagtgggttgataaaatattctaacgaattgaagaaaagaaagaaaaggagaaatcctgatggatcgaacaggagtctgtctgattagtcgaacatttgtacatatcgcgatgttggtttcgtcaccgtggccgacataagttttagaggattcgttttccagtgccgtcttcatgcaagatttgtttgtttattcatgcgtttttgtaaagatttgcagttttcgtatatgattgaaagtgactttttttggtgccaaaaaatataaaaaataagccttgatggagatacctcagcaatacaaagcaactgttgaattaggaattttaggtcgtcgctctttcaagtcgcctgaaagggttcctctccctccccctggtggaagccatgatgcttactcgtatggatcaaaaagctttagtaaaccaagtacctacccacagagtagtacatcatcatcgtcatatcctcactatgaaactgcacagagttcgagccctgctgtaccttcttctacttatgacaatcaggtttgcccaatctgccttgtgaaccccaaagacatggcgtttggctgcggacaccagtgcaatccatgcaaagcctttgaacggcttgcagacaagcccgttaagtactgggtttgcatcgacaaggatcgcaaggccagcaatccactgctccaagattgtggagcaggggatgtctcaagtattgaaacccactag

SEQ ID NO: 44438 - DNA, 1983 bp, Oryza sativa
  Clone ID: PAT_MRT4530_47499C.1
atggccctctcacggaggtttctgaatctgatcgtggacaaccgcttccctggatccaaatcgctgcgctgcatcgaccttacgctccagaatttcttcaacatatcagattccaaagttgtcgcggctgatgcctccgcagccataagcggcagcatggattggatccaacttccaagcccaatgttcaacttccaagcttcaagtgtggcccatcactgggaaattagctgcttcccgctaagaggtcgtgaggtgctctgcatcgaccaggatgaatgttgtttgatcttcttcaccaatgttgatgatgatgatggtgatggcaccctcttcatcatggagagggtcgttaaaccggagtcgccgagaagttcaccgtcgcacagcgatcagttcgaggctgttttctaccgaacgcagagctctgtccgcagtgtttcgtccacctgcaaacctctacctccaccgcctttcgtcagagaccccaaattctccaacacacgcaccacgatcaactcgtacgcggtggtcagtggtggatctgagatctgcatttcggtggagggtgctggcacttactgcatggacacagtgaagcatacttggaggcatgtaggtcagtggacattgccattctatggcaaggttgagtatgtacctgagctcaagctatggtttggcctctctgacaagaccaatcacttggctgctactgatctctccgccatggatgactgcttccagaggccagagctagtgagagcttggatggaactctcaccttgtcagcctgggctccggcaggttctgcatcgcaagttcaccccaacaatggccctctcccggaggtttctgaacctgatcatggacaaccgcttccctgtatccaaatctctgcgctgcatcgacctcacgcaccactgcaatctcttcaacgccacaccaccgaatttcttcaacggatcaaaatccaccataatcagagtggagaacaggattcaacttccaagccccatcttcaacttcgcagcaggtttcggcgaagctacacgtgcaggtttcggcgaagattggaggatggattgcctgccgtttcttgatcgcagggtgatctgtgcggaccagtcgggacgctgttttctcttcgaggcagacaggagccgcgtggttatgctgcctcgtcttcacggacccaagcaggtgcccatctccatcctcatcccctgccctgaagaagaatccggtgaattcgacggcggcaacttctacatcatggataagatgagcagagctggagtgtcgggaaccaatcagttcgaggcgttcgtctactgccactatcgtggaagtcgcatcatgaaatcatggacatgccagcttctcccgccaccgccgtatgtttatgacagaacatacttgggccgatggctggagatcagatcttatgttgtggttgattatggctcgaagatctgcatctctgtcaaaggtgttggaacctattgtatggacaggaggagcctcacgtggagtcacctgggaaaatggatgctacccttcattggcaaggttgagtatgtacctgaggtcaagctctgggttggcatttgttcaagcacccatgaactggctgctgctgatctctcatcgatggattcgcagccacaattagttggtacttgcaaggagtttgaaccgccggaggaatggaagcaatgcagggatcctcaacttgtcaacctgggttccggcaagttctgcgtcacaaggttctttcgcaatcaggctcccaaaggggattctgatgatgagttcattgggaggaacattactgtcttgaccggtgtggaggtgatgcagagtgcttgtcatggcaatggcaatggcaatggcaatggcagcagtggggaaatggaactccagatgatccctcacagatcgagatggtatggtggcgataccatcgggacagtgtgctga

SEQ ID NO: 44439 - DNA, 1857 bp, Oryza sativa
  Clone ID: PAT_MRT4530_4749C.1
atggtgcggaaggccaacggaaaatggagaatgtgcgtcgacttcaccgacctcaacaaggcgtgccccgaggatcacttccctcttcctcgaatagatcaactggtggactcaatagccggctgtgagctgttgagctttctcgacgcttactctggctaccaccaaatcagcttggcaaaagaggacgaagagaagatagcattcatcacgccgttcggggtattttgctatgttaaaatgccgttcggactgataactgcagggaatactttccagcgcatggtccagggcgcacttagcgaccagctcggcaacaatgtcgaggcatatgtcgacgacatcattatcaagaccaagacaggcgactcattgattgacgatctgcgggaaatgttcgacaacctccgacgatatcgccttatgctcaatccagagaagtgcacgttcggagtaccgtcgggcaagctgctcggtttccttgtctttggcagaggaatagaagcaaatcccgagaagatcaaggcaattgagaacatgaagtcgcccacaagactcaaggaagtacagaaactaaccggatggatggcagcattgagcaggaagctacgccactactttcaagcccacagagtcacagttgtctcctccttccctctcggtgaagtcgtgagaaacaaagacgttgtcggccgcattgcgaaatgggtagtcgagctgagccagtttgatgtcaattttgcgctacgaacagccatcaaatcccaggtactcgccgacttcgtagccgattggactatgcctgataacaaatcagacaaccaagtcgacaacgaaacgtggacaatggcgttcgatgggcgaccaataagagctgcagccgcacttggggtcaagcgactaatcgtgaaaggggactccgagctagtcgcgaaccaggtacacaaagattataaatgctctaactccgagttatccaagtatctcgcagaagtcaggaagctagagaaaaggttcgatgggatcgaagtccgacacgtctaccgcaaagacaacatcgagccagatgacctagcacgacgtgcgtctagacgagaaccgctcgagcccggcacttttctggacatcctgacaaagccatcagtaaaagaggttagcggcgaagttagcccggtcacccccgacattagctcggaggccacaaaggcagaacaagccgttgccgatatcgagaccacagacgactggcgcatcccactaatcaaattcatcaacagcgaggagttgcccgaggacgatacagagaccaagaaaataacccgtaaagcaaagatctactgtatggtcggcaacgatctatacaagaaagcgccaaacggggtacttctcaaatgcgtctcgtccgacgatggcagacacctcctccttgatatatatgaaggcatttgtgggtcacacgccgccggtcggatattggtcgggaaagcttttcgacaggggtttttctggccaaccgcccttaaagatgcatgcgacatggtccagcgatgtgaagcctgtcaattccatagtaaacacacaaagatacccgcgcaagcgctccagactatccctcttacttggccgttctcgtactgggggctagatatactcgggccattcccacgaggacagggcggctataggttcctattcgtggcgatcgacaaattcactaaatggatcgaagcagtacccatgggggaaatcaaggccgacaatgccatcaaattcatcaaggggatattttgcagatacggactactgcaccgcatcataaccgacaacggctcccagttcatcagcgctgatttctag

SEQ ID NO: 44440 - DNA, 369 bp, Oryza sativa
  Clone ID: PAT_MRT4530_474C.1
atgccggatgacaagattggacacaaggttgcacacggtgggtggacagacaccggaggccaagccgagcagcccaagacgacgggccactgcatcgaggcaagccggccttccagctcgggagctcggtcagcaggaggccacatggccggtcctaactggcccaagatggagacagcccacggcgacgggcccatgaagacaaggcaagcaagtccaaggtatgcgtgcggcgggagccgtacgagcaacgtggcggcctcccgttcgacggaccacggcatcggcaggaaaggtaggcccgctaggctggagcacgcgcggagcgctcggcgagacgcgtggcgactccggactggacgcgggtga

SEQ ID NO: 44441 - DNA, 498 bp, Oryza sativa
  Clone ID: PAT_MRT4530_47500C.1
cttactcgtatggatcaaaaagctttagtaaaccaagtacctacccacagagtagtacatcatcatcgtcatatcctcactatgaaactgcacagagttcgagccctgctgtaccttcttctacttatgacaatcaggtttgcccaatctgccttgtgaaccccaaagacatggcgtttggctgcggacaccagacctgctgtgattgtgggcagagcctcgaatcgtgcccaatatgtcgcagtccaatctccacaagaataaagctatactagcaatggcagtttggatcatttgcgaatgggtggcatactggagaccaccttgtgtcacattgggcgatggattgtattggatgcttcaagtgcaatccatgcaaagcctttgaacggcttgcagacaagcccgttaagtactgggtttgcatcgacaaggatcgcaaggccagcaatccactgctccaagattgtggagcaggggatgtctcaagtattgaaa

SEQ ID NO: 44442 - DNA, 345 bp, Oryza sativa
  Clone ID: PAT_MRT4530_47501C.1
agcaaaccacaaccgttcattgcctttagcgaggaaagggggctgaccactaacccacaaacatgctatttaagggggccaacccaccaaccacggactgcatctttggtataaaaaacaaacctagaattagatatgacaaattataggactgggaaactggacaaaaatatggctagaatcggagaatgaagggggggcacatccgaacctagaaggggttttttaccagagaagggagttttaaaaaacctattttgggggggttggacaaaaacctacttggatccctaattggattggaaccccacaagcgtggacacaatttttcctgcctttaggggc

SEQ ID NO: 44443 - DNA, 402 bp, Oryza sativa
  Clone ID: PAT_MRT4530_47502C.1
ggcgaaaaagtccctgttaccgaccacgctgataactatggcgggttgcacggaaccatttttgcgcccttgtactttccggacttggttaatggaaatcccaacttccgttcgctcaaggacgaccttaattagggctaacaaatcttgcccggcatgcaacctttccggcctgacaagggatgagggtcttctagcctgccggggaggcccatccttaccaaaggcggaacacttaggtggtgggggccaccttgaaaggaaaaggcttggttaaggcaccaaaaatggatgatgaagacccatggttgtgatgctcggttcacaacccgtttgaaaccctaaagtctggtcaagtttgtccggccttaacccctggatgagcctaggaatttttttcct

SEQ ID NO: 44444 - DNA, 500 bp, Oryza sativa
  Clone ID: PAT_MRT4530_47503C.1
gcacgaggctgaacttcgctttccgtgacaagttcaagaagatgttcggcttcaagaaggagcgtgatggttacgccatgtggatggccggtaaccttgcctccggtggtgctgctggtgccacctctatgcttttcgtctactctcttgactacgcccgtactcgtcttgccaacgactccaagaacgctaagactggtggtgaccgtcagttcaacggtctcattgacgtctaccgcaagaccctcgcctctgacggtattgccggtctctaccgtggtttcatgccctccgttgccggtatcattgtctaccgtggtctctacttcggcatgtacgactccttcaagcccgtcctgcttgtcggtcccctcgccgataacttccttgcctctttcatgctcggttggtgcgtcaccaccggtgccggtatcgctgcctaccctcttgacaccatccgtcgtcgcatgatgatgacctctggtgaggccgtcaagtac

SEQ ID NO: 44445 - DNA, 359 bp, Oryza sativa
  Clone ID: PAT_MRT4530_47504C.1
acctacccggactgaatggctggttcgacccacgcgttcgttttaactaaagagaaggccaatccacgggaggacctctaaagacaactccgccctccaccgccgaaccacggcggaacgcgccctactctacacggagctcgggtacctcctagtgcctcaatcacactaacaatctggagcacctgcgtcatcgtcgaaagactgcgcaaacaccaatacagtcttgacagacaaatgggaacccgactccccgaaaacaaaaccccacctaaaggactacaaagaggacctctacggctgcgggccgggggggctcatcctgctgctaaaaaccaataaacaacaggaccctttcc

SEQ ID NO: 44446 - DNA, 327 bp, Oryza sativa
  Clone ID: PAT_MRT4530_47505C.1
atggccgatgtacaaagcggcggcggcggcggcatcaccgtcaccgccgtggcggagcgggacggcgagagcggctacggcgcggcggtgttcttcgcctgcctacccggcgcgctgatcgccattggcgtcctcatggtgctctactaccgctcccaccatggccatggagcgctggccgtcttcctcctcgtgctgtccgtcttcgtcttcctatccgtgtgcttctgttgcataggtctcgtgcaactcgccatccacggcagccttcccctggaagaagacagggttgctgctgctgttgatcatccattagacgccgtctga

SEQ ID NO: 44447 - DNA, 438 bp, Oryza sativa
  Clone ID: PAT_MRT4530_47506C.1
atggcgtcgacctcaccactgcaaatgcgtgcggttagtccaccggtggcggcctcacatcacatggctcgctctcggtctcagccaataagccaaacgacaacgaggcaggcggcggctggaaaagcaaagcgcctccctggccgcgcctggataacatttcccggcgccatcctccgtgttcatcgtcgcgtcgatctcgtcggccagatgacgacgcacgcagcagctgtggctctgtggtcggtcaccgttagggaaggaggaggtggtggtcacggcagcggccatgccggagccggccacggccacggcggcggacatggcagcagccacggcaggccggacccatcagagcaccacccgggcaagcgcagcgcggcgcccggtgtcgggcagcctcctgcgccgctgtcgctctgcttcccctctgaatga

SEQ ID NO: 44448 - DNA, 553 bp, Oryza sativa
  Clone ID: PAT_MRT4530_47507C.1
ttttctttttttttttttttttttttttttttttttttttttttttttttttgttttttttttttttttttttttttttttttttttggggaaaaaaaattgattatttaaaaaactaaaccaaacgtttttttttgggggggactcccgtaaagttgaaaaacaaaagggaaaaagggaattccctgccgcgggtccaaattaaaatggttttttggaacaaaaaccaaaggggggcctgaaaaaactttgggggaaatttttacttaaaatttggaacacctttttgtttggaggggaaacaaaacttgggggcatgaacggggtaaccggccccccaagggttaagaaaagaaaaaagaattctttgaaaggtccccttttgaagaaccggacctaaaggggggcgaatctttttaatttctcttaaccgtgtacctgggccaaagaaaggttacaacccaagggtttttgggggcagttgtttaaaaaaataataaattgccccccccccccccccccaaaaaaaaaccccccccccccccttactttt

SEQ ID NO: 44449 - DNA, 485 bp, Oryza sativa
  Clone ID: PAT_MRT4530_47508C.1
cccacgcgtccgcccacgcgtccggcacaatgaatctgcttggtggcatacatctgattgtctaatgtctacaccaataatattggtattaatggaccagtaaacttttgacgacaaaactactcttttggtaaccatttcggagaaccacaccactaactattgttattgcataacaacaaggaaccatgcttcttgtggacatgatgacttggacctacatggtaacaacataatcctgtctgacccatcacatggacattgacttccacacccactggctggcagtaggtatcacttgtatatacttgacttccataccacactggtagcaataggcataccacttgtctatacttggaagggagagggatgagactatttgatttctgctttgtgttgtgcgtgaagtggctaggtgaggagagccaagattcatctgtttcttgcatttggttttcttattcatcacatagatcatgttt

SEQ ID NO: 44450 - DNA, 1311 bp, Oryza sativa
  Clone ID: PAT_MRT4530_47509C.1
tcaaaggagaagctctggaggatggtggcgagcgccatcttggcttccagcattgcaaagttctgtccaaggcagatccgagaacccccatccaaacataaagaatgcggtcttaaacttcgttgccttggagactccgttggcaaacctctccaggttgaactcgcttgcatctcctccccagatgctgggatcatggtggatagatggaacgggcaatgtgaagtttgctccttcagggcggcgtggagggtggatgcggcggcggctccgccaggagggggggtgggggcgctggcggcggcggccctcctctccggatctggcgcggcgtcgggcggggcaaggaaggcggcgtacagatccgccgccccccgttctcggaagagacggcggcgcgcggatccggtggcctctgtcctctggagcggccaggcgcggctgggaaggacggtggcgtgcggatccatcgcctcccgtgctcgggagcgacggcagcgcgcggatctgcccgattccgcccggcttaggcgggcgggttcgagcggccacggcggcggcagctgcgataacgacgacggccatggtggctgcgacgacgacaacgatgggcgtttggggtggagcggccggtccgagcgagcggagagggaggaggcggggagaccggcgagcagcgcggggatgttggtgagcgcgcgcggagagggaggcggcgaggaggccggcgagcgggcggagagggtggaggcaggcgccgctcctctcccctcctccgtcgtcgcgccgcgcgccacttcgccaccgcgccgcgcggcgctcatctccgccggcgagcatgccggcctccccgcctcctccctctccgcgcgtctgctcctctcctctcctccgccgtcgcgccacgtcccgcacagcgctcctctctcccgtgcggcgctcgtctccgccgccaagcatgccgagggagcatcatgcgtcttgtgccatagacggcaacagcggcgagcaggcctcgactcgcttgagctacaagcaggcggcaggggaggaggcaatgagcagcagctgaggaaccttcgagctggcgctagcgctaccagcaatcctactaatggtgctagaaattcgacgaacattgattcgattgattttttggaggctttcagaccagtgcttctgtttacagatttgttggtctacatattagtaaattcagatgagctgatgaatcagggaattcagattgctatgcctaacatccttagttcatctgatgttgctacatccttcttcaactttaaggtataa

SEQ ID NO: 44451 - DNA, 731 bp, Oryza sativa
  Clone ID: PAT_MRT4530_4750C.1
cccccccagttctgcaggcctggggtgcagttcaggagatgtattcatcaagagaattgtggccaagggtggggataccgttgaagtacgtgatggtaaattattggttaatggagtagtccaggatgaggaatttgtgctggagccactcaactatgaaatggatcaagtgactgttcctcaaggttacgtgtttgtgctgggggacaacagaaacaacagcttcgattcacataattggggacctctccctgtgaagaacattcttggcagatctgtgcttcgatactggcctccatcgaaaataacatacggtctttgagcatgatgcagttcactgcacagcaggcatctcctgagaaatatttattgtggcagaccagaaaccaatccattcttttggccgagcttcaatgtgagctgagccacatttcctcttaatttttgttatgctggacgtcgccttgcctcaaataccctttggcagatgggctgactatcagtttttttgcctgccctggtggcagatgcttggttaaaaggcagcaattcctgtactcagtaatgtaagaaggcacctccttcatatttataaaacgcggataaatgaacatccatagttgtaggcttagctccggatgatctgtttcagacacaaggagagtgggcgtcagatgatgttcaaatcttagtgtaaaagaaatagaaagcatgatgcattgttcctcgtc

SEQ ID NO: 44452 - DNA, 632 bp, Oryza sativa
  Clone ID: PAT_MRT4530_47510C.1
gagagatcaaggatggttagtactgtcataaacccaaacgccgctgggatattaccagatatctgatttccacttaggttaagtgtgtttagcctcgccagcactccaattgtcatgggtagtgagccactaatttgattcctagagaggtcaacttctgtgacctgagaaatgcctgtcagatcccagggaatttcaccagacagcaagttgtttgctgctatgaatactttcatttttcctgccaatgttggaataggacctgagaatttgttgttgctgatgtcaagacgtgtaaagttccatgggagctgtttggggaatgtgccagagaacctgttgttttgtatcataactgtacttagctgatttgtcaccactgaccaaagactcttggggaactctccagaaaaattgttgttgtacatcatcaaattgttcaacagatagcagccgtccaatgacgatggaagttttccagaaaagctgttattgaacacaacaatgtcatatagcttcctgttgaagcagaggccttctggtagcttcccagagaggttattattggagacctcaagattggccagtggtgagtgcttaccaagctctggtgggagtgatccagagagcat

SEQ ID NO: 44453 - DNA, 256 bp, Oryza sativa
  Clone ID: PAT_MRT4530_47511C.1
ccggaccggaatctgcattcccgagccagagccaccggtctgtgttcccccagcagcagcccaaacaacacttgggcgctctgaagatcggcgacggcgaacgcccggccgctgcctatgtcaataggggaggcatggcggactagagctagcggcggggggaggggctgacgcctcacagtccgggtcgtggccaccctgctaagggcagggctccgcaggcctgatgcttgggctacgacattgacagctcagg

SEQ ID NO: 44454 - DNA, 399 bp, Oryza sativa
  Clone ID: PAT_MRT4530_47512C.1
atgggcccaactagtataggcaccacgtgggccgcttccccgttctgggctaacaagtttcaggtttcccgcttcagcccaagcagcccatctttcttccttcctcggagcgaaatccaccgccgccgccgccgctccaaactccggcgacgactccactacagccgtcgccgcgtgctggccgcctcctccgtctccggtgtaaatccgcctccccgcgcccctccgcgtcttccacctccgaagattcagagaaaaccaaagcttcagttcgtaatcaggtttgcaacaaatctctcgaattcccagctctgcgcccgcgggttctcgtcagcgaggcggcgcctccgccccggcgaccggcagcctcggagcggcccacgccggcggccggcgtga

SEQ ID NO: 44455 - DNA, 790 bp, Oryza sativa
  unsure (1)..(790): unsure at all n locations
  Clone ID: PAT_MRT4530_47513C.1
cagcacatcacgctgccagtcatngtcacgtcgctcaatcctcgaatcacgtcacatcacgtcacaatcgaaccatgctccgcacaccgagcatcggacgtaccacacacgctcaccacacatccaccccctcgcacgcatcccaccgcgcctcacgccacatcacattcatcccactcatcgtcctcgctcactcagcctcgcctccaacctccaccactgctccatagcgatcccttctgtgactcggccgcttaatgccataccaagatccggtgtcctaccaactctggacacacccagctcggtgtcgggttcattctacaacagctcacacaaacctcgtccagccatctatnctcttcgcctcacccatcgcgcatccctctcgcgccatcnaccaatccctcatcctctcctggctctctcatgtcgacatatccccccatatgtatattatgtggcttggtataataaactcaacatgtntctctgggcatgtgtacacaccgtccagataacatatgtaatgaaccgctgcattaaagttctgcaaggtattccagcctcatgttcanccaaaaatcttcaatcccggttccgtgaattaatggtcctggttcaatgttgccacaattncccacggtntccctaaccgaactttgcctgatnttgcatgngaccnntcatnccatgcctnacaaccccaccaaatgtggaattcatccactcgaccatcgtgggttgtgcacaagggcccaatgcgtnctatgcgncatgggaatnatac

SEQ ID NO: 44456 - DNA, 448 bp, Oryza sativa
  Clone ID: PAT_MRT4530_47514C.1
ggaacacatcaggcagagcgcatatgccagcatcaatgcgcataacgttgagtagaaccgacgatatcttcgagagctggtctttacactcctggtgctcctgcagcacctaagcggtgagatcctctttgaggagaccctgtcccaaaaaaccaaggacggtgcgccctttgtacctgtactaagggatgatggagctctccatgcgctcaaggttacaagggaccgcacggtgccggaccaacacaacagagcaccacccagggcacatgatgatcgctgccacagcgttgcgcaccgtactaataggcctgagccgcttaccaaggggcgtgatcgcctctagattggacgtaccgagatatcttagatgtctatagacctaaatgctcacggccttgctccatattccattatctgacctaagaacagactgagaccgattgtc

SEQ ID NO: 44457 - DNA, 1145 bp, Oryza sativa
  Clone ID: PAT_MRT4530_47515C.1
atggaggagagagcttggcttgtagggcgtcggagctgcctctgttttgatgataaaagtgagaatgcctggaagtctcgagttggtgtgctttatgtgatgcacccgataacatttttcaccaatatcattggtgtggtgaccattgttctgatctccatcgtctccatcttgggccttatttgcctgtgccactcactgaacttccaattgttgatcaaacggaggaggagaaattactaccaagcgaatgacgagcagcttagctacttcaatgggccatggctgactcgcataacattaatactggttgcactatggtggggtgttggagaggtgttgcggctcacatttgtcaatggggaggggaggttcatttctgatcagacatggcaagccaatgtatgcaaattttacatcgtctcaaatttggggtttgcagaaccagggttgttcctgttgctagctttccttcttagtgcagcattgcaaaatcaagaggttggtgccttaaatcgtaaatggaaccagaggaccatatgtgcagtgtttatgctctgctcaccctcactcatatgggaagcttgtgtagtttttattggtcctcatattgcttcaaacgatggacagacatcaaaggttgcaaagtattggtattcagcctcttcagtccatgatggcgatgttgcatgcacatacccattgttgagcagcatatttcttgggacgttctacaccgtgttaactctttatgtcatatttgttggagggcagatattatctttagtgatcaacaaggggcttcgacggaggatatatatgctaatttttgccaccggaatactgcttcctcgagctatgtttcttggattctcggttcttccatggccaggtgaaatagtccatgaatctctcgtgtttgtctccttccttgtcctgatgattgctgctatgcttggtattgttattctggtgtatttcccagttgcggaaacctttgaagtaagaaaccaagagcatattgagctgcaaacaagtcattccattgccctgtgaatctttgatggctgagccttatgatttgacatatgtttcagcttttcattctaaggacaagacattgggagatgcttcagaattattat

SEQ ID NO: 44458 - DNA, 120 bp, Oryza sativa
  Clone ID: PAT_MRT4530_47516C.1
tacgtccgaattcggtcgccacgctccgggtgcaaaggcaatcaggagaagtcatgcaatgctcttctgctgaggttaacaaattgatctgcactgaagtattgaggcggaaatgtaaag

SEQ ID NO: 44459 - DNA, 273 bp, Oryza sativa
  Clone ID: PAT_MRT4530_47517C.1
atggctgttgttggcggtaggttcgggacggcgacggctagcatgctacggcgaacgagggatcgattaggtgataggggagcacttagggaatatgaggaggcttaccccatgctcggttggagtggaggcgggaggaggcagaggaggaaggctgcggctatcgggcttggtcagtattgggcaaagggcggcggtgttgggttggccatggcccacagcggctgcggtggtcggcgcctgggcgcggcagggcaccgggcagggaagtag

SEQ ID NO: 44460 - DNA, 375 bp, Oryza sativa
  Clone ID: PAT_MRT4530_47518C.1
acagggaaaaggggaaaacaaacccccaaatagctgaaggccatgggacggaaaggggttacaaccatacaaggggcacacatttttttacataaacaggtcaacataaaaacagggggggccatggccggaccccgccggggaggcccatccggtccgggcatcccatggacaaaaggggcatgccccgtttttaaaggtttttttacagagccccacttgcagattccgggttggttttttttaaccggggccctccaggacgcgaagatttcccttttgggctccaggacgctttttttggggaccaccccattgtcgcccgattggtggtttgggagggggctggaaaactttaacacctgggcccaaagg

SEQ ID NO: 44461 - DNA, 528 bp, Oryza sativa
  Clone ID: PAT_MRT4530_47519C.1
atggctgttgttggcggtaggttcgggacggcgacggctagcatgctacggcgaacgagggatcgattaggtgataggggagcacttagggaatatgaggaggcttaccccatgctcggttggagtggaggcgacggaggcagcggcgtcggctttgcgcagggaggaggcagaggaggaaggctgcggctatcgggcttggtcagtattgggcaaagggcggcggtgttgggttggccatggcccacagcggctgcggtggtcggcgcctgggcgcggcagggcaccgggcagggaagtagcagccttgcctcagctttgccagcgggaatcgcgggcagagtggggccagtggtccttaggcccactgatcagagagataacgggagaagggatgagtcgcccatcgggaggaggctgccgccggggtcgaggggcttccctatcatcggcgagacgctcgaattcctcaccgagagccccgccaatcagctccccgccttcttcaagcgccgtcttgacaggtaa

SEQ ID NO: 44462 - DNA, 235 bp, Oryza sativa
  Clone ID: PAT_MRT4530_4751C.1
gtcttgtcggtgatatgggaccgggagtatcatgaccagaggcttgaggcagacgcaatcgcccacgtggcctggcaccttcggggacgtcgggcccgagggtgaggtgtccgccctcctcgtgatttcccctgaggggggtctggtcaagcgtgtcacgctgcgtgcaacgcagtacagcacgctcttttatccggtctgtgaccagtcacagaccggtcagatcaagggttag

SEQ ID NO: 44463 - DNA, 345 bp, Oryza sativa
  Clone ID: PAT_MRT4530_47520C.1
gctggcccgcgtgcgagccccggcccggaatcccgggggcgccccacgcgtgttaatgcatggagggagagagagctaggggagttttgatcaggcaagtgatggctagctgtgacacggggaccaccatggcggcctactcgccgcttcttgatcgtgggagagcgtgcgcgctggatgagtatgctgcacatggtggctgcttctcgcctggattaatgggaggggccggcgtactgtacattaggacgaacgacccgaactggcacgataaaggtgtatgtatgctgctctctagctcgatctgctacagcattaatgcgtgtgtgcgctaaaaaagatatg

SEQ ID NO: 44464 - DNA, 873 bp, Oryza sativa
  Clone ID: PAT_MRT4530_47521C.1
atggcgctgcttcgctgcctcctcgtcgtcctcgccgtcgtcgtggcctccgctgggctctccttggccgaggagaacaccggcggcgcgggacggcaagtgtccccgtcgccggcgccgtcgacagggaagcacccgtgcctggacaactcgccgaacatgacggagaagacgggtggggaggccggcgaggtcgtccacgactacggcggcctggagtgctacgtcaccggctcccgccgctccggccgcgccatcatcctcgtctctgactattacggtttccgagcaccaaagctgagacaaatagcggacaaagttgcatactccggatactacgttgtggttcctgatttgttgtacggtgacccttacacggatgatccagcaaggccattttgggtgtggatcatggctcactctccggaggaagcagctgaaaagactaaaccgctcattgcggttctgaagaaggaagggatgtcctctgttggggttggaggttattgctggggtggaaaggtggccgtggaactatcaaagaccgaagaaacccaagcggtagtcatttcacatccttcgctagtgaccgtacatgacatgacagaggtcaaacgtccaattgagattcttggaggtgagcgtgataccatcacgccaccacttgttgtgcaccagtttgagcatgccttagatcagaacaacagggttgatcacttcgtgaagaccttccccaaggcgccccatgccttcgcttgcagatacaacgccagcgatccgttcgccgtcaaaactgcagaagaagctcgtgctgacatggtccagtggttcgacgagtatctgaagcagcacggagagtttcagttgcagtaa

SEQ ID NO: 44465 - DNA, 433 bp, Oryza sativa
  Clone ID: PAT_MRT4530_47522C.1
gcagtcaccaaaaaaggaatgtatgaatgttgcaatgtttttgcgtgattgagcagacaggtagtgatcttaccatggcatgagatgaaagaaatgcaggccggatagctgtatatgaattaccatcaccgactgaaacatcatgttaactatgagattgatacaagacatgtgtcaggcctatccttgactggagctggacactgactataaccaggctagacggacatggaggcgagggaatcctttctagggacccatgtgtgcctactatgtgtttcgagtggctaccccaaggtaactgttacaaaccctatttatcgggactgagacagatcgggatatgaatggttactaggaccctatggacatggcaaagcttcttacttctgatctttacaggtaacgaccttacatatcactggggactagc

SEQ ID NO: 44466 - DNA, 562 bp, Oryza sativa
  Clone ID: PAT_MRT4530_47523C.1
cccacgcgtccggagcgagagagcaaagcccaagttggtagccatgacggagctgttcgacaccgccgtgaccagcctcctccacctgccggaggtgctcgaccgcctcggcgccgccgccggggaccgccgctcggcgggcgaccacgcgcaccacgccgcgcatggacacggccagcaccgcatcagtggaatcggtggtggcgcgccagtggacatcatggagacccccggcgagtacgcgttcgtgctcgacgtccctggcctctccaagtccgacatccaggtgacgctggaggaggacagggtgctggtgatgaagagcagcaatggcgccgggaacgggaagcggaagcgggaggaggaggaaggggagtgcaagtacatccgcctcgagcgccgcgcgtcgccgagggcgttcgcgcgcaagttccgcctcccggaggacgcggacaccggcggcatctcggcgcgatgcgagaacggggtgctcacggtcaccgtcaagaagcggccgccgccggagaagaagaccaagtccgtccaggtcaccatcgcctga

SEQ ID NO: 44467 - DNA, 3221 bp, Oryza sativa
  Clone ID: PAT_MRT4530_47524C.1
atggagatgcagctcgccgccgtcctcgcctcgctcgccctcggcggcgcgctgctcgtgctcgtcttcggcaagtggtggcagccgctggccgacgccgacaggcgcgtcaaggagctcgccgacgccgtggaggcgctgctgcagctgcggtccgagctgctcaaggtggagcccgcgccgccggagtcggaccagctggcgcgcgcgtggctgcggcgcgtgcaggaggcgcaggacgaggtcgcgtcgctcaaggcgcggcacgatggtggccagctctacgtgctccgcctcgtgcagtacttcgtctccacggcacccgtcgccgggtcggccgagaagcagctcaaggccgtccgcgcgctccgtgagcagggcgaggcgctgctcgaggccgcgctgtccacgccgcaggcgccgccgccgctgctccgccagccggaggagctggagctcccgccggggaccagtctcacgaggccctacctcaacgaggcgctccgcttcctcggcgactgcgacgccgcgctcggcgtctggggcgcggggggcgtgggcaagaccacggtgctcacgcacgtccgcgacgcgtgcggcctcgtcgcgccgttcgaccacgtcctgctcgtggcgacctccagggactgcacggtggcgaagctgcagagggaggtcgtgggcgtgctcggcctccgcgacgcgccgacggagcaggcgcaggccgccggcatcctgagcttcctcagggacaagagcttcctgctgctcctcgacggcgtgtgggagcgacttgacctggagagggtcggcatcccgcagccgctcggcatggtggccggccgggtgaggaaggtggtggtggcgtcgaggagcgaggcggtgtgcgccgacatgggatgccgcaagaagatcaagatggagtgcttgagcgaggaggatgcgtggaacctgttcgaggccaacgctcgcgaggagacgatccatcgccaccctcggattcctgcactttcaagacagattggttcaaaacaagcgctacgtttagcattttcagttttccttcaaaaaatagatatcttccatccgttagatcatacaatggttgcttcagagtgcaagggcttgcctttgtccctcgtcaccgtcggccgcgccatgtcgagcaagcgcacaccgaaggagtggggcgacgcgctcgacgccctgaagaagacgaagctctcgagcgcgcccggcccggacaagatcgctcaccctctagtgaaattctgctacgacaatctggagaacgacatggcgagggagtgcttcctggcctgcgcgctctggccggaggatcacaacatctccaaggacgagctcgtccagtgctggacagggctcggcctgctcccggagctcgccgacgtcgacgaggcgcaccggctcgcgcactcggtgatctccgtgctggaggcgtcgcggctggtggagcgcggggacaaccaccggtacaacatgttcccgtccgacacgcacgtcaggctccacgacgtcgtccgcgacgcggcgctccggttcgcgcctggcaagtggctggtccgcgccggcgccgggctgagggagccgccgcgggaggaggcgctgtggcgcgacgcgcggcgggtgtccctgatgcacaacggcatcgaggacgtgccggcgaagacggggggcgccctcgcggacgcgcagccggagacgctgatgctccagtgcaaccgtgccctgccgaagaggatgatccaggcgatccagcacttcacaaggctgacctaccttgacatggaggagaccggcatcgtcgacgcgttcccgatggagatctgctgcttggtcaacctggagtacctcaacctctccaagaacaggatcctgtcgctgccgatggagctgagcaacctgagccagctcaagtacctctacctgcgcgacaactactacatccagatcaccataccggccgggctgatctcacggctcgggaagctgcaggtgctcgaactgttcaccgcgagcatcgtctccatcgcggacgactacatcgcgccggtaattgatgatcttgagagcagcggcgcgcagctgacggcgctgggcctgtggctggacagcaccagggacgtggcgaggctcgcgaggctggcgcctggcgtgcgcgcccggtcgctccacctccgcaagctgcaggacggcacgcggtccctgccgctgctgtccgcgcagcacgcggcggagttcggcggcgtgcaggagagcatcagggagatgaccatctactcctccgacgtcgaggagatcgtcgccgacgcacgcgcgccgaggctggaggtgatcaagttcgggttcctgacgaagctccgcaccgtggcgtggtcccacggggcggcgtccaacctccgggaggtggccatcggcgcgtgccacgccgtggcgcacctgacgtgggtgcagcacctcccgcacctggagtcgctcaacctcagcgggtgcaacggcatgacgacgctgctgggcggcgccgcggacggtggcagcgcggcgggtgagctggtgacgttcccgcggctgcgtctgctggcgctgctgggtctgcccaagctggaggccatccgcggcgacggcggggagtgcgcgttcccggagctccggcgcgtgcagacgaggggttgcccgcggctgaggcgcatcccgatgcggccggcggcgagcgggcagtgcaaggtgagggtggagtgcgacaagcactggtggggcgcgctgcagtgggcgagcgacgacgtcaagtcctacttcgcgcccgtgctgatctgaacaaaacaacgtcgtcgtcgctgcaatctcgccgcgccgtgccgcgcgtgcgtgcatccgattttccgatgcagaggttgaagttttggagacgtgctgatctgttagggaaggaacgtcgggggaaatttggtgactgttaatttggattatttttcattttcctttaaatttgggacggtttcttttgaacatcttgtgtttcgttgccaaaaggaaaactcaaccgctgaacattgcacttctttctttgttttgctcaaactatatcctatgctacaaacaagcaaacttgaatatctgatatgttcatactagttttgtgctcgaattcccgacgtgattataaggctgaattcccgacgtgattaaaaaaaaaaaaaaaa

SEQ ID NO: 44468 - DNA, 1926 bp, Oryza sativa
  Clone ID: PAT_MRT4530_47525C.1
atggcttcgctcttgaccttcggcatgagcctgttgcttgaacttttggtttcgacatctggaagggcagccgatggaaccaattatcggaatgctcagttcaagtcaactaaaatcattaacaaaatcttgaagagacatgagaagcaggagcaaaggttctgctggaacgagggaatgagactaccatcgattgaggactgccctggatgcagtaacaacgtggggagttcaagccaatcctacaacaaaagtaatcggctgagtcagaagagggtttctgttcatcagaggttggacacggtaaaccaggatcgtgatgagggtgaagatgagggtagaaaatcgcaatggtgtccttctgagtttgaagccaaagaagctgatgttgatgatgtagaagaagcctctgctagattgattttgtcaccagatcaagcagtttttgagaaaccagaatggacagaaaatcggcacctaaagctattatatcttaatgggtatgtcaacggcaagccgatgtccaagatgttggttgatggtggggctgcagtcaacttgatgccatatgctaccttcagaaaattaggcaggaatgtagatgatctcatcaagatgaacatgattctcaaagattttagtggcaatccatcggagaccaaaggagttttgaatgtggaattgacaatcggcagtgacaagattgagatcgtgccagccgacagccaattgaagatggagaccccaaattattactttgagggcgtcgtggagggttcgaatgtctacaccaaggacacggtagatgacctcgatggcaaattaacaaaatttggtaatgacggtaagaccaaatatggcaaagctaaggatgatgaacccaaggatgaaaaatcagaaggagaggagtctcaagagattaaaaattcgcaggatcagattgattatgctgttcatcatgcactgatcaaccagtcgggtgaacttgtcaacactctgactaatatgatcaagtccttggttgatgttacgattgctgagcatcaagctaaaggaccaacttttcttcctgatggcgtatttctacagtataggaatctggtgtccagcaagcaacaacctgtctctgatgtgatgagggagcagtttggtcttaagccaaaggatacgagtaacttctattggcacccatatccagaatattttgagagggttccattgccgaatcggtacaaggttccagatttttcaaaattctcatggcaagataatatgtcgacttatgagcatgtcagccaatttttggcccagtgtggtgaggcatcagctatcgatgctttgaggagttgggccaatctggaaaagcaatttcataaatacttctatagtgcgaatgatgagatgaagctttctgatttgacagcaattatgcaaagacatgatgagtctgttccagattatatccagaggttcaaagatatgaggaatagattctctgctcaagattttgagtgtttggctcacttggctcaaaacgtgacactacatgaacagagatttgcagaagccaagaagaagtttaaaaaggttaatcatgtctatccttatgtttctgattttgaagaggataatgatcttgaagtagcaacagcaaggaacaagaaggttttcacgcaactaatcaagtcggctattgaacaaggaaagataaagtttgatgattcaaggaggccgatgaaggttgatggcaatacttttcctattagcatggtccatacatctgggagaacaaccgatgggaaaaatcatcggaattcacagattaactcggttaggattatcaataaatatcaaaggaagtatgaaaagcaggaagagagatattatgaagatgatggtggttttgatccacattgggactactaa

SEQ ID NO: 44469 - DNA, 682 bp, Oryza sativa
  unsure (1)..(682): unsure at all n locations
  Clone ID: PAT_MRT4530_47526C.1
tttttnttttttttttttttttttttccttcaaaacatattgatcatcccatttcaagagagcaaagcaggcatctcgattgggcagtttacatatgtctggttaaaacaatgtaatgacatttaaaatctgaaatccaccatctttcatttctattctatatatatgatctttaaacgaactgaaagaaaaaaaaatttgaatggcctctaggagctcaatcctgtaattttgtatagctaaagaaactagcacttgcaacactgtcagattctgctcgcaacttagctcttacgccgcgatgtggtcactcaatttccggccgcttgtttccaggggaaagtatgagactgcaacacctgagacgagcatcaccgtgatgaatatcaggatggctgcagtctgatggcacgcgtgcaccaaaccaacggccacaagagggcacaagatcccaccgaaacgagcgattgagctcgcaaacccgactccggtagccctgactgcggttgggtatatctcaggagcatagatgtgcaagacaatgaagcttgcggagatgcaaatgcgtgcaccgaacaggaagatagttgtcagggactctgtttgagggaccataaggggagctatgcacaggcaactgatataaagcatagaggacattgagagtttgcgcccaatcttg

SEQ ID NO: 44470 - DNA, 1014 bp, Oryza sativa
  Clone ID: PAT_MRT4530_47527C.1
atggcagagttcgaggcagcggcggaacagtttagggttttcattcaagagacgaaagccaaggcggaggaggcgtatcagcttgcggttttgatccaaaaggcggcggcgggagggggctcagatgtggcagcggccttggaggtttgcaagaaggcggcggaggcaacggcggcgggtggagccagttcagatgcggcagcgacatcggagatttgcaaggcggcagatgtgatggtcaaggaggtggcggcgcacgcggatctgatacaggaggggtcggcggaggaggaggcttaccgacctcctgttctgattccggtggcaacagctagggactttggcggcagtatgcgtggattgactcaaaggactatgttgggagatgatagcgaccacatggccatgttcgagaagaaggcaagcgtcacgcaaactgacatgaaggagaagaggggaaaagctaaagatgttagcatcgacgaggacaagtcaagcgatgatgatgttgatatgatgttcctcataggcatcagagttaacatcaaaaggaaagccatgttggttgtgacctccataaatttgcagaatttcatccatggcatcggcaccgtctacaataacaattaccatgtcacctggatggttatggttggcacctccctgcacatcacctccaagttgatcctcctcttgaccaacatgcatttcaacttctgcaaccactggttcattaaggtcaggcacatcatgctcatctccctcatctgccactggttcattaagccgcgtagatgctctcaccgctgggaatcggcccctcgtgacctcatcgccgtttcccccttctcccgccgtcggttgccgccgccgctgcaatccgccgccgtcgagcatcccccggcgaatccgagccattggctcgtctcccctcgtcctgtgcaacatcccgtttcggagcccgaagacccgcagtgcgaggatttcgaggatcaagctcaagatctcgagtga

SEQ ID NO: 44471 - DNA, 216 bp, Oryza sativa
  Clone ID: PAT_MRT4530_47528C.1
tcgttcttattaaaattgtcatcttatgaaccaggggcatattatacattaaagcgcgtttcttacctccataaactacaatatcagtcttcgactaaagtcctcaagaacttaaacaaactaaattatattatgatttaattattctggatcagattactgtgtatgaagcgtagagttaaaaaacatcctggatgggatgctacaatataaaca

SEQ ID NO: 44472 - DNA, 475 bp, Oryza sativa
  Clone ID: PAT_MRT4530_47529C.1
ggagagagagagaactagtctcgagtttttttttttttttttttacgacaatatgcactactgtttgtatttgtgttcatgctcccactggagaaaatacgacaatatgcactactggatcaggggactcagagcaggagtagctacagaatactatttgggacgctgcaggtaggaaagcatattactgggaaggaaaagttgcaagagtctccaggaaggaaagaaggtaagagtagccttatcggcgaaggattcgatcatgagcaagcatggatggattgaagcagtgactgagcccagtggtggtggagttagtgcagtcagcagcttggggctagggaccaggcatcgtgcagcgggaattgtgtggatgcatagtggagcggggctctctagcttgccggcgacccaggagcagggaacatgcatccacccgatcagcgatcacgctttgattcggcagcgagaatag

SEQ ID NO: 44473 - DNA, 222 bp, Oryza sativa
  Clone ID: PAT_MRT4530_4752C.1
atggtgggccgttcaccgaggtggagcccggcgatcgtcgtcgccggcggcggtggcggcgacggggtgaggcgacggtggcgcgaggctgttcgacctcttgttgaatcgccgtctgagggtttaccggtgcctggtttctttgggctctggcagattcaagataagaaatatgagctcgatgcaattctgatgctttgcgccatgagaatggacgagtaa

SEQ ID NO: 44474 - DNA, 897 bp, Oryza sativa
  Clone ID: PAT_MRT4530_47530C.1
atgccgtcagaaggaaaagtaattctagaccacattctagaaaatacttccttcgtgacgccatgcaatgaacccctattggaagcatccgtgtccaagatagaggaaccttcaacaatcgagtcacaatctgaaccttccacctctacctactcgattgttgaaaaagttcccgagccaccagccgttgagaatgaagaaattcagactccggatcatgccgctatcatgttcagggatggttttgacgaagactatggtaacaccctgaactacttcagtaaaaagaaaccactcgtccccttgccacctcccgatcctatggaacttgggttcctaatagaaactgtacgggagctgacttctataatgagtgatgaatgtctaagagaggcagagctttcatccgaagtaactcggataaataccgctccccgagttcttccttgtcacctagaagggaacgacgttgtcattcaatacagtccaactatcgtggttaatcttatctctgagtcttttgcattcgcttacctaagcaataaggcagtaaccccgacaaacaaattcttcaagcacccaaacggaaatatcattgaaggatttgggattgtgcaagacgtacctgtctacttcgaagacaggaaggcagtcttggatttctacgtctttgaaatccaagattttgacattctaatcgggctccctattgagcaactcctcataaatacgccccgattagatagcctcaagataactctgggagggaatgaattctcagttccattctcatgggcaaggttcgccttgactgactctctcccagaagatgagtttgcggaggaggttacgtcaggtccccctcacgagtctcccgagacccttctggaaaattaa

SEQ ID NO: 44475 - DNA, 1007 bp, Oryza sativa
  Clone ID: PAT_MRT4530_47531C.1
ctgtgacgcgtgggaagaaaatccaccccaaaaaggaaaaccctaggctcgcaccgcgcgccgccatttctcccccttccaccgcgcaccgcctcctccgccaaatccaccgccgcggcgcgcggcctcctcctccgccgcggcgtgccgccacctcgctcctctctccccatccaccgcgctgccggagtcgacctcgcgcccgcccaggtggtggtgtgtgccgggtagaggaggaggaggaagcgagggcgtcggacttgtgcgtgcgcaggtccaggggcaggacgacattcgacgcggtcgccgacgagtttttccccttttgcctttgatttcttcggccctttcctttcaagttttgatacaaagaattcagaaactcatactatatgatgggtagtttcctctgtttagtcctgtatcttggaactcatactttatgatcaaagaattcagaaaaggatcatgtaactatccagtctagtatggactgtagttgtttctaactgctttccatagaaacttttgcaccctttgtggtataaagaattagaacaaatcataagattcttaagctgctaaggttaagtatcatgaccttcactagtaaatcataagattcctcctagttcactctgcttgatgttcaacagacctcatgatgcatgtgccccggaaatatattgctctcatatttgtaggattagatattcagtaaagttccagagtttcgctctgttttttatagtacaatgggtgcttttttgtctaaactgtgtgctggtaaatataaacgataaaaccatccagaactgagaaaacctagcagccgctggtgttgtgtttaattacatattgcagatgtatacacctctgcatttctaagtttgtattcctgcagttataaactcataatccgcttatactctgcaaacacatatatgaggtaagttcagtctggctgcagttaattaagattaaaggttgaaaatacggtgaactca

SEQ ID NO: 44476 - DNA, 520 bp, Oryza sativa
  unsure (1)..(520): unsure at all n locations
  Clone ID: PAT_MRT4530_47532C.1
aatgtactactcaatgaacgaattggttgacctctnggagaaaannataaataaattcctgaacaagatatatatcacagaagaanactcctgaaaaacattgaagatgcaccattgcccttgaagatggatttgatatttatatattcaacatttattaagggtgaccaaacatattttgaaattgactcgagaaaggaaggaactcaattgtatcctcatgtaaattataccacagtggatggttatttagataaattggtttagaatattaaatatttgttttttcctgtactagtaccattcctacctctattagttatattacctttcatctctagcctacctcaacttgctagggacttaaggttattattcttgtatcttgcccataaacaatacccttctgttaaatggtattttgaaagaattgcaaaatgacaaaaaaaaaaaaaaaaaaaaaaaaaaaaaaaaaaattcaataatatgatcttttttgggtgttccctgccaaaaaaaa

SEQ ID NO: 44477 - DNA, 399 bp, Oryza sativa
  Clone ID: PAT_MRT4530_47533C.1
atggaagaggacgagatgaggatgagagagaagctggccacgatggacgagaggcaggcgatggcgatgcggctcacctggatctctgagctcgtcgccagcaacaagaagtcgatcgccggcaacaaggcctacatcctggccctgatcgacgccatcgacaacgaccggtgcccgtacaccgccgccgagctctccgacaagatccgcgagctccgggaggacagggtgaccgtcatcctccccgcgcaggctgtcatcaagacgatgatcgactcggtgcgagcagctacgcccgccgccggcggcgatggtggtactcgtcgtcgtggcgccgacgacaactccggtgccattggctgtggcccaactcaccagtcgcggacgatcagccggtag

SEQ ID NO: 44478 - DNA, 1140 bp, Oryza sativa
  Clone ID: PAT_MRT4530_47534C.1
atgaacgacgacgtggtgagcgagatcctcctgcggttaccggcgaaggccgtcctccgctcccgcgccgtctgccggacctggcgccgcatcaccaccgcctactcccgccgccgcccgcttcagctcctcggcaacacggaccccagttattactttacccccttcaacaccttgacctccctcccagccacggccgttccacgcatcgacgacggcggcgacatcgccggctgccggcgtttgctccaccgcgacagattctgcttgggcctggaggctacctgcgacggcttcttgctgttcagaagagtgcagaaggggagcatgctcatctgcaacccggcgacgcggcagctcgtcaatctgccgccggtgagccctgagccgtcgtcgcggccaaatgataacgagctgcgggcactgggcttctacttccaccggccgtccggcgagtaccgcgtgctgtgccaccgcccactcctagatgtagatgccacctacatcctctccaccggcgccgccgagccacggcggctcggcggcggccctgactaccaccgctgcaccatggtcgtcggcgagaccatcggcgacaccgtatactggtgccgcccccgttacctgcacaacggcaagccacagatatcgtcgttcgacacggtgtcggaggcgttccgcctgctgccgccgcctccggtgagcctcgccaaggacgaactggtcgccatgatcgacatgcgcggcacgccggccgtgtggacgatgaccgagctgcacctcgacgtctgggccttggaggaggaggagaggtgggtgcggcggctgcgggtggggatgcctccgccgcccgcgccactcgcctactggagcaagggcagcaggaagaacgccgtggccacgttcgagtccggcgacggcggcgtgcagatggtggtggtgacctgggcttggaagttgctgtacgacgacaccagcaaggacaggagggtggtgggtcgcactattgttccgagacactgtggacatttctggcacaccaattgttggtttcgtgcctaccgggagagcctcgtcagggtggaatcttgcacgccggacctcccgccggacggcgagccctatctacaattctgttga

SEQ ID NO: 44479 - DNA, 287 bp, Oryza sativa
  Clone ID: PAT_MRT4530_47535C.1
aaaaaaccagccaaccacaaccatgattctataccagcagagcgatgcgattcattttctttaatgatttacaacacacgaacagtttcactaattatagcaaaacctgctaagctctatgcttacacaaagcgcgttatgccccttggccccttagcatacaagcccaaacagaattgcaatggaacaaggcaaggaaaaagtgaacacaaatatacaaccaacgagccagtcaatagaaatgagagacctataaccatccctagcaatgtactcctcaatggcct

SEQ ID NO: 44480 - DNA, 1185 bp, Oryza sativa
  Clone ID: PAT_MRT4530_47536C.1
atgaacgacgacgtggtgagcgagatcctcctgcggttgccggcgaaggccgtcctccgctcccgcgccgtctgccggacctggcgccgcatcaccaccgcccactacttcatcaccgcctactcccgccgccgcccgcttcagctcctcggccacacggaccccagcgatcactttacctccgtctacaccttgacctccctcccagccacggctgttccacgcatcgacgacggcggcgacatcgccggctgccggcgtttgcttcaacgcggcagattctgcttgagcctggtgactacctgcgacggcctcctgatgttcagaagagtgcagaaggggggcatgctcatctgcaacccggcgacgcggcagctcgtcaatccggtgagccctgagccgtcgtcgcggccaaaggataacgagctgcggacactgggcttctacttccaccggccgtccggcgagtaccgcgtgctgtgccaccgcccactcctagataataccacctacatcctctccaccggcgccgccgagccacggcagctcggcggcggccctgactaccaccgctgcaccatgttcgtcggcgagaccatcggcgacaccgtgtactggtgccgcccccgttacctgcagaacggcaagccacagatatcgtcgttcgacacggtgtcggaggcgttccgcctgctgccgccgcctccggtgagcctcgccgaggacgaactggtcgacatgatcgacatgcacggcacgccggccgtgtggacgatgaccgagctgcacctcgacgtctgggccttggacgaggatgagaggtgggtgcggcggctgcgggtggagatgcctccgccgcccgcgccactcgcctactggagcaagggcagctggaagaacgccgtcgcgacgttcgagtccggcggcggcggcgtgcagatggtggtggtgacctgggcttggaagttgctgtacgacgacaccaacaaggacaggagggtggtgggtcgcaccgtcgcactattgttccgagacactgtggacatttcgggcacaccaattgttggtttcatgcctaccgggagagcctcgtcagggtggaatcttgcacgccggacctcccgccggacggcgagccctatctacagttctgttgagtacaaacacgtcgttactagctactga

SEQ ID NO: 44481 - DNA, 848 bp, Oryza sativa
  Clone ID: PAT_MRT4530_47537C.1
tatgccccctagagggcctcctgcccaccttatatagaatggggggcattgcggctcattgttcgacagagcgaaccatgcgggctcgccttgacggattcaagaactgtcttcgagccaaggatgacgaactgggccgcaagagcttggagatcgagggcctcgttaacaccctcaaagaaacgaattctgaaaataagcggctccaagccgagctggagaaggggagcgaggcgaaggccgagatcgaatgactcaaggctgagctccaaaaggagaaggatcaatccgccaccttgactgagtactataatcttactgagccgaagatggaggctcttcgccagaaggccctcaaggcagaggcgagcgctgaaaaagaggcggaacggttcacgcaagggatggtgaaagccaccgagtccaccaaaaccgcatgccgtacgcttcgccttgccctcaatgatatgggggagagggtacaaggagtccctagagaagatgcctccatctttgacttctcggagtggactcagcaggccggcagggcggtctcggattgcgccaccgcgtacggcgattgctgtgcgcgtgtgtcggcggccttcaccatgggcttgctgcagcagttcgggtgcgaacacgtcgccgaattccctaactttgcgaagggggattgggaggtcagctgtcaagatgtttccctcgcgctttgtgcctggcgcaagcagttctggcaaaaggatggccgatccactaccaaggcgcgtctgcttgaacaattggcgaaggcagaggcggcaaaccagggcgaagaggcagcggccggagagggtggaggagatgcc

SEQ ID NO: 44482 - DNA, 942 bp, Oryza sativa
  Clone ID: PAT_MRT4530_47538C.1
atggtgggtggaatcagcggtggaggggacagtggcgggcggagctcagggtcgtggaggaggtgctcgcagccgccggcgctcgggacgacggcgggggaagcttggggccgagggggcggcggacctcagggcggtaggaggagagggcggcggagagcggagctcggggtggtggagggggcgtttgcagccgcccgcgctcgggacgatggcggggggagcttggggtcgagggggcggcgggagctcggggtggcgagaggaggggatggcggagggcggcgaagggacgcccacagccgccggcgtgtggctcgtcgaggcaacggaggggatgctcgtagccagcggtgctcagggaggtggaggggcgcggcggagcgagccgaggatggcggtgggtggagctccagctgcggaggaagcgcccgcaaccaccgccgtgtggctcatcgaggcaatggagccgtccgttgccgtcggcgctcaagccgcaaccgccaggatttgagagagagaaggtgggggagagggaaagagatagagtgccgccgccgccgcccccgccccggcatcggcgacgactccgacctccagaaggacctggacgagccgcgccgctcctgcatcctctccgggaacgaccccgacgccgcggtcgcgcaggtctccgccagcctcgccgccggcacatcaggggcggggggcggcgaagaatggctttgtccgatgatgacgaggaggaggaggacgatggctttggcgctcgtccgtagcatccgtgagaatctcctcaacaaggcctcttgccctcctcacccgatctgcgtctggccgccctccgacttggaggaggacgacgacaacgacctcgagacgctccgtgcgatacagcacccacttctcgcactaccattccgaactgaaccaccaatatag

SEQ ID NO: 44483 - DNA, 3026 bp, Oryza sativa
  Clone ID: PAT_MRT4530_47539C.1
atgttcgccgcttccacctcctccaccggcctccccttgccgcgcgcgggcggcctcctcctcctccccacctcccgctccctcctcctcccgcgccaccgccaccgcctccgcctccgcgatgttggcgccgctgcggccgccggagggggagtgtccggcgggggcggcggtgctgcttcttcgagggagccgccgaggacgctgttcccgggcgggttcaagcggccggagatccgggtcccggcgctcgtcctccgcgtcggcgccgacgaggcgctggcctccggggacgcggtggtcgcggccgtggcgcggggcgtggggatcgtcgtgctcgaggccggggaggagggcggcgggcgcgtctacgaggccgcgctctcgctcaaggcgtcggtcggggaccgcgcctacctgctcgtcgcggagcgcgtcgacgtcgcctcggcggtcggtgccagcggcgtcgtgctggctgacgacggtattcctgctattgttgcaaggagtatgatgatgaagtccaactcggactccatatacctccctcttgtcgctagaaccatacgttctgcagacactgcaagaagcgccacaagttcagagggggctgattttcttatcatcgataccggcagtgatgatgctattaatgttatgaatggtgttagtggcactcagcatgtgaagatccccattttttccactttgagtgattcgcaaagtgaagggtcttactcagataacacatccaggttgctccaatccggtgcatctggaattgttatgtctttggctggtattcaagtactcgctgatgatattatagaacgggatttttcaaaagtggataccgctgaaagtgtcctacaggctaattactcttcagctagtactttggaagaagcagataatgtaatggtcctaactcgtgagaaggcaaaagttgctggattcacaaaactagatgaaaaagtaatgcagctgatatcgatagaaaagcctattctaagtgaagctgttgctgttatccgcaaggcagcaccaatgatggaggaagttgagcttctagttgatgctgcttctcgcctgagtgagccatttttgttggttactgtgggtgaatttaattcgggaaaatcaacttttataaatgctctacttgggaggaagtatcttcaggaaggagttgtgcccacaacaaatgagatcatgttgctatcatattctgatgttgactctgaaagcgcagaacgatgtgagaggcacccggatggtcaatacatgtgctatttatcggcacccgtattgaaggaaatgaacctagttgatacgcctggaacaaatgttattctccaaaggcagcaacggcttactgaagaatatgtgccccgagctgacctaatactctttgttctttcatcagacagaccattgactgacagtgaggtcggatttctccagtatgttcagcagtggaagaagaaagttgtatttgtactaaacaaattggacctttatcggaacagtaacgagcttgaagaggctactgcatttatcaaggaaaatgcaagaaaattgcttaacacagaggatgtgacattatttcctgtatcttcacgctctgctctggaggccaagcttttgtattcaaaaaatgatggaagagagcatcatggggaagctttgtttaatgaccctagatggagaaacagcaagttttatgatctagagcattacctattgagcttcttggatggatcaacagaaaatgggaaggaaagggtccggctgaaacttgaaacgccaattggaattgcagatcgtttgctaacgtcatgtcaaaggcttgtgaagctagaatatgaaaaggctattgatgacctaacatccatcaaggatcttgtttctggtgcaaacaattatgctgtgaagattgaggctgacagtgattcttggcaaaggcagatttcatcccttattgcgagagctaaaggccgagcaatttcgctcatggaatctacacttcagttgtcaaacattgaccttatttttacatacaccctttcaggggggaaaagcactcccaccaaagttacatcattttttcaaaatgatattctgagcccttcccttgatgacgcagcaaatttgctaagtgaatattctacatggttgagttctaccaatgtccgtgaagcaaatatatatgtggactgcttccatgagagatggggtgcattggttgcccaggagcaaaggattccgccagagaaaaatgaacttgtcaatgaagaagagaaactctgtgtaaaggcactggatggcttcagtgctagtgctgctgctaaggtttttgaagaagaaattcgtgaagtggcttggggaacctttggagggctaggggttgctggattgtcagcttctcttttgacctctgttttgacaagtacacttgaagaccttcttgctctagctctttgctcagctggcgggttctttgcaatatcaaattttcctacccgtcggaaacttgcagtagagaagatcggcaaggctgctgaaaaactttcttctaaagttgacgaagctattcagcaggatatatcccgtagtgctaatcaattagtccattttgttgagactgtcagcaaaccttatcaagatgcatgtcagcaaaagatagattggctgcagggtgttcagggtgagttgtccactgttgagcgtaagctccaaactttgaaagttgaaattcaaaatcttcatgaatcatgaggtttcaattccattgaaattttcttcatttatttgcactcatgccttggatgggtgatatgcgctcatcaaattttgttagttggtgttgtattatggtggggctgttgatagatatatctgtaatatatgttgtaccttctcaacaagtgatacttatcacgtaatcaggagcaatgcaaccacaggttcaatcgatcattattcaaaaaaaaaaaaaaaaaaactcgagggggggcccggta

SEQ ID NO: 44484 - DNA, 4449 bp, Oryza sativa
  Clone ID: PAT_MRT4530_4753C.1
atgccgatctcagctgggccgtcgaggaccagaaacgagaacgcagtggctgtagcccaagatgactccacgtcgaaggatcctcccgccgaagcggagaacggaacatcgacgacatccgagctcgagaagaattctaatgcggccaaaccttgtcgttccgacaagaaacacaggccgacgagaataacttccgaggtgacagggtcctggtgccctatccacaaaaccaggaaacacactttgcaagcctgcttggtcttcctcaacgcccgcaccgagatccgcgcctgcaaagagcgtggaattcagcgtgtttctccaactcgtggtgtctattgtcctattcacaagacaaagaatcacgacctttcaagctgtaaagatttcctcatcgtcaccaagatgtcatctcccaaggtccagcagccaggcaagacccttagagatgaagacaaagaacgaggaacgacgttgaccccagattgtatcgtcggtgttatcgacatcggttcttccgaaccatcggtcctacatctactcgaagactacgactcctcgtcaacaagtacgccgcgtgaggtcttggctctcgacggcacaggcacatcggcacgcgctaacaccggggcggaaaatcaaacatctacaccggctcagcacatcaggaccctcaacgcgatactgagggaaaccccttatgaccccgtcctacacgatgacctcgcacaatggacggaacgggctttcagtcgttcgttgcgcgatgtccgatggcctgagaggttccgaccgggagcaatagaaaagtacgatgggagcactgaccaagaagaatttcttcaagtatactccacagtactctgtgctgccagagcggacgacaacgtgttggcgaattgcttgccaactgcgttaaaaggctctgcgcgttcatggttgatgcaccttccgccctactcgatttcttcgtgggcagacctatggcagcagttcgtcgccaatttccagggaacctacaagcgccacgcgatcgaagacgacttacacacattgacacagaactcgggtgaatccttgagggaatatgttcggcgctttaatgagtgcagaaatacaatcctcgaaatcatcgatgcttctgtaattcgcgccttcaagtctggtgtcagagatcgctacactacccaggagttggcaacgagacgcatcacaactactcggagactattcgagattgttgagcgatgcgcccacgttgacgatgcacttagacgcaagaacgacaagccgaagaccgggggcgagaagaaaccaaccacggacacacctgagtcaagcagaaagaaatatcgcaagaacgcgaaaaggaaagctcaagcagaagtactcgcagcagaatatgctaaccctctcaagcgcccagaccgacaaggtagtgacgcaaggaaagcatggtgtcccatacacaggtcgaacatacgttctttggaagactgccttgttttcaaaaaatcgctcgagaagcacatgacatcggaacaaggcaaacgagtacgcgtggtcgagaaggatgcggagatgactgctcaggagtcggacccagcgtatccagattctgacctccacgtctcacacatcttcggaggctctacagcgtactcctccaagcgagagtataagaaagtggagcgagaagtctgctcgacgtggcagggggctgcacccaagatgaagtggtctgaacagaagatacaattttcggaagatgaccatcccaagaccgccgttatcccaggacgctacccgatcgtggtcgaacccactattcggaacatcaaggtcgcgcgggttcttattgacggtggcagctcaatcaacctcctcttcgccagcacattggacgccatgggaataccacgaagcgagttgacacccaccgatcaacccttccatggaatcactccccggtcttcgtccaaaccaatgggcaaaatcacgctgcctgtgactttcggccaagcaaacaacttccgaacagagaatatcacctttgatgtcgctgaattcgatacttgcgaagttcatggccacatctcactacgcccgtccgacatgccgggagtccccagggaggtgatcgagcacaaactcatggtgcaacccgatgccaagccagttaagcaaagactgcggagatttgcaccagaccgaagacaagccatacgagaagagctcgacaaacttctcaaagctggctttatcagagaagtacttcatccagagtggctagccaacccagtcatggtgtggaaggccaacgggaaaatggagaatggcgcacttagcgatcagctcggcaacaacgttgaggcatacgtcgacgacatcgttgtcaagaccaagaaaagcgactcattgtttgacgacttacgggaaatgttcgacaacctccgacggtatcggctcatgctcaatccagagaagtgcaccttcggagtaccatcgggcaagctgctcggcttcctcgtttctggcagaggaatagaagcgaatcccgagaagatcaaggcaatcgagaacatgaagtcgcccacaagactcaaggaagtacagaagctaaccggatgcatggctgcactaagcagattcgtcgctaggatgggagaacgaggacaacccttcttcgctctgctgaagaagcaagacaaatttgtatggacacaggaagccgaagaggcatttattgcactcaagcgctacctatcaaatccccatgtactcgttgctccccaacctaatgaagaattattcctttatattgccgccacgccatactccgtccgcactgtaattgtcgtagagagagagaaagttcaacgaccagtatactatgtcagcgaagctctccacaacgcaaaaaccagatatccacagatccaaaaactgctctacgcagtaatcatgacgtcaagaaagctacgacactatttccaagcccacagagtcacagttgtctcctccttccctctcggtgaagttgtgagaaacaaagacgttgtcgggcgcattgcgaaatgggtagtcgagctaagccagtttgacgtccactttgtaccacgaacagccatcaagtcccaagtactcgccgattttgtagctgactggaccatgcccgataatcaatcagataacaagatcgacgacgaaacatggacaatggcgttcgacggtgcactcaacagccaaggagcaggggcaggattcatcttgacatgtccctccggagatcatttcaagcacgcaatccacctcaacttcagggcgaccaataacacagccgagtacgaaggactactcgccgggataagagcagcagctgcacttggggccaaacgactgatcgtgaaaggggactccgagctagtcgcgaaccaggtacacaaagattataaatgctctaaccccaagttatctaagtacctcgcagaagtcaggaaactggagaaaaggttcgatgggatcaagggcggctacaagttcctatttgtggcgatcgacaaattcactaaatggatcgaagcgatacccacgggggaaatcaaggccgccaacgccatcaagttcatcaaggggatattctgcagatacggactaccgcatcgcatcattaccgacaacggctcccagttcatcagcgccgacttccaggattactgcatcgggctgggagtcaaaatatacttcgcttcggtttcccatcctcaaagcaacgaacaaatcgagagggcaaacagcatagtactacaagggatcaagacctatgtctacgacaggctcatgtcacatgacaacaaatgggtcaaagaactcccatcagtactatgggccatacgcaccacaccgacaacatccaacaaggaaacacccttcttcctcgtatacggctccgaggccatgctccccagtgagctacgacatcagagtacacgagcacagaagtattccgacgaggaacaggaagagcagcgaaacgacgatgtgaatctactcgaggaacatcgcgaacgagttgccgtccgagcagccacctaccaacaagcccttcgccgctaccacgagaagcgcatccgagacgcatactttcgatcggcgactacgtcctccgaagggttcaaagccaagcagggcgaaacaagctctcacccaaatgggaaggaccatacacgatcacacaagtcttgcgaccaggcgcattcaaaattgcagacggcaatggccgcgagttggcaaactcatggaacattgaccaactacgtaaattctatgtatgagtcaataccctccatacctgtaagacaacttacatcatcaataaagcctatttttcaggcgcatattgcaatcacagtgtcctgcccgacaatccctcacccagatgacacctag

SEQ ID NO: 44485 - DNA, 433 bp, Oryza sativa
  Clone ID: PAT_MRT4530_47540C.1
ggaattaactttttttctctttggtataaactatgcatttttgaatatgccacgtaaatgctactatttggtcaatgtgcggctccaatcagtttacaccatgtttagatgggactaaaactttcaagtccttattaaattggatgtttggacactaattacaaatattaaacgtagactattaataaaacccattcatatttttagactaattcgggagacgaatctattgagtctaattaatcccataagtcgcctatgtgatgctgcaggaaacatttctctaattatggattaattgggcttaaaaatttgtctcccgaatttgcttccatttatgtaatcagttttgcaaggcgcttatttctaatactcgaaattagtgtctaaatatagggactaaagttaagtccctggattcaaacaccacctt

SEQ ID NO: 44486 - DNA, 353 bp, Oryza sativa
  Clone ID: PAT_MRT4530_47541C.1
caaccgcgggacgagcgcgagaaagacaaaaaacggcaaggcacgggggaacaacgaacaacaacaagaaacacccgcatccccccaggaatcgtcgcccacgctaccggcggcaaccgggagccagaaaagcgacacaaaaaaggggcaccgggccacgcaagcggccaccaaaagaaacaaacacgataggaaaccccacagaacggcagcggcacggcgcagcgcggacaaccgctgccatcgccacatcccgcaaccatggagccccacacccaaaatacaacgaaagcgcgcggagcgccaaactcccgacgggcgacaccacggggggaaaagtgaccgaaaaataa

SEQ ID NO: 44487 - DNA, 273 bp, Oryza sativa
  Clone ID: PAT_MRT4530_47542C.1
gtgccaggatatataccgtctcggcgaacgcgccgatggaaccttcgcgagcacccatccatgcatcgatcagacgttgttgttttacgcacgtacgctaccttcctcgtcgagccgccgcaccctctcttctcgatcgtcgcacgctatccaattgcctcgggcatggctggctgcggtttcggcgccgcacgtcccgctccccgcgcgtacgcgtacgtgtcagctggtcgcgttacggtttcgatacaggcgcggtgcatggtggcgtga

SEQ ID NO: 44488 - DNA, 453 bp, Oryza sativa
  unsure (1)..(453): unsure at all n locations
  Clone ID: PAT_MRT4530_47543C.1
caggaaggaatggaagctcaaggnagaaaaacttgtgggtgaaagtacagaaggtctctgatcaaattgtttctntgatgaatggagccggagtttgatgccaagaatcaacaatacatgcatagagaaggaattaagaagtgctgcttacacggaatgtaccaagtngttccanctggacaaactggtttgcngtccacaaaagctgatggaaggaaagatgctccacgagtaaggcatgccatagagtgggatctggttgaataatcagtcaaatgaagaaactgggattgagtttagtaattggccggattttnattagttaataagttctgaaacttctggtaagatcttgtcttggttagaaagaattaattagggatcganccacnccacnacgtggntagatttattggttggatcatangaaggtaatgggttttttttgtttgt

SEQ ID NO: 44489 - DNA, 504 bp, Oryza sativa
  Clone ID: PAT_MRT4530_47544C.1
atgttgcgcctactcacgtcactcaaggtcgtggccgctgggccggggcaggacccggggccgctctcgctcctgccgttcgtgctcctgcgcatgcccgagttgcgtgggtgcgacctctccacatccgctgctttgaggaggaggcgtgggagtggagaggaaggacatggggaagccgcgagcgtgcggggaaggaggaggcaggcgccgcccctcgccgaccgccgcccttttccctctttgcgcctgtcttcatccccctcgccggccaccagccttcactctcttcgcatccgtctctgcccccctcgctggccgccgccctactccctctccgcgcacgcttgccggccggcgagggagctcgacgaggaaggaaggaaggatagcagggagagagaaggaggtgccgagccgccgacgcgccgtcgtctgtggatagagaagagggcacgtgggacgaaaatcaggttcgtcgacaagttaagggacttcaagtga

SEQ ID NO: 44490 - DNA, 1754 bp, Oryza sativa
  Clone ID: PAT_MRT4530_47545C.1
cccgggctgcaggaacgggctgcaggaatgcggcaccaggctctcctcctcctcttcttcttcttccactagctagttcgtcttcctccttcagctagcttgtagcagctaaggttaggtcggatcgagatcgggatcggccgccggcgagcggcgagcggcgaggatggggcgggggaaggtgcagctgaagcggatagagaacaagatcaacaggcaggtgacgttctccaagaggaggaatggattgctgaagaaggcgcacgagatctccgtcctctgcgacgccgaggtcgccgccatcgtcttctcccccaagggcaagctctacgagtacgccactgactccaggatggacaaaatccttgaacgttatgagcgctattcatatgctgaaaaggctcttatttcagctgaatccgagagtgagggaaattggtgccatgaatacaggaaacttaaggcaaagattgagaccatacaaaaatgtcacaaacacctcatgggagaggatctagaatccctgaatctcaaagaactccaacagctagagcagcagctggagagttcattgaagcacataatatcaagaaagagccaccttatgcttgagtccatttccgagctgcagaaaaaggagaggtcactgcaggaggagaacaaggctctgcagaaggaactggtggagaggcagaagaatgtgaggggccagcagcaagtagggcagtgggaccaaacccaggtccaggcccaggcccaagcccaaccccaagcccagacaagctcctcctcctcctccatgctgagggatcagcaggcacttcttccaccacaaaatatctgctacccgccggtgatgatgggcgagagaaatgatgcggcggcggcggcggcggtggcggcgcagggccaggtgcaactccgcatcggaggtcttccgccatggatgctgagccacctcaatgcttaagatgatcatcgtcgtcgtcgtcggccaaacagctgccgtatgcaccgtgaatcatgggagcaaccttgaatgaattgaagtcattggtatcgatcctagcgataatatatatgattctcctaaaatgaaattgatctcaaaaaaacaaacctagcgattaagctattcttatatatgtgtttgcctgctgccccctaccctacaggctacatatgatttgcaagaaattaattatgagcaaggatcaggatgtgtctttgtgtaatcatcagcacgtacctagtgcttcctactgatatatatgcatgcaattgtgtgcatataaatatatttgcatgccatgctcccgtgatggttaattaaaaaaaaaaaaaaaaaaaaaaagtttatgattgtgtttatacgctaattaactgcagatgcaaactaatcaatcgaattataacctgacccggtccggtcgcctgctgctctggtttactactagtactattgtcatcttgcggttgcgagacgaggaaagcattttagccctaaattcagcattagtagcaagctgcaatgtgtatattttggcttcgtccagcaccgtcttcctcccaccagtaatttacccatgtaatatatgcgagtagcatgaacaaattttcccgtttccaaccatctccattggtgtcatgtgtgacttaaatagcgaaatttcagcattgtgcatagtgtgattactgtaagataaataaactttgtagacaataagtctccgttatcttgctgattggagctg

SEQ ID NO: 44491 - DNA, 1087 bp, Oryza sativa
  Clone ID: PAT_MRT4530_47546C.1
ctcctcctcctcttcttcttcttccactagctagttggtcttcctccttcagctagcttgtagcaactaaggttaggtcggatcgagatcgggatcggccgccggcgagcggggagcggcaaggatggggcgggggaaggtgcagctgaagcggatagagaacaagatcaacaggcaggtgacgttctccaagaggaggaatggattgctgaagaaggcgcacgagatctccgtcctctgcgacgccgaggtcgccgccatcgtcttctcccccaagggcaagctctacgagtacgccactgactccagtctcacaatcttactgatcatcaaggagtctgtaaacacctatacgtacggctataggattatggggaggatggacaaaatccttgaacgttatgagcgctattcatatgctgaaaaggctcttatttcagctgaatccgagagtgagataactcttccccagttgacaacatgcactgcatccagaagtactcatggtatttgttttcagtactgtttgatgagtaaaactttgggaaattggtgccatgaatacaggaaacttaaggcaaagattgagaccatacaaaaatgtcacaaacacctcatgggagaggatctagaatccctgaatctcaaagaactccaacagctagagcagcagctggagagttcattgaagcacataatatcaagaaagagccaccttatgcttgagtccatttccgagctgcagaaaaaggagaggtcactgcaggaggagaacaaggctctgcagaaggaactggtggagaggcagaagaatgtgaggggccagcagcaagtagggcagtgggaccaaacccaggtccaggcccaggcccaagcccaaccccaagcccagacaagctcctcctcctcctccatgctgagggatcagcaggcacttcttccaccacaaaatatctgtagctacccgccggtgatgatgggcgagagaaatgatgcggcggcggcggcggcggtggcggcgcagggccaggtgcaactccgcatcggaggtcttccgccatggatgctgagccacctcaatgcttaa

SEQ ID NO: 44492 - DNA, 532 bp, Oryza sativa
  Clone ID: PAT_MRT4530_47547C.1
attaaggttgtttgaatttttcactcttgccctctgccattcgattcgatgaaactctctatctgagacgccggacgacgagattgtcggatgcaggaatcttgcaagcagcagcaggaggtgcagatgcagccggcccgttctgaggaggaagaagacgacctaggaccctgtttattggtgcggaaatccgatccgaaacactaacggacaagtatagtagtcgaaaactgacacgaaaacggacatgaaaacactaaccaagcagcgggcatcggtgcggtggagcggtctggacgcagaaagggtggatctggggcgccatggcgacctcgagagggaagaggctcagcgagaagaggagttggagctcgccatcctcctgtgtcgcgtcccgctcaccgacggcggatggggagccatgcttcgtcgacggcgagcaagcaaatccggccgtcaacagtgacgtggagggcgcatggtcccgctgccacattggtcaggagtgggagagatagagcccacgcgtccg

SEQ ID NO: 44493 - DNA, 804 bp, Oryza sativa
  Clone ID: PAT_MRT4530_47548C.1
atggcagcctctctgccactgtcagctgccatcgttggagccgaagagtcggttgacaaggaggtcttggagatggagtacctctttgagaagtttttgatgccaagtgacttgtgcagcaatactgaatggcttgggatcccagaagaacatgttaggaaatttggcatgatgttggaggacagggacggttactccgtcattttctttcaggacggtgtggtgcctgggaagttgtggtgctttaggtactggaaaagcaatggagtccatggcttgaccaagggctggaggtgctttgttagggagaagggcctcaaagccggagacaccatctccttcttccgaggatctgcatgtggccgtctcttcatctgctgcaggttaggcacccatgcaacctttgcgtcatcctccaccttgcatcatggcttttctatgcccccaccacctgcccgcccgctggtgggtcttcaatctggcatgttggcaagagatgtcccatcattaggacaagctaggttgcatgatggaaatcaagatggaggcggtgcaccatcaagacatgttccatcctcaggacgacgtgtggaggcacagctatcacgtgtgtcgtcgcgccgtcaacgccgtactatgaagcactcgataccagagcccacgatagagacgccaccaattcttgagtcgatgttcctcatagccgcaccaccggcagtgaagtgcttacggctttttggcgtcaacatctatgtgttgcctgtgtcctctagtggccagccaaaacaagaatccagcccataa

SEQ ID NO: 44494 - DNA, 711 bp, Oryza sativa
  Clone ID: PAT_MRT4530_47549C.1
ccccaaaaaatcatgtataaaataggcgtctgtgcttacctgttgggcatccaaagtaccttactggggcgagtcgttgaaacattacaacttaaaacatactgaccatgcaacagcataatattggtggcagaataagctacttaggtgcaattgtgcaaacccttactcaacaaaattatactaatgaaagaacctaatacttaataattctcatagttaagggtctgcttacactcatggagctctaggaatggactgattagaaggcaaaccttgtcatcctcaaaatgtacctgcagcagcatacacgcaaagcctcaactgcatctatctataccaccagtctggcattctagtggcactcccaccaaccactgctgcttctgacataccgatctacaatactatattctttgttctgctcaagtcgcttagcgtagttctctgtagaaattggaccctttttaagcttccgataataaatgacttcccatggccataggcgtgcagcaccaaagtacttctctacaggttggttcaataaatctgtaccacgtgcttccattccattgtgcttaagagcagagaccacttcatttgttgttagcttcaaagagttgctcctctcacttttcaccagaatatccttgcttgacttcactgatgaagcgtcctcagaattggtcttctgaacttgcacaccatcag

SEQ ID NO: 44495 - DNA, 427 bp, Oryza sativa
  unsure (1)..(427): unsure at all n locations
  Clone ID: PAT_MRT4530_4754C.1
aaaataaataaataaattatctctcggagaggagccgcgtgcaccgccgcgccggggaagaggccaagagggggatcatcaccggcggtgatcgggctgggccttgggggagatatggcggcggcggaggcggaggcggggaggaggacgctggcgctggtgaacatggcggcgatcatggagcgcgccgacgaggccttgcttgccggcggtgtacagggaggtgggcgcggcgttgcacgcgacgcccatggggcttcggcgcgttcacgctgtgcccgttccttcgtgcaggcggcgtgctaacccgctcgccgcctacggccgccgtgcgttacaaccgcgcgcacgtcgtcgcccgccgggcccttcctctgggccgccgcaccttcctcgtcgccgtttncgacaccttcgccaggtccgg

SEQ ID NO: 44496 - DNA, 1852 bp, Oryza sativa
  Clone ID: PAT_MRT4530_47550C.1
tgccggacgcgtgggcttgctccgcttcttcttttctcggtgtaagcgtgcgcgcgtttcactgtttcggtttcatctcccgctcttccattttgccgctccggcgaagtgctggaagcggagccgaggttaagccatgggaacggccgagctgaaggcctaggagatggggtgggcgtccaggtggctgcgcgggctgctcggcggcggcaagaagcccaactccggctccggcgacccgaagccggcgagggagaagaagcgctgggggttcgggaagtcgttccgtgagaagtccccggcccatccgccgccgccgccaccgccgtcggcggcggtgcagagggcggtgacgccacggcgggcgtacacggcgtcggatgagggggacgacgagcagagcaagcgggccattgcggtggcggcggcgacggcggcggtggccgaggctgccgtcgccgctgcccaggcggccgcagccgtggtgcggctgacgagcagcggacgatgcgcgccggccgccgccaagcgggaggagtatgcggctgttcggatccaggccgcgttccgcggctacctggcgagacgggcactgaaggcgttgcgagggttggtgaagctgcaggccctcgtccgcggcaacatcgtgcggcggcaggcggcggagacgctccggtgcatgcacgctctcgtccgagtccagaggcgggcgcgcgcgtgtcgcgctatccgctcccagcatgtctcggcccatcccgggccaccgacgccggagaagtacgaccaggcgactcacgagggcgtgcctaagcacggccgttctggttctctgaaggggagctcgtcgaagacgccgggaagtgagagactgacccgggagaggtcagaatcttgcgggaggaactggcttgacaagtgggtggaggaacggtatttggatgacgagaagaacgccaagattctcgaggtggacaccggcaagcctgggcggcacgcctcacggaggcgcagcggcagccatcaccaccactcgtcatgctcgtccatgacatccgagcagaagagccggagctacgcgaccatgccggagtctccgtccaaggactccacgaccgcgcagcagtccgtgcccagcccgccgtcggtgggcatggccgaggcgctcagcccgctgctcatggccgtcgacatcgccgagctctgcgacagcccgcagttcttctcggcgacgtcgcggccggggagctcgcggagcagggcgttcacgccgaccaagagcgagtgctcgcgcagcctgttcggcggctactccgactacccgaactacatggcgaacaccgagtcgttccgcgccaaggcacgctcccagagcgcgccgaagcagaggccgcagtacgagaagtccagctccctccggaaggcgtcggcgcacgcgttcggacccggatcgtgcgcgccggtggcacagaggacaacggcctccttgcatagcaagttcaccaacaaggcctaccctggatcgggcaggttggatcggctaggcatgcccgtcaagtactgatcatatgccggattctcgcgatcaaccgggacaagtgaatgaaagcgacaagtgtgtcaaactgtgtttagcaaggaccgagtgaatttagcaattggtcgttgttaggcttgagctttttatgggtgctgttaccgtcacagattttctttcttgtttttaactagttatgaagtgtaagttgctggtagctgtttggtgaagtatctatgcgtccttaaccttcctgacaaaaaaaaaaaacctaaaaaaaaaaaaaactcgagactagttctctctctctctctctcc

SEQ ID NO: 44497 - DNA, 1005 bp, Oryza sativa
  Clone ID: PAT_MRT4530_47551C.1
aattcggcacgaggagagagagagaactagtctcagttttttttttttttttttttaaacaaggagtaaagggtgttagagaacatatgttaagatacaaaagttacatgaaaattcaaggagcaaagggtgttggagaacatatgccgagatacaaaagtaacagacatgatacttgatacagtacatgctagtgattctactattataaagtaacacgaataatgcacacgtacaaacagaacattaacatatcccgcattcgagtggacttcctggaaccagtcaatctcagttatgatatttctaatgctataagattcttgtgacttatcaaagtttcactatcaccttcaatctaatgtttcttcattcaaaacaccaccgccaagaagatatccaggcagcgtcagctactggagaagggatataaatttagaacagggagaagaacattgagggagtagagattagactaatcgattttcattgcttaatccaaaccacaatacaatctctccttatatagagagggaaggacccatcctagtcctatccaataaactctgaccaactgagctacagtactgagtaagaggggaagatagggataatgttacctccaccggtactgggctgcccaacgcccatgagatctagcggctgaaccacccactggaactatatacaaaagacccactgaatgggtaacatcaggggcggtgatgtacattggcgcacttttatcttaaccatacctttgaggttctcagtctactcatagaatgtctcttgcttcttatccatttgtggtccttaaactttttaaacttcttccgttgtgtccaccaatttgaataatccaaacttggattgcattcaataaaatcgtatagatctgaagaatcctccccacgtcctgtaagtcctttgagaatggttctacattatcccttccatactagatgtacacctctgaaagactatcgaactgcagacctcacc

SEQ ID NO: 44498 - DNA, 403 bp, Oryza sativa
  unsure (1)..(403): unsure at all n locations
  Clone ID: PAT_MRT4530_47552C.1
ctttttttgtgtttacacatataagatttgtaaggaaggtatcaaaccgtgcagcgatttgctgtttgatcctgatcttggactgttacttgctgttttgcattgttttgggagtcccctaaatccttattgacccatgccttgcaagaagtgaaagcttaaaataaaggaatggtggtagaatgattacttgcttgcctgtgttgtagtgtgcatggtcccaaatttgaggatttggggaaccggtatgttcgccatcgggctgttgttatgcgtgtagtttattttgatttgcccgcaagaagtggcgggttttggtgctgtggattctgttttaaaaagagaagagctctctgtttctgttgagagcgcaaggtgacaaaagatttggatcaannnanna

SEQ ID NO: 44499 - DNA, 438 bp, Oryza sativa
  Clone ID: PAT_MRT4530_47553C.1
atggcggcggcggcggcggcgcggcgacggcgagggctggaagtgggtggcttcgcgccgatcggggtcggggagggtgcgacttgcgagtcaggtgatgggatgatgggattgtcgtaccgctaccggagacttccggagtccccacttaaggaggccctcgtagctttccagttccggccatccatccccgccggaggtgaggttgagggcggccatgcatattctgaaagcattgtcgctgctggatcagtgaagtggtacggggagtcggtgaaggggtcgaactcgtcgacggaggcgtgtgaatcggactacgacatgaagtccctcatgccggcaccggcgccgtatctgtccccgtccatctccgccgatgcgggcatgagcggctgcggcggtcgatatcggcgaaggtggaggcagaagagggcatga

SEQ ID NO: 44500 - DNA, 229 bp, Oryza sativa
  Clone ID: PAT_MRT4530_47554C.1
tatggttttccacacgctagtgctggtggagagcggggtttttatggggctgtcctttgcggtcaacttggttgagatacaccacgaggctgttcaagaggttgtccctggagcacatcgcgagttcaacgggaaaaacgttcctctgaaagagctgaagcgccaacacgtgggctcccactacggggatgaccctgccaaggatgctggcaggttaacgttgcaggtg

SEQ ID NO: 44501 - DNA, 759 bp, Oryza sativa
  Clone ID: PAT_MRT4530_47555C.1
ttttagcacaaagaacattttctgcgtctaaaagaagcaaaccacattcttacgaacatagacaattttcaaacaattatacaacatatgacatacacatatgtgttccgtgttaataagttacgaggtcccaagtagcttctggatatcattctcaatctttaatggagaagtcgtcggggcatatcgctcaacaaccttgccatctttaccaacgagaaacttcgtgaagttccatttgatgccatcaccaaggaatccacctttctgtgatttcaagaacttgtatagcggtgcggcctccttcccgttaacatcaatcttgtcaaaaataggaaattctgctttgaatctggtacaaactgtttgctcaatctcttcattgctgccaggctcttgaccagcaaattggttgcacggaaatgcgagtatctcaaggcctttttctttgtatttctcgtacaagacattcaactccttgtaattggaatttgttaagccacattttgaggccacattaacaataagaagaaccttcccctcatactcgctcagcttcacatcatttccctttatatccttgacggagatgtcgtggacggaggtgggcaggtcgtcggccatgctgggcgcagcaggtggcggcgcgcggagggagaggagggagacgagggcgacggcgagcgcgaggacggcgagtgaggaggtccagatccggttgccgccgccgctgctgctacttgtagttgtagccgccat

SEQ ID NO: 44502 - DNA, 399 bp, Oryza sativa
  Clone ID: PAT_MRT4530_47556C.1
atggcttcctcccgcgccgcgctgctcgtcgctgttctcctcctcctgctggtctcctccctctccgtccgagccgaggcggatcaggtggcgcgagcgccggcgctggcgccggacgttgccgcggcgagctgggtacagcagggatcgcaggaagcggcggcgccggggcggcctggaatgggcatgggcaagaacggcgcggcgaggtggaggaggacggcggggcggcgcggccggggaggaggaggaggaggcaccggcgcgtgggcgttctcggcgatgctgccccgtgggttcgtgccgccgtcgggatcgtcggcgtgccacaacgacatgccggccgccgccgccgacgcggagttcttcgtgtgcggcggcggcgacgggagcccgtga

SEQ ID NO: 44503 - DNA, 1815 bp, Oryza sativa
  Clone ID: PAT_MRT4530_47557C.1
tcacttgacgatctctggtatgctgcgctttacaatcagctctccgtttctgcagatcagaaatggtaaccatgcaggcaggtcagaacgtctgtgtttgatggctatacaaaggctgatcccctgcttctggttctgcttctccttctgtttccgcttcctctcgtttcgcctcttcacccagggcttctcttcctccactggcgcttctgcctctgcgctgacagatcctgtaatctgcgcaaacgactctttggcgccagaggttacgtcgccgaagaagtccttcaccttgtcaaccacagttttgagctcttctttctttgggagttcgatcacattacttgtcgtcagcgcagacctcaggttcccattctccacaactttgtagccatatcgaaactcattgtcggtcttcagcaccctgtactgctcttttgctgtgtctattatgtcatcctcatctttgtagatgacagcggcaaggttcctggcgagcgtgtccttgtagatgtactttccgaggaagttgtccttcgccgcgagcatgatcttcgccgtcgtgccgccggtgacgatgttgagcgggtaccagaagtacaccaccccctccccctcgcctccaccaccagcgccgcccgcctcgccggcctcgccgccgcctgcagcctgctcctcggcgccgtcctcatcagcaggaagctccccccgccgctcgcctcgccgggcgacagctgccgcagccgcgcccgcgccggcgccggcgaagacgcgctcagcgacgacacgccgcccaccacctccattgaaacctcctattccggtctcgcgccgcacaagtctgcaaggaagcaacaggtagtcaatggcgaatctgctcttcatctcgtcgtaacccggccacaatgacgccatctcatgcacgtcgtacatctcctccatgcagcgtgccaggtacacgacgctgtatcccgtcaccgcctccagcccgtcgtcctcccacggcagcggcggcggcagcccggcatctgccagggtggtggccgcgtaccgcgcgaggtacaccgccgacgccgccacgacggacggcgggatcctcaggctccggcggtcgagcagcgtgaggtcggcgaggtggtgcgccacggcgtgcacggcgtcgccgccggagtagccgtacctggcgaggaagtggtcggcgaaggtgtgcgcggtggggcggcccagcctgtacccgagcgcgtcgagcaggtcgagctccctgtcgagcacctcgctcctggcgatggcgagcccgccggcgccggcgccggcggcggcgtcgccggcgctcagcctctcctcggggaggtcgccctcgtacttggccgcgacgaagacggccgtggcgccgagcagcgcgagcaggcggtggctcaccgcctccaggggcctcaccgactggtagcggtcgacgtaggcgacggcgcggtggagcgtgccggcggcgaggccggcgtgcccccgggtgatcccctccatccacgccacgagcgacgcgcgcgtccacgggtcgacccggccgcgctgcaccgcggtcatgtagtccggcgacgaccgctcgccggcggccatctccatggcccggaggctggcgtacaggtcggcgtcgtacgtccacgccgcgcaggcgcatctctcgccggcgcagtagctcccgtccgtctcgtcgccagcagccgctccgccgggaccattggcggcgacggcggccgcgatctcccggagcatagcctcgacgtcggcgtcggcatcatccagatagagataatccat

SEQ ID NO: 44504 - DNA, 941 bp, Oryza sativa
  Clone ID: PAT_MRT4530_47558C.1
cctcgagccaagaaaccatcaagctagcgaggccacctcaccggccgccatggagatcccgccgctctaacggcggcgcgttcttgctcgtcgtcggagctagagatcgatcgaccaagctagcgtttcttcgattagatatagtcatatctatataggtagaaggatgggtgtgcacttgctgaagaggcagcagtcatcggcgtcggcggggggctcgtcggcggggggagggatgccgccgaaggggtgcatggcggtgagggtggtggggcccggcggcgtgggcggcggcggaggaggagcggagggagagaggttcgtggtgccggtgggttatctgaagcacccgctgttcgtggggctcctcaaggaggccgaggaggagttcgggttcgagcagaagggcgccatcaccatcccctgcggcgtcgaccacttccgccgcgtccagggcatcatccaccaccagaagcaccaccacggcggctcccatggcgccggcggcgccggcgccggcggcctcctctccggccacggctcgtcgggacaccacaacaacttccacatcgccgcctgcttcagggcctgattgagatgatcatcagatgatgatgcatggtgtttctttggctagcttctctctctcttagatcgatggattaataatacttagggttttaatttccttttgggtaggaatttagtcatggtttgtgatgatgatcaaaaaggatcatgcatgcatgagcagatctgtcatgcagctgcgggttgttctctgttcatccttataggactctctctctctctctctctctctctcctagttaagttagattgtgatgatgatgatgatgaaaatggagatcaaaggatctggttcaatcaaaacaaaagatgttccctttcttctttttctttaaaaaaaaaaaaaaaaa

SEQ ID NO: 44505 - DNA, 597 bp, Oryza sativa
  Clone ID: PAT_MRT4530_47559C.1
atggcgggcgggccggggagctgcgtgatgtgcgcgtcctgttgcaccctcctgctcttactggtcgccgcgctgctgatcctctcgtacggcgtcgtcttcaacgtcggcgtcacggtggaggacgcgtccctgacacgcctcgacctcgccggcgccaacggcaccgacctggcctacggcatctcgctcaccgtcgccgtgcacaaccccaacatggccgtccgcgccgagtacacccggccgctcgccgccgagctccgcctcgccaccagggaggagctcctccacgccgtccatctcgcggacgccgggcagagggtggaggcggccgagacggacaggttcggcgtgaccgacgagggcgtggcggctcatctcggcggcgcggcgttgacggagctggtgaaggagatgggcgcgcgcgggggaggaggtgtcgtcgctggagctgaagatcaccggcgaggtgaggttccggccggtgcacgccggccggacgaggagggtggacgcgacgtgcccgctgaggctgtaccgaccggggacgaacaccacgcaggtcaaccacagggtcatcaaatgccactagactag

SEQ ID NO: 44506 - DNA, 823 bp, Oryza sativa
  Clone ID: PAT_MRT4530_4755C.1
acgtcagcagtgacgtcaccaccggcggcggtggctcggcggctcgggcttgcatgctcgccggcgaacgacggcacggcggcgcgaacggaaggcaccaacgggtagagcgcgacgcggcgaactcaccggtgaccaaacgagcggcggaagatcaacggacggcgacggcgacgacgaagaaacggcggcggtcttcgggtcgacggcggcgacggtgctccggtggtctacaacgacggcgaaggggcggacgaggacggagacgcgacggcgaccacgatggcagccttcccgagtgacgacgacggctgaaacggcggcggcgcacggctggagcgacggcggcgacggcggcgctagggcacacggtgctagagctcttccggcgacgagaggcgaaggcgagggtggcggcgggtagaggagacaccggggagccttttaaaggggctaggaggcgacggcgaaggcccacggcggccggcgacgagaaggaaagttcgggaaaatcgaatccgaaacaaactcgaatccacgaatttccaaacgattttagccgatgtttccaaaggagaaaaggtagaggagatcccgaggatcatttcccctctatcaattcggccggaaacggaaaggagcggccggattggaaagcggcggcggcggcgcgaaactagggtttcggccggaggaagacgatgggccccacctgtcagcgggcgaacgcgcgcgcgcgcgacggcggactgggccgacttgggctgaggagagagagagcggttttgggccgactttcggcccaaagccaaaagagactttt

SEQ ID NO: 44507 - DNA, 315 bp, Oryza sativa
  Clone ID: PAT_MRT4530_47560C.1
cagcatggcatccataactcgccctatagttctcttcacagctggctagatcctcccgcgcagaggctctctagcccagcagctagtaggccagagcactagtcaatggcagagttctcgtggtggaagtacaagagaatgcaggttcgataggctgcaagcatttgagccaattcggagcgtgaggtctgaagctggcacagctgagttcttcgatgtctataatgagcaagttcaaggtacctggagtatctgtctgtgcgctcgcgctattgagacctagaggcccttctactaccccagtacactaagtgg

SEQ ID NO: 44508 - DNA, 1506 bp, Oryza sativa
  Clone ID: PAT_MRT4530_47561C.1
atggcctccgatggtagtttcttccgatacggtgagcgccagatagcagctaaacctgaagattgcccagcaatgtcatcaatgttgtcattggaggatctcccggatgcattgctcgcagagattgtaaagaggattaccaacacaagtgacctgaagtccatttcccttgtgtcaaagcgtctgtacactatcgaggcggagcaaagaagttctatccgtgttggctctgacctttgtccagcgatagatgccttgtcagcactctgttcccgattccccaatttgttggaagtagagatggactactctggttggaaatttcactggaatctgctagaaaaacatattttctcattgcacttccctgtcctgcgtgatctcaccttatacattgatgatattcgtatgggttgtctagcttcttgcaaaaatttgatgtccctcaggttgaactctgtatcagcgataggctcatgtggacttctctcggtggctgttggttgcaagaatttaacttctctccacattattaagtgcaaccatattgttggcagtgataagtggctggagtacattggcagtgctgggtcactggaagaacttgtagtgaagaactgcaagagaatcagccagtatgatctcctaaaatttggccctggatggatgaagctcaagaagttcgagttcaagttcaagagaagtttcaacacatatgaacctcgtgacccctgttatgtggataactatcagtatggatatgatttctgctgtgaaagtttgagggatgtcactttggctacgattgtaactaaaccagagataggacttcgctgtctcctgacaaagtgcaaagcattagagagactctgccttcactatgtaattggcataagtgatcatgacatcattacaatctcccagaactgcagcaaccttagaagcatctcactttctcaagagatgctgctctgtgaaatacctggaggcacaggcgtaatggctaggacaccactgactgatgacagcctcaatgctctagccctgagatctcatatgcttgaagctgttgagcttatgttttatggttgtgctcctgattggccatctgagatagccttcacacaggatggccttgtgacactcctccagtcctgtccgattcgtcatctcgtgctacgtggtgctaacttctttgatgatgaagggatggaggctctctcatgtgcacaattcctggagacactggagcttatgcaatgtgttgcggtaactgatgtcgggatgcgctttcttgcacaaagcccatgtttgaagaatctcacgctgcagatgtgttacgaggttactgatgatggagtgtgtgaggtggctcatgcacgggatttggagtctctcactgttgaaagctgtaatcagatttctgtagaagctttgcatggggccgccaaatccgttcactacaaagttgattgcccaagctactacgatcgatataaagattag

SEQ ID NO: 44509 - DNA, 260 bp, Oryza sativa
  Clone ID: PAT_MRT4530_47562C.1
cgggtgaatgccggagaggcttgggggaggaaggctgatcaggagcctccccaaccagggttccagcctgctcatggacccaggcactccgggctcaatcacattcgacagcactcccccagcaaacagcgccagctgctcggcatcggcgggatgtcacagacagacagacactccgggggatgctcacccgaggcagactttgacggcggacgccgccctcagcgaagatgggagttctggcgtcattcatgttcagc

SEQ ID NO: 44510 - DNA, 755 bp, Oryza sativa
  Clone ID: PAT_MRT4530_47563C.1
atgaagaccagccacgtggagaatgactacatagacaaccctagcctggcccctgccacgggtcccaagcggccccggggcgggccaccagagctggctcctacacctgcccgctgtgaccaggatattactcaccactggatctccttcagcggtcggcccagctctgtaagcagcagtagcagcacttcctccgaccagaggctcctagatcacatggctccaccgcccgtggctgagcaggcctcacccagggctgtgcgcctccagcccaaggtggttcactgtaagccgctggacctcaaaggcccgacagctccgccagagctagacaagcacttcttgctgtgtgaggcctgtggaaagtgtaagtgcaaagagtgtgcgtcccctcggacgttaccttcctgctgggtctgcaaccaggagtgcctgtgctcggctcagacgctggtcaactatggcacatgcatgtgtctggtgcaaggtatcttctatcactgtactaatgaggatgatgagggctcttgcgccgaccacccctgctcctgttccggctccaactgctgcgcccgctggtccttcatgggcgccctctctgtggtgctgccctgtctgctgtgctacctgccggccacaggctgcgtcaagctggcccagcgaggctacgaccgcctgagacgccccggttgccgctgcaagcacacgaacagcgtcatctgcaaggcagccagtggggacaccaagaccagcag

SEQ ID NO: 44511 - DNA, 261 bp, Oryza sativa
  Clone ID: PAT_MRT4530_47564C.1
atggctgctgcttggtgcaactacaggcgatcacgaaagaggagcacgatgacaactaggacgccccttccccatgcgcctgcggtacttggcgacgaagccggcaagcgggtgcgggatccgacgacgcgaaagaagatgagtggagggcgttgtgacagaggaggtgaggacagggttgccagctcccttcgctccctcaaccattgccgctcgtcgccgcaatcccctccgcccccatcgccgcccaaggaagaatag

SEQ ID NO: 44512 - DNA, 255 bp, Oryza sativa
  Clone ID: PAT_MRT4530_47565C.1
atggagagcatgtgcagctgctggctagggcagagcatgcggcagctggttggaggagtgcctctatgggtagggaaaaatttaggatgtaatagattgccggaaattggcgtgatggtgaatgatggcaacgacatcgtgctcgccatcaacatgtctccaggcctacctactcggcagcttcagtgtccacgaaaagattcacgatcttcggatgtctcacagcaaaggccgcaatctttcggtgtcctgtag

SEQ ID NO: 44513 - DNA, 1377 bp, Oryza sativa
  Clone ID: PAT_MRT4530_47566C.1
atggaggaggggtttgtggctctcaagaggacggagcatgtcgaggtgacgtccttggcggtggcggtcgaggcgacgccgtcggcgaaggggggaaaggggaaggttgtggtgggtggtggtggcgccggcggcggcgttgggccgacgagggtgagggtgttctgtgatgacttcgacgcgacggactcgtcgagcgatgaggatgaggaggaggtgaccgcgcggcggagggtgaagcgctacgtgcaggagattcggttacagcgcgcggcggcggtggccgtgccgccggtgaaggtgaagggcgaggaggtgttcccggccgcggtgtcggcgaagatggcggaggccgcgaaggcgagggtggtgttggcggctgggaggaagaggaaggccggcggggtggacggcgccgagccgcggttccgcggcgtgcggaggcggccgtgggggaagtacgcggcggagatccgcgacccgtggaggcgggtgcgggtgtggctcggcacgttcgacaccgccgaggaggccgccaaggtgtacgacacggcggccatccagctacgcggccgcgacgccaccaccaacgtccaccagtccggggactcggcaagcctcgacgtcccacccgaggtcgccgagcgcgtcccgcagccgccgggggcgtccaagaacgcctccccggccacctcctacgactccggcgaggaatcccacgccgcggcggcctccccaacctccgtcctccgttccttccctccctccgccgtcgtcgcgaccgccgacacggccaacaagaagcagccgccgccgccgcctctcgtcgtccgcgagaccgacgagtcggtcgacgtcttcggctgctccttctccgacgacggcggcttcgccggcgagctcccacctctctacaccgacttcgacctcctcgccgacttcccggagcccccgctggacttcttgtccaacctccccgtggagcccttctccctggctcccttctccagcaacaatgggtcaccggacctccacctcgacgacgccccatcgccggcggcggcacaagtggacgacttcttccaagacatcaccgacctgttccagatccccgtcgtctagtgcagcagcaagaactgtaaaacaccggattaggagactaatccggcccaattttgtttgcgttttctcttttttttttcttctttattttttcgtttttagaggagaggagagttgagttaatgattccccgtcagtctagctgcggcagaacacccaccaccgcttcgtcaggggggaaagccttgacgaggcgagagagatgagaaagtcaaaagagagggcataaaacgggatccaatgttgttgggggtt

SEQ ID NO: 44514 - DNA, 787 bp, Oryza sativa
  unsure (1)..(787): unsure at all n locations
  Clone ID: PAT_MRT4530_47567C.1
aaaaggtaaatctgagccatagtagcccttagcgacattgagtagcccaacctattattgccacgttatagaagcaaggcaacaggacatcattgtattaccaaatacaagaataaataacccaaagtttttaacttacaaacaaaggtacaattcattctactctatgccatcattctaacatgaaattagaaatagcatcttttaggcgatatcctaaattttttaatcaaacacgggacagaatcatatgaaccatactatattaataacagttcagggagtatatgtacaagaattacacatgcaaggcatttatggagaaaacaatgaaaactagattttcactaacataaaataaaacttacgattggaatattgggaatagcatctgttaatggtataatgccctcttcattacttgtgtgggatttaataaacaacgtgggtcaacaaagcatttgtcaagtgccaaaacctgtcgtatgtttcacataatatcattcaaatatttgctttcacctgatatcaaatagccaaccagattaataaatctctgcttcaattaaatgcacagcagagcaaatagattccattacccttaacatatttgatctatgaactttccactatagcctatggtcaactgagatataagcttgaaccaagaaatgcagttacaaaaagagaattattattgnttaagtcatgtgatacgccagcaaagcaactactcattttagtaccagaacactggatactttgtgcataatcatcaaaacaggac

SEQ ID NO: 44515 - DNA, 978 bp, Oryza sativa
  Clone ID: PAT_MRT4530_47569C.1
atggcggcgccgccggtgatggaggtggactcaccgacgaccggagatgaagaagatgaagatgttgagagacaaactacaaaaccaattggtgttatggctccgcaggatacatggtgtaggatggatcccaaatcccttcaacagagcgaagtcgatgggcacgaagggtgcagccaaaatatgttgggttatctgcatcttgcttcccctgcaataaataaatacgacagtcgctccctagattttgttccaccccatctcaagattcctgcaggacccatagaagaatcaatgtggagagacaaactacaaaaccaattggtgttatggctccgcaggatacatggtgtagggtggatcccaaatcccttcaacagagcgaagtcgatgggcacgaagggcgcagccctaaagactcaatatacaccaactgcactatcccccatcgatactccctaccttcgaaggatgataaagatcaatgtgaatatccatggaccaaatcctccaatcaatatccccgaacttcaaggtactatcatggatactacccgccttcaagttataatgaaggaggtttcacaccttcgatatatattgaaagaggcccctcaccttggagacatcataaaggagattcctcatcttcaaggtatgatggagaaggttcctcacctccaagtcactatgaagatagctaccggccttctaatgtgtcatggaatcgagtgttctccgccttatggagatggtaaatagcccaaagatattagagcactgatgtaccactcaaaagccatcaatttttagaggagtctatgaaagaatctccatgtcgatagtctccacctttaagtaacaataaagattactagtgcacggagacacggagcaaagcagtctatgccacggttgggtgcaaattagttgcatgataataaaacgagattatacccttatcctaaaaaaaccaaa

SEQ ID NO: 44516 - DNA, 676 bp, Oryza sativa
  unsure (1)..(676): unsure at all n locations
  Clone ID: PAT_MRT4530_4756C.1
anttgtnntacgactcactatagggcgaattgggtaccgggccccccctcgagttttttttttttttttttagaaagaccatcttgagggatgtccttagcattcagaactgatattataagaaacttttacagtacntancagcancgcaattgcttgcaatttatttatttatttatttagttattctntatctgcattgccnacttaagaggattccgccacnttataaacgtcttggtngcncttgttttggaggggagtnaatgcaccnaactcatctcctctgttatncttgancctctganntctnctcttgagatgcgatatncatttgctagnaacatcccttgggagancaccgaaganagaantccttnccgccaangttgnttnccncnaaattntngggttgtcttngnaatntcntgttaagncccccccccccccttttnnnctncccnnctaaatannnattgtttttnngttctntnanttttttttntcccanannaaatnttcccntgtataantccccctccnctncttttaatacattaanccngnggnngncncgttttttccnnatctnttanntttttttncactgnnaacgnanctttctnttcnatttttttccgcccccctntttaaaaacnnnaggtttcttatacnc

SEQ ID NO: 44517 - DNA, 366 bp, Oryza sativa
  Clone ID: PAT_MRT4530_47570C.1
atgacacccacgacggctaggggaagaacccaggtgcctcagctcaccgacgacaaggaccaagacaacaggacgagagtagccagcgccggtgacggcgacagcgaccaccttgaggagagggagcttcgagagagagcaatagctgagttccaacgtttagttgaatacactttccgcttgacgcacacacctgaagcctttgttccggtgggctggactgctggactagatcggccagaatctacgccgcgcctagtgcccggtgatccgatcgggaccgatgctccggtacgcactagcccctcgtgcaggaaaaagaaaagctgccggcttcggtcagatggagatggttgggctctatga

SEQ ID NO: 44518 - DNA, 293 bp, Oryza sativa
  Clone ID: PAT_MRT4530_47571C.1
tggtgcagaaagatttttagggccaaagatgttgatgcatgtattgctgatgtggcccctgctgcaaactgcctgccccaaactgctgctggatggtgaaatgatgtgagatgctgaccgtgagccgccaccccaacgccaggaaagtgaggaccaacgtgagtgagtgaggagttgacccccctgacccttgtattaaccaccagcctattcccccggataaatttgtgtaagctctgtagctcgagataaaaaaaaatggcgatcgaacgaacgaacaaaaaaaaaaaaaa

SEQ ID NO: 44519 - DNA, 335 bp, Oryza sativa
  Clone ID: PAT_MRT4530_47572C.1
gcgcccgtgggcgctaatgctgctcgccgccgtcctcctcgtggcggtgcccgtggcggcggcgacgctgcacccggtggactacctggcgctgcaggcggtgcggcgcgcgctgtcggacatgccggggtcgaggttcttcgcgtcgtgggacttcaccggcgacccctgcgggttcgcgggcgtgtcgtgctcgggcgacggccgcgtcgtcaccctggcgctcggcgacccgcgcgcgggggcgccggggctgtccggcgcgctccccgccgccgcgctggcgcggctctccgagctcgcgtcgctggcggtcgttccctcgctcgtgtcct

SEQ ID NO: 44520 - DNA, 1411 bp, Oryza sativa
  Clone ID: PAT_MRT4530_47573C.1
gcacgaggcccccctttttttttttttttttttttttttttttttttttttttttttttttttgtacgcaaatctaattaccaccaatgcggtcttgggattagaattgctaaaatctcattacatgatgatatgaattgtacactactagttaactacaatggactaaactatctcaatggaattccactaaagtacactatacatgaacaaaatacatcacgatgagggtgagctaatgccattaatttcattgaacagctctgaacagctccttccatttctctgggtcgctcccaggtccttcgcccttcaccgagttgatctcgtatatttgtccttctgtgaattcaatatccaaagcttggatacaggcttctgccaccaccagtctgcttgcttctcccacaagcttgtcaccttcgcccatgacaactgcccgtctttctccagcagtagcttgaagaagtgtgttaaggtcataagaagtgtagggtccatcggttaatctcccaggccttatgatggtgaaaggtatgcctgagttctggacaaagtcctctgccatcttcttgtacttaagcacaccaaacagattcatgatactccatggtagttcattgtattttgtaacgccgatggatgacaccagaaccagtctcttgattgtccgtggcatggcgctcaccagattacgggtgccatcccaatcaacacgttcaggagtgttatccccatcccagcgctttgaagggaatgctgtagttccagtagtgcagatgacatgcgtaactccctcaaatatttctggatccaattctgcagcatttctcgtgtcagccttgtaagcctgaaatacgctctcatcttgctcgccgaatagggtcactgcctttgcaggatctcttagcaacaaccttgtcttgatgttcctgctcagtaaagatgccaccaccaactgccctgcaaggatcttgtggagattatgggtatcccatatcagcatgatgagcttgacataatcagataatggcatagtaaaatgacagtagtgacactccaatggagagaaggtgacactgaagctatggagagaagggctagagatgtgggtctccttacctacgccgccggtcccgccgacgacgagaactagcttggacgaggcgtcggccgccgcctccgcgccggcctcacccgacccctccgtccgctgctgctgctcctgctgccgcacggcctgcggctcctccgccaccgccgcgagccgccatctgcagcgacccgccgcggcgcgcgcggaggatgtgggcaccaccaccgagcagcagcgccgcggggccgctctaccgccgtaggccaggcgcggggagagcgcgagagggttgaggcaggccatcgccatcgccat

SEQ ID NO: 44521 - DNA, 1497 bp, Oryza sativa
  Clone ID: PAT_MRT4530_47574C.1
atgtcgggggacgcgttcaacatgtcggtggcgtaccagccgtcggggatggcggtgccggagtggctgaacaagggcgacaacgcgtggcagatgatctcggcgacgctggtggggatgcagagcgtgccggggctggtgatcctgtacggcagcatcgtgaagaagaagtgggcggtgaactcggcgttcatggcgctctacgccttcgccgccgtgtggctgtgctgggtcacctggggctacaacatgtcgttcggccacaagctcctcccgttctggggcaaggcgcggccggcgctgggccagagcttcctcctcgcccaggccgtgctcccgcagacgacgcagttctacaagggcggcggcggcgccgacgccgtggtggagacgccatgggtgaacccgctctacccgatggccaccatggtgtacttccagtgcgtgttcgccgccatcacgctcatcctcctcgccggctcgctgctggggcggatgaacatcaaggcgtggatgctgttcgtcccgctctggctcaccttctcctacaccgtcggcgccttctcgctgtggggcggcggcttcctcttccactggggggtcatggactactccggcggctacgtcatccacctctcgtcgggtgtcgccggcttcaccgcggcgtactgggtggggcccaggtcgaccaaggacagggagaggttcccgccaaacaacgtgctgctcatgctcaccggcgccggcatactgtggatggggtgggcggggttcaacggcggcgacccgtactccgccaacatcgactcctcgctcgccgtgctcaacaccaacatctgcgccgccaccagcctcctcgtctggacttgcctcgacgtcatcttcttcaagaagccgtccgtcatcggcgccgtccagggcatgatcaccggcctcgtctgcatcactcccggcgcaggcctggtgcagggttgggcggcgatcgtgatgggcatcctctccggcagcatcccgtggttcacgatgatggtggtgcacaagcggtcgcgcctcctgcagcaggtggacgacaccctgggcgtcttccacacccacgccgtcgccggattcctcggcggcgccaccacgggcctcttcgccgagcccgtcctctgctccctcttcctccccgtcaccaactcccgcggcgccttctaccccggccgcggcggcggcctccagttcgtccgccaggtggccggcgccctcttcatcatctgctggaacgtggtggtcaccagcctcgtctgcctcgccgtccgcgccgtggttcccctccggatgcccgaggaggagctcgccatcggcgacgacgccgtgcacggggaggaggcgtacgcgctgtggggcgacggcgagaagtacgactccaccaagcacggatggtactccgacaacaacgacacgcaccacaacaacaacaaggccgcgcccagcggcgtcacgcagaacgtctga

SEQ ID NO: 44522 - DNA, 458 bp, Oryza sativa
  unsure (1)..(458): unsure at all n locations
  Clone ID: PAT_MRT4530_47575C.1
ctcgctcaacactagtatcgtgcaatgagcaatggcagcatacaccatgatgaccttagacctgtgtgccttgctcgctctctctgcaagtgccactactgcgatcacgactatgcagcttttagcactaacattcgccatgggcaccacggatccgtgaggcagtgcacgatgcatacgttgggcgtgggtagctacacagtcatgtgtcatgtcacagacaatggcgctgctgcagcagcaatgttgcatgcagctactaggcatgatgcctcagtgtcactgtggcaccagttgccngatgatgcagagcatgcaacangttatttgtgctggactcaggcagcagcctatgatgaacatggctacgcagatgccatacatgtgcaacatggcctctgttaacttacaactctgtttctgtggatcggtgtgatcaaacaatggttacatgtact

SEQ ID NO: 44523 - DNA, 717 bp, Oryza sativa
  Clone ID: PAT_MRT4530_47576C.1
caatggcctccttgtcatccttcctgctcgccacggcaatggccgcattgttggtcatcggctcgtacgccactgagctcaccttcaaagtcggtccaggctctagcaccactagcctgaacctcatcaccaatgtcgccatctctgaggtggaggtaaaggagaagggcaccggtgactggacggggctcaaggagtcatcggctaacacctggacgctcaaaaccggggcaaaactcaagggccccttctccgtccgcttccttgtcaagaatggcggctaccgcgtcgtcgacgatgtcatccctgaagccttcaaggtcggctccgtctataagagtggcatccagctcaagtaacggtacactttgtgctcttgcattggatcgcatggaaatttgttgatctcttaaaataattctttttttaaaaaagagggggcgagccggcctgtgcgcaagccaataattattttttatggtccttcccgcatattgttgtgaagctatatatgtgcacatgattttgaatacgttgtttatgtaggacttatggtaaaaaggtatattatttggtcagccttcaccgagacggttgtttacatttgatttttccaatgttttaatacatatgtatatctagatcaatgatgttcatctatcatttttacatgtaaaaaaaatcctgtaaaattcgcattaaaaaaaaaaaaaaaaa

SEQ ID NO: 44524 - DNA, 2450 bp, Oryza sativa
  Clone ID: PAT_MRT4530_47577C.1
agcgagcgaagcctccgagttctcgaattctctcgtctccaatcgctgcagatttccatttccgccgcggcgaggaggaggaggaggaggaggggcgaacgctagtgctctccgcctcgcgggcagtgggcgcgagatctcatccgagtgggtgggcggggagagatctagggcttgcgttgcgggcgcgcggccatggcgagctccggactcgcctaccccgaccgtttctacgccgcggcggcctacgccggattcggggccggcggggccacctcctcgtccgccatctcccgcttccagaacgacgtcgccctcctcctctacggcctctaccagcaggcaacagtggggccttgcaatgtgccgaaacccagggcatggaaccctgtggagcagagcaaatggacaagctggcatgggcttggaagtatgccatcggcagaggcgatgcggctgtttgttaaaatcttagaggaggaagatcctggatggtactcaagggttcctgagttcaaccctgagcctgttgtagatattgaaatgcataaaccaaaggaagatcccaaggttattctggcttcaacaaatggaacatcggttccagaacctaaaaccatatctgagaatggaagttcagtggagacacaggacaaagttgttattctggaaggtcttagtgctgtcagtgttcacgaagaatggactccattatctgttaatgggcagcggcccaaacctcgttacgagcatggcgcaactgtggtgcaagataagatgtatatatttgggggaaaccacaatgggcgttaccttagcgaccttcaggctttggatctgaagagtttgacttggtcgaagattgatgcaaaatttcaagcaggatccactgattcatctaaatcagcacaagtctcttcttgtgctggacattcgttgatatcttggggcaacaaatttttctctgttgctgggcacacaaaagatccgtctgagaacattacagtgaaggaatttgatccgcatacttgtacatggtctattgtcaagacttatggaaaaccaccggtttctcgtgggggtcagtctgtgactttagttggaacaactctagtcttgtttggtggtgaagatgcaaaacggtgtcttttaaatgacttgcacattcttgatcttgagaccatgacatgggatgatgtggatgcaataggcacccctcctccaagatcagatcatgctgctgcttgccatgctgatcgctatcttttaatttttggtggagggtctcatgcaacatgtttcaatgacttgcatgtcctcgatttgcaaacaatggagtggtcaagacccaaacaacagggtctggctccaagcccacgagctggccatgcaggtgcaaccgttggggaaaactggtacatagttggtggtggcaataacaaaagtggtgtctctgaaacacttgtgcttaatatgtcaactttaacatggtcagttgttagctctgtagaaggtcgtgttccccttgccagtgagggcatgactttagtgcatagcaattacaatggagatgattatctcatttcttttggaggatacaatggacgatacagcaatgaggtctttgctcttaaacttaccctcaaatcagatttgcagtcaaaaacaaaagagcatgcatcagatggtacatccagcgttctggaacccgaggttgaactttctcatgatgggaagatccgtgagattgccatggacagtgctgattcagacctgaagaaggatgacgcaaacgaacttttagtagctcttaaagctgagaaagaggaactagaagcagcacttaacagggagcaagtgcaaactatacagcttaaagaagagattgctgaagcagaggctagaaatgcagagctgacgaaggaacttcaaactgtccgtggccaacttgctgctgaacagtcaagatgtttcaaacttgaggtggatgttgcggagctacggcagaagctccagagtatggatgcattggaaagggaggttgagctgcttcgaagacagaaggctgcctctgagcaagcagcgttggaggcaaagcaaaggcaaagttccagtggcatgtggggctggctggtgggaaccccacctgataagtccgagtcttgatcacctatctatctttacccgacaatctcatacggatcgcgcagattcatatacgtgtaacatgtataaactttttgaatgtcttctacacttttccttttcctttttctttttatcgttttctggcattcgtgttcatttggcgacaaaacaataaggcgttttggcaagcgttatctgatattctcatagaaaattgttagctcatccttgtatcgcattcaattcttattaggtcgtaaaaaagcttgtatacacctttttgtgggcattctttggacatt

SEQ ID NO: 44525 - DNA, 627 bp, Oryza sativa
  Clone ID: PAT_MRT4530_47578C.1
tatcttcttctctcctcctctcctcccatccttctcttccttcttctctcaccccatctcctcccctttcctccccctcctctcgcagccagcgccgggcgggaggtggcggccggcgccggacgggaggcggcggtcggctgcgtcgggggcggccggcgccggtcgggaggatccgccgctgacgtgcttgtgaccaatggatcctccctcacgtgcggtggagatgaggcgaaaggcggcacggcgaccacaaccacggtggcaacgtgcggactcaggagcagcggatccgccaccggtaggctccagaatggtggatccaccgccagcaacaggggaagcggtgggcttcagaattggagcagaggtagcctctggagcccatgggagcgggagcggtgaccacgaccatggtggcgacatgtgggctcgggagcggttaatccgccctcacgcttggcagagaggaggtgggggggtgccgtgatgacggcggcaccagagcagcaaccatgaccatggtggcggcggcatgcatgcacaggagtggcatatccgccgctgacgggcttgtgaccaatggatagtttgcagttgtgccactgatatgtgggtcctactttg

SEQ ID NO: 44526 - DNA, 251 bp, Oryza sativa
  Clone ID: PAT_MRT4530_47579C.1
gctcacctcatgactcgcgagcccggggattcctggcttgggcagcggatccgcgagctggtgctctctcctggctccgggccgatctcctcgcgcgctgaggctttgctgtacaacgccgacaaggctcaacacgtcgacgaggttgtcattccggctttgcgagagggcaaggtcgtcgtttgcgaccgttacgttgactcgactatcgcctatcagggggctggcagggccctcgaccctggcgaggt

SEQ ID NO: 44527 - DNA, 717 bp, Oryza sativa
  Clone ID: PAT_MRT4530_4757C.1
atgacgccgagagcgattcacgttgtctcatgtgcgtcgtgcttctcggtggccgttgatttaatctcgaagatcgccagtgccgcgaggtggaggggacaccaagaccttgtggcttcggaagtcatctttgtcggctcgtggttcatgtcggaaggacaaagtttggccgtatcagaatccttctcgagcttggatgtcgtcgatattccgttctccgtctcgatgggaggatatttcgacatggaatcgccttggttcgtagccactgcgttctcgtctccggtcattggaggaccggttgagatcggcgtcgtgaaccttgagtaccaaggccccctacctggcgtaccactgtcgacgggtgatacccgtagaccggatatagagggtattggggtacgctggtacgaggatcgatgaggtcgtaatcgaacaggttcgactagatctcccggcgacttggctcctgtaggctccaactccgtaggctgtggtggatgtgttggctatgagattcgatgccttaggtcctcccggggggtcccttttatatcgcaagtcaactggtctccaagtaggactcggagacatcggacccggcacgatacaatgacgacccagttctgtccgagtatgactccttccatctgtgaactccatgatgaatttccttaacgtatgccgaaaacgttcgtatacgcatatgtataccat

SEQ ID NO: 44528 - DNA, 585 bp, Oryza sativa
  Clone ID: PAT_MRT4530_47580C.1
tcagctagatagcttattggagagaaaaaagggtcgaagcgcaagcaaatcgatcagcaacacaagatgaagaagatgcggatggcaatggtgagcctggccctggtgctggtggggcttctcctcgtcgccaccactgctaacgccaagaacgcccatgccggtggcttgaagaagggcggctctgaagctgaaggccgcgtcgtctacgccgacatgagattggtcgttccctccgactccgactccgcccccgcccccgcccctgcctccgcctctgatgggccagcacctgcgccatcccccaacaattaattcaacatcgacctagcatatatatatacgtatatatttgttattttcatgtgttgttttcgcattttatataaccatgcgcgctctagttgtacatgcagccgattgatgtgcatttgatttatgcctgctcatttttatttctttctttttatttacgttaaatgaaacactttctccatgcatacatggttgttcttattttatttattataaggatatatatatatatatatatgcgcaaaaaaaaaaaaaaaaaaaaaaaaaaaa

SEQ ID NO: 44529 - DNA, 303 bp, Oryza sativa
  Clone ID: PAT_MRT4530_47581C.1
cgttcgcgtggtcggatcgtctccgacgaggaggagtaggtcaccagccgaccgaaacctctacatcgtgctcatcagcattcatgggctcgtgcggggcgagaacatggagctcggccgagactctgacaccgggggccaggtgaagtacgtggtggagttggcgcgggcgctggcggcgacgccgggggtgcaccgcgtcgacctcctgacgcggcagatctcgtgcccggacgtcgactggacctacggcgagcccgtcgagatgctcaccgtcccggctgccgacgccgacgacgaaga

SEQ ID NO: 44530 - DNA, 560 bp, Oryza sativa
  Clone ID: PAT_MRT4530_47582C.1
ggtggtgatggacaaggggcgcatcgtcgaagatggcacgcatgaggaacttgtggcgctcggcggcatttatgcaagtctatgggcccgccagtccggcggtttcctcggcttcgatgaaaatcccgaggatgcgctggtacaataaggacagaagccattgatgaaagcggtttacagcctgttcgaacgttgggtcgatccctttcgtgaaccggaccggctgagaccgccttcaaccacgctcggctttctctggcattatgcgaggcaagcgaaatggccgctcgccgtttcgcttgcggttggcggattgctgccgctggtcgaggcgggcctgttctatttcaccggcaggctggtcgatattctcgatcaggcggggaagggtggcgtcgaacgaagctggtcggcgcttttgcaggcggcagggccagaacttctgttcatgggcataaccgtccttgtaatccgcctcgtcgtgacggcgatcaacacgctgctggaagaccagaccttgtcgccgggtttctacaatatgatccgctggcaggcgaact

SEQ ID NO: 44531 - DNA, 1293 bp, Oryza sativa
  Clone ID: PAT_MRT4530_47583C.1
atggcacaaggagtgatgctgtggtatgacctccatgctctggctgcagccgtggcactactagtttcgtctgtgctggtcggtacgtcgacggcggtgaactgcggcaggaagtgcggcgaggtgcgcatcccctacccgttcggcatcggcgtcgactgcgcctggccgggcttcgacctctcatgcaaccatagctttaccccacccaggccgtacacggggaacgtagagatcaaggacatctcgctggaggcaggggagatacgcctgtacacccacgtcgtgtccaactgctatacttcgtacaataccaccgaatacgaaagcacctcctcgcaggacgacctccgcgatacgccgttcctgtttgcgcggagcaggaacgagttcacggccatcggctgtggcgcgattgcgtttctatggggcagggacgatgcgagctactcgaccggctgcatcacaacgtgtgcgagcttggatgaggccgcccacgacggtgacgactgcaccgggctgggttgctgccaggtgccctctatcccgcccaaccttgacatcttaaacatttccttcgaccccggaagcctcatcggcaaccctgcttggagagagagcccatgtagctacgccttcgtggccgaaaaacactggtacaatttcagccggcatgatttcagtcatgccggcagcaagagcttcgtcaaccgtactggagatagaagtgtccctacagtgcttgactgggccatcaggggaaatggatcgtgctcatcagcaacaggggctcctgcctgtgtcagcgcccacagctactgtgtaaacgctaccaacggcaaggggtacctctgcaactgttccgcagggtactccggcaatccgtatgtcaccggcggatgcataaatattaatgagtgcgagcttaggagagaagggcctgccatgtatccctgttacagtggtagcagatgctatgacacagagggtggttacaagtgcaaatgccgatttctacatagaggagatggcaaaatcgacaagggatgcaaaccgataattccagcgaccgtagtcgcaacaatagcaactgctgtcgccggaggtattctggcattcgtggtgctgtacattctcaaggagcatcggaggcggcagcaaaatagatcattcgacaaaaatggtggcaacatactgaacaagatgatggacatcaaaatcttcagcgaagaggagctgaagaagatgacaaaaaactactgtgagaaaagaagattgggaaaggctacttcg

SEQ ID NO: 44532 - DNA, 1774 bp, Oryza sativa
  Clone ID: PAT_MRT4530_47584C.1
aagagcccgtgtagctacgccttcatggccgagcaaggctggtacagtttcagccggcaagatttcagtcatgccggcagcaagagctttgtcgagagtgatggaggaagaagtgtcccaacagtgcttgactgggccatcaggagaaatggattgtgctcatcagcaacaggggctcctgcctgtgtcagcgcccacagctactgtgtaaacgctaccaacggcgaggggtacctctgcaactgttccgcagggtactccggcagtccgtatgtcaccggcggatgcataaatattaatgagtgcgagctttggagagaagggcctgccatgtatccctgttacagtggtagcagatgctatgacacagagggtggttacaagtgcaaatgccgatttccccatagaggagacggtactggcaagggatgcaagcccataattcccttacgtatagtcgccacactagcaacggtatgcgccatggttgctcttttgggccttgcgtggttcattcgttgtgagcacaaggcatgggagcagagggggttcttcgaaagtaacggtggccaactactgaaggatatgggcgttaccaccttcacgcaggagcagcttgacacgataacaaacaagaagagaaccaagatcgggaagggcaccttcggtgaggtctataagggactccacgatgaccaggaggtcgccgtcaaatactccaccgcgaagagcagtattagacgaggcaaatacgagttcgtgaaagagatggcctttagaaaatccatcagttccaatggtgatggtacgctcgggcaaaaagcgtccgtgaatgagatcattgtccagtcacagatgcagcacgacaacgtggtccgtctcatcgggtgctgcatggagacggaggtccccatgctggtcttcgagtttatccccaatgggagcctcgagaccgtgcttcatggacctgacctacgggctctctcgctgccagaacgcctcggcattgccatcggctccgcggctgctcttgcctacatgcattctcttggtctccaaagcattattcatggagatgtcaagccagccaacatccttcttggtaaggatctcgtgcctaaggtctctgactttgggtcctccaagttaggccttgcaaccaaggaagtatgtgccgacaagaactacatcgatcctgtgtgcatgaaaactaacattgtcacacagaaaagcgatgtttacagctttgggatcgtcctcatagaactcattactcggaaaaaggccaagtatgacgggagaaacgttcagtcagattttgtcaactgtcacacggacaacaatgcaaggagggagatgtatgaccaggacatgctgcatactgatgcccacagccttcagcctgatcagtgcattgaatgcctcgacacgatggcggccatcgcagtccggtgtctcaaagatgacgtggatgagaggcccaccatggcagaggtgctggaggagcttaagcagttgagagcaagcaacgaactgatggtgtagaagatgaaccaagcctggtctcctcagactcggttggtagtccatcgatatatggattcgtccttcttgctattgttttctccgtcgatctcgcagatgtgacgtttgttgcttccgccgggttgtcctgttatgcttgtagagctgcagcattgtgctattgtcgtttagtttcctcttgtaacaagtatcgataacgattcttttagtttctggtaaaaaaaaaaaa

SEQ ID NO: 44533 - DNA, 213 bp, Oryza sativa
  Clone ID: PAT_MRT4530_47585C.1
atgaagatgcacaattcgctggcctgttttggtctcgccggcgacgacaagaccgggaagcgtgtcaaggttaaggccaagaagcaatccccggtgccggcggcggcggcaaacgaggagaaagaacgacacacggcgagcaaaagagggagagcgacgagccgacgatggtgcgcctcccatgagaaggggcacggccaatttcaaccctaa

SEQ ID NO: 44534 - DNA, 405 bp, Oryza sativa
  Clone ID: PAT_MRT4530_47586C.1
gctgcccgataacactagcacaaactggtggtcgctgtaagaatggtgttccaagtttgtactattgagatgactgctgtatgtaacgcagctacaccatgatgagcttgctaattatgtccgctaatacaacctgaaaatactatcctattaagattgtgctgatgtataagttttgatcgttggctcaaacatactagtgcccttaatgattctgaaaagagggccatctatgaccaagaagtcctaggatgcgctccgcgaatgatacacaatgatgcgtggtgctggtttttcaatataaaacttacatttattttagctaaaaatttaaaattttataatactttgacctaaatggaaataatttgctgggttacaaaaatcttgttcatgctaaaaatg

SEQ ID NO: 44535 - DNA, 357 bp, Oryza sativa
  Clone ID: PAT_MRT4530_47587C.1
atgtcgcaacgcatccacttcctctctcgttgccaattcgagtcttctcaacctctcgatccgggcgtgatggtgccgaaggcggagaagaagccggcagagaagaagccagcagaggagaaggtgcatccagacataggaatctcctccaaggccatgtccatcatgaattccttcgtcaacgacattttcgagaagctcgagcaggaggccgcgaggcttgccaggtacaacaagaagcccacaatcacctcccgcgagatccagacctctgttcgtctcgtcctccccggcgagcttgccaagcacgccgtctccgagggcaccaaggccgtcaccaagttcacctcctcctaa

SEQ ID NO: 44536 - DNA, 925 bp, Oryza sativa
  unsure (1)..(925): unsure at all n locations
  Clone ID: PAT_MRT4530_47588C.1
gcttcctctcctctcttcctccaaaaccctagccttcctcctcctctcccggcggcggcggcggcgatggacaagagcatgctcggcgacctcgacggtctcccggaggaggacaagatgcgcatggcggccatggcccaccagctccagacccgcgacagctcgacaacgcacaacccccgtcgcgggacgccgcctcccagactgcgccggacactcttccgcccggaagacccctcnacacgcacccacgccacnncgcccccccccccccccccccccccaacccccccccacccccccccccccccccccccccccccccacccccccccccccccccccccccccccccccccccccccccccccccccccccccnnnnnctcccccccccaccccccccccccctcccccccccccccccacccccccccccccccccccccccccccccccccccccccccccccccccccccccccccccccccccccccccccccccccccccccnccccccccccccccccccccccccccccccccccccccccccccnnncccccccccccccccacccccccccccccccccannanccccccccccccccccccnncccccccccccccccccccccccccccccccccccccccccccccccccccccccccccccncccccccccccccccccccccccccnnccccccnnnccccccccccccccccccccnccccccnnnncccccccccccccccccncccccncccccccccnnccccccccccccccccccccccccccccccnnccccccccncccccccccccccnccccccccccccccccccccccccncccccccccccccccccccncccccccccccccccccccccccccccccccccccccccc

SEQ ID NO: 44537 - DNA, 362 bp, Oryza sativa
  Clone ID: PAT_MRT4530_47589C.1
ttgtttttgagggtgatggcctactactcgccagcaggcacggtatctaatatcgcggggttcgcccccaccaggggtggctgctggagcacctggctgggttcaatcaacgtggaagagatcactccgcggcatctacgccgacatgcctacaccagctctgcccttcgtcagcggagacatgccgatgtcatcaatcccagcgccggatgtccacttcacgccatcgacagcggaggaagtctataaggacataactcattcaggcgtgaccatcttctccagcagattgaggccccctgctgatgcatgtggttgtgtcccctccagcttagctagggctggctctggtaccggcacaa

SEQ ID NO: 44538 - DNA, 612 bp, Oryza sativa
  Clone ID: PAT_MRT4530_4758C.1
atggcggccgacctcccgcgccggtttcctcccttccccggccaccccctctctccccggctctatttaaaccctccccgcacctcctccgtccggttccgcctctcgccgcccttcctcctcgccggatttgagctcgcgacgtcgctctctctctccgccgtcgccgccgagctccggtccgccgccgtcgtcaccccggaccgcctcccacctcggcgccgcctccttcggcttcgccgcatcctcgccgacctcgtccacctctccgtttcggtcgccgaccgccggaacgccgccgtccccgtcgacccgagccgcgccgccgcctctctccgctccggtcgccgttcccgttgtcgccgtcgacccggggtgagccgtggaccgccgtttcgcttcccccttcccacccctctctcgggcgccgctccgccgcgccggtggtcgccggcggcgaccataggggcgcgggcgcgttgccttccgccggccgcgccgacgtggccgccttcgggcgcggcgtgtggctgccgcgtggggcccggccgtccgtcgcccgtgccctcgggtgcagctgacgcatggggcccgcagcgccagccggtgtga

SEQ ID NO: 44539 - DNA, 423 bp, Oryza sativa
  Clone ID: PAT_MRT4530_47590C.1
ttgtgcacttagtggacaagagctaccttttgtgccaaaacccagtgtcgggtgcagcatcaaatggcacccatggaagagcgtattgcattgtcatgtgctggaatatagatgtttttcccccttaaattgaaggttgaacatggggattgagggaaatagatgcagttgaggccttgtggagctgattcttaacgttgtgggggctgttcaacttgagagttgcaaaggggagacatgaatggcgtggatagtgttatgttgtgtgctggtgtctcatcttggccggaaaaagaaaaactgatggatgtaactggtatttgtgcaacaatgggataatgcacacaagtacaataacccattattatggctagcacaacacccacgggtgaaaattaaagatgagggctatcgagttctcct

SEQ ID NO: 44540 - DNA, 502 bp, Oryza sativa
  Clone ID: PAT_MRT4530_47591C.1
tgacaaactcatgctttgtaggatcaatatgcaaggctattgattaaagtgtgtcatgaatattaaagtattcatctggctgctctttagtgacaggctaaacacaagagacatgttagacaggaaaaattgtgccccactaaatgctgacttaacctgtgttttgtgttcacttcagcacagagaaactctatttcatctgttttttcagtgcccctttagtaaaaggtgttgaaggaaaattggaatttcatggaatacatctttggagttttttcagatgcttgtcttggccagactgaggtttagagggaagggtttcttggagatttgtttcatagcttgctggcatatctggaaacaacgcaatgcaaagatttttcagaacgtcaatcctacttttgatagctggtggtatgcttttaggaatgatattcttttgcatatgtgcagaatgaatggtgaacttcggcaacaggtttctgactggataacgtttctg

SEQ ID NO: 44541 - DNA, 386 bp, Oryza sativa
  Clone ID: PAT_MRT4530_47592C.1
gcaagaaaacatcgaagtctaaaaaatggcatttgtttttacaattggcaatggaataaaaatcaagcccctggcaaataaaatttttgccccaaatttttggggcccatcagttggaaattgggaaaattgaatccaataccccacctacctccccgggatttcccagatctgaacttttgaagccgggttaattttcaaaatcaacgggccgaaaaaacaggcaaacaaaatccccacccaaatcaacttgggggattagcagagggcccaccctccaaacgggggggggggggggcccaccaacagggtaagcccccaggggggagctgggagcctgggacgggcaacggggccccccttccatgggttcaagccccgggggg

SEQ ID NO: 44542 - DNA, 496 bp, Oryza sativa
  Clone ID: PAT_MRT4530_47593C.1
ggaaaccactcctaggcccgtacttatttggccggcccattggaaaagggggaaatcatgttaaaagccctcaaatgaaacgaatttccttgtctaaaaccccctggctgagacgaagggctcaacaaagaaaaaaaatcctttggcttgtccccatgagggccaagcctagggagctggcaagaacaaaatcccttgggtcggacccattggcccaaccgaaggacacagccaaagaattttttaacatgggtggagaaagaccaactgggagatttttcgactcgtacacaagggccgggcctaaaaagaagggggggcatgattcccaccttgaaacacctttgttttttctggcccaacaaagcgaggaaacaaaggctgcccaaatggcgtaagaacaaagcggcccggcagcgtttattgcctaacaacaagcagcgcttttgaaaaaatacccacagaacctagcctttacgctaatctcccctgaaac

SEQ ID NO: 44543 - DNA, 1455 bp, Oryza sativa
  Clone ID: PAT_MRT4530_47594C.1
atttgtaacgtccagtcccaacaccgagctaaattagaggtcaaattctctctgcatttcgaggctataattcgaggccaagaattcggccgccttcaaatcgcatgggaaaatccagtgacccgcagaaaaagtattggcaacatgaacaagtggtttgtaaatttaccatcaaataatcacgagaaaattttgaagtactggtacctgctcatcgcgtactgcatgcgctactcatcggattggagagatgcacgggaagatggcacgattcatgagtgtacggtgctgtttcgagtaaacttgttgtcaagggaaaatggggcagaattaagtaccttgtcgcctttagtagtagtaggagtacgtgcacagcccccagtgtgtgtcaccgacccgcgcgacgggcccacttccagtctccgaacaaacggcatatatagtcggtcaaaccgcgcccgcgccgtgtgccgtgccgtgtggtccgcggacagcgcccgcatgtcacgacgatttattgccgcgcgtcaccgcatgcccggccggcccacgctatttgtacccgcgctcgcgtacttatatagacacgtacggcgccgtgccggctcggctcggcaccgcctgcttgttcgtagcgacgcgagaggcaacggggaaggccgtgacgcggacgtgtgtcggtcactctccacgagctccttctcctgtcgtgtttcgcctaaggagaagacgatcgagtcgcatatccaaaaagtcaaggtaaatcatgcgatggatcgatcgaccgcgatcgagtggaacggggccgtggctgtggccgtgggtcacgcatgcaggtcacgcggggcccgtcaacgggtcatctccgccgtccacacaaaagccaacgggtgggacggcgaatcgcgaccgttcccctcacaagaccgtgatctgcagcggatattcgtgtcaggtcggctcatgattggccgcgagtgcgcggggcccttggacacagccacacacaggacaagcgtagccccctacgtgtaccaaaaaatactgtaccgcacgagtactgtacaccgcacgaggaatacgtctttacgagtggtgcgaaattatacttggtatgtagaaggtgaaaacgattacaaccatcgaattttgagaaaaatgataatgcatatcaacattttgaagatcacatttgcctattcaacttgtgggctatgtacccattgccttggcatccaagaagcctcgtccacacaaatcgggccactgaccggtgggcccgtgtccacgcgtcgcccatccagtggccccgcgcgagatgcggcgggctgttgcgcggtcacagctcacacgtcggcggcttcgctagaatctcccctcctcccttcccacttcactgacaggtggggccgccataattactgccaccccgaaaatgtactgcccccaggtagt

SEQ ID NO: 44544 - DNA, 294 bp, Oryza sativa
  Clone ID: PAT_MRT4530_47595C.1
atggagaagacgggcatctcgctaagggtggccttgatggccttcctttactttgcaacttccacatgcgacccgcacgcgcccaggggtcttggaaaatcacgattttcacccagctacggatccgccgtccgctcccgtcaccggccgaagacgcccctcccctctgctggatctacaagaggagggaaggggaatggagggaagccgaaggagaaagagggaaggggaatcaactcacccgacgctggccggccgccgctgaagccgccgcacctccacgccaaccgctaa

SEQ ID NO: 44545 - DNA, 2832 bp, Oryza sativa
  Clone ID: PAT_MRT4530_47596C.1
aaccctcctatgccccgagacaaacagttggcggcggcggcggcgcgaggcgatggcggcgacggcgttcacggaggaggagaaggcggtggatgactcgctcggctaccccaaggcctacgcgcgcctctgccgcggcggcggcggtggcggcggtggactcccgtacggccacggcccgccgcacggcttcctcccctacgtcctccacccgcacgaggcgatgcgggcgaaggatctgaacgagatgttcccggtggccgacgcggaggcggcgccgacggcgaacccgcgggggttcgcgaacctgctgtggaagcagctcgaccacctcggcaacgccgggttcgacccggcgctgttccgcgtcgacgcctacggcaacgtgctctacctccacgccgactccgcctcgcctctcgcgtgggacatcgaccactggttcccctgcgcccgaggtgggaggacggtgccgagcaacctgaggatcgtgcaggcgcaggtgtgcaggaagaagcacaacaagctggagttcctcgtcccgtggtgggatctgcagctcggcatctccgtcaaccagttcctctccatcttcgcctccaagaacgccgacttcaggaacagagcattcacgttcttgttcgtcgacggggccagcgaggagctcacctcgatgcaggctgtggaggcgcacgcgtttccgcaccatttctccgatttgaccaagaaagttggccttgcccctgctgccattgtttcctccaggggatccgatagctcggtgctcaaatctcttgatgcaaaccggccgctcaggcctaattatcctctcattgctgccaagaaattcacgggagaaaaggatgagaattttaacgtgccaatgtccaaccatgggcctaattcgactaaggagaacaataatccggatgctgatggctacattagcaacccttacctgtccattgcaacggctagggactcgctgaggcaaagggaagaggccaagaagaagcaagctgagctcactgagctggagaacgaggccactgagctgaagcagaagaatgaagaggagcgggtggccatccaggacatggaggccctcctcatcaagaggcggcggcgcgtcgagaagtgccgccgcttggcggaggctcagtcgaattacaaggctgtgctggagaagatgatcagagacgccatgcaccagtctgttgtgtacaaggagcagcttaggatgaaccaagctgcaacgagcactctcatggcgagactcgaggcccagagagcaatgtgtgactcatccgaaaccgagctccggaggaagtaccagcagaaggatgaactggagaagcagatcaagcctttcaccgatcaagcaaggaagcggtatcgtgttgacgatgatggattgctagaggaaaggcacagcttagaagaaaggcacagtgaaagggtgaagtattttccaggaataagactgaggagcagaaaccctctcaagcaggagctgagggttttcctggaggaggaccagagggcttcagatgcatacatctccctagaggaagaggaaattgcaggtgaaacttcaacaatgggaaatttcaggaattcacctttcaaggtgataaacttcccaaggaggtccatggaagacaacacagttgacactgagagaggaagagcatcagtgagggagaagctggagcatctggcgatcaaagaacggcagcgcggcagaaggagagaaaggaccatgtcatcaaggggatcaagggcaactagcactcctgtgaggtcaagagatggcaatggcaagggcaaagcagccatggtgcaatgtgagtctgagactgaaagatctcagacagtttcagtgccaaggacatcctcagttcctccaagtcctccttacagagtaactggcatgtatggaacacctagatatcctgcagagaaatcggtgctattgaaaaagaataatgtgattcatcggcaaggcgtcggtcgatccgaaggcgacgcaaacatgaaccacaccggcaaaggaactgtggataagtggcttcaaatgctcatggaggatcagcagcagcaagaagatcctgcagcagcatatcattcttctgaagatcacaacactgctgatgaaatcgcttcagacgagcaccaaatgcaaagcagaattgatgatgagagctgcaggaatgagatcaccgaatgctccgatgagatcgtcgaggtcggtggcgatggtgctactgagcagcaggacaggtgcaggaacagctttgagatcaaggagaggggagaggagaagaagatctggttcccaaggtctgacagctccaggggtttcaggtctctgccttcctcaccttccaagatccttggaatgagaaggggtgtggagtgcatgagcaggaagcccaaggtggtcggcgacgacaatggcagatacggctatgaagattcagtgtccacaagcagcagcaagttcctcaccaggtgcaagcaagccatcaagaaagcagtgaacaaataaaacaattctttgcaccatgatgcagcacatttcaacctgtttattcttcaaatctgtgtgtttaaattcgtgtcaaattgctagttttgttttctgtagctgaataagttagtactcaagtgaggcatacatagctttgcagagttccttctgcaactagtgagacagacatttactgttcatggtcactattatgtgatcatactggcgttgtacaactatttgttgatttatttatgaagagaaactaaattcttaaaaaaaaaaaaaaaaaaaaaaaa

SEQ ID NO: 44546 - DNA, 249 bp, Oryza sativa
  Clone ID: PAT_MRT4530_47597C.1
ctgcaagtgcggcaagtgaagtcacgaaacaaccgaacactcgcctgcggcgagtcacctaccttaaatagtccacaataaaaaccacccatatgagtggggtttgagtgtgtgctgattaatggtgaattaaaccccggtgccatcgattaaataagcagctggtcgcttctgcgactatgcgggtatcaacgtatgaatttgagtgatgggatgtacccgggctattctcagggaaattaatcaatc

SEQ ID NO: 44547 - DNA, 348 bp, Oryza sativa
  unsure (1)..(348): unsure at all n locations
  Clone ID: PAT_MRT4530_47598C.1
gtcgacccacgcgtccgcgacgaaatgcccacgcgagtacgccactaagattcgccccngcatctacgtcgattccccggttccccctcgcttcccgtcgaggaatccggcgagatcgaggcgccccgcgctaatccggcgatcctcgccgtcccgccccggctggatctccgtgctgggtggggggcggccgcggccttgatggtacttcggatccggagggcgaggaggcggcggcgatgagcaggctggcgtcggcgtgggggctccaccggctgcggcggtcgccatgggaggtgctgtggtcggggctggcctcctgcggcctcacgctcctctcgcagctcg

SEQ ID NO: 44548 - DNA, 696 bp, Oryza sativa
  Clone ID: PAT_MRT4530_47599C.1
atggccagccaaaggctactgctcctcctcgccgtcctgctcctgacattgctcgccgcgacgacggcggtcgtcgggggacacggcggtgacgacgtcgccggcgccgaagaagcgaagccgccggacgacgacggggcggcggcgaagctcgacgtgcgggcgaggaggtggccgcggttcccggcgacggacgggcagctggtgatgggggagtcgaggaggaaggaggagtacatctgcttcccagagcacctctgcacctgctactccttcttctacgacatcgtcggccgcggcgagcagctctgctgcaagcaccagttagcagcccgacttgcggaggccgtcagtaagcaccaggacattgaggagacttctccccctctctctctgtgcggcggctgcgggagggccggtgacggtggtggcgggtcggacccagacggcgtggaggcggccggccggacctcgtctccgccagatccggcggcactgtggccaggacggcgtggaggcggcgggccaggcgtcgcctcctccagatccggtggcatgggggcgctcggcccgacggggcgagagggcggcgtggaggcgggcgagggaggaggctgcccccaatgccacgtggccctcccccgagaggagtcaggcccgaggtggggtggcggccactccttccccaaagactag

SEQ ID NO: 44549 - DNA, 501 bp, Oryza sativa
  Clone ID: PAT_MRT4530_4759C.1
ctggcacagacaggtttccacagactggatatacgacaggccagtgagcgcaacgcccaattaatgtgagttagctcactcattaggcaccaccaggctttacacactttatgcttccggctcgtatgtttgtgtggaattgtgacgcaggtattacacaaatgtgtgcacacaaggagaacaagcttatggaccctgattacagccaaagctcttatattacagactcaactattagggaaagctggtacagcctggcaggttaccaggtccaggaattcccagggtgcgacacacacgcagtgcacagacacacaggattatcgaatggagtgccgatatacgcgagacttcagagtaatgtaattgagaactagttatcggctgtagagtaaaattagaaacacccaccacagtatgacaccttgggtggtgattctattcgatatcaagtactaaataaaggttacacaaatttcttaaaaaaaaaaaaaaaaaaaa

SEQ ID NO: 44550 - DNA, 1353 bp, Oryza sativa
  Clone ID: PAT_MRT4530_475C.1
atggagtcaaagggtggcaaaaagaagtctagcagtagtcgttccttgatgtatgaagctccccttggctacagcattgaggacgttcgacctgccggaggcgtgaagaagttccagtctgctgcttactccaactgttctgaccaacctgctccaatgggtgtcttgtctgctgctgaccctcccccagtctcagcaattgggtttgagggctatgagaagcgccttgagatcactttctctgaggcacctgtctttgctgaccctgatggtcggggtttgcgcgccctctccagggcccagattgactctgttctggatcttgcacggtgcaccattgtgtccgagctgtccaacaaggactttgactcctatgtcctctctgagtccagcctgtttatctattctgataagattgtgattaagacctgtgggactacaaagctcctgctcacaattccaaggattcttgagcttgctgaagggctttctatgccacttgctgctgtgaagtactcccgcgggatgttcatcttccccagtgcacagcctgctccccacaggagcttctctgaggaagttgctgtcctcaaccgctactttggccatctgaaatctggtggtaatgcttatgtgattggagatccagcaaagcctggccagaagtggcatatctactatgctactcagcacccggagcaacctatggttacccttgaaatgtgcatgaccggactggacaaggagaaagcttcagtctttttcaagacttctgctgatggtcacacatcatgtgctaaggaaatgacaaaactctcgggcatctctgacattatcccagagatggagatctgtgactttgacttcgaaccctgcggctactccatgaatgcaatccatggctcagcgttttctaccattcatgtgacccctgaggatggcttcagctacgccagttatgaggtcgtgggcttcgacgcctctactcttgcttatggcgacctggtgaagagggtcctcaggtgctttggcccttcggagttctctgttgctgttaccatctttggtgggcatggtcatgctggaacatgggcaaaggagctcaatgctgatgcttacaaatgcaacaacatggtagagcaggagctgccctgtggtggcctcctcatctaccagagcttcgacgctactgaagacgtacctgttgctgttgggtcgcccaaatctgttctgcactgcttcgaggctgagaatatggtgaaccctgctcctgttaaggaaggtaaactgggcaatcttctcccctggggagaggatgcgttggaggagaatgatggagtgtttgatgagtaa

SEQ ID NO: 44551 - DNA, 705 bp, Oryza sativa
  Clone ID: PAT_MRT4530_47600C.1
ttagtgaaattggctgtctggtggttttgggtgccaatggtttttcattctcgggtctctgaggccctcacactccttccccacctccatccctatccccccaccattgcctccagccgataatgacgacaacggcacaatgcttggatccgccaccggccacgacgacggcagcaatggcgaagatgacggctgcgactggctgcgacgatgacaatgacggtgcttggacaatagcaatgggattcgcttcctgctggcctcgggtgcatggatctgccgttggccatcctcgggagcgcggatctgccgtcggctgtcctcgggcgcttggatacgccggtggaaggagtggggggtggcggcttggaccggcgggggcgtcaggaggtcagggtgggggctctcaggttgcggcagggcttcgaccgacgatgaatttttagtttcgcaggcctttgccctcaggcggttgggctggccgccaaaaatggtccttagagcatctccagcagggactttcacgctctcgtcacattcccgcacggcaccacgatgctggatctcatctgggctccggcaccagcggccatcgattcccgagtccgccgtccacacagtgtcgcacgacctcccgccgtcggtccgcacgttgctgtccacacaccaccccgcactaccatggtcctcctgctgcacggccat

SEQ ID NO: 44552 - DNA, 376 bp, Oryza sativa
  unsure (1)..(376): unsure at all n locations
  Clone ID: PAT_MRT4530_47601C.1
atagagccgtcctgcgtttttgacgctagagagctttggcaactgcacatatttctcaagatgatgctcttatcatactgattatagcactgattattactgactgtgaaacttaacctgctgtttttccggcagatacagaacttgaacacacccatgaatttctacacctttttgctggtgctatccatgaaagtgcacaagatttatgaacgngtataccatgcgcccactaggcatgctagggcgagctatataatccaaaggagagaagttaagatcctatcctgaacacacaagagcaaacactggctaatctatgggaatattactgatccgaactatcttttactgcatatcgctgttggggctgttg

SEQ ID NO: 44553 - DNA, 174 bp, Oryza sativa
  Clone ID: PAT_MRT4530_47602C.1
atggggcttcagttccagaactttgcatagtacggcgtttgctccagtgaccacaaggcgagtgacttgtcttcttcttgcataatggccggagtgatgacgcagcggactagcgggcctacggctccatcttcacaggcgctcaactggggtataagccaggactccgcctaa

SEQ ID NO: 44554 - DNA, 5613 bp, Oryza sativa
  Clone ID: PAT_MRT4530_47603C.1
atgccgcgtgtgtatcgtcctgatctgggcgtgctacggccgtgcaaccctatactggcttgtggcctcgtcgccggggaagtagggcggtggacgtcgtcgtcgtcgtcggagaggacgacgtggaggaagccggaggtggggtggatgaagctcaacttcgacgggtcgcgcaacgacgcgaccggggcggcgagcatcggcggcgcgttccgcgaccacgagggcgcgttcgtggccggctacgcggagcggatgatcgtcggcggcgcgtcgagcttcaccgcggagctcgccgcgctgcggcgagggctcgagctggcggcgaggtacgggtggcggcgcgtctgggcggagggggactcgagggcggtggtcgacgtggtgcacgggcgcgccggggtgcggtcggaggaggaccggaggcagtgcggggagatcgccgcgctgctcccggcgctcgacggcgtcgccgtgtcgcacctgtgccgcgacgagaacaaggtggcgcacgggttcgccaagctcggccacaaggcgcggcgccgccgggtgtggcacgtcgtgccacccaacgaggtcacagtgtgtgaccggtcacagaccggtcagatcgcggacaagaatgaccggtttgtgactggtctgacgccggtcacgtcatcggcagacaaccgtgctcccacgttgcgcctgcttccggcggagtggaggcgggaggaggcgctcgagggggtcgaaagatccgcgacttcgccgcccacgagcgatgaagaaggacggcgagacggggagcgtcgcctcctcgtctacggcgatggcagcacgccccagggcgcgctccaagctgcgggcgcgctcttgcgtcacccgcccgtcgtccccgatccagagactccagcccgatgttggctggatgacgtggccgacttggtcatgacggcgcagcagcgcctaggcgccggtgggcggtcctccgccaccaaggcctctggcgctgctaccgccggctccgtgtcgtcgaggcggagggcgcggcgagcggcggccgttacctgccgttcgtcagccattccctcgtcaacgcctccgacccaagaagatgtgcgtagggggtcggatgcccgcctcagtatcgagcgccggcgcaatggtcgtcgtgctgcccacgcaacggaaggcgtttcctcgtccggagcgccacttcggttcgggcgcgggggccagccccccgtgcccccggttggtggtgtcggctgtcgagcctttgtggcgagtcttcggaacgtccgttggcccccaaggttccggcccaccatcaccgaaaaatatgacggaagcgtcaaccccgccgagtttctccaggtctacacgaccgggatcgaggccgccgggggtgacgacagggtcatggcgaacttcttccccatggccctgaagggacaggcgcggggttggctaatgaacttgccgcccgcgtcggggggcgtgcggcacaaccgcatgctcgaaaagatcgcctccaaggagccccagaccactgcggagctttttcagctcgcggaccgtgtggctcgcaaggaggaggcctggacctggaactccaccggttccggtgtggcagcttcggccgcccccggatccgccgctcggtcagggcggcgggacaggaggaggaagaagaggtcggcccattccgacgacgagggacacgtcctcgccatcgagggcgcttcgcgggccacccaaaagaggaggcctgcgagcgacaaaaaaaaggaggccggcggtcccagcagggagcgcccgaccggcaagtggtgcaccgtgcacaacacctccctccacgacctcgcggactgccacgcggtcaaaagtttggctgagcggacaaggaagtgggaggaggagaggaggcaggagcgccgtgagggcaaggccccggcggctccctccggcaaccggcgaagtgaggccaagcagaaggcccccgccgaggacatcgacgatggcgacgatgacctagagttccaggagcctggggccaccatcgccaccgtcgatgggggagcatgcgctcacgcttctcgtcggagcctcaaggccatgaagcgagagcttctggccgcggcccctacccatgaggcgacgcggcgggcgcggtggtcggaggttgccctcaccttcgaccagaccgaccacccgccgtgcgttgcccggggaggacagatcgcgatggtggtttcccccaccgtttgcaatgtgaagttggggcgtgtcctcatagacggggctgcagccctcaacatcctttcccccgcagcctttgacgccatcaaggccccggggatggtgcttcggccgtcccagccgattataggtgtgacgccggggcacacttggccgctaggtcatatcgacctcccggtcaccttcggtggatccgccaacttccgcacggagcgggtgaacttcgatgtggcagacctcagtctgccctacaacgcggtcctggggaggcccgcgttggtgaagttcatggcggcggtccactacgcctacctccagatgaagatgccgggcccctgtggccccatctctgtccatggcgacctcaaagtcgcgcttgcttgtatggagcagcgcgcggaccacctcgccgccgcgtccaagcccgagggtggcaacgagaggctcagcacctccgtcccagccgccccgaggcagcggatgatcatgtgcgacgaggtcccggtcaaggaggaagacgcgctcgtctccttcctgcgggcaaacgccgacgtcttcgcctggagaccggcggacatgcccggggtccccagggaggtgattgagcaccgtctcgccgtgcggccgggcgcaaggccggtccggcagaaagtgcgacggcaggccccggaacgtcaagccttcatccgcgaggaggtggcgcgacttctggaggccggattcatccgtgaggtcatccatccggagtggctggcgaacccggtcgtcgttcccaaggcgaacggcaagcttcggatgtgcatcgactacaccgaccttaacaaggcatgtcctaaggacccttaccccctgccacgcatagatcagattgtcgactccaccgcgggccaaataggacgtaatgttgaggcctatgttgatgacttggttgttaagacgcgcaaccaagagaccttactctcggatctagcggaaactttcgaaagtctccgctccgcccgcataaagctgaaccccgataagtgcgtgttcggcgtgcctgcgggcaagcttctcgggttcttggtctctgcccgaggcatcgaggccaaccccgagaagatacgagctatagagcggatgcgcccccccagcaagcttagggatgtgcaatgcgtcaccggctgcatggccgccctaagtcggttcatatcgaggctgggagagaaggcgctacccctatttaagctcctcaaatgctccgggccgtttatctggacggaggaggctgagcgggccttcactcagttgaaggcgtacctcagttctcccccagtcctggtcgccccggagccagatgagccgttgctactctacctggcggcaaccccgcaagtggtcagcgcggcgttggttgtggagcgcgacgaggacaaccctcaccccgcgcatccccaccctgtgtcgactcgacccgggagagagcagggaggagaggcccccgagccgaacggcggccaaaggcccccgacggccggagctggccctccgcctgcttgtccgacggcgctaggcgcccccgacccccaggatggccccggggccactgcgggaaggccgctcctgtcgccctccgaccccgaggtcgtcggcacagaagccgagtgcgccccgtgcggcctctcggacgaagagcgccctggagatgcggcccctagcgaagaggatcggccccgccgaaaggcgcatcgggtcacggtggttacgtcttaccccctcggccaaatcttgcataaccgagagggtactggacgggtggtgaaatgggcaatcgaactctctgagttcgatttgcactttgaaccacgccacgcgatcaagagccaggccctcgccgactttgtggcagagtggaccccggcccctgagcccgtctccgcccccgaggccagctcgggcccctcgcagctgcctcacaccgtcaactgggtgatgcagttcgacggctccttgtctcttcaaggcgccggtgcgggggtcacgttgacctcgccgagcggagacgtcctcagatacctggtccgcctcgattttcgggcgaccaacaacatggcggagtacgagggactccttgcgggactcagggtggcagctggactggggatccgccgcctcctggtgttaggcgactcccagctggtcgttaaccaggtctataaggagtaccggtgctctgacccgcagatggacgcttacgtgcgccaagtgcggcatatggagcgccattttgacgggatagagcttcggcacgtgcccaggcgggataacgcggtcgccgacgagctctcaaggatcgcttcctcgcgagcccagaccccaccgggcgcctttgaagaaaggcttgcccagccgtcggcgcgacccgacccgctaggggagacggacacgcctgaacggcccccgaggcccgtcggagtccaggcctcgggacccgaggggagcgttcccggctcccctagattgattgcttggatcactgagatccaggcgtacctcgcagataagactctacccgaggaccgcgaagggagtgaacgcgtccggcgcatctccaagcgctacgtgctggtggaagggaccctctatcggcgcgcggctaacggagtcctcctgaaatgcattcctcgggaacaaggcgtcgagcttcttgccgatatccatgaaggcgagtgcggagcccactccgcctcacgcaccttggttggcaaggcctttcgccagggtttctattggccgacggctctcaacgatgcggttgacctggtccggcggtgcagggcgtgccagttccacgccaagcaaatccatcagccggcccaggccctgcagaccatacctctttcatggccgtttgctgtctgggggctcgatatcctgggtccgtttaggcgagccccgggcgggttcgagtatctgtatgtcgctgttgacaagttcactaagtggcccgaggcttacccggtcatcaagatcgataagcactccgcgcttaaattcatcaggggcattactgctcggtttggggtgcctaatcgtatcattacggataaaggcacccagttcactagtgaactcttcggtgactactgcgaagatatgggcatcaagctctgcttcgcctctcccgcccaccccagaagcaatggccaagtggagcgcgctaacacagaaatcctcaagggcctcaaaaccaaaaccttcaacatcctcaagaagcacggcgactcgtggatcgaggagttgccagcggtgctctgggcgaaccgaaccacgccaagccgagcaaccggggaaacgcctttcttcctcgtctacggcgcgtag

SEQ ID NO: 44555 - DNA, 448 bp, Oryza sativa
  Clone ID: PAT_MRT4530_47604C.1
gggggggcaaaacccacctatttaaaaaggaaaccgggggcccccaagaaaacgggtaaaaaaaccaacaaatcatcccggcccggggggcccttaaaccccacccaagggggcattagccccccaaaatcctggcaaaaaaaggggggggaagaccccgcccaagggggggccccccaaacgggggggttaccgccccccccggggggggggcccccgggggggggggggccccccctggaaggggaaaaccgcgagggggccccccccccccaaatggttgccaaaaaaaaacaaacccctgggggccgggggaaacccccccctggcccggaacctggcccccacaaaaaaaaggggggggggcccccaccccccaaaggggggggcttccccgaaagggtttcccaaaaactgtaacccccccggggaaaaagccccggggggg

SEQ ID NO: 44556 - DNA, 491 bp, Oryza sativa
  Clone ID: PAT_MRT4530_47605C.1
tcgcgatctagaaaaaaaaaaaaaaaaaaaaaaaaaaaaaaaaagaaaggaaaaaaaaaaaaaaaaaaaaaaaaaaaaaaaaaaaaaaaaaaaaaaaaaaaaaaaaaaaaaaaaaaaaaaaaaaaacgggccccggggggggccccggggggggccccgggggtcaaccgggaatttcgggccgggccctggagggggtccaagttttccttatggggggcggattaaaagttgggggaaataagggaaaaagtggtttctggggaaaaatggttttcggttaaaatttcaacaaaaaatacgaccgggaggttaaaggggaaaacccgggggggccaagggggggacctaactaaaataattgggggggggtaaatggccggttttcaagggggaaaactggtcggcccacttgaataaagaaatggccaaacggggggggagggggggttgggttttggggccccgggggggttttttttttaacaagg

SEQ ID NO: 44557 - DNA, 5733 bp, Oryza sativa
  Clone ID: PAT_MRT4530_47606C.1
atggccgaacgggcagtggcgcacaacctctctccgagcgctagcggtgacgacagcgagcagaacccgcgtcgtcgagctcgtactccaccgcccccctctcgccgaagtcttaggcgggaggaggcgctcgagggggtcgaaagatccgcgacttcgccgcacgcgggcgatggagaaggacggcgagacggggagcgtcgtctcctcgtctacggtgatggcagcacgccccagggcgcgctccaggctgcgggcgcgctcttgcgtcacccgcccgtcgtccctgatccagagactccaacccgccgttggctagatgacgtggccaacttggtcatgacggcgcagcagcgcctaggcgccggcgggcggtcctccgccaccaaggccactggcgttgctactgccggctccgtgtcgtcgaggcgaagggcgcggcgagcggcagccgttacccgccgttcatctgccattccctcgtcaacgcctcccacccaagaagatgtgcgtgaggggccggatgcccgcctcaatatcgagcgccggcgcaatgatcgccgtgctgcccacgcatcggagggcgcttcctcgtccggagcgccacttcggtccgggcacgggggccagccccccgtgtccccggttggcggtgccggctgtcgagcctttgtggcgagccttcggaacgtccgttggcccccaaggttccggcccaccatcaccgaaaaatacgacgaaagcgtcaaccccgccgagtttctccagatctacacgactgggatcgaggccgccgggggtgacgacagggtcatggcgaatttcttccccatggccctgaaaggacaggcgcgggattggctaatgaacttgccacccgcgtcggtccactcttgggaggatttgtgccagcagttcaccatgaacttccagggcacatatccgcgcccaggtgaagaagcggacttacacgcggtacagcgaggggacgatgagtctctttgctcgtacattcagcggttttgtcaagtccgcaacaccataccgtgcatccttgcacacgcggtgatctacgcgttcagggggggcgtgcggcacaaccgcatgcttgagaagatcgcctccaaggagccccagaccactgcggagctttttcagctcgcggaccgtgtggctcgcaaggaggaggcatggacctggaactccaccggttccggtgtggcagcttcggccgcccccggatccgccgctcggtcagggcggcgggacaggaggaggaagaagaggtcggcccattccgacgacgagggtcacgtcctcgccgtcgagggcgcttcgcgggccacccgaaaggggaggcctgcgagcgacaaaaagaaggaggccggcgctcccagcagggagcgcccgaccagcaagtggtgcaccgtgcacaacacctccctccacgacctcgcggactgccgcgcggtcaaaagtttggctgagcggacgaggaagtgggaggaggagaggaggcaggagcgccgtgagggcaaggccccggcggctccctccagcaaccggcgaagtgaggccaagcagaaggcccccgccgagaacattgacgatggcgacgatgacctagggttccaggagcccggggccaccatcgccaccgtcgatgggggagcacgcgctcacgcttctcgtcggagcctcaaggccatgaagcggagcttctggccgcggcccctacccatgaggcgacgcggcgggcgcggtggtcggaggttgccctcaccttcgaccagaccgaccacccgccatgcattgcccggggaggacagatcgcatgatgggggtgcagccctcaacatcctttcccccgcagcctttgatgccatcaaggccccggggatggtgctccggccgtcccagccgatcatcggtgtgacgccggggcacacttggccgctaggtcatatcgacctcccggtcaccttcggtggttccgccaacttccgcacggagcgggtgaacttcgatgtggcggacctcagtctgccctacaacgcggtcctagggaggcccgcgttggtgaagttcatggtggcggtccactacgcctatctccagatgaagatgccgggccccggtggccccatcaccgtccatggcgacctcaaagtcgcgcttgcttgcatggagcagcgcgcggaccacctcgccgcggcatccaagcccgcgggtggcgacgagaggctcagcacctccgtcccagccgccccgaggcatcggatgatcacgtgcgacgaggtcccgatcaagcaggaagacgcgctcgtctccttcctgcgggcaaacgccgacgtcttcgcctggagaccggcggacatgaccggggtccccagggaggtgattgagcaccgtctcgccgtacggccgggcgcaaggccggtccggcagaaagtgcggtggcaggccccggaacgtcaagccttcatccgcgaggaggtggcgcgacttctggaggccagattcatccaagaggtcatccatccggagtggctggcgaacccggtcgtcgttcccaaggcgaacggcaagcttcggatgtgcatcgactacaccgaccttaacaaggcatgtcctaaggacccttaccccctgccacgcatagatcagattgtcgactccaccgcggggtgcgaccttttgtgttttctagatgcatactctggttatcatcagattcgcatggctagggaggatgaggaaaaaactgcattcattacccccataggaacttattgttatacgacaatgcctttcgggttaaagaatgcaggtcctacttttcaacgtactactcgaatttctttgggtagccaaataggacgtaatgttgaggcctatgttgatgacttggttgtgaaaacacgcaaccaggagaccttactttcggatctagcggaaactttcgaaagtctccgcaccgcccgcataaagctgaaccccgacaagtgcgtgttcggcgtgcctgcgggcatgcttctcgggttcttggtctctgcccgaggcattgaggccaaccccgagaagatacgagctatagagcggatgcgccccccagcaagcttagggatgtgcaatgcgtcactggctgaggctgaacgggccctcactcagttgaaggcgtacctcagttctcccccagtcctggtcgccccggagccagatgagccgttgctactctacctggcgggaaccccgcaggtggtcagcgcggcgttggtcatggagcgcgacgaggacgaccctcgcttcgcgcatccccaccctgtgtcgactcgacccgggagagagcagggaggagaggcccccgagccgaacggtggcccaaggcccccgacggccggagctggccctccgcccgcttgtccgaaggtgccaggcgcccccgacccccaggatggccacggggccactgcgggaaggccgcgcctgtcgccctctgaccccgaggtcatcggcacagaagccgagtgcgccccgcgcggcctctcggagcgtgacgaggacgatcctcgctctgcgcgtccccaccctgtgtcgattcgacccgggagagagcagggaggagaggcccccgagccgaacggtggcctaaggcccccgacggccggagctggccctccgcccgcttgtccgacggtgctaggcgcccccgacccccaggatggccccggggccactgcaggaaggccgcgcctgtcgccctccgaccccgaggtcgtcggcacagaagctgagtgcgccccgcgcggcctctcggacgaagagcgccctggaaatgcggcccctagtgaagaagatcggccccgccgaaaggcgcatcaggtcacggtggttacgtcctaccccctcggccaaatcttgcataaccgagagggtactggacgggtggtgaaatgggcaatcgaactctctgagttcgatttgcactttgaaccacgccacgcagtcaagagccaggccctcgccgactttgtggcagagtggacaccggctcccgagcccgtctccatccccgaggccagctcgggcccttcgcagctgcctcacaccgcctattgggtgatgcagttcgacggctccctgtctcttcagggtgccggtgcgggggtcacgttgacctcgccgagcggagatgtcctcaaatacctggtccgcctcgactttcgggcaaccaacaatatggcagagtacgagggactccttgcgggactcagagtggcggctggactggggatccgccgcctcctggtgttaggcgactctcagttggtcgttaaccaggtctccaaggagtaccagtgctctgacccgcagatggatgcttacgtgcgccaggtgcggcgtatggagcgccattttgacgggatagagcttcggcacgtgcccagacgggataacgcggtcgccgacgaactctcaaggctcgcttcctcgcgagcccagaccccaccgggcgcctttgaagaaaggcttgcccagccgtcggcgcgacccgaccccctaggggagacggacgcgcctgaacggcccccgaggcccgtcagagtccaggcctcgggacccgaggggagcgctcccagctcccttagattgattgcttggatcgctgagatccaggcgtacctcgcagataagactctacccgaggaccgcgaagggagtgaacgcgtccagcgcatctccaagcgctacgtgctggtggaagggaccctctatcggcacgcggctaacggagtcctcctgaaggcgtgccagttccacgccaagcaaacccatcagccggcccaagccctgcagaccatacctctttcatggccgtttgctgtctgggggctcgatatcctgggtccgtttagacgggccccgggcgggttcgagtatctgtatgtcgctatcgacaagttcactaagtggcccgaggcttatccggtcaccaagatcgataagcactccgcacttaaattcatcaggggcatcactgctcggtttggggtgcctaaccgtatcattacggataacggcacccagttcactagtgaactcttcggtgactactgcgaagacatgggcatcaagctctgcttcgcctcccccgcccaccccagaagcaatggccaagtggagcgcgccaacgcggaaatcctcaagggcctcaaaaccaagaccttcaacatcctcaagaagcatggcgactcgtggatcgaggagttgccagcggtgctttgggcgaaccaaaccacgccaagccgagcaaccggggaaacgcctttcttcctcgtctacggcgcggaggcggttctcccatccgagctcaccctgaggtcccctcgggccaccatgtactgcgaggctgatcaagatcagcttcgcagagatgacctcgactacttggaagagcgaaggcggcgcgcggccctccgagccgcgcgctaccagcagagcctgcggcgctaccatcagcgccacgtccgggcccgatcactctgcatcgacgacctcgtcctacgccgcgtccaaacgcgtgctggactgagcaagctctcaccaatgtgggagggtccgtatcgagtgatcggcgtcccccggccgggctccgttcggctggccacgggcgacggcacagagctgcctaacccgtggaacatcaaacaccttcgtcgcttctacccctag

SEQ ID NO: 44558 - DNA, 5649 bp, Oryza sativa
  Clone ID: PAT_MRT4530_47607C.1
atggccgaacgagcaaaagcgcacaacctctctccgagcgctagcggtgacgacagcgagcagaacccgcgtcgtcgagctcgtactccgccgcccccctctcgccgaagtcttaggcgggaggaggcgctcgagggggtcgaaagatccgtgacttcgccgcccacgagcgatggagaaggacggcgagacggggagcgtcgtctcctcgtctacggtgatggcagcacgccccagggcgcgctccaggctgcgggcgcgctcctgcgtcacccgcccgtcgtccctgatccagagactccaactcgacgttggctagatgacgtggccaacttggtcatgacggcgcagcagcgtttaggcaccggcgggcggtcctccgccaccaaggccgctggcgctgctactgccggctccgtgtcgtcgaggcggagggcgcggcgagcggcggccgttgcccgccgttcgtctgccattccctcgtcaatgcctctgacccaagaagatgtgcgtgaggggccggatgcccgcctcaatatcgagcgccggcgcaatgatcgccgtgctgcccacgcatcggagggcacttcctcgtccggagcgccacttcggtccgggcacggaggccaaccccccgtgtccccggttggcggtgccggctgtcgagcctttgtggcgagccttcggaacgtccgttggcccccaaggttccggcccaccatcaccgaaaaatacgacggaagcgtcaaccccgccgagtttctccagatctacacgactgggatcgaggccgccgggggtgacgacagggtcatggcgaatttcttccccatggtcctgagaggacaggcgtggggttggctaataaacttgccacccgcgtcggtccactcttgggaggatttgtgccagcagttcaccatgaacttccagggcacatatccgcgcccaggtgaagaagcggacttgcacgcggtacagcgaggggacgatgagtctcttcgctcgtacattcagcggttttgtcaagtccgcaacaccataccatgtatccctgcacacgcggtgatctacgcgttcagggggggcgttcggcacaaccgcatgctcgagaagatcgcctccaaggagccccagaccactgcggagctttttcagctcgcggaccgtgtggctcgcgaggaggaggcatggacctggaactccaccggttccggtgtggcagcttcagccgcccccggatccgccgctcggtcagggcggcgggacaggaggagaaagaagaggtcggcccattccgacgacgagggtcacgtcctcgccgtcgagggcgcttcgcgggccacccgaaaggggaggcctgcgagcgacaaaaagaaggaggccggcgctcccagcagggagcacccgaccggcaagtggtgcaccgtgcacaacacctccctccacgacctcgcggactgccgcgcggtcaaaagtttggctgagcggacgaggaagtgggaggaggagaggaggcaggagcgccgtgagggcaaggccccagcggctccctctggcaaccggcgaagtgaggccaagcagaaggcccccgccgaggacattgacgatggtgacgatgacctagggttccaggagcctggggccaccatcgccaccgtcgatgggggagcatgcgctcacgtttctcgccggagcctcaaggccatgaagcgagagcttctggccgcggcccctacccatgaggcgatgcggcgggcgcggtggtcggaggttgccctcaccttcgaccagaccgaccacccgccgtgcattgcccggggaggacagatcgcgatggtggtttcccccaccgtttgcaacgtgaagttggggcgtgtcctcatagacgggggagcagccctcaacatcctttcccccacagcctttgacgccatcaaggccccggggatggtgctccggccgtcccagccgattatcggtgtgacgccggggcacacttggccgctaggtcatatcgacctcccggtcaccttcggtggatccgccaacttccgcacggagcgggtgaacttcgatgtggcggacctcagtctgccctacaacgcggtcctggggaggcccgcgttggtgaagttcatggcggcggtccactacgcctacctccagatgaagatgccgggccccggtggccccatctctgtccatggcgacctcaaagtcgcgcttgcttgtatggagcagcgcgcggaccacctcgccgccgcgtccaagcccgagggtggcgacgagaggctcggcacctccgtccccgccgccccaaggcagcggatgatcacgtgcgacgaggtcccggaagacgcgctcgtctccttcctgcgggcaaacgctgacgtcttcgcatggagaccggcggacatgcccggggtccccagggaggtgattgagcaccgtctcgccgtacggccgggcgcaaggccggtccgtcagaaagtgcggcggcaggccccggaacgtcaagccttcatccgcgaggaggtggcgcgacttctggaggccggattcatccgagagcttatccatccggagtggttggcgaacccggtcgtcgttcccaaggcgaacggcaagcttcggatgtgcatcgactacaccgaccttaacaaggcatgtcctaaggacccttaccccctaccacgcatagatcagattgtcgactccaccgcggggtgcgaccttttgtgttttctagatgcatactctggttatcatcagattcgcatggctagggaggatgaggaaaaaactgcattcattacccccataggaacttattgttatacgacaatgcctttcgggttaaagaatgcaggtcctacttttcaacgtactactcgaatttctttgggtagccaaatacgaaaagcgaaaactttcgaaagtctccgcaccgcccgcataaagctgaaccccgacaagtgcgtgttcggcgtgcctgcgggcatgcttctcgggttcttggtctctgcccgaggcattgaggccaaccccgagaaggtacgagctatagagcggatgcgcccacccagcaagcttagggatgtgcaatgtgtcactggctgtatggccgccctaagtcgattcatatcgaggctgggagagaaggcgctacccctatttaagctcctcaaacgctccgggccgtttatctggacggaggaggctgaacgggacctcactcagttgaaggcgtacctcagttctcccccagtcctggtcgccccggagccagataagccgttgctactttacctggcggcaaccccgcaggtggtcagcgcggcgttggtcgtggagtgcgacgaggatgaccctcgctccgcgcatccccaccccgtgtcaactcgacccgggagagagcagggaggagaggcccccgagccgaacggtggcccaaggcccccgacggccggagctggccctccgcccgcttgtccgaaggtgccaggcgcccccgacccccaggatggccacggggccactgcgggaaggccgcgcctgtcgccttctgaccccgaggtcgtcggcacagaagccgagtgcgccccgcgcggcctctcggagcatgacgaggacgaccctcgctccgcgcatccccaccttgtgtcgactcgacccgggagagagcagggaggagaggcccccgagccgaacggtggcccaaggcccccgacggccggagctggccctccgcccgcttgtccgacggtgccaggcgcccccgacctccaggatggccccggggccactgcaggaaggccgcgcctgtcgccctccgaccccgaggtcgtcggcacagaagccgagtgcgccccgcgaggcctctcggacgaagagcgccctggagatgcggcccctagtgaagaagatcggccccgccgaaaggtgcagcggcccgtctacttcgttagcgaggccctccgggacgctaagacccgataccctcaggcccagaagatgctttacgctattctgatggcttcgaggaagttgcgccattattttcaggcgcatcggggtactggacgggtggtgaaatgggcaatcgaactctctgagttcgatttgcgctttgaaccacgccacgcagtcaagagccaggccctcgccgactttgtggcagagtggaccccggcccctgagcccatctccgtccccgaggccagctcgggcccctcgcagctgcctcacaccgcctattgggtgatgcagttcgacggctccctgtctcttcagggcgccggtgcgggggtcacgttgacctcgccgagcggagatgtcctcaaatacctggtccgcctcgactttcgggcaaccaacaatatggcagagtacgagggactccttgcgggactcagagtggcggctggactggggatccgccgcctcctggtgttaggcgactctcagttggtcgttaaccaggtctccaaggagtaccagtgctctgacccgcagatggatgcttacgtgcgccatgtgcggcgtatggagcgccattttgacgggatagagcttcggcacgtgcccagacgggataacacggtcgccgacgaactctcaaggctcgcctcctcgcgagcccagaccccaccgggcgcctttgaagaaaggcttgcccagccgtcggcgcgacccgaccccctaggggagacggacgcgcctgaacggcccccgaggcccgtcggagtccaggcctcgagacccgaggagagcgctcccagctcccttagattgattgcttggatcgctgagatccaggcgtacctcgcagataagactctacccgaggaccgcgaagggagtgaacgcgtccagcgcatctccaagcgctacgtactggtggaagggaccctctatcggcgcgcggctaacggagtcctcctgaagtgcattcctcgggaacaaggcgtcgagcttcttgccgatatccatgaaggcgagtgcggagcccactctgcctcacgcaccttggttggcaaggcctttcgccagggtttctattggccgacggctctcaacgatgcggtcgacctggtccggcgacgggccccgggctggttcgagtatctatatgtcgctgtcgacaagttcactaagtggcccgaggcttatccggtcattaagatcgataagcactccgcacttaaattcatcaagggcatcacagcccggtttggggtgcctaaccgtattattacggataacggcacacaattcactagtgaactcttcggtgactactgcgaagacatgggcatcaagctctgcttcgcctcccccgcccaccccagaagcaatggccaagtggagcgcgccaacgcggaaatcctcaagggcctcaaaaccaagaccttcaacatcctcaagaagcacggcgactcgtggatcgaggagttgccagcggtgctctgggcgaaccgaaccacgccaagccgagcaaccggggaaacgcctttcttcctcgtctacggcgcggaggcggttctcccatccgagctcaccctgaggtcccctcgggccaccatgtactgcgaggctgatcaagatcagcttcgcagagatgacctcgactacttggaagagtga

SEQ ID NO: 44559 - DNA, 6018 bp, Oryza sativa
  Clone ID: PAT_MRT4530_47608C.1
atggccgaacgagcaaaagcgcacaacctctctccgagcgctagcggtgacgacagcgagcagaacccgcgtcgtcgagcttgtactccgccgcccccctctcgccgaagtcttaggcgggaggaggcgctcgagggggtcgaaagatccgcgacttcgccgcccatgagtgatggagaaggacggcgagacggggagcgtcgtctcctcgtctacggtgatggcagcacgccccagggcgcgctccaggctgcgggcgcgctcctgcgtcacccgcccgtcgtccctgatcaagagactccaactcgacgttggctagatgacgtggccaacttggtcatgacggcgcagcagcgtttaggcgccggcgggcggtcctccgccaccaaggccactggcgctgctactgccggctccgtgtcgtcgaggcggagggcgcggcgagcggcggccgttgcccgccgttcgtccgccattccctcgtcaatgcctccgacccaagaagatgtgcgtgaggggccggatgcccgcctcaatatcgagcgccggcgcaatgatcgccgtgctgcccacgcatcggagggcgcttcctcgtccggagcgccacttcggtccgggcacggaggccagccccccgtgtccccggttggcggtgccggctgtcgagactttgtggcgagccttcagaacgtccgttggcccccaaggttccggcccaccatcaccgaaaaatacgacggaagcgtcaaccccgccgagtttctccagatctacacgactgggatcgaggccgccgggggtgacgacagggtcatggcgaatttcttccccatggccctgagaggacaggcgcggggttggctaatgaacttgccacccgcgtcggtccactcttgggaggatttgtgccagcagttcaccatgaacttccagggcacatatccgcgcccaggtgaagaagcggacttgcacgcggtacagcgaggggacgatgagtctcttcgctcgtatattcagcggttttgtcaagtccgcaacaccataccatgtatccctgcacacgcggtgatctacgcgttcagggggggcgtgcggcacaaccgcatgctcgagaagatcgcctccaaggagccccagaccactgcggagctttttcagctcgcagaccgtgtggctcgcaaggaggaggcatggacctggaactccaccggttccggtgtggcagcttcagccgcccccggatctgccgctcggtcagggcggcgggacaggaggaggaagaagaggtcggcccattccgacgacgagggtcacgtcctcgccgtcgagggcgcttcgcgggccacccgaaaggggaggcctgcgagcgacaaaaagaaggaggccggcgctcccagcagggagcgcccgaccggcaagtggtgcaccgtgcacaacacctccctccacgacctcgcggactgccgcgcggtcaaaagtttggctgagcggacgaggaagtgggaggaggagaggaggcaggagcgccgtgagggcaaggccccagcggctccctctggcaaccggcgaagagcctggggccaccatcgccaccgtcgatggggagcatgcgctcacgtttctcgccggagcctcaaggccatgaagcgagagcttctggccgcggcccctacccatgaggcgatgcggcgtgcgtggtggtcggaggttgccctcaccttcgaccagaccgaccacccgccgtgcgttgcccggggaggacagatcgcgatggtggtttcccccaccgtttgcaacgtgaagttggggcgtgtccttatagacgggagagcagccctcaacatcctttcccccacagcctttgacgccatcaaggccccggggatggtgctccggccgtcccagccgattatcggtgtgacgccggggcacacttggccgctaggtcatatcgacctcccggtcaccttcggtggatccgccaacttccgcacggagcgggtgaacttcgatgtggcggacctcagtctgccctacaacgcggtcctggggaggcccgcgttggtgaagttcatggcggcggtccactacgcctacctccagatgaagatgccgggccccggtggccccatctctgtccatggcgacctcaaagtcgcgcttgcttgtatggagcagcgcgcggaccacctcgccgccgcgtccaagcccgagggtggcgacgagaggctcggcacctccgtccccgccgccccgaggcagcggatgatcacgtgcgacgaggtcccggaagacgcgctcgtctccttcctgcgggcaaacgctgacgtcttcgcatggagaccggcggacatgcccggggtccccagggaggtgattgagcaccgtctcgccgtacggccgggcgcaaggccggtccgtcagaaagtgcggtggcaggcctcggaacgtcaagccttcatccgcgaggaggtggcgcgacttctggaggccggattcatccgagaggttatccatccggagtggttggcgaacccggtcgtcgttcccaaggcgaatggcaaggttcgaatgtgcatcgactacaccgaccttaacaaggcatgtcctaaggacccttaccccctaccacgcatagatcagattgtcgactccaccgcggggtgcgaccttttgtgttttctagatgcatactctggttatcatcagatttgcatggctagggaggatgaggaaaaaactgcattcattacccccataggaacttattgttatacgacaatgcctttcgggttaaagaatgcaggtcctacttttcaacgtactactcgaatttctttgggtagccaaataggacgtaatgttgaggcctatgttgatgacttggttgtgaaaacacgcaaccaagagaccttactctcggatctagcggaaactttcgaaagtctccgcaccgcccgcataaagctgaaccccgacaagtgcgtgttcggtgtgcctgcgggcaagcttctcgggttcttggtctctgcccgaggcattgaggccaaccccgagaaggtacgagctatagagcggatgcgcccccccagcaagcttagggatgtgcaatgtgtcactggctgtatggccgccctaagtcgattcatatcgaggctgggagagaaagcgctacccctatttaagctcctcaaacgctccgggccgtttatctggacggaggaggctgaacgggccctcactcagttgaaggcgtacctcagttctcccccagtcctggtcgccccggagccagatgagccgttgctactttacctggcggcaaccccgcaggtggtcagcgcggcgttggtcgtggagcgtgacgaggacgaccctcgctccgcgcatccccaccctgtgtcgactcgacccgggagagagcagggaggagaggcccccgagccgaacggtggcccaaggcccccgacggccggagctggccctccgcccgcttgtccgaaggtgccaggcgcccccgacccccgggatggccacggggccactgcgggaaggccgcgcctgtcgccttctgaccccgaggtcgtcagcacagaagccgagtgcgccccgcgcggcctctcggagcgtgacgaggacgaccctcgctccgcgcatccccaccctgtgtcgactcgacccgggagagagcagggaggagaggcccccgagccgaacggtggcccaaggcccccgacgaccggagctggccctccgcccgcttgtccgacggtgccaggcgcccccgacccccaggatggccccggggccactgcgggaaggccgcgcctgtcgccctccgaccccgaggtcgtcggcacagaagccgagtgcgccccgcgaggcctctcggacgaagagcgccctggagatgcggcccctagtgaagaagatcggccccgccgaaaggtgcagcggcccgtctacttcgttagcgaggccctccgggacgctaagacccgataccctcaggcccagaagatgctttacgctattctgatggcttcgaggaagttgcgccattattttcaggcgcatcgggtcacggtggttacgtcttaccccctcggccaaatcttgtataaccgagagggtactggacgggtggtgaaatgggcaatcgaactctctgagttcgatttgcgctttgaaccacgccacgcagtcaagagccaggccctcgccgactttgtggcagagtggaccccggccgctgagcccatctccgtccccgaggccagctcgggcccctcgcagctgcctcacaccgcctattgggtgatgcagttcgacggctccctgtctcttcagggcgccggtgcgggggtcacgttgacctcgccgagcggagatgtcctcaaatacctggtccgcctcgactttcgggcaaccaacaatatggcagagtacgagggactccttgcgggactcagagtggcggctggactggggatccgccgcctcctggtgttaggcgactctcagttggtcgttaaccaggtctccaaggagtaccagtgctctgacccgcagatggatgcttacgtgcgccgtgtgcggcgtatggagcgccattttgacgggatagagcttcggcacgtgcccagacgggataacacggtcgccgacgaactctcaaggctcgcctcctcgcgagcccagaccccaccgggcgcctttgaagaaaggcttgcccagccgtcggcgcgacccgacctcctaggggagacggacgcgcctgaacggcccccgaggcccgtcggagtccaggcctcgggacccgaggggagcgatcccagctcccttagattgattgcttggatcgctgagatccaggcgtacctcgcagataagactctacccgaggaccgcgaagggagtgaacgcgtccagcgcatctccaagcgctacgtactggtggaagggaccctctatcggcgcgcggctaacggagtcctcctaaagtgcattcctcgggaacaaggcgtcgagcttcttgccgatatccatgaaggcgagtgcggagcccactctgcctcacgcaccttggttggcaaggcctttcgccagggtttctattggccgacggctctcaacgatgcggtcgacctggtccggcggtgcagggcgtgccagttccacgccaagcaaacccatcagccggcccaggccctacagacaatacctctttcatggccgtttgctgtccgggggctcgatatcctgggtccgtttagatgggccccgggcgggttcgagtatctgtatgtcgctatcgacaagttcactaagtggcccgaggcttatccggtcatcaagatcgataagcactccgcacttaaattcatcaagggcatcacagcccggtttggggtgcctaaccgtattattacggataacggcacccaattcactagtgaactcttcggtgactactgcgaagacatgggcatcaagctctgcttcgcctcccctgcccaccccagaagcaatggccaagtggagcgcgccaacgcggaaatcctcaagggcctcaaaaccaagaccttcaacatcctcaagaagcacggcgactcgtggatcgaggagttgccagcggcggttctcccatccgagctcaccctgaggtcccctcgggccaccatgtactgcgaggctgatcaagatcatcttcgcagagatgacctcgactacttggaagagcgaaggcggcgtgcggccctccgagccgcgcgctaccagcagagcctgcggcgctaccatcagcgccacgtccgggcccgatcactctgcgttgacgacctcgtcctacgccgcgtccaaacgcgtgctggactgagcaagctctcaccaatgtgggagggtccgtatcgagtgatcggcgtcccccggccgggctccgttcggctggccacgggcgacggcacagagctgcctaacccgtggaacatcaaacaccttcgtcgtttctacccctag

SEQ ID NO: 44560 - DNA, 296 bp, Oryza sativa
  Clone ID: PAT_MRT4530_47609C.1
gggaaaaaaggaagggggaatttttttaaaaagccgggcccccattaggggaaggggcaggagtacaaggagggagccccctgcggaaaggggatccatccaagtttggtggggaacccaccaacattgtacgaaaaacccccacactgaaaaaagcaaatgagggtttatttagggggtaaaaaaaaagggaggggctgcctaaaaaaaaagtggggactaaaggaaggaaaataagggctggatcaaaggttttatccacaggagcagcttccaaaccagaaaaccttattgca

SEQ ID NO: 44561 - DNA, 712 bp, Oryza sativa
  unsure (1)..(712): unsure at all n locations
  Clone ID: PAT_MRT4530_4760C.1
tacactggtcaaggcggaaacgtgatgcaagtaaagaagaagggagaggaactgaaagagcctgaagaccaaaagcttattaccggaaacctcgcgttagcaaccagcatagaaaaacaaacccctgtgcgtgtcattagaggcaaacataagtcaactcatgataaatcaaaaggtggaaattatgtttacgacggattatatcttgtggaaaagtattggcaacaagtcggatctcacggtatgaatgtcttcaagtttcaacttatgcgcatacctggacaacctgaactttcttgggtagaggtgaagaaatctaagtcaaaataccgggaaggtctatgcaagcttgacatctcagaagggaaagagcagtcacccattagcgctgtgaacgaaatagacgacgagaaaccgcctttgttcacctacactgttaaactgatttacccagattggtgcagaccagttcctccaaagtcatgctgttgcaccacgcgctgcaccgaagctgaagcgagggtgtgcgcttgtgtggagaaaaacggtggagagataccgtacaacttcgatggagccattgttggtgcaaaacctactatctatgaatgtggcccactctgcanatgcccttctagttgctacctaagagtcacacagcatgggatcaagttaccgcttgagatcttcaaaaccaagtcaagaagttggg

SEQ ID NO: 44562 - DNA, 573 bp, Oryza sativa
  Clone ID: PAT_MRT4530_47610C.1
atggcgcagcagcagaggatggtgatagtgggggaggagcactgcggcggcggggaggacagggagctgacggtgaggaagacgacgctgttctgccccggcgacgggctggaggcgtacgaccacgggacggggacgctggcgttcagggtggagacgtacgggcgcggcgggaagccgctcttctccgcccgccgctcgtccatcctcggcgtcggctcaggcgccgccgccgtcctcgtcgacctcctcgcccccggcgccgccggcgagttccgcgtcgacgggtccttcccgcgccgctgctgccgcgtggtggccgtcaaggccgctgcccccgccggcggcggcggggaggaggaggaggaggaggtggtggtggcggaggtccggaggaaggtggacgaggacgcgcacgtggtgatggggcgcgacgtgttcgtgctgtggttgcgcgccgggttcgacgccgcgttcgccatggggatcgtgctcgttctcgaccggatcaccggcgacgagctcaacggcgacctgagcgaggacctcgccgtcgccagttcgccggtgtaa

SEQ ID NO: 44563 - DNA, 5166 bp, Oryza sativa
  Clone ID: PAT_MRT4530_47611C.1
atgacggcgcagcagcacctaggcgccggtgggcggtcctccgccaccaaggcctctggcgctgctaccgccggctccgtgtcgtcgaggcggagggcgcggcgagtggcagccgttacccgccgttcgtctgccattccctcgttaacgcctcccacccaagaagatgtgcgtagggggctggatgcccgcctcagtatcgagcgccggcgcaatggtcgtcacgctgcccacgcaacggaaggcgcttcctcgttcggagcgccacttcggttcgggcgcgggggccagccccccgtgcccccgattggtggtgtcggctgtcgagcctttgtggcgagccttcggaacgtccgttggcccccaaggttccggcccaccatcaccgaaaaatatgacggaagcgtcaaccccgccgagtttctccaggtctacacgaccgggatcgaggccgccgggggtgacgacagggtcatggcgaatttcttccccatggccctgaaaggacaggcgcggggttggctaatgaacttgccgcccacgtcggtccactcttgggaggatttgtgccagcagttcaccatgaacttccaaggcacatatccgcgcccaggtgaagaagcggacttgcatgcggtacagcgaagggacgatgagtctcttcgctcgtacattcagcggttctgtcaagtccgcaacaccataccatgcatccccgcacacgcggtaatctacgcgttcaggggggacgtgcggcacaaccgcatgctcgaaaagatcgcctccaaggagccccagaccaccgcggagctttttcagctcgcggaccgtgtggctcgcaaggaagaggcctggatctggaactccactggttccggtgtggcagcttcggccgcccccggatccgccgctcggtcagggcggcgggacaggaggaggaagaagaggtcggcccattccgacgacgagggtcacgtcctcgccgtcgagggcgcttcgcgggccacccgaaaggggaggcctgcgagcgacaaaaagaaggaggccggcgctcccagcagggagcgcccgaccggcaagtggtgcaccgtgcacaacacctccctccacgacctcgcggactgccgcgcggtcaaaagtttggctgagcggacgaggaagtgggaggaggagaggaggcaggagcgccgtgagggcaaggccccggcggctccctccggcaaccggcgaagtgaggccaagcagaaggcccccgccgaggacatcgacgatggcgacgatgacctagggttccaggagcctggggccaccatcgccaccgtcgatgggggagcatgcgctcacgcttctcgtcggagcctcaaggccatgaagcgagagcttctggccgcggcccctacccatgaggcgacgcggcgggcgcggtggtcggaggttgccctcaccttcgaccagaccgaccacccgccgtgcgttgcccggggaggacagatcgcgatggtggtttcccccaccgtttgcaacgtgaagttggggcgtgtcctcatagatgggggtgcagccctcaacatcctttcccccgcagcctttgacgccatcaaggccccggggatggtgcttcggccgtcccagccgattgtaggtgtgacgccggggcacacttggccgctaggtcatatcgacctcctggtcaccttcggtggatccgccaacttccgcacggagcgggtgaacttcgatgtggcggacctcagtctgccctacaacgcggtcctggggaggcccgcgttggtgaagttcatggtggcggtccactacgcctacctccagatgaagatgccgggcctcggtggccccatctctgtccatggcgacctcaaagtcgcgcttgcttgtatggagcagcgcgcggaccacctcgccgccgcgtccaagcccgagggtggcaacgagaggctcagcacctccgtcccagccgccccgaggcagcggatgatcatgtgcgacgaggtcccgagaccggcggacatgcccggggtccccagggaggtgattgagcaccgtcttgccgtgcggccgggcgcaaggccggtccggcagaaagtgcggcggcaggccccggaacgtcaagccttcatccgcgaggaggtggcgcgacttctggaggccggattcatccgtgaggtcatccatccggagtggctggcgaacccggtcgtcgttcccaaggcgaacggcaagcttcggatgtgcatcgactacaccgaccttaacaaggcatgtcctaaggacccttaccccctgccacgtatagatcagattgtcgactccaccgcggggtgcgaccttttgtgttttctagatgcatactctggttatcatcagattcgcatggctagggaggatgaggaaaaaactgcattcattacccccataggaacttattgttatacgataatgcctttcgggttaaagaatgcaggtcctacttttcaacgtactactcgaatttctttgggtagccaaataggatgtaatgttgaggcctatgttgatgacttggttgtgaagacgcgcaaccaagagaccttactctcggatctagcggaaactttcgaaagcctccgctccgcccgcataaagctgaaccccgataagtgcgtgttcggcgtgcctgcgggcaagcttcttgggttcttggtctctgctcgaggcatcgaagccaaccccgagaagatacgagctatagagcggatgcgcccccccagcaagcttagggatgtgcagtgcgtcaccggctgcatggccgccctaagtcggttcatatcgaggctgggagagaaggcactacacctatttaagctcctcaaacactccgggccgtttatctggacggagaaggctgagcgggccttcactcagttgaaggcgtacctcagttctcccccagtcctggtcgccccggagccagatgagccgctgctactttacctggcggcaaccccgcaggtggtcagcgcggcgttggttgtggagcgcgacgaggacaaccctcaccccgcgcatccccaccctgtgtcgactcgacccaggagagagcagggaagagaggcccccgagccgaacggcggcccgaggcccccgacggccggagctggccctccgcctgcttgtccgacggtgccaggcgcccccgacccccaggatggccccggggccactgcgggaaggccgcgcctgtcgccctccgaccccgaggtcgtcggcacagaagccgagtgcgccccgcgcggcctctcgaacgaagagcgccttggagatgcggcccctagtgaagaagatcggccccgccgaaaggtgcagcggcccgtctacttcgttagcgaggccctccgggactctaagacccgataccctcaggcccagaagatgctttacgctattctgatggcttcgaggaagttgcgccattattttcaggcgcatcgggtcacggtggttacgtcttaccccctcggccaaatcttgcataaccgagagggtactggacgggtggtgaaatgggcaatcgaactctctgagttcgatttgcactttgaaccacgccacgcaatcaagagccaggccctcgccgactttgtggcagagtggaccccgacccctgagcccatctccgtccccgaggccagctcgggcccctcgcagctgcctcacaccgcctactgggtgatgcagttcgacggctccctatctcttcagggcgccggtgcgggggtcacgttgacctcgccaaacggagacgtcctcagatacctggttcgcctcgactttcgggcgaccaataatatggcggagtacgagggactccttgcgggactcagggtggcagctggactggggatccgccgcctcctggtgttaggcgactcccagctggtcgttaaccaggcgtacctcacagataagactctacccgaggactgcgaagggagtgaacgcatccagcgcatctccaagcgctacgtgctggtggaagggaccctctatcggcgcgcggctaacggagtcctcatgaagtgcattcctcgggaacaaggcgtcgagcttcttgccgatatccatgaaggcgagtgcggagcctactccgcctcacgcaccttggttggcaaggcctttcgccagggtttctattggccgacggctctcaacgatgcggttgacctggtccggcggtgcagggcgtgccagttccacactaagcaaacccatcagccggcccaggccctgcagaccatacctctttcatggccgtttgctgtttgggtgctcgatatcctgggtccgtttaggcgggccccgggcgggttcgagtatctgtatgtcgctgtcgacaagttcactaagtggcccgaggcttacccggtcatcaagatcgataagcactccgcgcttaaattcatcaggggcattactgctcggtttggggtgcctaatagtatcattacggataacggcacccagttcactagtgaactcttcggtgactactgcgaagatatgggcatcaagctctgcttcgcctctcccgcccaccccagaagcaatggccaagtggagcgcgccaacgcagaaatcctcaagggcctcaaaaccaaaaccttcaatatcctcaagaagcacggcgactcgtggatcgaggagttgccagcggtgctctgggcgaaccgaaccacgccaagccgagcaaccggggaaacgcctttcttcctcgtctacggcgcggaggcggttctcccatccgagctcaccctgaggtcccctcgggccaccatgtactgcgaggctgatcaagatcagcttcgcagagatgacctcgactacttggaagagcgaaggcggcgcgcggccctccgagccgcgcgctaccagcagagcctgcggcgctaccatcagcgccacgtccgggcccgatcactctgcgtcgacgacctcgtcctacgccacgtccaaacgcgtgctggactgagcaagctctcaccaatgtgggagggtccgtatcgagtgatcggcgtcccccggctgggctccgttcggctggccacgggcgacggcacagagctgcctaatccgtggaacatcgaacaccttcgtcgcttctacccctag

SEQ ID NO: 44564 - DNA, 1032 bp, Oryza sativa
  Clone ID: PAT_MRT4530_47612C.1
tttttttttttttttaactataatttttttttttttttttttttttcgtttttaggagtaacttgcatttcgctcaaagctacaagctcaatttacaaggcaaaatattcaaacttcgacaagaaaacatacaaaaaagaatttgcaagatgatacatattttacacatctctaagcatgaacccattgatccgatcaccgcaagcttttacaccggcgaactggcgacggcgaggtcctcgctcaggtcgccgttgagctcgtcgccggtgatccggtcgagaacgagcacgatccccatggcgaacgcggcgtcgaacccggcgcgcaaccacagcacgaacacgtcgcgccccatcaccacgtgcgcgtcctcgtccaccttcctccggacctccgccaccaccaccttctcctcctcctcctccccgccgccgccggggggggcagcggccttgacggccaccacgcggcagcagcggcgcgggaaggacccgtcgacgcggaactcgccggcggcgccggggccgaggaggtctacaaggacggcggcggcgcctgagccaccgccgaggatgaacgagcggcggcggaaaaagagcggcttctgccccgaggcgggcgccgtccccaaggaacccgtcccagcggtggtgcaggctgggccgccggcgccggacggtgagcacgggctccccctcggggccgagcagcgccaggtcccccgccgccgcgccgccgccgcacaccccgccgcgcccgtacgtctccaccctgaacgccagcgtccccgtcccgtggtcgtacgcctccagcccgtcgccggggcagaacagcgtcgtcttcctcaccgtcagctccctgtcctccccgccgccgcagtgctcctcccccactatcaccatcctctgctgctgcgccatggacgcaatacgcaaacgcaaatcaaatctctctctctctctctctctctctcgctaacaactcgcgtggatttgaaggtggagaggagtgggagtggaaccctcgtgc

SEQ ID NO: 44565 - DNA, 5013 bp, Oryza sativa
  Clone ID: PAT_MRT4530_47613C.1
atgacggcgcagcagcgcctaggcgccggtgggcggtcctccgccaccaaggcctctggcgctgctaccgccggctccgtgtcgtcgaggcggagggcgcggcgagcggcggccgttggtggtgtcggctgtcgagcctttgtggcgagccttcggaacgtccgttggcccccaaggttccggcccaccatcaccgaaaaatatgacggaagtgtcaaccccgccgagtttctccaggtctacacgaccgggatcgaggccgccgggggtgacgacagggtcatggcgaacttcttccccatggccctgaagggacaggcgcggggttggctaatgaacttgccgcccgcgtcggtccactcttgggaggatttgtgccagcagttcaccatgaacttccaaggcacatatccgcgcccaggtaaagaagcggacttgcatgcggtacagcgaagggacaatgagtctcttcgctcgtacattcagcggtcctgtcaagtccgcaacaccataccatgcatccccgcacacgcggtgatctacgcgttcagggggggcgtacggcacaaccgcatgctcgaaaagatcgcctccaaggagccccagaccaccgcggagctttttcagctcgcggaccgtgtggctcgcaaggaggaggcctggacctggaactccaccggtttcggtgtggcaacttcggccgcccccggatccgccgctcggtcaggacggcgggacaggaggaggaagaagaggtcggcccattccgacgacgagggacacgtcctcgccgtcaagggcgcttcgcgggccacccgaaaggggaggcctgcgagcgacaaaaagaaggaggccggcgctcccagcagggagcgcccgaccggcaagtggtgcactgtgcacaacacctccctccacgacctcacgaactgccgcgcggtcaaaagtttggctgagcggacgaggaagtgggaggaggagaggaggcaggagcgccgtgagggcaaggccccggcggctccctccagcaaccggcgaagtgaggccaagcagaaggcccccgccgaggacatcgacgatggcgacgatgacctagggttccaggagcctggggccaccatcgccaccgtcgatggaggagcgtgcgctcacgcttctcgtcggagcctcaaggccatgaagcgagagcttctggccgcggcccatacccatgaggcgacgcggcgggcgcggtggtcggaggttgccctcaccttcgaccagaccgaccacccgccgtgcgttgcccggggaggacagatcgcgatggtggtttcccccaccgtttgcaacgtgaagttggggcgtgtcctcatagacgggggtgcagccctcaacatcctttcccccacagcctttgacgccatcaaggtcctggggatggtgcttcggccgtcccagccgattatcggtgtgacgccggggcacacttggccgctaggtcatatcgacctcccggtcaccttcggtggatccgccaacttccgcacggagcgggtaaactttgatgtggcggacctcagtctgccctacaacgcagtcttggggaggcccgcgttggtgaagttcatggcggcggtccactatgcctacctccagatgaagatgccgggccccggtggccccatctctgtccatggcgacctcaaagtcgcgcttgcttgtatggagcagcgcgcggaccacctcgccgccgcgtccaagcccgagggtggcaacgagaggctcagcacctccgtcccagccgccccgaggcagcggatgatcacgtgcgacgaggtcccggaagacgcgctcgtctccttcctgcgggcaaacgccgacgtcttcgcctggagaccggcggacatgcccggggtccccagggaggtgattgagcaccatctcgccgtgcggccgggcgcaaggccggtccagcagaaagtgcggcggcaggccccggaacgtcaagccttcatccgcgaggaggtggcgcgacttctggaggccggattcatccgtgtggtcatccatccggagtggctggcgaacccggtcgtcgttcccaaggcgaacggcaagcttcggatgtgcatcgactacaccgaccttaacaaggcatgtcctaaggacccttaccccctgccacgcatagatcagattgtcgactccaccacggggtgcgaccttttgtgttttctagatgcatactctggttatcatcagattcgcatggctagggaggatgaggaaaaaactgcattcattacccctataggaacttattgttatacgacaatgcctttcgggttaaagaatgcaggcatcgaggccaaccccgagaagatacgagctatagagcggatgcgcccccccagcaagcttagggatgtgcaatgcgtcaccggctgcatggccgccctaagtcggttcatatcgaggctgggagagaaggcgctacccctatttaagctcctcaaatgctccgggccgtttatctggacggaggaggctgagcgggccttcactcagttgaaggcgtacctcagttctcccccagtcctggtcgccccggagccagatgagccgttgctactctacctggcggcaaccccgcaggtggtcagcgcggcgttggttgtggagcgcgacgaggacaaccctcacctcgcacatccccaccctgtgtcgactcgacccgggagagagcagggaggagaggcccccgagccgaacggcggcccgaggcccccgacggccggagctggccctccgcctgcttgtccgacggtgccaggcgcccccgacccccaggatggccccggggccactgcgggaaggccgcgcctgtcgccctccgaccccgaggtcgtcggcatagaagccgagtgcgccccgcgcggcctctcggacgaagagcgccctggagatgcggcccctagcgaagaggatcggccccgccgaaaggtgcagcggcccgtctacttcgttagcgaggccctccgggacgctaagacccgataccctcaggcccagaagatgctttacgctgtcctgatggcttcgaggaagttgcgccattattttcaggtgcatcgggtcacggtggttacgtcttaccccctcggccaaatcttgcataaccgagaggatactggacgggtggtgaaatgggcaattgaactctttgagttcgatttgcactttgaaccacgccacgcgatcaagagccaggccctcgccgactttgtggcagagtggaccccggcccctgagcccatctccgtccccgagaccagctcgggcccctcgcagctgcctcacaccgcctactgggtgatgcagttcgacggctccctatctcttcagggcgccggtgcgggggtcacgttgacctcgccaaacggagacgtcctcagatacctggttcgcctcgactttcgggcgaccaataatatggcggagtacgagggactccttgcgggactcagggtggcagctggactggggatccgctgcctcctggtgttaggcgactcccagctggtcgttaaccaggtctgtaaggagtaccggtgctctgacccgcagatggacgcttacgtgcgccaggttcggcgtatggagcgccattttgatgggatagagctttggcatgtgcccaggcgggataacgcggtcgccgacgaactctcaaggctcgcttcctcgcgagcccagaccccaccgggcgcctttgaagaaaggcttgcccagccgtcggcgcgacccgaccccctaggggagacggacgcacctgaacggcccccaaggcccgtcggagtccaggcctcgggacccgaggggagcgttcccggctcccctagattgattgcttggatcactgagatccaggcatacctcacagataagactctacccgaggaccgcgaagggagtgaacgcgtccagcgcatctccaagcgctacgtgctggtggaagggaccctctatcggcgcgcggctaacggagtcctcctaaagtgcattcctcgggaacaaggcgtcgagcttcttgccgatatccatgaaggcgagtgcggagcccactccgcctcacgcaccttggttggcaaggcctttcgccagggtttctattggccgacggctctcaacgatgcggttgacctggtccggcggcgggccccgggcggtttcgagtatctgtatgttgctgtcgacaagttcactaagtggcccgaggcttacccggtcatcaagatcgataagcactccgcgcttaaattcatcaggggcatcactgctcggtttggggtgcctaatcgtatcattacggataacggcacccagttcactagtgaactcttcggtgactactgcgaagatatgggcatcaagctctgcttcgcctctcccgcccactccagaagcaatggccaagtggagcgcgccaacgcagaaatcctcaagggccccaaaaccaaaaccttcaacatcctcaagaagcacggcgactcgtggatcgaggagttgccagcggtgctctgggcgaaccgaaccacgccaagccgagcaaccggggaaacgcctttcttcctcgtctacggcgcggaggcggttctcccatccgagctcaccctgaggtcccctcgggccaccatgtactgcgaggctgatcaagatcagcttcgcagagatgacctcgactacttggaagagcgaaggcggcgcgcggccctccgagccgcacgctaccagcagagcctgcggcgctaccatcagcgccacgtccgggcccgatcactctgcgtcgacgacctcgtcctacgccgcgtccaaacgcgtgctggactgagcaagctctcaccaatgtgggagggtccgtatcgagtgatcggtgtcccccggccgggctccgttcggctggccacgggcgacggcacagagctgcctaatcagtggaacatcgaacaccttcgtcgcttctacccctag

SEQ ID NO: 44566 - DNA, 5106 bp, Oryza sativa
  Clone ID: PAT_MRT4530_47614C.1
atgcctccgacccaagaagatgtgcgtgaggggccggatgcccgcctcaatatcgagcgccggcgcaatgatcgccgtgctgcccacgcatcggagggcgcttcctcgtccggagcgccacttcggtccgggcacggaggccagccccccgtgtccccggttggcgttgccggctgtcgagcctttgtggcgagccttcggaacgtccgttggcccccaaggttctggcccaccatcaccgaaaaatacgacggaagcgtcaaccccgccgagtttctccagatctacacgactgggatcgaggccgccgggggtgacgacagggtcatggcgaatttcttccccatggccctgagaggacaggcgcggggttggctaatgaacttgccacccgcgtcggtccactcttgggaggatttgtgccagcagttcaccatgaacttccagggcacatatccgcgcccaggtgaagaagcggacttgcacgcggtacagcgaggggacgatgagtctcttcgctcgtacattcagcggttttgtcaagtccgcaacaccataccatgtatccctgcacacgcggtgatctacgcgttcagggggggcgtgcggcacaaccgcgtgctcgagaagatcgcctccaaggagccccagaccactgcggagctttttcagctcgcggaccgtgtggctcgcaaggaggaggcatggacctggaactccaccggttccggtgtggcagcttcagccgcccccggatccgccgctcggtcagggcggcgggacaggaggaggaagaagaggtcggcccattccgacgacgagggtcacgtcctcgccgtcgagggcgcttcgcgggccacccgaaaggggaggcctgcgagcgacaaaaagaaggaggccggcgctcccagcagggagcgcccgaccggcaagtggtgcaccgtgcacaacacctccctccacgacctcgcggactgccgcgcggtcaaaagtttggctgagcggacgaggaagtgggaggaggagaggaggcaggagcgccgtgagggcaaggccccagcggctccctctggcaaccggcgaagtgaggccaagcagaaggcccccgccgaggacattgacgatggcgacgatgacctagggttccaggagcctggggccaccatcgccaccgtcgatgggggagcatgcgctcacgtttctcgccggagcctcaaggccatgaagcgagagcttctggccgcggcccctacccatgaggcgatgcggcaggcgcggtggtcggaggttgccctcaccttcgaccagaccgaccacccgccgtgcgttgcccggggaggacagatcgcgatggtggtttcccccaccgtttgcaacgtgaagttggggcgtgtcctcatagacgggggagcagccctcaacatcctttcccccacagcctttgacgccatcaaggccccggggatggtgctccggccgtcccagccgattatcggtgtgacgccggggcacacttggccgctaggtcatatcgacctcccggtcaccttcggtggatccgccaacttccgcacggagcgggtgaacttcgatgtggcggacctcagtctgccctacaacgcggtcctggggaggcccgcgttggtgaagttcatggcggcggtccactacgcctacctccagatgaagatgccgggccccggtggccccatctctgtccatggcgacctcaaagtcgcgcttgcttgtatggagcagcgcgcggaccacctcgccgccgcgtccaagcccgagggtggcgacgagaggctcggcacctccgtccccgccgccccgaggcagcggatgatcacgtgcgacgaggtcccggtcaaggttgccctgggcgacggcccgtccaagaccacacgaatcggtggtcctacttttcaatgtactactcgaatttctttgggtagccaaataggacgtaatgttgaggcctatgttgatgacttggttgtgaaaacacgcaaccaagagaccttactctcggatctagcggaaactttcgaaagtctccgcaccgcctgcataaagctgaaccccgacaagtgcgtgttcggcgtgcctgcgggcaagcttctcgggttcttggtctctgcccgaggcattgaggccaaccccgagaaggtacgagctatagagcggatgcgcccccccagcaagcttagggatgtgcaatgtgtcactggctgtatgaccgccctaagtcgattcatatcgaggctgggagagaaggcgctacccctatttaagctcctcaaacgctccgggccgtttatctggacggaggaggctgaacgggccctcactcagttgaaggcgtacctcagttctcccccagtcctggtcgccccggagccagatgagccgttgctactttacctggcggcaaccccgcaggtggtcagcgcggcgttggtcgtggagcgtgacgaggacgaccctcgctccgcgcatccccaccctgtgtcaactcgacccgggagagagcagggaggagaggcccccgagccgaacggtggcccaaggcccccgacggccggagctggccctccgcccgcttgtccaaaggtgccaggcgcccccgacccccagtatggccacggggccactgcgggaaggccgcgcctgtcgccttctgaccccgaggtcgtcggcacagaagccgagtgcgccccgcgcggcctctcggagcgtgacgaggacgaccctcgctccgcgcatccccaccctgtgtcgactcgacccgggagagagcagggaggagaggcccccgagccgaacggtggcccaaggcccccgacgatcggagctggccctccgcccgcttgtccgacggtgccaggcgcccccgacccccaggatggccccggggccactgcgggaaggccgcgcctgtcgccctccgaccccgaggtcgtcggcacagaagctgagtgcgccccgcgaggcctctcggacgaaaagcgccctggagatgcggcccctagtgaagaagatcggccccgccgaaaggtgcagcggcccgtctacttcgttagcgaggccctccgggacgctaagacccgataccctcaggcccagaagatgctttacgctattatgatggcttcgaggaagttgcgccattattttcaggcgcatcgggtcacggtggttacgtcttaccccctcggccaaatcttgcataaccgagagggtactggacgggtggtgaaatgggcaatcgaactctctgagttcgatttgcgctttgaaccacgccacgcagtcaagagccaggccctcgccgactttgtggcagagtggaccccggcccctgagcccatctgcgtccccgaggccagctcgggcccctcgcagctgcctcacaccgcctattgggtgatgcagttcgacggttccctgtctcttcagggcgccggtgcgggggtcacgttgacctcgccgagcggagatgtcctcaaatacctggtccgcctcgactttcgggcaaccaacaatatggcagagtacgagggactccttgcgggactcagaatggcggctggactggggatccgccgcctcctggtgttaggcgactctcagttggtcgttaaccaggtctccaaggagtaccagtgctctgacccgcagatggatgcttacgtgcgccatcgagcccagaccccaccgggcgcctttgaagaaaggcttgcccagccgtcggcgcgacccgaccccctaggggagacggacgcgcctgaacggcccccgaggcccgtcggagtccaggcctcgggacccgaggggagcgctcccagctcccttagattgattgcttggatcgctgagatccaggcgtacctcgcagataagactctacccgaggaccgcgaagggagtgaacgcgtccagcgcatctccaagcgctacgtactggtggaagggaccctctatcagcgcgcggctaacgaagtcctcctgaagtgcattcctcgggaacaaggcgtcgagcttcttgccgatatccatgaaggcgagtgcggagcccactctgcctcacgcaccttggttggcaaggcctttcgccagggtttctattggccgacggctctcaacgatgcggtcgacctggtccggcagtgcagggcgtgccagttccacgccaagcaaacccatcagccggcccaggccctgcagacaatacctctttcatggccgtttgctgtctgggggctcgatatcctgggtccgtttagacgggccccgggcgggttcgagtatctgtatgtcgctatcgacaaattcactaagtggcccgaggcttatccggtcatcaagatcgataagcactccgcacttaaattcatcaagggcatcacagcccggtttggggtgcctaaccgtattattacggataacggcacccaattcactagtgaactcttcggtgactactgcgaagacatgggcatcaagctctgcttcgcctcccccgcccaccccagaagcaatggccaagtggagcgcgccaaagcggaaatcctcaagggcctcaaaaccaagaccttcaacatcctcaagaagcacggcgactcgtggatcgaggagttgccagcggtgctctgggcgaaccgaaccacgccaagccgagcaaccggggaaacgcctttcttcctcgtctacggcgcggaggcggttctcccatccgagctcaccctgaggtcccctcgggccaccatgtactgcgaggctgatcaagatcagcttcgcagagatgacctcgactacttggaagagcgaaggcggcgcgcggccctccgagccgcgcgctaccagcagagcctgcggcgctaccatcagcgccacgtccgggcccgatcactctgcgtcgacgacctcgtcctacgccgcgtccaaacgcgtgctggactgagcaagctctcaccaatgtgggagggtccgtatcgagtgatcggcgtcccccggccgggctccgttcggctggccacgggcgacggcacagagctgcctaacccgtggaacatcaaacaccttcgtcgtttctacccctag

SEQ ID NO: 44567 - DNA, 481 bp, Oryza sativa
  Clone ID: PAT_MRT4530_47615C.1
taacttgccttgctccaacgcaaataaatgcgagataggcaacctgattatctgatctttgaaataccacaggttgccatccaaaatataatagactctgtcagttctttgtctcttcttcttcttttctctttcttcttcctccttccttcttctgcttcttcttctcttccagccgagcaaacagagagaagggagaggaggggcgccgatgctccggtggatgaacggcctcgacgacagcggccacgcgtgttcccgagcgacgcgcacccggggaggtcggtggctggccgagagggagagatatatagccggaacggcggcggcaagggctcacctcgagccggcatggatgatggcggtggtggcttgacttagaggtggagggagaggggaaaggggaaaaacggactcgccggatggaggcgaagccggtggcgcgaggataggggaggtggagctacggatggggagatcg

SEQ ID NO: 44568 - DNA, 5712 bp, Oryza sativa
  Clone ID: PAT_MRT4530_47616C.1
atggccgaacgagcaaaagcgcacaacctctctccgagcgctagcggtgacgacagcgagcagaacccgcgtcgtcgagcttgtactccgccgcccccctctcgccgaagtcttaggcgggaggaggcgctcgagggggtcgaaagatccgcgacttcgccgcccatgagtgatggagaaggacggcgagacggggagcgtcgtctcctcgtctacggtgatggcagcacgccccagggcgcgctccaggctgcgggcgcgctcctgcgtcacccgcccgtcgtccctgatcaagagactccaactcgacgttggctagatgacgtggccaacttggtcatgacggcgcagcagcgtttaggcgccggcgggcggtcctccgccaccaaggccactggcgctgctactgccggctccgtgtcgtcgaggcggagggcgcggcgagcggcggccgttgcccgccgttcgtccgccattccctcgtcaatgcctccgacccaagaagatgtgcgtgaggggccggatgcccgcctcaatatcgagcgccggcgcaatgatcgccgtgctgcccacgcatcggagggcgcttcctcgtccggagcgccacttcggtccgggcacggaggccagccccccgtgtccccggttggcggtgccggctgtcgagactttgtggcgagccttcagaacgtccgttggcccccaaggttccggcccaccatcaccgaaaaatacgacggaagcgtcaaccccgccgagtttctccagatctacacgactgggatcgaggccgccgggggtgacgacagggtcatggcgaatttcttccccatggccctgagaggacaggcgcggggttggctaatgaacttgccacccgcgtcggtccactcttgggaggatttgtgccagcagttcaccatgaacttccagggcacatatccgcgcccaggtgaagaagcggacttgcacgcggtacagcgaggggacgatgagtctcttcgctcgtatattcagcggttttgtcaagtccgcaacaccataccatgtatccctgcacacgcggtgatctacgcgttcagggggggcgtgcggcacaaccgcatgctcgagaagatcgcctccaaggagccccagaccactgcggagctttttcagctcgcagaccgtgtggctcgcaaggaggaggcatggacctggaactccaccggttccggtgtggcagcttcagccgcccccggatctgccgctcggtcagggcggcgggacaggaggaggaagaagaggtcggcccattccgacgacgagggtcacgtcctcgccgtcgagggcgcttcgcgggccacccgaaaggggaggcctgcgagcgacaaaaagaaggaggccggcgctcccagcagggagcgcccgaccggcaagtggtgcaccgtgcacaacacctccctccacgacctcgcggactgccgcgcggtcaaaagtttggctgagcggacgaggaagtgggaggaggagaggaggcaggagcgccgtgagggcaaggccccagcggctccctctggcaaccggcgaagtgaggccaagcagaaggtccccgccgaggacattgacgatggcaacgatgacctaggggttccaggagcctggggccaccatcgccaccgtcgatggggagcatgcgctcacgtttctcgccggagcctcaaggccatgaagcgagagcttctggccgcggcccctacccatgaggcgatgcggcgtgcgtggtggtcggaggttgccctcaccttcgaccagaccgaccacccgccgtgcgttgcccggggaggacagatcgcgatggtggtttcccccaccgtttgcaacgtgaagttggggcgtgtccttatagacgggagagcagccctcaacatcctttcccccacagcctttgacgccatcaaggccccggggatggtgctccggccgtcccagccgattatcggtgtgacgccggggcacacttggccgctaggtcatatcgacctcccggtcaccttcggtggatccgccaacttccgcacggagcgggtgaacttcgatgtggcggacctcagtctgccctacaacgcggtcctggggaggcccgcgttggtgaagttcatggcggcggtccactacgcctacctccagatgaagatgccgggccccggtggccccatctctgtccatggcgacctcaaagtcgcgcttgcttgtatggagcagcgcgcggaccacctcgccgccgcgtccaagcccgagggtggcgacgagaggctcggcacctccgtccccgccgccccgaggcagcggatgatcacgtgcgacgaggtcccggaagacgcgctcgtctccttcctgcgggcaaacgctgacgtcttcgcatggagaccggcggacatgcccggggtccccagggaggtgattgagcaccgtctcgccgtacggccgggcgcaaggccggtccgtcagaaagtgcggtggcaggcctcggaacgtcaagccttcatccgcgaggaggtggcgcgacttctggaggccggattcatccgagaggttatccatccggagtggttggcgaacccggtcgtcgttcccaaggcgaatggcaaggttcgaatgtgcatcgactacaccgaccttaacaaggcatgtcctaaggacccttaccccctaccacgcatagatcagattgtcgactccaccgcggggtgcgaccttttgtgttttctagatgcatactctggttatcatcagatttgcatggctagggaggatgaggaaaaaactgcattcattacccccataggaacttattgttatacgacaatgcctttcgggttaaagaatgcaggtcctacttttcaacgtactactcgaatttctttgggtagccaaataggacgtaatgttgaggcctatgttgatgacttggttgtgaaaacacgcaaccaagagaccttactctcggatctagcggaaactttcgaaagtctccgcaccgcccgcataaagctgaaccccgacaagtgcgtgttcggtgtgcctgcgggcaagcttctcgggttcttggtctctgcccgaggcattgaggccaaccccgagaaggtacgagctatagagcggatgcgcccccccagcaagcttagggatgtgcaatgtgtcactggctgtatggccgccctaagtcgattcatatcgaggctgggagagaaagcgctacccctatttaagctcctcaaacgctccgggccgtttatctggacggaggaggctgaacgggccctcactcagttgaaggcgtacctcagttctcccccagtcctggtcgccccggagccagatgagccgttgctactttacctggcggcaaccccgcaggtggtcagcgcggcgttggtcgtggagcgtgacgaggacgaccctcgctccgcgcatccccaccctgtgtcgactcgacccgggagagagcagggaggagaggcccccgagccgaacggtggcccaaggcccccgacggccggagctggccctccgcccgcttgtccgaaggtgccaggcgcccccgacccccgggatggccacggggccactgcgggaaggccgcgcctgtcgccttctgaccccgaggtcgtcagcacagaagccgagtgcgccccgcgcggcctctcggagcgtgacgaggacgaccctcgctccgcgcatccccaccctgtgtcgactcgacccgggagagagcagggaggagaggcccccgagccgaacggtggcccaaggcccccgacgaccggagctggccctccgcccgcttgtccgacggtgccaggcgcccccgacccccaggatggccccggggccactgcgggaaggccgcgcctgtcgccctccgaccccgaggtcgtcggcacagaagccgagtgcgccccgcgaggcctctcggacgaagagcgccctggagatgcggcccctagtgaagaagatcggccccgccgaaaggtgcagcggcccgtctacttcgttagcgaggccctccgggacgctaagacccgataccctcaggcccagaagatgctttacgctattctgatggcttcgaggaagttgcgccattattttcaggcgcatcgggtcacggtggttacgtcttaccccctcggccaaatcttgtataaccgagagggtactggacgggtggtgaaatgggcaatcgaactctctgagttcgatttgcgctttgaaccacgccacgcagtcaagagccaggccctcgccgactttgtggcagagtggaccccggccgctgagcccatctccgtccccgaggccagctcgggcccctcgcagctgcctcacaccgcctattgggtgatgcagttcgacggctccctgtctcttcagggcgccggtgcgggggtcacgttgacctcgccgagcggagatgtcctcaaatacctggtccgcctcgactttcgggcaaccaacaatatggcagagtacgagggactccttgcgggactcagagtggcggctggactggggatccgccgcctcctggtgttaggcgactctcagttggtcgttaaccaggtctccaaggagtaccagtgctctgacccgcagatggatgcttacgtgcgccgtgtgcggcgtatggagcgccattttgacgggatagagcttcggcacgtgcccagacgggataacacggtcgccgacgaactctcaaggctcgcctcctcgcgagcccagaccccaccgggcgcctttgaagaaaggcttgcccagccgtcggcgcgacccgacctcctaggggagacggacgcgcctgaacggcccccgaggcccgtcggagtccaggcctcgggacccgaggggagcgatcccagctcccttagattgattgcttggatcgctgagatccaggcgtacctcgcagataagactctacccgaggaccgcgaagggagtgaacgcgtccagcgcatctccaagcgctacgtactggtggaagggaccctctatcggcgcgcggctaacggagtcctcctaaagtgcattcctcgggaacaaggcgtcgagcttcttgccgatatccatgaaggcgagtgcggagcccactctgcctcacgcaccttggttggcaaggcctttcgccagggtttctattggccgacggctctcaacgatgcggtcgacctggtccggcggtgcagggcgtgccagttccacgccaagcaaacccatcagccggcccaggccctacagacaatacctctttcatggccgtttgctgtccgggggctcgatatcctgggtccgtttagatgggccccgggcgggttcgagtatctgtatgtcgctatcgacaagttcactaagtggcccgaggcttatccggtcatcaagatcgataagcactccgcacttaaattcatcaagggcatcacagcccggtttggggtgcctaaccgtattattacggataacggcacccaattcactagtgaactcttcggtgactactgcgaagacatgggcatcaagctctgcttcgcctcccctgcccaccccagaagcaatggccaagtggagcgcgccaacgcggaaatcctcaagggcctcaaaaccaagaccttcaacatcctcaagaagcacggcgactcgtggatcgaggagttgccagcggtgctctag

SEQ ID NO: 44569 - DNA, 231 bp, Oryza sativa
  Clone ID: PAT_MRT4530_47617C.1
atgttgttgtggtctcatcagtgcgagagcaagctcgaccatttcctaggcaccggtggcgagggcaggcgtgatggagttgggtcggccggggtgtccggttgtccagctgtcggattcaccgcgacgcacaagggggctgcctacctccgggagctgaagatcttcccagttgaagttgtcttgttgaagttggtttcgtcgctgccgtcaaggatgcctgtggagtag

SEQ ID NO: 44570 - DNA, 4791 bp, Oryza sativa
  Clone ID: PAT_MRT4530_47618C.1
atggccgaacgagcaaaagcgcacaacctctctccgagcgctagcggtgacgacagcgagcagaacccgcgtcgtcgagcttgtactccgccgcccccctctcgccgaagtcttaggcgggaggaggcgctcgagggggtcgaaagatccgcgacttcgccgcccatgagtgatggagaaggacggcgagacggggagcgtcgtctcctcgtctacggtgatggcagcacgccccagggcgcgctccaggctgcgggcgcgctcctgcgtcacccgcccgtcgtccctgatcaagagactccaactcgacgttggctagatgacgtggccaacttggtcatgacggcgcagcagcgtttaggcgccggcgggcggtcctccgccaccaaggccactggcgctgctactgccggctccgtgtcgtcgaggcggagggcgcggcgagcggcggccgttgcccgccgttcgtccgccattccctcgtcaatgcctccgacccaagaagatgtgcgtgaggggccggatgcccgcctcaatatcgagcgccggcgcaatgatcgccgtgctgcccacgcatcggagggcgcttcctcgtccggagcgccacttcggtccgggcacggaggccagccccccgtgtccccggttggcggtgccggctgtcgagactttgtggcgagccttcagaacgtccgttggcccccaaggttccggcccaccatcaccgaaaaatacgacggaagcgtcaaccccgccgagtttctccagatctacacgactgggatcgaggccgccgggggtgacgacagggtcatggcgaatttcttccccatggccctgagaggacaggcgcggggttggctaatgaacttgccacccgcgtcggtccactcttgggaggatttgtgccagcagttcaccatgaacttccagggcacatatccgcgcccaggtgaagaagcggacttgcacgcggtacagcgaggggacgatgagtctcttcgctcgtatattcagcggttttgtcaagtccgcaacaccataccatgtatccctgcacacgcggtgatctacgcgttcagggggggcgtgcggcacaaccgcatgctcgagaagatcgcctccaaggagccccagaccactgcggagctttttcagctcgcagaccgtgtggctcgcaaggaggaggcatggacctggaactccaccggttccggtgtggcagcttcagccgcccccggatctgccgctcggtcagggcggcgggacaggaggaggaagaagaggtcggcccattccgacgacgagggtcacgtcctcgccgtcgagggcgcttcgcgggccacccgaaaggggaggcctgcgagcgacaaaaagaaggaggccggcgctcccagcagggagcgcccgaccggcaagtggtgcaccgtgcacaacacctccctccacgacctcgcggactgccgcgcggtcaaaagtttggctgagcggacgaggaagtgggaggaggagaggaggcaggagcgccgtgagggcaaggccccagcggctccctctggcaaccggcgaagagcctggggccaccatcgccaccgtcgatggggagcatgcgctcacgtttctcgccggagcctcaaggccatgaagcgagagcttctggccgcggcccctacccatgaggcgatgcggcgtgcgtggtggtcggaggttgccctcaccttcgaccagaccgaccacccgccgtgcgttgcccggggaggacagatcgcgatggtggtttcccccaccgtttgcaacgtgaagttggggcgtgtccttatagacgggagagcagccctcaacatcctttcccccacagcctttgacgccatcaaggccccggggatggtgctccggccgtcccagccgattatcggtgtgacgccggggcacacttggccgctaggtcatatcgacctcccggtcaccttcggtggatccgccaacttccgcacggagcgggtgaacttcgatgtggcggacctcagtctgccctacaacgcggtcctggggaggcccgcgttggtgaagttcatggcggcggtccactacgcctacctccagatgaagatgccgggccccggtggccccatctctgtccatggcgacctcaaagtcgcgcttgcttgtatggagcagcgcgcggaccacctcgccgccgcgtccaagcccgagggtggcgacgagaggctcggcacctccgtccccgccgccccgaggcagcggatgatcacgtgcgacgaggtcccggtcaaggaggttgccctgggcgacggcccgtccaagaccacacgaatcggtggtcctacttttcaacgtactactcgaatttctttgggtagccaaataggacgtaatgttgaggcctatgttgatgacttggttgtgaaaacacgcaaccaagagaccttactctcggatctagcggaaactttcgaaagtctccgcaccgcccgcataaagctgaaccccgacaagtgcgtgttcggtgtgcctgcgggcaagcttctcgggttcttggtctctgcccgaggcattgaggccaaccccgagaaggtacgagctatagagcggatgcgcccccccagcaagcttagggatgtgcaatgtgtcactggctgtatggccgccctaagtcgattcatatcgaggctgggagagaaagcgctacccctatttaagctcctcaaacgctccgggccgtttatctggacggaggaggctgaacgggccctcactcagttgaaggcgtacctcagttctcccccagtcctggtcgccccggagccagatgagccgttgctactttacctggcggcaaccccgcaggtggtcagcgcggcgttggtcgtggagcgtgacgaggacgaccctcgctccgcgcatccccaccctgtgtcgactcgacccgggagagagcagggaggagaggcccccgagccgaacggtggcccaaggcccccgacgaccggagctggccctccgcccgcttgtccgacggtgccaggcgcccccgacccccaggatggccccggggccactgcgggaaggccgcgcctgtcgccctccgaccccgaggtcgtcggcacagaagccgagtgcgccccgcgaggcctctcggacgaagagcgccctggagatgcggcccctagtgaagaagatcggccccgccgaaaggcgcatcgggtcacggtggttacgtcttaccccctcggccaaatcttgtataaccgagagggtactggacgggtggtgaaatgggcaatcgaactctctgagttcgatttgcgctttgaaccacgccacgcagtcaagagccaggccctcgccgactttgtggcagagtggaccccggccgctgagcccatctccgtccccgaggccagctcgggcccctcgcagctgcctcacaccgcctattgggtgatgcagttcgacggctccctgtctcttcagggcgccggtgcgggggtcacgttgacctcgccgagcggagatgtcctcaaatacctggtccgcctcgactttcgggcaaccaacaatatggcagagtacgagggactccttgcgggactcagagtggcggctggactggggatccgccgcctcctggtgttaggcgactctcagttggtcgttaaccaggtctccaaggagtaccagtgctctgacccgcagatggatgcttacgtgcgccgtgtgcggcgtatggagcgccattttgacgggatagagcttcggcacgtgcccagacgggataacacggtcgccgacgaactctcaaggctcgcctcctcgcgagcccagaccccaccgggcgcctttgaagaaaggcttgcccagccgtcggcgcgacccgacctcctaggggagacggacgcgcctgaacggcccccgaggcccgtcggagtccaggcctcgggacccgaggggagcgatcccagctcccttagattgattgcttggatcgctgagatccaggcgtacctcgcagataagactctacccgaggaccgcgaagggagtgaacgcgtccagcgcatctccaagcgctacgtactggtggaagggaccctctatcggcgcgcggctaacggagtcctcctaaagtgcattcctcgggaacaaggcgtcgagcttcttgccgatatccatgaaggcgagtgcggagcccactctgcctcacgcaccttggttggcaaggcctttcgccagggtttctattggccgacggctctcaacgatgcggtcgacctggtccggcggtgcagggcgtgccagttccacgccaagcaaacccatcagccggcccaggccctacagacaatacctctttcatggccgtttgctgtccgggggctcgatatcctgggtccgtttagatgggccccgggcgggttcgagtatctgtatgtcgctatcgacaagttcactaagtggcccgaggcttatccggtcatcaagatcgataagcactccgcacttaaattcatcaagggcatcacagcccggtttggggtgcctaaccgtattattacggataacggcacccaattcactagtgaactcttcggtgactactgcgaagacatgggcatcaagctctgcttcgcctcccctgcccaccccagaagcaatggccaagtggagcgcgccaacgcggaaatcctcaagggcctcaaaaccaagaccttcaacatcctcaagaagcacggcgactcgtggatcgaggagttgccagcggtgctctag

SEQ ID NO: 44571 - DNA, 1086 bp, Oryza sativa
  Clone ID: PAT_MRT4530_47619C.1
ttttttttttttttttttttatctggcaatgacccattttccatagacacactgagccgaagatggctgccaccaccttcagctcctctccctccaatttttactactgccaaactaagaggaggcgtcaccagatcttactctccatacacgcagctcaccttctgctcgaggcatcacttcatcattcatgatactgagttttgagtatgaacagcgaagttgcataccacaaggagccataaaacacgatgaagagcaggacagattcatgccttataaaccttgcagttgcagcgctttcatttctctacctttctctgagttcctccgatatacagaagtggctgctctatgtgctctttattctcttcagatgatttataaaaagattcatacagcagaagggaacccggtcaggactcaggagtcactcctgctaggcttgtttgaaactggaataaccgtctctgaggatggtatccaatcatttgttgcagggttgctcatgcagcggataatgctgtcagatgagtaggcaacggttgtcacgttgaaggagctaccattgggtctttccactttgataaaccctgtaccagtcgtgtggtgttgcttgtcgatgcaattgagcccgttgtagtattgcgtctccacatactcctccccgttcacatccccaccgtccagcaccaacttctggggtttggcctcgaggtcgcggagcctccgaagctccggcaggtcggcgtcggcgtcggcctccgccccaccctccccggcgtccgacgggtcgctccgcggcggcttggaagggcgcctgggggccatgctgtcgaagtagccccgcacctcggcctccacccgcgccgcctcctccggcggcaggtgcgggtcgctgcgcgccggccgcgtcgtcgccattcgtgtgatattgtactgaactgccggctttggttttaagggtggattttggaacatggggcgattaatcgatagttaacattaatatagtaaatattctactaagataagtaggaaaggtggcgatgccgtgaatgtggatcccggccgggcagcccgggg

SEQ ID NO: 44572 - DNA, 376 bp, Oryza sativa
  unsure (1)..(376): unsure at all n locations
  Clone ID: PAT_MRT4530_4761C.1
aattcttttttgtttggtatgaanncagagatactgattgcttggtgagggtgctatatatatggcagaaacctcatggtcagaaacaacagtttaaaacgggtacatctgcctttagctaagctcacaaaacatcaaaaatttggcctatatgccgatgatagacagaagcattgtttacttacattgtgttaggcgcaaccctccctctgtctacttcactaattaccttatcaataagaaccttaaagatggactttacaatggtccaaacaattccattgtcgttcactgtaggaggctttttcactttttcatgccttgcattgcatccttttgctagccagccatcttcctttttagagcaccttatcat

SEQ ID NO: 44573 - DNA, 497 bp, Oryza sativa
  Clone ID: PAT_MRT4530_47620C.1
tgatatgtttgatggggaccatgcaaaaaatctggaggaaatgaatgtatttgagcgagagaggtaagtacaggtatgaggtacggggaccctgagagggtggcaccaagtattgttgacacggatggtaacctacaaatataaggtagatgtgatgattttttactgattaggttagaaatataataggagaactttgtgctgatggggatttataaaggtatgaatttatctgcaatgattatttgctttgagcaatgttccgttctattgttagatcattcgatattttttatgtatatattttttttattaaaaaattattgtcttttttatttttattttatacttttatattgttaatttactatatttttttctatttttatcatttcttttacatttctttattcttctacttttccatttttttttatttccttattcttacttatatttatatcttctttcttttttttctttttttttattcatta

SEQ ID NO: 44574 - DNA, 525 bp, Oryza sativa
  Clone ID: PAT_MRT4530_47621C.1
atggctggcttcgccctgcaacaggaaggggatcaaacattaaggcttatgccgttgtccagactcctgtcggatcggctgccgcggagcagcctgctctatgcctcgcggccgcagccaccgtgccccgttgtccagtcggccgccctggagcagcgccgctcccgccggctgccggggtctccatgcctcacggccgtgctgctgcaggcgccccgccctcctgccggccaccgggctcgacgctctcctaggcggcgggcgctggcttggccctggagttctgtactggttcctcaatcctctgcctattacttgcgtggattcaggggaggtgaaggggtgggggagatcattggcactaggagatatttgatgagagattgggcgcgccacgagagggattcggcattcggcgcggtgccaagatttcgcgcgtcaatgaaaattggcgcgggtaaattgccgccaggaggtggatttggcgccaccgatacagaagggacatttggtttttcagaataa

SEQ ID NO: 44575 - DNA, 889 bp, Oryza sativa
  unsure (1)..(889): unsure at all n locations
  Clone ID: PAT_MRT4530_47622C.1
gtcnnttgacaccgnatgtnntacaagcnnncantgnaannangcnannngtcnngtgacantnntcacnctntcatgacntgntcntncttnnntgtancncnctaattnnccnacnnacnaaaaanttnggnaantcnangcnncacgtgttggtgtnagnnnagnctnagtggtnccacngggntganggnantttggacgaggnntgaagggcaagggcnttgcagcttagngcgtactctngagtgtntttnangctggnnggcaccgacctntttnattcagtggnttttgttggtcaatgtttgcgtctatgtngtgcctacagancctactgaannaccaantttntgaaagaatgatgaatcaactctnaggttngaagaactnnttgtnagaaaaaantncanaantnanaacctcgngggggngcccggtacccanttcgacccttagtgggtcgtttttncatttnactgngccgtnggttncaacaangtcgnnactgggtaaaaaccctgggngttncccnaccttaaattcgncttngnagcaccatacncctttttngcccagttngngtnntagccnctgtngggncncgataccggatcggncctttnccacacngtttnacgcccgnccttctctttgtgnggnnttnggcanngnttgttaanggccgttgtnatcatntttggtttanaaacttccggcgttnaaacattttctctgttnaancattntggngnccnntctttntaanccctnnganggngccngnntactnnaggncattnacttccncttnntnnnngtnnnacanggncntttngnccccgngangttncggggtnttaagntgtatgtttccccngtttngntc

SEQ ID NO: 44576 - DNA, 153 bp, Oryza sativa
  unsure (1)..(153): unsure at all n locations
  Clone ID: PAT_MRT4530_47623C.1
ggacaatgtacatgaaggtcaagggtaacatgttcaagaacaagcntgttcttatggaaagtatccacaagtntaaggctgagaaggcaagnnagaagacactctctgaccagtttnaggctaagcttgccaagagcaaggcaagccgtgaga

SEQ ID NO: 44577 - DNA, 1994 bp, Oryza sativa
  Clone ID: PAT_MRT4530_47624C.1
atgggttgctgcggctcctcgctgcgggtggggtcccacgcgccggagaagccgccccgccgcgcccgccccccgccgccgccgccgcagccacaccacccgcgccgcccgtccttcaccctcaacgcgcaccaggcggccgcctcctcctccgccgcctccgccgctcccgccccggcgttcgcggagttctcgctggcggagctccgggaggcgacgggcgggttcgcggcggcgaacatcgtgtcggagagcggcgagaaggcgcccaacctcgtctacagggggcggctgcagggggcgggaggcggcggccgcgccatcgccgtgaagaagttcggcaagctggcatggcccgaccccaagcagttcgcggaggaggcgagaggggtggggaagctgcggcaccggaggatggccaacctcatcggctactgctgcgacggcgacgagcggctcctcgtcgccgagttcatgcccaacgacaccctcgccaagcacctcttccactgggaaaacaaggctattgaatgggctatgcgcctcagagttgcatacaacattgctgaagcattggaatattgtagcaatgaggaaaggcctttatatcacgacctaaatgcatacagagtactctttgatgagaatggtgatcctcgtctatcatgctttggtttgatgaaaaacagcagggatgggaaaagttatagtacaaacctggcatatacacctccagaatatctgagaaatggcagggtcacactagaaagtgttgtattcagttttggcacaatactcatcgatcttctcagtggaaagcgcattcctcctacccttgcacttgacatgataagaagcagaagcatccaagcaataatggagacaaatttagagggaaagtactctatagaggaggctactactctggtggatcttgcttcaaaatgcttacagtatgaaccaagagataggcctgatattaaaaagttggtttccattcttcagcctttgcaaacaaaatcagaggtaccttcttatgtgatgcttggagttccaaagcctgaagaagtaccaaaggcgcctcccgccccacagcacccactttctcccatgggagaggcctgttccaggatggaccttactgccatccatcagatcctagtttcaacacattacagagatgatgaagggactaatgagctatctttccaagaatggactcaacagatgagagatatgttggatgctaggaaacgtggtgattttgcatttcgagacaaaaatttcaagcaagccatagattgttacactcagtttgttgatgtggggacaatggtgtcgccaactgtatatgccagacggagcttgtgccaccttatgtgtgaccaacctgatgctgcactcagggacgcaatgcaagcacagtgtgtgtatcccgattggcccacagctttctacatgcaggcagtggcgctctcaaagctgaacatgcagagtgactctttggacatgttgaacgaggcatcacagctagaagagaagaggcaaaagagcataaaaggtccatgaagaacttgtttaggctcagagaagcggcgttccagaagctggcacttatctgtagtatattgcggggttaggagttagaagacctatttggagaagatgtttaccggcgtgtcgtatgattaaaaaggaaaacccatttggtttggcttcctacgataggagatgcatttttttggacccatgtatataacatctgttgaatagttagagcatgggagttcatttgtggtggctaaagagtgttgctggttgttcacaagggtccttgtaggtaaagttaataaaacatgtcctatgtacagaaatatttgtttggaagtacaccaatcccatataaatacatatttgtgtgcatcgcaaaaaaaaaaaaaagcaaaaaaaaaactcgaggggggaaaaaaaaaaaaaaaaaaaaaaaaaaaaaa

SEQ ID NO: 44578 - DNA, 2498 bp, Oryza sativa
  Clone ID: PAT_MRT4530_47625C.1
tcaggtcttagcggcccggctgcagcagtggcgtggctcggcccggcggcggcaacagcagcgcagcggcgagcggcggcagcaacagcggcgcacgcgcagcccggcggcggcagcagccgcgatggcagcagcagcggcacacggcgcggcgagcagcgcaagcagcaggagcagcggagtgagcgacgtggcggcagcaatggtggtggagcaggcggcgtaggggtagaagatgtggaagagagagatgtagaagatgaggacattttcgtccctgaaattaggccccatcgggtgggctggggacggggtcgttccaccactccccggcccgtatccccatggggcccaagatatatcagcccatgagcaaatccctagggtgtcagtccattcgatccctaattccccattcctctcttttctctgaatagaagtccgattggtgaggcgaggcgacgccagggagccagcgaggcagcgacgtgcctccaggccgcgcgccgccgtcgccgcctcgaagctccctgcgccgccgtcgtaggttagtagcgtgccgctgccgctgccgtgtgtgtggagccgccgtcgcatgtgatgtgtactctgttgaactccaaaacatgtgagcttgttatgtactgcatgtgatgtgttgctatgatgctatgcatgcaccgatgtactgcttaagtttatgtgatgaacttgttaagtttaatgtttgttggagtaaaaaaaaaaaaaaaaaaaaaaaaaaaaaaaaaaaaaaaaaatttcatgaaagagcccgcgcaggtgaggacggcgcggggcggcgcggcggatggggtggaggtgggggtggaggaggaggaggagccgccgcgatcggcgacggtgaagcaggaggaggcgaacgcggtgctcggggcggaggggtcccgcccgttcgccatgcgggagctcaaggaggaccacgaggtcgcggccgggagcggcgtgaaggcggcgtctggggagaggaacgggatcggatcggcggatgcccagggttcgtcgtacagccaagagagtatgcagcagttttcatcccatcatgatgttgcaatggacttaataaatagtgtcactggagttgacgaggaaggccgttctcgccagaggattctttcttttgctgccaaaagatacataagcgcaatagaaagaaatcatgatgaccctgatgcatattataattgggcccttgttctccaggagagtgcagacaatgtagatccaaattctagttcgtccaaagatgcattgcttgaggaggcttgcaaaaagtatgctgaagctacccgtctttgcccaactctttatgatgcatattataactgggctattgctattgctgatcgggctaaaatgcgaggtcgtactaaagaagctgaagagctctggaagcaggcaatactgaattatgagaaggctgtccagctaaattggaatagtccgcaggctcttaataattggggtcttggactacagctaggagtatgaatttgtattgcaggaactgagtgcaattgttccggctcgtgagaagcaaaccatcataaaaacagctataagtaagtttcgagctgcaattcaactgcaatttgatttccatcgggcaatatacaatcttgggacagtcttgtatggtttagctgaggatacaatgaggtctgggaagccaggtgtgtccgctagcgagttttacagtcagtctgctatctatgttgcagctgcccatgcactgaagccaaattactcggtctaccgcagtgctttgcgattagtccgttcaatgctgcctttgccatatctcaaagtgggatatttgattgctcctccagaaaatagtgccattgcaccacacaaagaatgggagaggtcacagtttgttttgaaccatgaagaactccagcaggtcaatgcctctgaccagcctccatcacaatcacctgggcatgtggacagcggcagaaagcttttcaggatagttgttgcagacattgtttctgtgtcagcatgcgctgatctaaccctgccacccggtgctggccttcgcatcgatactattcatggccctagattcttggttgctgataactgggagaccattgacagttggctagacgctatacgcctagtctacaccatatttgcaagagggaggagtgatgtccttgctgggattattactggctgatggctcgctgctagtgaaaaactgccaacaagtataggccaagagactgtaggagtatgtcccggaatcagatagaagtatcatagaactcatggttttagtaggcgtaagagcagatgttatttgtaacccatttatggactggtaggtcataggccaattttcctttgtactgtggcgttgtgtcgtcatggtacatatgatgtgatataagaaataaaaaccgtaatatcctctctagcctgtgaataaagatgcaacggcttgtggc

SEQ ID NO: 44579 - DNA, 229 bp, Oryza sativa
  Clone ID: PAT_MRT4530_47626C.1
cggacgcgtggggcataagcaacacacgggattaactcatcactcacttagataattaaatcgtcgagcatgtccgacaagtgcggcaactgcgactgtgctgacaagagccagagcgtgaagacaggcaccagctatggcgtagggatacttgaagccgacatgagccacttctaggaggacgtcgacaacaaggagaccggcgggcgcaagtactacaccatccagt

SEQ ID NO: 44580 - DNA, 381 bp, Oryza sativa
  Clone ID: PAT_MRT4530_47627C.1
gggcccatcacccctttgaagattagttacggatttgggttaacttggtgagcaacaaatgggcttaatatttcactgaagttctaaaggacaagggaataaatttaaaagggccacgttttagactaaacccaaaaaaaatggttggaaaagctaacacaatatgggggaaatatttttttcctgctccaaccattttttggtgccttgaagaagactttggtttacaccctggtggatgccacgtttttgctgaaaaggggaaggatggaaacaacttggaaaggggtggcgcccaagaaagctagggcccccgctattgggtaaaaaatgaaacccctttttgggggttaaattggggggcggggaccagttttacgg

SEQ ID NO: 44581 - DNA, 399 bp, Oryza sativa
  unsure (1)..(399): unsure at all n locations
  Clone ID: PAT_MRT4530_47628C.1
aagcgatgctgcgccaaangtnctgttgttaatcatatgtggtcatgttttctgaaaccagtgncattatggngcaacttaccggtgatgacagtntatgnccagtgtccaattgccgagtccgnctaaattcaacttcctnattcttcccgcggcaccattgcatntnctatgcgtagntccaacctgtgagtttactgatctnatgaattccnnntaaagacatggtgcaagggaaggcaacctagnattgcattcgtnctaaatgnatcttncccaagtgnagnannctgccccggnntattcttntctcnttncctaaaactgggattttaacccntatgtgtnntgnccacaaataanaatnnngccatcctgcacaacanttaaccggggaan

SEQ ID NO: 44582 - DNA, 414 bp, Oryza sativa
  Clone ID: PAT_MRT4530_47629C.1
gtcggcgtcggcggagagagggagagggagagcgagtcttttgtgcgggtggttggggcgtgggcggtggcgtgttcaaggcggggagctacgtttcctgccggaggagatggggggttccaaggcggaggagaagcccgccggcggcggcggcggcggcgaggattggtggtgctaccagttcggcaacaaggacgcattgattgtgaagtcctctaagaaatcacccctcgcattgagaatggttgttttcgctatgactatgatctgcgggatatttatctgcacgatgtgtatgaagcaactaggaagtgatagcttgtctagaatagtgaagaacgaggttgcagaacagctatgcaataagtctgcaatcctgcattaaaagggtcactttgtgcattacccacaacc

SEQ ID NO: 44583 - DNA, 832 bp, Oryza sativa
  Clone ID: PAT_MRT4530_4762C.1
taaaaaaaagtttattgcgtcagccgaggggagggggcgcgcggaccgggtccacgggggtgggacccacgaggcagcctcacggtcgacggtggaccgggtgcacccgggctcacaccggccggcgccgtgggtcccacgcgtcagccgcacctaagggtgcgggcggctgatggccgggccccacgcggcagccactcggcgcgcccgagggcggcctagccggcgcagccggcgggaggcggcgcgcctgcgccccgatggtcgccgccggcgaccactagcgcggcggagcggcggccgagagaggggaagggaagggggaaaagaagcggcggtccccggctcactctaggtcgacggcgacgacgaaaaaggcggccggagcggaggaaggcggcggtgcggctcgggtcgacggggtcgacggcgctccaccggtcgacgagcgaaacggaggggtggacgaggtcggcgagagccgaagaaggcggcgccgaggtgggaggtggtccagggcgacgacggcggcggaccggtgctcggcggcgacggcggagagagagagcgacggcgcgagctcgattccggcgaggaggaagggcggcgagaggcggaaacgaacggaggagggcgcgggcgaggcggcgggagcggcgggaggaaggggatgacgggtgggccccacccgtcagcgagggtggcgggcgggcccgcccgtcagcggcgctcgtgcggggagaggccggatgggccgcggggagaggagagggagggggagggagatgggccgagccggcccaagagagagagggaggggaaggggactttt

SEQ ID NO: 44584 - DNA, 2616 bp, Oryza sativa
  Clone ID: PAT_MRT4530_47630C.1
atgtccacctcccccaccgccgccaaccacctcctcgccctcctccgccgcaacgccgcctcccccgccgtcgcgctccgcctcttcctccacctcacctccgccgcgtccccgccgtcgccgcactccacctcattcctcgcccgcatcctcgccgccgccgccgcccacgacgccgccctcctcccgagcctcctccgccacctcctctccctcccggaccccgcgccgcacctcctcgcgctcctctcctcctcatcgtcgccgctgcgcctcccgctcgggttctccctctccgcgttccgctccctctgcgcgctcccctccgcgccgccgccgcccacccccgtctacaaccgcctgctcctcgccgcgctccaggaggcccgattcgacctcgtcgagtcgctctacaaggatctcctcttgtccggcgccgccccggacgtcttcacgcgcaacatcctgctccaggcgctctgtgccgctggccggatggagctcgcccgcagggtgttcgacgcaatgccggaaaggaacgagttcagcttcgggatcctggcgcgtgggtactgccgtgcggggaggagtatggacgcgcttggggtgctcgattcaatgccaacgatgaatttggtggtatgcaacacagtagtcgcggggttctgccgcgagggccaggtggatgaggctgagaggctagttgagcgcatgagagatgagggtcttgctccaaatgtggtcacattcaatgcgaggatctctgcactctgcaaagctgggcgggtgctagatgcatacaggatattcaacgacatgcaggaaaaatgggagagaggtctgccgaggcctgaccaggtgacgtttgacgtgatgctgagtgggttctgtgaggctggtatggtggatgaagcaagagtcctggtggatattatgaggtgcggtggtttcttgaggcgggttgagagttacaaccgttggttgtcagggctggtgaggaatggaatggttggggaagcacaggagctgctgagggagatggcgcatgagggtgttcaacctaatagctacacctacaatattattgtggatgggttgtgcaaggagggcaaagcgtttgatgtgaggaaagtggaggattttgtgaagagtggtgtcatgacaccagatgttgtgacctatactagtttgctccacgcttattgctcagagggaaatgctgctgcagccaataggattcttgatgagatggcacagaaggggtgtgccccgaattcatttacttacaatgttctgctgcaaagtttgtggaaagctggtaggattacagaggcagaacgattgttagagaggatgagtgagaaaggatacagcttggatacagcaagctgcaatatcattattgatggactatgtagaaacaacaaattggatatggccatggacattgtcgatggcatgtggaacgaaggtagtttggctcttggcagattaggttattcattcctaagtttacttactgattcttccagcagcaaaagatgtcttcctgaccgaatcacttattctacactggtgagtgcattgtgcaaagagggcaggtttgatgaagcaaagaagaaattgcttgagatgataggcaaagatatctctcctgattcggttctatatgatacctttattcatgggtattgcaagcatgggaagacttctctggctgttaaggtcctgagggacatggaaaagaaaggttgcaagccaagcacaaggacatacaacttgttgatatggggatttcgggaaaaacacaattcagatgaaatccttaaattgattagtgaaatgaaggggaaggggatttgtcccaatgtcatgacctataatagcctgataaagtcattttgtgaacggggaatggtgaacaaggccatgcctcttttagatgaaatgttacagaatgaaattgttcctaatataacttcttttgagttgttgattaaggctttctgcaaaacttcagatttctctgcagctcagagagtatttgatgcttctctgagtacatgtggtcagaaggaagtgctctatagtttaatgtgcacccagttatctacttatggtagatggttggaagccatgaatattctagaaacagtgcttgaattaaggatctctatccatagattcccatataagcagattattgagggactctgcaaagttgatgaggtggatcatggacataggttactcaagctgttaatggttaaaggatattcatttgatccagcagcattcatgccagtgattgatgcattgagtgaaaggggaaagaagcaacatgttgatatgctctcacaaaaaatgatggaaatggcagagcgtgataatggtcttgcagctccttctggcgaatttaagcctagaagtcagaagcatggacaggacaagcatgctgaaagtgattggcatgctcttttgcacagagatgacagtgctcgcacagtcatgaaaatcaccaagagagtgaagacaggatggggtcaaagaggcaacgtttatgagaataagcagcagcagaatgatgacatttatgtactagaaaacactggctga

SEQ ID NO: 44585 - DNA, 1239 bp, Oryza sativa
  Clone ID: PAT_MRT4530_47631C.1
atggggggttccaaggcggaggagaagcccgccggcggcggcggcggcggcgaggattggtggtgctaccagttcggcaacaagaaaaaggggatttttgattctttggcttgtgatccattattgattaaggaatatgatgttgggcaggacgcattgattgtgaagtcctctaagaaatcacccctcgcattgagaatggttgttttcgctatgactatgatctgcgggatatttatctgcacgatgtgtatgaagcaactaggaagtgatagcttgtctagaatagtgaagatcgaggttgcagaacagctatgcaataagtctgcaatcctgcattcagaggttcactttgtgcattacccacaaccgataacttatagcaggagtgaatgcaagtgtacacctgtccggttcttcgcgattatctcgtcacaacgttctggaagtggctggtttgaaactcttcttaacagccatatgaatgttagctccaatggtgaaattttctcttcaaaagaaaggagaagtaacatttcatctataacaaagacactggataaggtgtacaatttggattggaatagtagtgcttctaagaatgaatgcactgctgctgttggcttaaaatggatgcttaatcagggtcttgtggcaaatcatgctgatatagctgactacttcaatcgaagaggagtctctgcaatatttctcttcaggtggaacctcctccgtcagttggtatctcaacttgcgaataatcatgacagatacctcaagcagttgaatggaacgcacaaggcccatgttcacacggcatatgagaaacttcttgatgtcctggatttcctcaaagtgccaaggagcaaactagtcagccgacacgtgaagatacacaccaaaccactttcggagcaaattgaaaattgggatgaagtctacaatgctctaaatggcactcagtatgagagcttcttgaatgctgactacagaatatgacagtgtgccttcacactccctgtatagatatatcctttttctggttacatttctttttaaaatagctggccttgatgtgcctggcgaaaattttgatggtgcattgccccggttgcccacgagtgttctttgataggttcactaattgtcatagcagggttttgttttttgttttatgttttctggaactgatatgctcaggattctaatcttgtgtattgcagtgcttattcttctccc

SEQ ID NO: 44586 - DNA, 647 bp, Oryza sativa
  Clone ID: PAT_MRT4530_47632C.1
ccacgcgtccggggaccctgaccctgcgcctgcgactgagaaggcggctgctcagctcaagacctctaccaggccatggccggcggactaccatacagctggaccgacgccctgggtgtgttaaacgatcgaacctatgcgcgatcggccacgtcatggacaaccagctacctactgctggggctgctgcacctactcgtgctgccgatgctggaccgacatgctgaggcggcaagggaccgaaagatggctatgtgatcgaggccgatttcactgacaggcattgatcgttctagcgagagccaattattgatggaaggatgatcggtgggggatgtgtgagatggactgaactgtgatagtctatgaagaatgaagcgaacaaagcggtctctttgctactatggatcccgtggtcaataaggtttttataaaggaatttgataccgctggggcatgccaacattttgctgggatgctaaatgaccgattattggctgtagacgacctttgaagaggaagctgatgataatgtcgaacaattgcctgattgatatgaccatgctgcttgaaaagcatataatcgttacatgcctgtgctggaatcatttggcccggaggaaaattatctacgtaagagagcggac

SEQ ID NO: 44587 - DNA, 779 bp, Oryza sativa
  Clone ID: PAT_MRT4530_47633C.1
tttttttttttttttttttttttttttttttttttttttttttttttttttttttttacgccacgctgacaaccaaatgcaagtaggttggatggatcaatcgaacgtaacacattaagcagtttatgcttgactgaaagataaatgatgcataggcatagcgatgtgtatgtaacaacaatgcactagctgatggaaaaacgaaacaaaagggtgacagaccagtggcttcgttcttattgatcatacaacatgtcgattgcacgttatcaactggaaaaagggaaattaagttgtttgcaccctggaggtgctaagttctgctcctagatgcagcagggctcctgttcatcagtcttcttttccatagttgtagataatctcgatccctttaggtggaggagggtttcttgtgaatttactgccaccaggagcccatgggacaatgtagggatcgggatgctggaaattcctgtactgcgcttccgcatcatcgataagcctatcgatcacatccgggttgtccacatctctgttcgcctcgaacttctccctgagatccgacgcgtcctggtagaagaggtggcggtggacggcccagttgagggtgtccttgagggcgcggcggtagagcagccgcaccctctccttctgcgccgcccgccgcgccaggaaccccgccgacgtcgccatcgccgccgccgccgccgccgccgcttgcttcctcttctctctcctctccgatggtggggtcgattccgatcccggccgggcgtggg

SEQ ID NO: 44588 - DNA, 276 bp, Oryza sativa
  Clone ID: PAT_MRT4530_47634C.1
atggaggatggcaagagcagggggctttttcagaggagaggggcagcagcagcagctatagtcagctacggcagcaaaggctggaggtctggactcgagagccgtggagagtatagctacggcgcaaatttacatgcgggaccccaccgactaagaaatgtcaggtgcgtctcgtacttctgggggtgcattatgttactccgtgttaggccggatgggctttacagcccatcaaaatctagcccatggaactacccaattatccataccttttaa

SEQ ID NO: 44589 - DNA, 186 bp, Oryza sativa
  Clone ID: PAT_MRT4530_47635C.1
ctactttcctccaagtgaagcatctgcaacagatataacaccaatttgatggattattgtcactgacatcatcaccagcacctctgcttcatcggccttgacatcaactcgaggatatttttcatgagcctgcttcatgtcgtcgaggatcctccgctccaggttgtccaaagcctccggcggagc

SEQ ID NO: 44590 - DNA, 121 bp, Oryza sativa
  Clone ID: PAT_MRT4530_47636C.1
atggcgtgccgcctctcgttgcgcgtcgcggcgcctgctgccgggtggcgaccccgtgtggcgcgaggagcccgccgctcggcgacagtgcgagcgagcgatcagctagagcggcgtaacg

SEQ ID NO: 44591 - DNA, 376 bp, Oryza sativa
  Clone ID: PAT_MRT4530_47637C.1
attctaatcatgcatatattattgtcttttttatcttctcaggacgtactcttgttgattgttgattcacaaacaacaaacggggggacaattgaagatgttttgaacaagtgatcaatattgtatgctggaggaaaaaaaaggacaatttgacatgtttttggatccccaaggtaatcgcacaaagaacatggaacaaacatgtgttatcttgatttgaagggaaagtttgttcacagagaataagaacccatttggggccaaaagatttttacaaaaaaattgcctgaaggaataaaaccatcccacagggttaatccaaactttttttatttacatttccacagggcagtttttgggatgaattttgacccct

SEQ ID NO: 44592 - DNA, 258 bp, Oryza sativa
  Clone ID: PAT_MRT4530_47638C.1
atggacctcgacagtggtgttcatgagggaagcgagaagataaagaccactgtctctaggggcgccatctctggggtcgtttccctcaccaatgagccgtcgtctgtgcccactcagatccagcagcatttgtcagcattcggttacttctgcctccccggcttggctgggtggatgagaattgcctcccctggtgcggcacaaacgccgaggctggccggccgcatgcgcatcacgccgggatcccgctgtccctaa

SEQ ID NO: 44593 - DNA, 294 bp, Oryza sativa
  Clone ID: PAT_MRT4530_47639C.1
tcaacgtttttgtctccaagcagcaagcctgcagttcgtcgtcgtcaccgtgttcctgttcgccggtcgcagccgccgccagttgcggcgccgcgcccgttcccacttctccacccacgcagccacgccgtcgtggtgttcatccacgttcatatcttcatcatctccatgtcggagcttgtcatcatcatcatcaatcagtgaaggtccgaagaacagtttgtgaagggccttcatcaatatcaatgtctcatcatcaatcaaaggaccgaagaacagcttgtgaaggtccat

SEQ ID NO: 44594 - DNA, 2388 bp, Oryza sativa
  Clone ID: PAT_MRT4530_4763C.1
atgcgcagtatcacccgcctgaaggtcatatccaaccggcaatcccgcacagaggtcgccagcgccgtcgaccgccatgtcgcggagagtttctccgcccctgccggctccccgtccgcctcgtcttcggcgaaactgacactgcgagtgattgtgtgtgcgcgctcgtgagcgagctcagctgggccggctagctcatgagcatctcgttctcctgcccgctgcaagatggagtcatgatgaggagcggcacgcggcaccgcggcggcggcagtgcatctggtgttctttgctcggcgctgtttttttcctgtcctggcagtggccgtcgccgcaggctccggttcgtcgtcgcagctcgccgtcttcgtctccggcgccagctgcgagggctccttctcaacggacgccgccgacgccagcaacgccggcaaaggtggcatccccaccggcgacgaactcgtcgccctctccacggacacccgcggcgccagccccgaggcctccacagccgccacccgcgacgtcgccggcgccaacgaagccgtcgtctccgcccgcgccgaagccatcttcccctcccgcgccgtcgccgtccacaacgccgtcgtctccaccccgcgccgaagccatcttctcctcctcctgcggcgacgccgaccacaaagccgtctcctccaccgtcctcaccaccgcgcctgcgttaagccagcccccgacaacgtgaccccgcactgcctcccctccctcctcgacctcagcagttgctgccagatcgtgggagctggccccttacgacgcaaccccgcgccaagcagcagccgatcaccccgccgtggcagaaggttgcctcgaagctctgacattgaaaagccttcctcctccacctccgccgccggcgcgtgcagccacagcaacgccggctgcgagggcgccttctcaacggacgccgccgacgccagcaacgccggcaaaggcggcatccccaccggcgacgaactcgtcgtcctctccacggacacccgcggcgccagccccgaggcctccacagccgccaccggcgacgtcgccggcgccaacaaagccgtcgtctccacccgcgccgaagccaccttcccctcctgcgccgtcgccgtccacaacgccgtcgtctccacccgcgccgaagccatcttctcctcctcctgcggcgacgccgaccacaaagccgtctcctccaccgtcctcgccaccggctccgagaccgtctcctcctcttcctcctcggacgccaccgccaccgccgccggcagcggcaccgaaaccatctccttctcctcctccggctccaacgaattccacgacgaactcctcctcgccgtcgacgtccacgccggtccagctctcgccaaatttctacgcgcagtcctgcccgagcgtggagctggcggtgagggatgtcgtcagggatgtgatgcatcagtgatgattgaaggtagcggcacggagaggaccgatcctgcaaacctctcacttggtgggttcaatgtcatagatgctgccaagaggctgcttgaagccgtgtgccctgtaactgtttcctgcagcgacattttagtccttgccgcaagagatgctgttacatttgtaagtatgatggcactatgtgatttctcttttctagttgctacaatccactcaaagaccggaggaccgttggtgccagtctctctcgggaggctcgacggcctggtctcgctggcctccaacgtcagggcgaacatcatcgacaccggcttctccgtcgacgccatggcgaggagcttctccgccaaagggctcaccctggacgacctcgtcaccctctcaggtacacacacacacgctcttgaatgctggaggatcaactgcgattttcacttttcacctggtctcaccgtgagcacacggctgtcgatcgccggcgtggcgcactggcgcgcaggggggcacaccatcgggtcggcgcactgcacgacgttcggggagcggttccgggtggacgcgaacgggagcacggtgcccgcggacgcggcgatgaacgcggactacgccggggggctgatcagggcgtgctcggcggtgaacaacacggtgtcgtcgacggcggcggtggactgcgacgaggggtcggcgtcgcggttcgacaacgcctacttcgccaacctgctcgccgggcgcgggctgctgcgcacggacgccgtgctggtgcagaacgccacgacgcgggccacggtggaggcgttcgcgcggagcgaggggagcttcttcgccagctgggcggcctcgttcgccaggctcaccagcctcggcgtcaggaccggcgccgacggcgaggtccgccggacgtgctcccgcgtcaacggctga

SEQ ID NO: 44595 - DNA, 249 bp, Oryza sativa
  Clone ID: PAT_MRT4530_47640C.1
gatacctttcagattggatatttctcggatagttcggatgtggatacaaatacggatattttctcccagatacaaattaatacggatatggtacctgggtttccatcagatacggataatcatcgtgtttcgagaaaaaattgtttccgtattcatgtccgattatattcgattcttattcatattcgagataatccgtatttgtttccgtattcgaactatccgtattcgttttcatatccgataaaa

SEQ ID NO: 44596 - DNA, 1403 bp, Oryza sativa
  Clone ID: PAT_MRT4530_47641C.1
gtaggtacaagcataatttcataaagtttcaagtaatccagtgttacggcatttcaaaagtgctttgtcaggtctgcccttgcacaacacaggagttcaagatagtagatagcaaccaatgcaacaggttcaagactaaataggcatggatataaattactaatattttatatatctgcgcggctctatcttgcgatggctggagaaggaaggataatgccaacgtaacttgggcacaggccatctgttttggttgtccataatctcaggagagatgtccccttctccatcaaaatagctcaataatttcagaattgtatcccttggtaaatacggagtctctttcctaccgtagaagttcataacaacgaaattaccatgacaatcaatcagcagggcaccatggtgatttcacacgtggagatcatgagttctttccgataaactccgcttggatcgtcagtcagcaccccactggtggccattaatttgcctgacttgaagcagcgccccacagcaactaccttactgtgagactcaaattgcagctgatgctcaagatttattgctcggagaccagggaagaacttggtttcaataacagcaatattgtattgcaagtcatacttgtataaccacccatgggcaacttgtttttttggaaggtgtacttcaatagacacaaatggcatgatcttgctttcatcatcaaaagatctaatcaggctagctgaagtcaggtaacttgtgccaaataaatcagttttgataactacgcctgtgcatgcagaatgcataatatccccatcgaatgaagccagcgagacaacactttcagataagtttgacgctactactttactcagttcactccatgctccttgaccagagttcttcaagctgccaaactcctcttcaaaaatgttatcttcatgcaattttcttgtctctcctctacttttgcaagctttcttccttttctttgagcttgttgagcaatcacctattagattatctgtcatctttccaacccttccgtgcgacgccgcctgcttcgcctggccgtccgtcgcatcccccgctgtgcgcatccgctgcctactgctcccccgctgtacgcctccgccgccgactgctcctgcttctcctccgccggcgattgctcctcctccattggtttcctcttctctcgtagcaactaattgcccccaaatttgcgtcgctctcccattgccgccgccgccgacgacgacctgcacggctgcgcccctgcctcgtagccctcgcggccttctgccccgcttgtcccatcgacgccggtcaccatacagccttaactcatttgcggagaccccggcgctttgatctcctccccagcgtaccgtcgtggtttctgctgtcat

SEQ ID NO: 44597 - DNA, 337 bp, Oryza sativa
  unsure (1)..(337): unsure at all n locations
  Clone ID: PAT_MRT4530_47642C.1
atgcgtcgagattgtattgaacgtgtgttgttgtattacatggggctcggggcgggcgaatcaaacgaggaggggcggcagaggcccgacaataacaaggacaaccaggggtggcaaggcccaggcagcgaacctctggctacggtgtgccggttgcggatccggtggcaacggaacaacaacagtggcacggcggtagcagctcaggctgtaattttgccccggcggccccgagtggatgtaaaggtgactggccatgcgggctgcaaatccggcggtcctgaggtgtaccggtggcggttcantgatgggggcacaccattgccggaaatcaccg

SEQ ID NO: 44598 - DNA, 2247 bp, Oryza sativa
  Clone ID: PAT_MRT4530_47643C.1
caagtaatccagtgttacggcatttcaaaagtgctttgtcaggtctgcccttgcacaacacaggagttcaagatagtagatagcaaccaatgcaacaggttcaagactaaataggcatggatataaattactaatattttatatatctgcgcggctctatcttgcgatggctggagaaggaaggataatgccaacgtaacttgggcacaggccatctgttttggttgtccataatctcaggagagatgtccccttctccatcaaaatagctcaataatttcagaattgtatcccttggtaaatacggagtctctttcctaccgtagaagttcataccaacgaaattaccatgacaaatcaatcaggggccctccaatcccagccttactgattctacaagtggagaccttaagttctttgcagtcaagtttgcttggtttgtcagtcaatatcccacttgtggccattaatttggctgacttgaagacgcgtcctacagataatacctccttacgctcaattagccctggatcatgaaattcttccgtacgaagacaacgaaaacctttgatgctgacaatagcaacattgtaattcaaaagtgctttgtcaggtttgcccttgcacaacacaggagtttaagttagtatataggaaggaataaaactgatttcataatgttttaagtattcaagtgctaaggaaatttgtaacttcctcctcaggactacctctatactatacaagatgtctagctagtaaaaaacaacgtatgctaccgattcaagaataaaaaggcatcgaaataacctccgaaatcaatcaagatctgcccaattctatctttcggtgtcctacgaatgtagaataatactgccttaaattcccctcgggtcatctcttcgggacagcccttactcataggtgtgacgttccctccttcctcaattcaccccatgcatcttagcctggtatcctcaagtagccaaggaccttttcaaaaatcttatcttcatgcactaatcttgtttctcctctaattttgcaagctgtcatccagatcataatgttgcaatgtcactaacgtattagattagttgtcatctttcaaacccttctgtgcgatgccgccagctccgccttgctcgtcagaagtatccaccacgctgggcgcatccgctacctactgcttgccttcgctgtacgctctcacgatccctggactgctcactgcccgctctctccgatcggcgattgctcgagagctcactccacgtgacatgtttgaagcaacttttttggtgagtttactccagatatcatcagcaaattcattttcaaaagtattaaccaaacgcatgcctccgtcaaggacagctggcaaaggataaccttgggacgttagttccttgattaaaaatttcccaaattctggtaaacaaacatcaccatcagcaactggcaagaaaggggaggccgtctccataaaaaatggatcattctcaattgggttttcttctgaatcactagaagaagacgactcctgctcattctcaggtttcctactggagttacgtaactcaaaagagtccgaacatccttccaagccttccaaataggacttggaggttgcaggagattcttgtatctcatttgtgctccttccagttgtgctatcaagtttcttaagctcaccccggtatgtcttgaaattagccatgcattcggtaatagtactccttggcaggaatggtgtccttttcttcgcataaaagttcatgccaacaaagttcccatccaaatcaataagaggccctccaaccccagccttactgtgagactcaaattgcagctgatgctcaagatttattgctcggagaccagggaagaacttggtttcaataacagcaatattgtattgcaagtcatacttgtataaccacccatgggcaacttgtttttttggaaggtgtacttcaatagacacaaatggcatgatcttgctttcatcatcaaaagatctaatcaggctagctgaagtcaggtaacttgtgccaaataaatcagttttgataactacgcctgtgcatgcagaatgcataatatccccatcgaatgaagccagcgagacaacactttcagataagtttgacgctactactttactcagttcactccatgctccttgaccagagttcttcaagctgccaaactcctcttcaaaaatgttatcttcatgcaattttc

SEQ ID NO: 44599 - DNA, 189 bp, Oryza sativa
  Clone ID: PAT_MRT4530_47644C.1
atggaggaggacgacgacaccgtggcggttgatggcggtggccggcgagcggtggcctggctggcggcgcttgaggcgaaggcactgcttcaagcttcgctgccggacgctgggcagcaccttaaccagcaaggaggtatggcgttatacgatgtggaggcattcatgcgagtaaatttgttactttag

SEQ ID NO: 44600 - DNA, 113 bp, Oryza sativa
  Clone ID: PAT_MRT4530_47645C.1
gacgcgccgcccttgacccaaagcgacggatttttctgtttgaccggcgccggaacaagaacccgctttggtggttataacgcgggcggatgggcggccctcgggaacctctt

SEQ ID NO: 44601 - DNA, 786 bp, Oryza sativa
  Clone ID: PAT_MRT4530_47646C.1
cagaactaaaatgaactcatatttttttttaaaaaaaaaaaacctgtggagggtaatcccgttggcagatggaccagatgttctgccaagctcatttttcccgttaatttctgaagcacctggtgcagttccagcagtttcaacatttccatttgccagcatagggtagtgattaaatggatgcacaccaggagtagagggatgtgcatatacagttcctggaggatacatcatataaggtggtggtgtcccgtaaggtggcaccatgggctgagctccccacatgtagggatgagcctggggacttgcagcaacaggaggtggaaagaacccatgcggtggaattgccgagtaggcctgaaaaccaggccattcagggtaaactggagctgtagtgccagatgtagtggctggagactgctccggttctgatgcctttgttgccttggacggcgtgccaggatcattagtacccatctgattcgtcaacaatgcttcccggcaaccaaactcgcacactcattccattgtaacccggatattgataaattgtgatagcaaaaaggccaccttaatctagcaacccacacgaggagagaaaccacgcgaacgcggccctcgagcagagcaagcccacacggccgctcgctcttcccccgagccacaggcaaacaaatgcagcagcgccctcggcgcaggcagcgtccgacgccggcgagtccgcctccggcgagcggattgcggcggcgagcggcggcgaggaggaggaggtggattgggagggag

SEQ ID NO: 44602 - DNA, 951 bp, Oryza sativa
  Clone ID: PAT_MRT4530_47647C.1
atggatgggaagggacgccatggtggcggcggcggcggcgaagatcccctcaccctcaccctcggatccatctactctagcgcccccacgccgcctccctcaccgtccctggtggtggcccctacgccgcctccctcatcattcctagttgcggcccccacgttgctttcctcaccaactcctgtggtcgtccccatgctgcttccctcgccaacacggccggtggtcttctcgatgcagcctcactttgacctcgtccccgcgctccctccctcgtcaccgcaggtgccacaatcttctctttcctcgctctctgctccgggttcgactcgccactaccgtaatagtcctcgttcctcgctgcttgctccaccttcgaatcgtcgccgcctcaacaaccccgatgaaggccagtccccacgaggccgcggtgaggaggcgaatggggacaatggagtgctagtcatggcgacatcattcccatgggtgacatcggctgatctgccagtgttgcattgcaccctagagagcatgttgctgaagggcatcacgtctgtggagggcaaagccacctgcaatcgttgcagtgcggaggtgcccatcgcgtacgatctggacgcaaagttccgggaggtgcgcgactatgttgcagccaacatccacatcatggatgaccgtgccccggagcactggatgtgcccgcggctgccagactgcggctcgtgcggcaagaaggcctgcatgtggccacagatcccaaacgagaagcgtgagatcaactggttgttcctcttccttggccagatgctgggctgttgcacactagaaggcctcaagttcttctgcaagaataccaagaatcactgcactggcgccaagacccgcgtgttgtactatgcttacattgagatgtgccggcagctcgacccacaggggccgttcaatatctga

SEQ ID NO: 44603 - DNA, 765 bp, Oryza sativa
  Clone ID: PAT_MRT4530_47648C.1
ctaaggttgtgggttgtgatcatgaagtttgtctttgatgtttgaggccatatcctgtgaaaatgcaccaaatgttgcaaacttggaaatactaatctccaccgttgcatccaatctgaacgaccatgataagctcccatccactctctcacctgttggatgcacttttgcagaaaaccgcccgcacctggctgcatatgttacaaaaaaaaccctatactcatcttctttatagattctatccctctcatcttgtaatgtactgctaccatgatttgttccaacaaagctcactggtcgactcctatggccagcgagacggcggtcgccggtcttgagctgcgccatgagccactccatctcggcgcgcttcaagaccgccttcaccttcaccccgccgccgccgccgcagccgtctcttctccatcctcctcctcctcctcctctgctggttcttccctcagcaggtggacgaatccatcctccgcggtggcgatggcgaacggcatcggcgctacccaatcccctaaggccgttagcaacctcgcccccgaccgctcccctgacctggacattgagttgcagggctacgaagggaatcaagtcccaaccagatctgggccaaggtattctcttctccctgatgatggatctgtgcattggagccatgaataagtatgtgcatcggcttgaggtgagtttattggccagggattccccctcgtcaccaaagtgtccctgggtgagtttctccatcttctccat

SEQ ID NO: 44604 - DNA, 239 bp, Oryza sativa
  unsure (1)..(239): unsure at all n locations
  Clone ID: PAT_MRT4530_47649C.1
agacggaanctatctgattgagattccacccagttacgtgctgagtactantctacgcttaaccgccggaaaagagaggaatctactgcgtcgttctacgtatgactgtatcacatattacataaccagttttgacagcttatgtacgagttcatccgtacagtgctttcacaatgtcgtcgtcttttcccctgtctaatagtagcttgattagcttgctcaaaaaaaaaaaaaaaaaa

SEQ ID NO: 44605 - DNA, 2395 bp, Oryza sativa
  Clone ID: PAT_MRT4530_4764C.1
atggctgacaatgagaaaggcaataaggtcagaagtcaggacatcggtacctcaagctcccgagtgaatgaagcaccagacaccagttgtgtgacactggtccaacacctgattaaccataaccgattgcttatagagatactacagcagcatcagacgccaattctgaacctgagtcagatacaacctcaagtgcagttggaggcagtccaagcactcacaccacgagtcagcatgccgccagcatcccgaaggacccatggtgacgtgccacatgttgactcaaaagaagcaagtatcatttgttttatgtgtgatgagcaagggcactatgcaagggagtgtcctcagcagaaaagaaaaacaccaatgcgaaccaaagatgaagtccgtaagatgatcattaccagcacagaatggcctccaccaggaatgacaaaacgtcagagaagaaataccttccgaggtgcaccacagttgacagagcatcttttagctaatggaggtagagtgtctgatagtgaagattcagatcaagtctcctcagatgatgaagatgagaagtctccccaaggtttcaaccagaataaaatggaacgtaaggcatgctctcgttgtggagaaatcggtcatgttgccagctcgtgtgccactacatgcgttcattgtgaggaagaccatccacccgacaggtgtccaacgagcaggatcacttgtttcttttgtgaaggaactgatcatgtaccaaaagattgtcaattcagtttgctgctgacgaagaagatggccaaccaacccgccagttccaacggagagaagcatcaaggcaacacaaatcctcgccaagattacagtttcagcctaactccagtgccaggacagaggaatcaaaatgagaaaagaaaatgccgagtccgggaagatatctgttgcttcaattgtcaaggaatgggtcatttcgccgacaagtgcccaaaaccgagagacatagctgccagcacgtcagtccacgcaactccctgcaatcagaagcttgctcctcagcgaattgtcatccatgcatcccgaagcagtcctatagcccgcgttgcaacagctccaactccagcgagtgcattaccacaaggtgtcaatgctcaatttcagccccagccaccagttgacaagacagaggccacctttcaactattacagaattggaactacccagcaggggcaaccaacgttcaagtacctacagtccagcaacagtgcaagttatcagaatttctcaaaactgagactccaacctttgccattgtcgtcgaacctatggaagccagtgattggttgcgcacagtcgagaagaagctggggttgattcagtgcacagaccaggagcgggttgtcttcgcaactcatcagttggttggactggcttcagaatggtgggatagctacgaagcatcacggccagaaggacataccatcacctgggacgagttttcatctgtattcaagagatcccatgttcccgcaggaatgatcacactgagaaaacgagagttccgctacctgaagcaagaagatttgaccgtcacagagtacctgcacgagttccatcgtttggctcactatgcaccagaagatgtggaaaatgatgaagacaaacaagagaagtatctccaggggttaaaagatgagatcgcagtgcaactactcctagaggaatatgaagattttgagaaacttgtggacaaagccatacaactcgaaagtgagcataatcggatgaagaactgtaagagaaggattgtcagcatcccagtattcccatgtggtaaccaaagacagcgcacggagccacttcagatcaccggatcttctgttgcgcatcaagagtttccgccccaagaagatggacacaatgcagacaacaacattagcaatactaatgatgatgataccaccaacaaccatgcttcttgccccattagtgaccactcaaatcaagcgtgcaatgtcaacatcattcaccaaggtgtcgacgatagtatcaatgatggcacccaaaatgacaaccctagcaattgtgactctgagaaagactccaatggtgatagcaactatggtttctctgaaagacagcacgcccaaggacctcattgccccagaagcatcctcaacacccggagcgaagagtacctggttgagaaaggtcgaaagtggtaacttgtatgaggttgactccgaagatatgaatcatgagaagttctggaacggaagcatcattaaactaccgcaacctagtctgagtcagctaaaaggtgcaccctggttcaagtcaggtgaagagaagattccatccgcaacagaaggtcaagccaagcagttccgagtggtgaagttttgctga

SEQ ID NO: 44606 - DNA, 545 bp, Oryza sativa
  Clone ID: PAT_MRT4530_47650C.1
ggttcaccaacaaaaacttcttctctgttggttttttttattgatgaagccagatacgaaaagttggacaaaattgctctgaaacgacttggatctatcgtatacacttctgtcctaactgacagtacagttacagtaaattttgaaccccattttcatgtttggacaaaactcctataagtttccacattgaacctctctttgggaaaaaaaaaattctatcaaaacatttcaggcattccatgatgccgaccgtcgcatggtcggcttcaccggccggtcttcctccatggagatcatcatcagcgtcgacgggtcctccagcatcatacgggctacgaggtagccagcgatggaccatgtctggaacttcctggcctgcttgccgatgaaccgtcccagcttgccatcgtagtactctggccagccgtccttcagaagcctggactcggcgagctcaatggcgcgctttcgccatttgcgacggcccagttcttatgcaggttcttgtaacaagccacagaagaactggccatgatcccaca

SEQ ID NO: 44607 - DNA, 871 bp, Oryza sativa
  Clone ID: PAT_MRT4530_47651C.1
atggccgcgtccgttctcgcgctcgccgtcgcgttcctcctcggcgccagcggctacggggtcgacaggggcgccgcggccgcctccccggcggcggagggcgtcgaggtggcttatgggagcaccatcaagctgatgcacgagaagacgaagcaccggctgcactcgcacgatgtgccgtatggctcaggcagcggccagcagtccgtcactggcttccccgaagtcgatgattccaatagctactggatcgtgcggccctctccagattcatcagctaaacagggtgatgccattgaaaccggtagcatcatcaggttgcaacacatgaggacacggaaatggttacatagccacttgcatgcttcaccattatccggtaacctagaggttagctgttttggtggggatggacaatcagatactggagattattggaggctggagattgagggaggtggaaagctatggaaacaggatcagaaagtaagactccgacatgttgatactggaggttatctgcacagtcacaacaagaagtacaacaggcttggtggtgggcagcaagaggtatgtggcgttagagagaagcgagctgaaaatatttggttggcaacagagggcgtctaccttcccgttaacaaaagcaagtaaactcaacattcccatgggttcgtccaaggttaacatagcaccagaattttactgacattttgttctgctaatgcttttaaatttaaagaagggacctaaaccctgagtcccgagtattttgttggttatagatgacgatgtgcagaaaatgagaaatatacaaacgtttcatgtagccaatttaccttctaatattcagaacgacaagctgttgtat

SEQ ID NO: 44608 - DNA, 480 bp, Oryza sativa
  Clone ID: PAT_MRT4530_47652C.1
tcagggtcaatggtggcaaacatccgtggtcaatgtttgcaaaatggcatgagtttggggaagcatcccgccaataccaacgcagaggcttagcacctcttgcacacttcgcaaacttcgataatccacccactatggcattggtgaccggtaactctgcggctgctgggccaactggctgtagacccttggaccgggtgaactctgccctttgcagtaagcatatggcttcgaaccaatctggccaagtcgccttgctgcttgcctgaatccttgcggggtgtggaaaactatgggtggtggattcgtgtggaactggttggtggtgcctggattgtggtgttgaccccagtggtgtgtggaacttggtggatgatgattgattgaatgcgttgtggtggctttgtaaaatgtaataatcacctgtgtgagataaataaaagggggaaggttacccattaaaaaaaaaaaaaaaaaaaa

SEQ ID NO: 44609 - DNA, 510 bp, Oryza sativa
  Clone ID: PAT_MRT4530_47653C.1
atggacatggagctctcctcctcctcctcctctaccaccgtcgcttcctcacctgcgtcgtcgccgccgctcgggaggtgcgtcctccgcttcaggctcccgccggcgtggacgcccgaggaggacgccgtcctggagcgcctcgccatggagcacggctcccgccactggcgccgcgtggcggcgcaaatgccgcgccgccgctcgcccgcgcagtgccgcgacaggtggggggaccacctcgcccgcgacgtcttccaccgccccttcaccgccgccgacgacgccgagctcgcccgcctctgcctgcgcctcgacgacgacgctggcttcgccgccggccgccgatggaaggacgtcagcagggccgtctacggccgcagctcgtgcgccgtgaagcgacgctggagggagctgcgcaggagcgacgcgttcctcggcgcgctgtggcgtccgaggacgacgacgacggcgccgccagccaatgccgcgatcacgacgacgtgttga

SEQ ID NO: 44610 - DNA, 1332 bp, Oryza sativa
  Clone ID: PAT_MRT4530_47654C.1
atgccgccgcgcgcccgcaccctcctcatgccgcttgcggcggcgacgctcctcgtcgcctccaccatcttcctcttcgccgccaccggcgctcgatggcgacccgccgacaccggcctcccggtccccgccgccgacttctctgcggccgtcctagagagcgcagtgaccgacaccaccgccgccgcgaaggagctctcgttcgttgacgagaatggccgccccgacgatcccgcctccagctcggcggccgccgcgagatgcgacccgacccacgccgccgtcagggtattcatgtacgacttgccgccggagttccacttcggcatcctcggctgcggcgccgccgccccgcggtaccccggtgggctcaaccagcagcacagcgtcgagtactggctcacgctcgatctcctctcctcctcgtcgccgccgtgcggtgccgccgtcagggtcgccgactcccgcgacgccgacgtggtgttcgtgccgttcttcgcgtccctcagctacaatcgccactccagggttgtgcctccggagaaggtgagcagggacaaggaattgcaggagaagctggtcaggtacctgatggcgcagccggagtggaagaggtcgggtggcgccgaccatgtcattgtcgcacaccacccgaatagtttgctccatgcccggtcagtgctgttccccgtggtgttcgtgctgtctgacttcgggagataccatcctagagtagccagcttggagaaggatgtcattgccccttacaagcatatggctaagacgtttgtgaatgactccgccgggtttgatgaccggccgacattgttatacttccggggagcaattttcaggaaggagggagggaacattaggcaggagctatattatatgctcaaagatgaaaaggatgtttattttgcctttggaagtgtccaggaccatggggccagtaaagccagggacaccccttcttccaatcgcctgtttgacgctatagtaagtcattgcgtccctgttatcatcagtgacgacatcgagcttccttatgaagatgcattggactattcgaagttttctatctttgttcgctcatctgatgctgtaaaaaagggttacttgatgaggctgattagaggagtaagcaagcatcaatggacaaggatgtggaataggctgaaagaagtggataaacattttgagtatcaatacccatcacagaaggatgatgcggtccaaatgatctggcaagcattggctagaaaggtgccagcaatccgcctgaagtcacataggtctagaagattttctagatatgatagaggaaaataa

SEQ ID NO: 44611 - DNA, 1617 bp, Oryza sativa
  Clone ID: PAT_MRT4530_47655C.1
atgcctccccgcgcccgcaccctcctcatgccgcttgcggcggcgacgctcctcgtcgcctccaccatcttcctcttcgccgccaccggcgctcgatggcgacccgccgacaccggcctcccggtccccgccgccgacttctctgcggccgttatagagagcgcggtgaccgacgccgccgccgcgaaggaggagctctcgtttgttgacgagaatggccgccccgacgaccccgcctccagctcggcggccgccgcgagatgcgacccgagccacgccgccgtcagggtcttcatgtacgacttgccgccggagttccacttcggcctcctcggctggtcgccgccgacagatggagccgccgacgccgccatgtggccggatgtcggcagcggcgccgccgccccgcggtaccccggtgggctcaaccagcagcacagcgtcgagtactggctcacgctcgatctcctctcctcctcgtcgccgccgtgcggtgccgccgtcagggtcgccgactcccgcgacgccgacgtggtgttcgtgccgttcttcgcttccctcagctacaatcgccactccagggttgtgcctccggagaaggtgagcagggacaagggattgcaggagaggctggtcaggtatctgatggcgcagccggagtggaagaggtcgggtggcgccgaccatgtcattgtcgcgcaccacccgaatagcttgctccatgcccggtcagtgctgttcccggcggtgttcgtgctgtctgacttcgggagataccatcctagagtagccagcttggagaaggatgtcattgccccttacaagcatatggctaagacgtttgtgaatgattctgctgggttcgatgaccgtccgacattgttatacttccggggagcaattttcaggaaggaggtgaagattgattcctggaaggtgagcccctatagccatccaaatgttcccattccaaattaccctccaaatatttgtggatatatgatccatttatgttctcttactgagtatgtctacatattaatctccaaaattccaaagaccagcaaattaacagatgttccaacatttgaattgtcaaagggagggaacattcggcaggagctacattatatgctcaaagacgaaaaggatgtttattttgcctttggaagtgtccaggaccacggggccagcaaagccagtaagggaatgcacgcatcaaaattttgcctaaacattgcaggggacaccccttcttccaatcgcctgtttgacgctatagtaagtcattgcgtccctgttatcatcagcgacgacatcgagcttccttatgaagatgcattggactattcgaagttttctatctttgttcgctcatctgatgctgtgaaaaagggttacttgatgagacttattagaggagtaagtaagcatcaatggacaaggatgtggagaaggctgaaagaagtggataaacattttgagtatcagtacccatcccagaaggatgatgcagtccaaatgatctggcaaacattggctagaaaggtgccagcaatccgcctgaagtcacataggtctagaagattttctagatacgatagaggaggaaaataa

SEQ ID NO: 44612 - DNA, 201 bp, Oryza sativa
  Clone ID: PAT_MRT4530_47656C.1
atgggagccgatcgccaggacgccgccaccatgggagctgaccgccaggacgccgccgccatgggagccgaccgccaggacaccgccatgggagatgggatccgcctgatgcggattattttcctcccgcaggcgcagaccggcgacgcggaggcgagggattcgggtggagggcgcggtaggaggggaggcggcgcttga

SEQ ID NO: 44613 - DNA, 479 bp, Oryza sativa
  unsure (1)..(479): unsure at all n locations
  Clone ID: PAT_MRT4530_47657C.1
gaagtcaaacgttggcctacggtcaatagagtcataaaagcagatatcaaaagcaaaagctgtcaactaggcaagggcgggctataacatagtatgacgataggctaacgactttggagagatttacctatgatacgtaactaagcccccaggcgtngggaaagctacagcagatttggcagattagtagtctccaacttattttattagtggatcgagcggattggtcttgttgccgtaagcctacggagggaggggacccatcctgtagaaggcaagcggtaggtaaattgtaatttatcacttttgtcgataggggaatcgctcttttcacttccgttacgttcagctttctttctttacctttccttccttcccctaatcacttccgttccaccactggctttggtatctttttgactctcaaccagcagtcaagtcatttcattacgaaaaagtcattgaattggttgcccagc

SEQ ID NO: 44614 - DNA, 3483 bp, Oryza sativa
  Clone ID: PAT_MRT4530_47658C.1
tggatccccgggctgcaggcttcccctctcccctccgatccctcaccgccgcttctctcccctcctcctccgacgagaaccgatcgccgaccccgccggccatggcgctccatctcaccgccgccccgaccattgccccctccgcggccgccgcctgcaggtcgctggcgccgatgccgcctctccccgccgtttcgtgctcgagtaggtggtggagggggaggcggcggtgtgtcccggtggtggccatggcggcggcggcggcggcggacggggagaggccgcatgggcacgcggcggaggctggcactgggaggatgaacctcaacgagtacatggtcgccgtcgaccgcccgctcggcgtccgcttcgcgctcgccgtcgacggacgcgtcttcgtccactccctcaagaaaggggggaatgcggagaaatcacggattatcatggtaggggacactctgaagaaggctggcagtcgtgagggcgtgggttttgttgacatcagagacctaggtgacacggaaatggtgttgaaggaaacgtcagggccatgcgatcttgtccttgagaggccatttgctcctttcccgatacatcagttgcatcaaaatgaagattatcatctcctatttaacaagggtagggttcctcttactagctggaacggtgctctattatcatcaaagctgaatgaatcatctgaggggaacggaaatcctggatttgccatattctcgccaaggctgctaaattcacatggatgggcagttttgtctagtgagcaagatggacttaatcagcgcagtactagccttgcaaatcgtataagtgagattgttggtttgtactctgatgaggatgatgcagatactgaatgggcacatggtagctttcctttggaggagtacattaaagcactagaccgtgctaaaggtgaactgtactacaatcattcacttggtatgcaatacagcaagattacagaacaaatatttgttggatcatgcctacaaacagaaagagatgtgaaaatgctatcagagactatgggtatcactgctgttctgaattttcaaagtgaaagtgagcgcaccaattggggaatcaattcagaggcaatcaacaattcttgtcgcgagaacaacattttgatggttaactaccctatacgagaggttgattcaatggacctgaggaagaagcttcctttctgtgttggtcttctactgcggcttataaggaagaactaccgcatatatgtgacttgtaccactggatatgatagatcaccagcatgtgtgattgcatatctacattgggtgcaggatacgcctctccatattgctcacaagttcatcactggtttgcactcctgtagacctgacagagctgcaattgtgtgggcaacatgggatctcattgcactagttgaaaacggaagacatgatggtactcccacacattcagtatgctttgtttggaacagtggtcgggagggtgaggatgtggaattggtgggggattttacaagtaactggaaagacaaagtaaagtgtaaccacaaaggtgggtcaagatatgaagctgaaattcgacttcgacatgggaagtactattacaaattcatagcagggggccagtggaggcactcgacttcattgccaacagagactgatgaacatgggaatgtcaacaatgttatcagggttggtgacatcgctcgtattcggcctgctcccagccaactgcagataagggacccaactgttgtcaaggtcatagagagggcactaactgaggacgagcgattcttactggccttcgctgcacgccgcatggcatttgcaatctgcccaatcagattgtctcccaagcaatgaacacatcataatacctactgagatgaactgcagcgaaaatttcagccctttcaagacgaactgaggcgcggtatatcgatgttccttcccttacatagcaaaactcatgtaacattgggacattcggggcaccacctgcctgttcaaatcaactggacattgctagagaggggttgtggacattgctcagcagttcatcacagtgcgtacaacttgtgtaacagtgtaactctatgaactgtaatatgagataaacttcattttggtctatgctgacacacttcagaatcagaatctcaggtgcgagagaccatcataagctctgccattgatgtcaagctctcatggaatgggtgagatgacaactttcccggtggctctccctgtctcgaggtaggagaaggcctccacaacctgtgagaaggcgaatggccccttggggtccaccagcggcttcaccttcccggactccaggtatgggttgagcttctccaacaccgacccgtcggaggtgaccacgaaccggaaccccggcggcacgacggcgccggtgagcaccaccacgctgcccccttccttcaccaccttgacggccttctcgccctggccgacggcgtcgaggacgacgtcgtacttgtccggcaggtcctcgaagttctccttggtgtagtcgatggcgacgtcggcgccgaggctcttgaggagctccagcttgggcgtgctcgccgtcgccgccaccttggacgcgccgtacacgtgcttggccagctggatggcgagggagccgacgccgccggcgccgccgaggatgaggatggacttgccggcggagaagccggcgcgctcgaggccctcgtgggcggtctcgatggcgagcggcagcccggcggcctgcgcgaagccgaggctcttgggcttgagcgccagcagcttctcctccacggcggtgtactccgccagcgaccccgactgcttgggcccctccagcgccttctcgctgatgttgccgtacacctcgtccccttccttcagccccttcaccttcctcccggccttcaccaccacgccggccacgtcgtaccccggcaccgtcgggagaggggagtcggtggccttgaacttgccggcgcggcgcttggcgtcgacggggttgagcgcggcggcggcgacgcgcaccagcacctggtcgtcggcgatgtccggcaccgccgcggcgtcgttgagcttgagcacgctgccgtccccgtaatcgtcgtacgcccacgccttcatcgtcgcgggcacctcgccggcctccgccgtggtcaccgccggggacgacgacgacgcagccgccaccacgcaccggccgccactggccgatctcctcgacacggcagcaatggcgccactcctcgccgccgcggccaccgggaccgaggcagcggcggcgagcttagcagcggtcggcgggaagagcggggagccggtggtgcatgggttggcgagcaccgaggaggagaggagggattgcatcgtcgtcgtcgtcgtcgtctccttgctcttggtctgctctgttttgcgctgactcgtggcggacgcgtgggcccgggggatccac

SEQ ID NO: 44615 - DNA, 375 bp, Oryza sativa
  Clone ID: PAT_MRT4530_47659C.1
atgggaccagagaaggggagtctaatcagtgcgactagtcgactagtcgaatcagataagatcatcacccataaggtccataaggtctgcgtcttgtttgtctcctcctgtggacgagtggacgatgaccgatttatattttgcacaatttgcacgtacgggctgatcgtttcccctgagcggtcgatggccggtctcggccaggtcggacggaaactgcagcgaaagctgtgtgctcgcggccaggtcgggtgcacgttaaacagtcatatcatccacaaccatcaaattaagctgatgaacgatagagagctgcgccacgacacaaccaggctgtcagctttacagtacacgactgtgtaccctgaccgaatc

SEQ ID NO: 44616 - DNA, 268 bp, Oryza sativa
  Clone ID: PAT_MRT4530_4765C.1
gggtcggattttttaataacacttgacaaggtggaaaggatttacggtggaccggggaacgtgcgccatagttacatgggggacagcgcgggccaatgccggtcagagtttgaacctgtgataaaaataagtcttaacatggttcactactgatgcgggccgacggcagaacgtgcgaagagtgtggagccttaagtgtaaagtatctaagatccatggagtggggaggcgtgcaacctgtgcattcgggtatgggtgggggacacct

SEQ ID NO: 44617 - DNA, 221 bp, Oryza sativa
  Clone ID: PAT_MRT4530_47660C.1
atattaatccaaaaagagcagggtagacagtgagtgttcttgtatgttacttagacgcagttgcgatcactcttaggaaccttctgtgctagttttagttacaatacttgacaacacctccaggctaccacattctgagcaggattactcatggaggattttatttcatgaaactattacggctcctctttatcaagtttgaccaggaactattaactgtt

SEQ ID NO: 44618 - DNA, 334 bp, Oryza sativa
  Clone ID: PAT_MRT4530_47661C.1
tttacttgtccgatctccccaagggggatatggtggggctacgatagatacatctggctgggagggtactaattcgacttacacggactccaccccctgcaccatgccggactactacaaccagcggcgaggcgccctcctgaggagactcatacttgtcgtcatatacgtcgtgaccttgttcatcctggatgtattcgctgtcaccaatcgcggatcctcgtcgcagttctcacaaaggatcgcgaagccactggaaaatgctgagcgacccgacaactttatgctcgccaagccccgggcaccgggcaccggcgacaaggaccttctggga

SEQ ID NO: 44619 - DNA, 2151 bp, Oryza sativa
  Clone ID: PAT_MRT4530_47662C.1
atggtggatactaaggctagagttcaatgcacgtggaaggtgaaggacaccagcggtcagaccggcgacataagggcggtcagaccggcagcggcagccaggcagcagcaggagtacataaaatttgagatgaaaccaggagaagctttggatgattatcttggtagatataataaaattttgagtgatcttagatctgttgattcttcttatgatgttaattatacacaatatgaggtttctcgccactttttgaatggtcttgacatgatggaagataagggtgatgagaagaccaacgacaacaagccgaatagtatagttaaaggagggaagaagatcagggagactctcaagaaggcttttgatcaagtctatgccccgtttgggccactaagcgatgtagatgatgagagtggagatgaagataagggaaagaacatctccgtggatcccacggtcggaccggcgaccggtcagaccggcagcagcgcctcggtcagaccggcccctggtcagaccagctcctatgttgcgtactatggcttcgacttctgcttgtgtgtagactttggtggcgaggaaggagagcatgtggatcatggattccggttgttcgcggcacatgactggtacattgtcacaggttcaggggaggatggtcgtatttttgaagacgagagcgacgacgacgacgacggcgaggtcggctcggccgtgagggtacagaacgtgaaacaacttcagaagtcgctgctactttgcacattcaacgatgacatccgccggaacaaattattggtggagggtttggagtttgatgaaacttttggtcctgttgctagaattgaagcaattagacttttgttgacttttgctcaaggttttgaagcaatcagaccggcgcagaccgcgtccaaccggcaggacaccaatggtcagaccggcggcatcgcagcagtcagaccggcggccaccgtaccgacgcctgaagggaggaggccacacgatgacgtggaacaatggagagaagccgcgcataccgccgcggcggcggcggcggcgacggcaaatgaggccgtgccgtcgtcggctaccaccgagcagcaggaggcgcgtccggatgatgagcgggcgccaaaggatcacaccggctgcgaatgcaagcccaaggtggtaatgctcccggagctactacgagccgccagtcatggcgatctccagaggctgcgcgttctcctaggtgtcctacacgacgatgagtcgccggcaccgacgacgacgacgacgacgaccagccaagacgacgacgctgtcgtcctggaggtttatcgctctgcacccctactaccaccaccctctactactgcaggtgaaggtgaagatgaagggacgttgtccctcctggagggaaccacgtttcagggggactccgcgctgcatgtggtggcgagcagcggagacgacggcgacttcttgaagagcgcaaggctgatctatggcaaggccaggcacctcctcgaggcgaccaacaacaatggcgatacgcccctccactgcgctgccagagctgggaatgttaagatggtcacgcatctcctcgagctggctggaggcgatggcgccggcgatcaacggaagaagctgatcctgaggaaaaaaaaccaccagcatgagacggtgttgcacgaggcagtccgcctcggcaacaaagatttgatcgacaagctgatgacggaagatccagagctagctcgtcatccaagcaacggcgccacttcaccgttgtatctggctgtgatcttgccaaatccacaagttgcgatgcagctgcatgggtatgataaaatgctgtcctactcgggacctgacggacaaaatgtcttgcacgctgctgttcttcgacaaagaggcgtggcggtggctggcaacggcgcgccctcccctccgccggatctagctggaggggaggtggtggaccttggggacggccgggcggtggtccggtggaggcggttgcggcggccgcgccctcccctccgccaaatccggccggagaggaggcagcggacctcggcggaggcggcacagcggctggcggcggacctcggcggaggcggctggcggcggccgtgccctcccctccgctag

SEQ ID NO: 44620 - DNA, 826 bp, Oryza sativa
  Clone ID: PAT_MRT4530_47663C.1
ggatccccgggctgcaggaatcggcacgaggacaggttggaggaggagaagacatatttgccacgattagatggtcacaaaagttactatatgacaatggacagttttctgttgatattccttttcaatttccgcaatatgtgaaccctttgccaaaagtgtttatgaaaaaggaaaaaattcagttgactctgaatagtggtgtgagtaacgagattgttttgaagggctcaagtcatccattgaaggaaagaagtaggcaaggtgagaaactgtctttcttccatgaagcagttgttgagaactggtcaaacaaagattttacctttgcatatagtgtatactcaggtgatttatctggtggaatgctcgtgcaaccctcaacatcggatgactatgatgatagagacatgtttggcatttttcttttaccaggaaataaccaaaagagaaaggtcttcaggaaatgcctctgtgtttatcattgatacaagtggaagcatgcaaggaaagcctcttgagagtgttaagaatgccatgtacactactctttctgagcttgtgcaaggagattacttcaacataataacatttaatgatgagcttcattcattctcatcttgtttggagcaagtaaatgagaaaacaatagaaaatgcaagggaatgggtgaacacaaacttcattgctgagggtggcactgacatcatgcatccattgagtgaggcaatagctttgctatcaaactctcacaatgcacttccacaaatctttcttgtgactgatggatctgttgaggatgaacggaatatttgccgcactgtga

SEQ ID NO: 44621 - DNA, 1609 bp, Oryza sativa
  Clone ID: PAT_MRT4530_47664C.1
cccgggctgcaggcggagttagagttcgtagccgcgaaggatatagccatatattatagatggcgattggtgttggtggctgctgcgccgtgctgctcgcggcggcgctgctcttctcctctccggccaccacatatgcttatgattccctggatccaaacggcaacatcacgataaaatgggatgtgatgcaatggactcctgatggctatgctgccgttgtcacactgtccaactaccagcaattccggcacatccagccaccggggtggcagctggggtggacatggcagcagaaggaggtgatctggtccatgtacggcgcgcaggccatcgagcagggcgactgctccatgtccaaggagggcagcaatgtcccccacagctgcaagaagcatcccaccgtcgtcgacctcctcccgggcgccccaatcgacctgcagatcgccaactgctgcaaggctggatcactgagcgcattcagccaggacccggcaaattctgccgcgtcgtttcagatcattgtaggccattctgggaacagcaatgagactgttagggtgccgaagaacttcagtcttatggcgcctggtccggggtatacctgtagccgtgctatgattgtgaagcctagtaggtttttaagtccggatgggaggagggcgactcaagctctgatgacatggaatgtgatctgcacatactcccaatttcttgcacaaaaggttccatcctgctgtgtttctctctcgtcgttcgacaatgacaaaactgttgactgcccaacatgctcttgtggctgccgaaatgaaaaatctactacaggaaaatgtgtaaagaagaatgcacctgatttgcaatccatcattcacggccctggcagatggacctggcagcctcttctccagtgcacttcacacatgtgcccagtgaaaattaactggcacttgatgctcaaagacaaggaacactacagagtgaaaatcactgtcactaacttgaactaccgcatgaatttcaccgaatggaacctggttgttcagtatcatcccatcctcgatatcacccagatatctggcttcaattacaagtcaatccaagtcggcaaaataaatgatactacgatgctatggggagtaaagccctactatgatttgctcatgcaagctggtccgcttggaaatgtgcaaggagaactgattgtgagaaaggatttcagggcttcttccactagtaacaataacaagggaagggccttcccagtccgtgtgtacttcaacggtgataactgtgtgatgccgcctccggatgcatatccagttagtattacggcttagaggcgatcgtcaagatgattgtatcacattactatatttatggggtcatgaataaagtgtgttgtcttgtctattgaagattagaagtaactataattaaattgaatctccaactagtattaagattgtcagaggtctgcgggggggcttgtagataaaattctgcctatgttaacttcgatggtgtcaaagatatcaaatccatagcagattcgtggcaggagccaaaaaaaaaaaaaggaaacgacagtgtaagaccgacagaatatgta

SEQ ID NO: 44622 - DNA, 551 bp, Oryza sativa
  Clone ID: PAT_MRT4530_47665C.1
gggaatctggtaacccctgcaggtacccggtcccggaattccccgggtcgaacccacgctgtcccggtcgccccgtctccggagcgtcgagatgtcgtccggtggctacgcccagcgctgccggagccggaggctacggtgcgccggctacaggtggtggtgccagcagccaggtggctacggccagcccccgtgaaggcggctacgccggtgccaggtggctacggtggcagcccagtggtgccggcagctacggtggtggctacggcagccgcggcggcggcaactccgaccgggaactggaggaactgagccggtggggccctcatggccacagttatctatctatctaatcgagctaccatcatcatcatccgatcgttatcatcgttagttttgtgtggaactatctagtttgtgttaactgtgtggttgcccatctgtgtttttgatcgcacagaagaaagctcgtctcgtttgctttgatcaaatgaatgaatgaatgaatcttagtgtgctccgctctcgtccaaaaaaaaaaaaaaaaaaaa

SEQ ID NO: 44623 - DNA, 1170 bp, Oryza sativa
  Clone ID: PAT_MRT4530_47666C.1
atggcggtgacaaagctcaacccatcagcggcgccgttccactgctcccgccgccacctgttcttcgcgccgccgcctcctcctcctcctcccatgccggcgtaccagtaccacgccacgggcgcgtgcgccgcggcggcgccgccacctttccccttcttcgccacctactcctgcgcctcgctcccgttccacggtcacctctacccaccgtgcgggtaccaggcgcagatggggcctgcgccgccgggcgcggcgttcgccaagggcgtcctcgccgcggcgccgccgccgccgcacggccgccctccgcacaagctcatggtgtgcaagggcgcccccacggtcaccgacgtgaagctgcgcgcgcaggcgcgggcggcggcgcgtgtgggcgttgccgccgccgtgcgggggtggcgaccggcgccggccaccgcggggcctccccggatgctggtggccgccgcgccatgcgggatgctgcacccggccgccgtggcgaggcggcggggcatgagcaaggtgtacaagccccggaagccgcagcgcgccgggagggagcggtcgccgtcgccgtcgccggtgttcacgacgaggccgatgtcgccgacgccgccgatgcagaagctgaagccggcgcacaccaccgtcatggtgcgcaacatccccaacaagctcacgcgctcggacatggtgcggctgctcgacgaccactgcgcccgcgagaacaggcggcgcggccgcggcggcgagccgcgcgcggagtacgatctcgtctacgtccggatggatttcgggatgtgcaacaaggagaggagcagcaacatgggctacgcgttcgtcaacttcacgacggcggaggcggcccgcgggctgcagcgcgcgctccacggctgccgctggaagcgctccgccttcgactccggcaagatcatcgacatccgcgccgcgcgtatccaggggaaggacgcgctggtgaggcactttgggcggacgacatactacgagtgcgacaccgacgagtacctcccggccgtgttctcgccgccgcgtgacgggtccaccgccggcgccggcgcgccgtcgccgccggcggtcaagaccgtcggcatccgtgtgccccctcggccgatcacgctgctcacccaccgcggcaacgtcaactga

SEQ ID NO: 44624 - DNA, 1827 bp, Oryza sativa
  Clone ID: PAT_MRT4530_47667C.1
ctatagggggctcgtgggccgggccttggctatttgcaacctctgcggtctgtacgagttcggtatcttccttctcgtctcgcctctccagccgcgacggcgccggcctccgccgcgccgcattcttcctcctccggcggcggcgcagaccgaagccgagatcgcgcgcgggtggatgccctggatctctaccccctccccgacctcgcgcctcgatcttcgtaggtaggagaggggcagggaggagagaggtgggccgcctcggggtgctctcgatttcctcggctcgatcccgcgtatgccgccatggccctgctcgcgctgaaccggctcatctccatccggcgggagcgccgtcgccggcgaaacaaagcccgcagtaagcgctttcccctcggcctctctgcacttcatctctccgaaggaggatcaattactaaatcggtgagaaggaagtactcaccctgccaacaagatgattcccagggtggtaaaatgatgacaaattcaggggtaactcttccagaggacatctggagttatatactttccctgatgccaatgcgagatgctgcccgtgctgcatgtttgtttcgtgccttcctacgatcctggagatgtcatcccaacctcacctttaacgaagatgcactaggattgaatgataatgcttgtgaaacagatttcaccagcaaagttgaccacatccttaaaaaccactcgggcattggtgtgaagagattcaagctttcaatccactgcaagttagataactgtgattatgtcgatagttggcttcagtttgccattacaccagggattgaagaaatcacagttatgctgtctggaaacaagccacagttcaacttcccatgctcacttttctctgacaagattgcatactcaattcggtgtcttgagcttggcaattgtgcctttcatcccacaattgaacttggcccattaagaaacctcaaaaggctgcatctgtcttgtgttcgtatttcaggggatgagttagcatgcctcctttccaactcgtttgttttggagcagttggaactcaagtactgcaaaaagatagtcagccttaagatgccttgtgtgctgcagcggcttaactgcctgaacgttttggaatgcaagagggttcaggtgatagagagcaaagcccctaacctctccagtttttcctttagtggaaacaaggtaaaactctcacttgtggaatcatcgcaagtgaagaatctatacatgtgcagttcaaacatcatatgttatgctcgttcagatcttccatccattgtgccaaatgttgaaactcttgccgtagcttcacactgcgagatggtcgacacaccaatgctaccaaccaaacttctgtacctcaagcatctgactatttctctttttgcatggaccttttctcgagcctatgactatttttctctggtttcattttttgatgcttctcctttgttggaggtattcgtcttggatatatatcaggaaagcatggagcatgaatcaatctttgagagttcctcacatctaagacagatgccagaatatcaccatgaacacctcaagtccgtgacgatcagcggcttctgctccgcgaagagcttggtcgagctaacatgccatattgttgagaacacaacgtcacttgagcgccttgaattggacaccactcatggcaatgctaggtgttctgaagacagttctgatgaatgctttcctgtgagccaggtgttctcacagaatcccctagagcagtcttggctatcagaggatacatcgaggggaaaattcccaccaatgtga

SEQ ID NO: 44625 - DNA, 454 bp, Oryza sativa
  Clone ID: PAT_MRT4530_47668C.1
cacatcaccggttacgaggccagtcgcccgctccgagcggagcgcggtgctacggccagcgcggcggaggcggaggctacggtgcgcggctacggtgttgtgcgcggcggtggctacggccagcgccgtgaaggcggctacggcggtggcggtggctacggtggcggccgtgttggcgcagctacggtggtggctacggcaccgcgcgcggcaactccgacgggaactggaggaactgacggtgggcccctcatgcccaagttatctatctatctaatcgagctaccatcatcatcatccgatcgttatcatcgttagttttgtgtggaactatctagtttgtttaactgtgtggttgcccatctgtgtttttgatcgcaagaagaaagctcgtctcgtttgctttgatcaaatgaatgaatgaatgaatcttagtgtccaaaaaaaaaaaaaa

SEQ ID NO: 44626 - DNA, 544 bp, Oryza sativa
  Clone ID: PAT_MRT4530_47669C.1
cccttttccaaccttccggcgtagatcctcgagtccacagatctatcctacgtttcgggtatctaccggggagttcgtcgccggtgttcgggtttcgtgacgttctcgagcgagccaggccatgcgtcgacgccatcgaggggatgaacggcaaggagctcgacggtccgcaacatcacccgtccacgaggcccacgtcgcgccgctccggatggccggaggcggcggtggctaccggtggcgtcccgtggtgccgcggctacggcggcggctatcggcacgcccgccggtcgtgtcggcaatctccgaccgggaactggaggaacctgagccggtggggccctcatggccacagttatctatctatctaatcgagctaccatcatcatcatccgatcgttatcatcgttagttttgtgtggaactatctagtttgtgttaactgtgtggttgcccatctgtgtttttgatcgcccagaagaaagctcgtctcgtttgctttgatccaaatgaatgaatgaatgaaaaaaaaaaaaaaaaaaaa

SEQ ID NO: 44627 - DNA, 4917 bp, Oryza sativa
  Clone ID: PAT_MRT4530_4766C.1
tacatagaatttacgtagttggtcaatgttccaagaatttgccaactcgcggccatcgccgtctgcaattttgaatgcgcctggccgcaagacttgtgtgatcgtgtaaggtccttcccatttgggtgagagcttgtttcgccctgcttggctttgaacccgtcggaggatgtagtcgccgatcgaaagtatgcgtgctcggatgcgcttctcgtggtaacggcggagggcctgttggtaactggctgctcgaacggcaactcgttcgcgatgttcctcgagtagattcacatcgtcgtttcgctgctcctcctgatcctcgtcggaatacctctgtattcgtgtactttgatatcgtagctcgctggggagcatggcctcagagccatacacgaggaagaagggtgtttccttgttagatgttgtcggtgtggtgcatacggcccatagtagggtcttgatcccttgtagtactatgccatttgccctctcgacttgtccattgctttaaggatgagaaaccgaagcgaaacatatcttgactcccagcctgatgcagtaatcctggaaatcggcgctgatgaactgggagccgttgtcggtgatgatgcgatgtggtagtccgtatctgcaaaatatccctttgatgaatttgatggcgttgtcggccttgatttcccccgtgggtatcgcttcgatccatttagtgaatttgtcgattgccacgaattggaacctgtagccgccctgtcctcgtgggaatggcccgagtatatctagcccccagcacgagaatggccaagtaagagggacagactggagcgcttgtgcgggtagttttgtgtgtttatatgtcgcacgcatctttgagggcggttggccagaaaaacccttgtcgaaaagctttcccgaccaacgtccgaccggcggcgtgtgacccatagatgccttcatgtatatcaaggaggaggtgtctgccgtcgtcggacgagacgcatttgagaagtaccccgtttggcgctttcttgtatagatcgttgccgatcgtgcaatagattttcgctttacgggttattttctcagcctctgcgtcgtcctcgggcaactcttcgctgttgatgaatttgatcagtggggtgcgccagtcgtctatggtatcgatatcggcaacggcgcgttctgcctctgtggcctccgagctgatgtcgggggtgtctgggttaatttcgccgctgacctctttcactgatggctttgtcaggatgtccagaaaagtgctaggctcgagtggttctcgtctggacgcacgccgtgctagatcatctggctcaatgttgtccttgcggtatacgtgtcggacctcgatcccatcgaaccttttctccagcttcctgacttctgcgagatacttggataattcggggttagagcatttataatctttgtgcacctggttcgctactagttcggagtcccctttcacgatcagtcgtttgaccccaagtgcggctgcagctcttatcccggcgagtagtccttcgtactcggctatgttattggttgccctgaagttgaggtggattgcgtgcttgaattaatctccggaaggagatgtcaagatgaatcctgcccctactccttggctgttgagtgcaccatcgaacgccattgtccacgtttcgtcgtcgatttggttgtctgatttgttatcaggcatagtccaatcggctacgaagtcggcgagtacctgggacttgatggctgttcgtggcacaaagtggacgtcaaactggcttagctctactacccacttcgcaatgcggccgacaatgtctttgtttctcacgacttcaccgagagggaaggaggagacaactgtgactctgtgggcttgaaagtagtgacgcagcttccttgatgtcatgattaccgcgtaaagcagcttttgtatctgtggatatcttgtctttgcgtcatggagagcttcgctgacgtagtagattggtcgttgtactttctctctctcgacagcaatgacggtgctaacagaataaggcgtggcggcaatatagaggaataattcttcattaggttggggagcaacgagtacaggggggtttgataggtagcgcttgagtgcaatgaatgcctcttcagcttcctgtgtccatacaaatttgtcttgcttctttagcagagcgaagaagggttgtgctcgttctcccatcctagcgacgaacctgcttagcgctgccatgcatccggttagcttttgtacttccttgagtcttttgggcgacttcatgttctcgattgctttgatcttctcgggatttgcttctattcctctgccagatacgaggaaaccgagcagcttgcccgacggtactctgaacgtgcacttctctggattgagcataaggcgatatcatcggaggttgtcgaacgtttcccatagatcgtcaatcaatgagtcgcttgtcttagtcttgacaacgatgtcgtcgacgtatgcctcgacgttgttgccgagctggtcgctaagtgcgccctggaccgtgcgctggaaagtattccctacggttatcagtccgaatggcatcttaacatagcagaataccccgaacggcgtgatgaatgctgtcttctcttcgtcctctttcgccatgctgatttggtggtagccagagtaagcgtcgaggaagctcaacagctcacagccggctgttgaatccaccagctgatcaattcgaggaagagggaagtgatccttgggacacgccttgttgaggtcggtgaaattgacgcacattctccattttccgttggccttccgcaccatgactagattggctagccactctggatgaagtacctctctgataaaaccagctttgagaagtttgtcgagctcttctcgtatggcttgttttcggtctggtgcaaatcgccacagtctttgttttactggcttggcatcaggtcgcaccaagagtttgtgctcgatcacctccctagggacccccggcatgtcagacggctaccaagcgaacacgtcagcattgtcgcggaggaaggtgatgagcgcgaattcggtcttgtcggggttggcactagagagtggaacgatcttgatcgcgccatctggtttcggcgtcttctttgtcttgctcactttcttgggaggctcagttgtagcgggtgggctgggcatgtgctcgaccatgtcgaggctccgcttgtcgcattgtaccgctagcttggcgttcccttgaatagtgattgttcctttcggtcccagcatcttgagcacttgatacgcgtagtgagatgcggccatgaacttcgcaagtgcagttttcccgatgatggcgttatacgctgtatcgaattcagcgacatcaaaggtgatctgctccgttcggaagttgtttgcttggccgaaagtcacaggcaacgtaattttgcccaatggtttggacgaggactggggagtaattccatggaagggttgatcggtgggtgtcaactcgctttgtgggattcccatcacgtccaaggtgctggcgaagagaaggttgattgagttgccaccgtcgatgagaacccgcgcgaccttgatgttccgaatagtgggttcgaccacaatcggatagcgtccttggatgacggcagtaatgtgcgagacgtggaggtcagagtctggatatgctgagtccgattcctgaggagtcgcctccgcatccttctcgaccactcgtactcgcttgcctttttccaacgccatgtgcttctcgagcgactttttgaaaacaaggcaatcttccaaagaatgtctgtccgtcttgtgtatggggcaccatgctttctttgcgtcgctaccttgtgggtctgggcgcttgggtgggttcgcgtattctgctgcgagaatttccgcttgagctttccttttcccactcttgcgatttttcttcttgcttgactcaggtgcgtccgtggctggtttcttttctccccggttttcagcttgttgttcttgcatctcagcgcatcgtctacgtgggtgcatcgctcaacgatctcgaataatctccgagtagttgtgatgcgtcttgtcgccaactcctgggtagtatagcgatctcggacaccggacttgaaggcgcgaattacagaagcgtcggtgatttcggggattgtatttctgcactcgttaaagcgccgaacatattccctcaaggatccacctgagttctgtgtcaacgcatgtaggtcgtcttcgatcgcgtggcgcttgtaagttccttggaagttggcgacgaactgctgccacaggtttgcccacgaagaaatcgagtagggcgggaaatgcgtcagccatgaacgtgcagagccttttaatgcagttggcagataatttgccaacgtgttgtcgtctgctccggcagcgtagagtactgtggagtagacttgaaggaattcttctgggtcagtactcccatcgtacttctctattgctccgggtcggaatctctcaggccatcggacatcacgcagggaacgaccgaaagctctacacccagcgctaggagcagtgggttgtcggcgatcgtgtgtccttcgtggatgtctgtctgacgatgaggatgaagaagaagatgacgatgatgatggatcgcttggttttggtgtaggattacgaggtcgtcggctggattctcgagaatcctgtcgtcgccctccgttgttgtcccggcgccgatctctgtcgtcctcgtcgttatggcggtgtcctcgaccagtatcgccctgcattcgcctctcacgatcatcatgatcgtggcgattgcgagggcggctccccttctcatgagccgccgccatcgctgcgtgacgtccccctcccacgagccgtcg

SEQ ID NO: 44628 - DNA, 1566 bp, Oryza sativa
  Clone ID: PAT_MRT4530_47670C.1
ccccccggcgcggcccccctgctgttggcctttcttttttttttttcgtgcctcaaaattcgagtttcacacgtaatagcattagtatttcttattgatgttataaaacagttaaggagagagattttactatttttttattgagacattaaccaagattatatgacacaaaaaccaagaaaatagtaggcacaagttatatcatcagaatacatagcaactgcaagttgctcaaaaattgtgacaaagcatcatcttgtccacagaaaacttgctccaattaccgaagaaaaactagcagcaccatgtctatccatcacaacgacaaacactttcctcatctattggaatgttttaaggtcttataggggtcttatgcggtggtctcgcaccttggtggcagcagaaagcttggacctcctctttgccaagctctcactcctgcgttccctctgctccttgagcctctgggcaagcagcttctggtactcggcagcctcggacttcttcttggcaattctttgcttcttctgggcgattctcgccctcttcctctgaagagtcaggggagtgacaagcctctggatcttaggagccttgctaaccttcttgccgttcttggtagtgaaggttctgcggtaagtgttgacatacttgcggacatcatcatccttggcaaggttaaacagcttcctgatcttagatgccctcttgggtcccctcatcctgggcttctcagtgtcagtcaagccaggaaggtcattatcacccttctttacaatcaccaagttgataacagagagatcttggctgacaatgcaaccacggactgacttccttctgcgctcaccatcacgcctgccatatccacggaagcagggggtacccctgtggaggagaaggcggacacgtccagaagtaagcacaccctgcttcatggggaaaccttgcttgtcacagcctcccatgatcttgaatacatagcccttgaattcttcgccaagagcatcaccactgacttcctgggagatcctcttgtcataaaatgcccggagcttctggtcgtcatcgatctcgagcttcttctggcacccggtggtcgggttggcgatgttgaacttcatggcggcggcggcggcggcgctagggctaggcgatgttgaacttcatggttgcgaagcggcgcgagctcgcgggcggcgagcggcgagtgcgcgggggagcggcggcggcggcggcgcgagggctagggttttcggccgtcgagctccttgccgttcatcccctcgatggcgtcgcgcatggcctgctcgctcgagaacgtcacgaacccgaacccgcgcgacctccccgtctcccgatcgttgatgatcttggactcgaggatctcgccgtaggtggagaaggcggcttcgagggagcggtcgtcggtggcccaggcgaggccgccgacgaagcagcggtactcaacatccggcgccgccatgctttcccacccgcgaagaaaaaaactcgagactagttctctctctctccctcgtgccgaattcctgcagcccgggatcc

SEQ ID NO: 44629 - DNA, 1955 bp, Oryza sativa
  Clone ID: PAT_MRT4530_47671C.1
gcacgagggcgaaggagacggcgacggcgacgaggagatgacgaaactgaaggagtatttggtgattgaatctgcagaggtcggtaatgaagatgggaggcaggaggatctgcttgttaaggaagggccaggggagcaccaagaaaacaccatcagagattccgacgaagcgaaaaatgaggattgcagcaatagcgggtcagtaaccgaagccgtcgtatcaagcgaagaacccagtgacaggagcagcactgaagaacccagtgacaggagcagtactgaagaacccagtgacagtagtagtggtggtgacagtagcagccaatctgctgattctgatggaggtagcaaagaggcgcctaagatggattcgaaggccggtaacgatgacagcagcgagtgcaccgatcagagctctcctcgcgcggtgctagacatctcggtatccggtagtgtcgactccgatgagagctcctccgttgagcagccagcggagtcgaatcacaatacgcagtggaggaacctgatcagtggattgatactcaggaggaggaagtcgatggcgagagcggggacattccctcagagaaccaagaccacagggcttaagaggtacctggagaggatgcggagcggcaagaaccagatcgattgcggcgccattgctcctgagatccttcctgagatcagcaagtggaggccatcatggagaagcttcgactacagtgagctttgtgctgcaactgacaaattcagttcagaaaatttgatcggaaaaggcgggcatgctgaggtgtacaaaggacatcttgctgatggacaatttgtagcagtgaagagactaacaaaaggtggtaacaaagaggacaggattagcgatttcttatctgagcttggaataatagctcatgttaaccatccaaatgcggcacagctcttggggttcagtgtggaagggggcttgcacttggttcttcagttctcacctcatggaagcctggcttctgttcttcatggcacaaagggagccctcaagtggaaggctaggttcaatattgctcttggaattgctgaaggactgctttatctacatgaaggctgccatcgacgcataattcacagagacatcaaagcatcaaatatccttctaactgaagattaccaacctcagatctcagattttggacttgcaaagtggcttcctgacaaatggactcatcatgttgtgttccccattgaagggacattcgggtatatgtctccagagtatttcatgcacgggatcataaatgagaagactgatgtgtttgcatatggagttttgcttcttgaactagtgacaggacggaaagccgtggattcctccagacaaagcctagtaatatgggcaaaaccattgctcgactcgaacaacatgaaggaactagtggatccttctcttgatgttggatatgatccagaagaaatggctcacatcctagcagtggcatccatgtgcattcaccacagctcaagctcgcggcctagcatgaaatcggtggtccgtttcttgaagggggatagggaatcactcgaaatgatgcaaatgcaaagaccaaaactcatgaaacccctcatgttcgactccggcgattcagaggattatactcgctcaagttacctcaacgatctcgaccggcacaagaagcttgccttggagcagtgatacttgagttgattttgactgccatcttttgtacatcatcatcattatcaacattgtgatcctcctcctttccaaaggtgtagtagtatgcaggctgtatggatggatgtaagggttcagtttatcagttgctccctttgttgctgatcaccatggtgtcattttggccaaatgcatgttgtgataccattattcgatcgatggaccatttcagccaaaaaaaaaaaaaaaaaaattctcctctctctcc

SEQ ID NO: 44630 - DNA, 535 bp, Oryza sativa
  Clone ID: PAT_MRT4530_47672C.1
gcgatcagcccatgcgcgacgccatcgaggggatgaacgccaaggagctcgacggccgcaacatcaccgttaacgaggcccagtcgcgccgctccggagcggaggcgcggtggctacggccagcgcggcggagcggaggctacggtggcggcaggctacggtggtgtgcggcgcggtggcttacggccagcgccgtgaaggcggctacggcaggtggcaggtggctacggtggcgccgtggtggcggcagctacaggtggtggctacggcagccgcaggcggcaggcaactccgacgggaactggaggaactgagcggtggggccctccatggcacaagttatctatctatctaatcgagctaccatcatgcatcatccgatcgttatcatcgttagttttgtgtggaactatctagtttgtgttaactgtgtggttgcccatctgtgtttttgatcgcaagaagaaagctcgtctcgtttgctttgatcaaacgaatgaatgaatgaatcttagtgtgcaaaaaaaaaaaaaaa

SEQ ID NO: 44631 - DNA, 676 bp, Oryza sativa
  unsure (1)..(676): unsure at all n locations
  Clone ID: PAT_MRT4530_47673C.1
ccggccgggtgcctcacaacgaaatcgccgcccagatttgtcgacaggctggtctcgtgcagaagcagggcatcaccaacaagggtgttcatgacggacacgaagagaacttctccatcgtcttcggtgctatgggtgttaacttggaaaccgcccgcttcttcacccgcgattttgaggagaacggcagtctggagcgcaccactcttttccttaaccttgccaacgatcctactatcgagcgtattattactcctcgtctcgctcttaccactgctgaatactacgcttaccaactcgagaagcacgttctggtcattcttactgatctttccgcttattgtgatgcccttcgagaagtttcagccgctcgagaagaagtccctggtcgacgtggttaccccggttacatgtacgctgatttgtccaccatctacgaacgagccggtcgtgtctcgggtcgaaacggttccatcactcagatccccattctgaccatgcccaacgacgatattactcaccctattcccgatttgacaggttacattactgagggtcaggtctttattgaccgagctctcgataaccgtggtatctacccacccatcaacgggctgctttcgctgnctcggctgatgaagtctgcttatggtgagggcatgacccggaaggatca

SEQ ID NO: 44632 - DNA, 830 bp, Oryza sativa
  unsure (1)..(830): unsure at all n locations
  Clone ID: PAT_MRT4530_47674C.1
cctcgagtccaagatcatcacgatcgggaacggggagttcgcgcggggtttcgggtttcgtgacgttctcgagcgagcaagccatgcgcgacgccatcgaggggatgaacggcaaggagctcgacggccgcaacatcaccgttaacgaggcccagtcgcgccgctccggaggcggaggcggcggtggctacggccagcgcggcggaggcggaggctacggtggcggcggctacggtggtggtggcggcggcggtggctacggccagcgccgtgaaggcggctacggcggtggcggtggctacggtggcggccgtggtggcggcggttaccgtggtggctacggcaggctcggcggcggtacttacgcggtaactggatagactgactggggtatgcattattggcaagttttttattttgctaatggagctggtagtaccatagccgatggatatatttgtcatttttgttgggagactcgagctccgaacgatgggcgtgtgtgcgcaaaagcagtatgttttataataagggntagttcctcctnagtgtgttacttctgacgagagtagatgttttgatagtcgcttctgtagagtccacacataagctctacacactgccgaatcgactttagattgatattttaggggttttgcttgtaggatgagtgatggtgaagcgcgtctccagtggtttgccgttgtgtcggtgggggcgtggtggttatgttggttatgaggtctgttaaggatgtatcgcgtgaatttttgtaggtggttgtccacggtctgtcgcatgtacgcgcggattgtcacatttcttcttat

SEQ ID NO: 44633 - DNA, 2469 bp, Oryza sativa
  Clone ID: PAT_MRT4530_47675C.1
atggccgcctccgccgtcgccgtcgcgttcgtcgtggcggtggccgccgtgctggccgcggcggcgtccgcggccgtgacgtacgaccggaaggctgtggtggtgaacgggcagcggaggatcctcatctccggctccatccactacccgaggagcacccccgaggcaaggcgcacacgcttccccttcctcctcctcaccatgtggccggatctgatagagaaggccaaggacggcggcctcgacgtggtgcagacgtacgtcttctggaacggccacgagccgtcccccggccagtactacttcgaggggaggtatgatctggtgcacttcatcaagctggtgaagcaggccggcctctacgtgaacctccgcattggcccctacgtctgcgccgagtggaacttcggttttcctgcacttgcagctgagatgcagaagttcaccacaaagatcgtcgaaatgatgaagtcggaagggctctttgaatggcaaggagggcctataatcctctcccagatagagaacgagtttgggcccttggagtgggatcaaggtgagcctgccaaggcatatgcatcatgggcagctaacatggcagttgcgctcaacaccagtgtgccatggatcatgtgcaaagaagatgatgcccctgatccaattattaatacatgcaatggattttactgtgattggttctccccaaataaacctcacaaacctaccatgtggactgaagcctggactgcttggtatacaggctttggtattccagttccacatagaccagtagaggatctagcatatggtgtcgccaagtttatccagaagggtggctcttttgtgaattattacatgtatcatggtggaacaaactttggacgcacagctggtggcccattcattgccactagttatgactatgatgctcctattgatgaatatggtttgttgagagaaccaaaatggggccacttgaagcagttgcataaagccataaaactttgtgaacctgccttggttgcaggagaccccattgtaacttcacttggaaatgctcagaagtcatcagtttttagatcaagcacaggagcttgtgcagctttccttgagaacaaggataaagtatcttatgcaagggtagcatttaatggcatgcactatgacctgcctccgtggtccataagtattctcccagactgcaaaacgacagtcttcaatactgctagggtgggaagtcagatttcacagatgaaaatggaatgggctggaggatttgcatggcaatcatacaacgaggagataaattcctttggtgaggatccacttacaacagtaggattactggaacaaataaatgtgacgagggataacacagactacttatggtataccacatatgtcgatgttgcccaggatgagcagttccttagcaatggggagaatctcaagcttactgtgatgtcagctggtcatgctttgcatattttcattaatggacaactgaaaggaactgtttatggcagcgtagatgacccaaaactgacttatactgggaatgtgaagctctgggcaggcagcaatacaatttcctgcttaagtatagcagttggcctcccaaatgtgggagaacattttgagacttggaatgctgggattcttggcccagtgacgcttgatggcctgaatgagggaagaagggatctgacatggcagaaatggacttatcaggtaggactgaaaggtgagtctatgagtcttcattcactcagtggaagctcaacagtggagtggggagaacctgtgcagaagcagcctctaacatggtacaaggcttttttcaatgcaccggatggtgatgagccattagctttggacatgagtagtatggggaaggggcaaatctggataaatggacaaggtattgggcgatattggcctggctacaaggcttctggaaactgtggaacctgtgattatcgaggtgaatacgatgaaacgaagtgtcaaaccaactgtggtgactcttctcagagatggtaccatgttcctcgttcatggcttagtcccacaggaaaccttttggtcatattcgaggagtggggtggtgaccctactggaatctcaatggtcaaaagaagcatcggaagtgtctgcgctgatgtgtccgaatggcagccatcaatgaagaactggcatacaaaagactacgagaaagcaaaagtccacctccaatgtgacaatggacagaagataactgaaataaaatttgctagctttggcacaccacagggctcctgtggaagctacaccgaaggaggctgccatgcgcacaagtcgtacgacatattttggaagaactgcgtcggtcaagaacgctgcggggtaagcgttgttccagaaatatttggtggagatccatgcccagggacaatgaaacgggctgttgttgaggctatatgcggttga

SEQ ID NO: 44634 - DNA, 850 bp, Oryza sativa
  Clone ID: PAT_MRT4530_47676C.1
agaggtgggttggcttctcctccccctcccggttcggttcggttcgggtccggttcgatttcgtttttttttcttcttcgtggggttggtgggaaagcatggcggcgccggatgttgagtaccgctgcttcgtcggcggcctcgcctgggccaccgacgaccgctccctcgaagccgccttctccaccttcggcgagatcctcgagtccaagatcatcaacgatcgggagacggggaggtcgcgcgggttcgggttcgtgacgttctcgagcgagcagggccatgcgcgacgccatcgaggggatgaacggcaaggagctcgacggccgcaacatccccgtcaacgaggcccagtcgcccccctccgaaggcggaggcggaggcggctacggccagcccggcggaggcggaggctacggtggcggcggcggctacggtggtggcggcggcggtggctacggccagccccgtgaaggcggctacggcggtggcggcggctacggtggcggccgtggcggcggcggcggctacggcggtggctacggcagccgcggcggcggcaactccgacgggaactggaggaactgagcggtggggccctcatggccaagttatctatctatctaatcgagctaccatcatcatcatccgatcgttatcatcgttagttttgtgtggaactactatctagtttgtgttactgtgtggttgcccatctgtgtttttgatcgcaagaagaaagctcgtctcgtgtttgctttgatcaaatgaaatgaatgaatgaatcttagtgtgcaaaaaaaaaaaaaaaaaaaaaaaaaaaaaaaaaaaaaaaaaaacaccacacccc

SEQ ID NO: 44635 - DNA, 500 bp, Oryza sativa
  unsure (1)..(500): unsure at all n locations
  Clone ID: PAT_MRT4530_47677C.1
cccacgcgtccgcccacgcgtccgaagctggtgaagcaggccggcctctacgtgaacctccgcattggcccctacgtctgcgccgagtggaacttcggtgggttccctgtttggctcaagtatgtccccggcatcagctttaggactgataatgagccgttcaaggctgagatgcagaagttcaccacaaagatcgtcgaaatgatgaagtcggaagggctctttgaatggcaaggagggcctataatcctctcccagatagagaacgagtttgggcccttggagtgggatcaaggtgagcctgccaaggcatatgcatcatgggcagctaacatggcagttgcgctcaacaccagtgtgccatggatcatgtgcaaagaagatgatgcccctgatccaattattaatacatgcaatggattntactgtgattgggtctccccaaataaacctcacaaacctaccatgtggactgaagcctggactgcttggtatacagg

SEQ ID NO: 44636 - DNA, 935 bp, Oryza sativa
  Clone ID: PAT_MRT4530_47678C.1
tccgttgaattgtaactcccatggtgagcggccgctctagaactgtgtatcccccgtgcggtagtgaattcggcacgaggcagaggtgggttggcttctcctccccctcccggttcggttcgggtccggttcgatttcggtttttccttcggttcgggggttggtgggaaagcatggcggcgccggatgttgattaccgctgcttcgtcggcggcctcgcctgggccaccgacaaccgctccctcgaagccgccttctccacctacggcgagatcctcgagtccaagatcatcaacgatcgggaaacggggaggtcgcgcgggttcgggttcgtgacgttctcgagcgagcaggccatgcgcgacgccatcgaggggatgaacggcaaggagctcgacggccgcaacatcaccgtcaacgaggcccagtcgcgccgctccggaggcggaggcggcggtggctacggccagcgcggcggaggcggaggctacggtggcggcggctacggtggtggtggcggcggcggtggctaccggccagcgccgtgaaggcggctacggcggtggcggtggctacggtggcggccgtggtggcggctacggcggtggcggtggctacggcggcggctacggcggcggctacggcggcggctacggcagccgcggcggcggcaactccgacgggaactggaggaactgagcggtggggccctcatggccaagttatctatctatctaatcgagctaccatcatcatcatcatccgatcgttatcatcgttagttttgtgtggaactatctagtttgtgttaactgtgtggttgcccatctgtgtttttgatcgcaagaagaaagctcgtctcgtttgctttgatcaaatgaatgaatgaatgaatcttagtgtgctccgctctcgtcaaatccatcgaattattt

SEQ ID NO: 44637 - DNA, 1950 bp, Oryza sativa
  Clone ID: PAT_MRT4530_47679C.1
atgatgatgcagctcctcctagtgatcatcatattgtccacagtgatgatctcctcgtccgatgcttattatcaatcatgcagatgcttgggtgatggcaagaacaaccagacttcctgtgatcaagcgatcgacgactccatcaaaggttcagggcagctaatttttcgacgcatacagccgccgatcactagcgtcgcctttaatgtgagcttcatcggaagcctcgccttcatcctccgcccagtcccagctggaggagaatatagcaataatagcgatgcctatggctccctcgtgttctccggcaacacttataataaaacgacgacgattattactcattctgactgctgcagcactggcgacagtagttccaacgtttttgttaagatgggtgcattaaaaaatgtttctacctttggtgtaaacattacaatctcacggaaggcctccaatattcaaatagtacaagggaacaactacaccatatctgtatggattgattacaatcgtgcagctgaagctgcagatcgcagcatatcggtcttcgttgccaaggcaagagagacgaaacctaaggaagccataatcgtcaacaaggacgacaatatcagcaaaggcgcaaccctgcaaggctgcatcttctcgtcgatggacctgcaacgactccatcagatcagtgacatggatgtgacattcgcctatggccaacatgttagccatagcccatcgaggtcgttgccgaccatactggcatcagttctcggaccagcaggcggtgcagtcattgctgcagctgtgacatggttatacttcaactcctcctacaggaggtggaagaaggacttcgatcagctggccaagtccatgcaaagcctccccggggttcctgtcaagatcagcttcgccgatatccgcaaggccaccaacaacttccatgacaccatgaagctgggcagcggcgcatttggcgccgtctacagatgcaagctccagtccttgaacttgaaggagcaaccggtggaggtagcagtcaagaagtttacacgtgccgacacccggtcctaccaagactttctcgccgaggtcagcatcatcaatcgtctgcgccacaagagtattgtccctctcatcagttggtcatacaacaaaggagagcccctacttatctatgagtacatgcccaatggtagcttagacaggcacatattcgctagaactgaccagctgcatggtggccaccatacaacgatccggcaatgggacacccgctacaacattgtcagggatattgccaccggcttgcactacgttcatcacgagtatgagcccaaggtgctccaccgcgacatcaaggctagcaacatcctgcttgactccaccttccgtgcccgccttggtgactttggtctcgcctgcaccgtcgccgtcggccggagctccgtctcgtgtggtgtcgcaggaacattcggctacatcgccccggactacgcaattaacctgaaagcaacgcagcagactgacgtctatgcgtttggggtgctggttcttgagattgttactggcaagaaggcgatgctgaatgacgcacaatttggccatatcacagattgggtctggcatctccaccaacgggggaggctccttgaagctgtagatggcgtgcttggcactgccggccatggtgagttcgatatcgaagaggcaagacgcttgcttcttctaggcttggcgtgcagcaacccgaacccgtcggaccggccaacgatggtggtggcggtgcaggtgattgcaaaattagcaccggcaccggatgtgccacttgagaagccgactgttgtgtgctttcctcctctaactttgccagtagggtcttcatcatctgaatgcactgattattacgtcacggcaaagggtagtctgcagatcaagagctcaatggtatag

SEQ ID NO: 44638 - DNA, 364 bp, Oryza sativa
  Clone ID: PAT_MRT4530_4767C.1
ttttgttttttctaattattcattaattgggggttaacagtatcattggggagttccatgcacaccaccctgtttacaaaacccagcacaaaacctgcacagagggatacactaccacttccaatgtcaccttcaacataaacagactacttccatccccacgaagaaaggcgaagtcggacctacaaacaggccacggacctacctccattgccaggcatagataacactacaactattgtaaaacaccccattcgggggtgaccgacctgaataagttgggggggccgggatctcatagacacccaaaggggcaccgcctgaccggcggggtatgaaactaccacctgcaaaccaagaacgg

SEQ ID NO: 44639 - DNA, 3054 bp, Oryza sativa
  Clone ID: PAT_MRT4530_47680C.1
atggcgtctcgcggcggtggcggcggcggcgacggcaattcccctcctccctccgtgtcgtcgccggatgtgcgaccgtcgagccctctcccggcgaccaactcctccccgcctcagtcggggcggcgcggcggggggcggcgccggcgtggttccgccagcccgtacccgtcgtccccgtccctcggcgggttcgagacgccgccgcacccgggccgccgcacgccctccggcggcgcggcggcgcggcagcagcggcagaactggacgggggggcggttcccgccgaccccgtccacccccatgtccaccgacgacgtcccgctctcctcggaggccggggacgaggacacccccgagaccgacggcggcggcggcggcggcgcgggcgccgacgccacgccggtgttcgtctggggcaccaacatcagcgtgcaggacgtcaacgccgccatcctccggttcctccgccacttccgcgacccgcgcgacgccggccgcgtcgacccggtcatggacgagggcaagtacatgcgcgccatccaccgcatcctcgagctcgagggcggggagtcgctcgacgtcaacgcccacgacgtgttcgaccacgacccggacctctacggcaagatggtcaggtacccgctcgaggtgctcgccatctttgacatcgtgctcatggacctcgtcgcgcgcatcgagcccctcttcgagaagcacatccagaccaggatctacaacctcaagtcctcggtttgcttgaggaatctcaacccttctgatatcgagaagatggtgtccatcaagggtatgataattcggtgcagctcggtgattccagagctcaaggaggctgtgttccgctgcttggtttgcgggttctactctgagcctgtaatggttgatcgagggagggttactgagccgcacatctgtcagaaagaacaatgtaaagctacaaactctatgactcttgtgcataaccgatgcaggtttgcagataagcagatcataaagttgcaggaaacaccagatgagataccagaaggtggcactccacatactgttagtgtcttgatgcacgataagcttgtagatgctggaaagcctggagacagggttgagataactgggatatacagagccatgagtattagagttggcccaactcagaggacagtgaagtcgattttcaagaagacagacaagtctagacttcatgttgaggactccatggaaactgataaccccaatgctaacaagacaactgaagatgattttctcagagataaggttgagaaattaaaagagttgtcaaagttgccagatatatatgacagattaactaggtcattggctccaaacatatgggagctggacgacgttaaaaggggcctcctttgccagctttttggtggaaatgctttgaggcttccttctggagctagtttccgaggcgacatcaatattttgcttgttggtgatcctggaacaagtaaatcccagcttctccaatacatgcacaaactgtctcctcgtggcatttatacaagtggcagaggaagttcagctgttggccttactgcatacgttaccaaggatcctgaaactggtgaaactgttcttgagagtggagcgcttgttttgagtgacaaaggtgtttgttgtattgatgaatttgataagatgtctgataatgctcgaagcatgttacatgaggtgatggaacaacagactgtctccattgccaaggctggaataattgcatctttaaatgccagaacatcagttctagcatgtgcaaatcctactgaatcacgttataatccaaggctctctgtgattgacaatatccatcttcctccaacactgctttctaggtttgacctcatttatctgatattggacaaggcagatgagcaaactgatagacgcctggctaagcatattgtttcgttgcattttgagaatccaaacatagaggagctcgaggtcttggatttgccaacacttgtagcctacataagttatgcaaggaagcatatacaaccacagttatctgatgaagctgcagaagaattgactcgcggctatgttgagatgaggaaaagaggaaacagccctggtagcagaaagaaggtcataactgcgacagctcgacaaattgagagcttgattcggctcagtgaagcactggcccgaatgcgattctctgaaatggttgaagtacaagatgttgtagaggccttcaggcttctcgaagttgccatgcagcaatcggcaactgatcatgccactggtacaatcgatatggatcttatcatgactggaatatctgcgagcgaaaggcagaggcgggacaatctcgttgcagcaacccgcaaccttgtgatggagaaaatgcagcttggagggccctcagtgcgaatgattgagttgctggaagaaattaggaagcagagctctatggaagttcatctgcatgatcttcgcggtgctcttggcactctgatgacagagggtgccgtagtcatccatggagacagcgtcaagaggtggatccagccatccggaggaaggaagggtcacgaggccatcaagccatcgctgccctcttctcccctctcatctccagaccactaccgccttcctcttcctctccctatcctcggtgagctacagatccggtttggggtcattggaatcgatggtctcggcctccccactggtggatccgatcactggaatcatcgatacaaccaaaagagattatggaggataagatatctttatttgtttttggcaaaagatgcagttgagctcaactacattatctcctctgcaataattgtttttagtaccatcctgtattccaagcatccgtccaatgtcatagatgttagtattgtactattgccagtaaacaaaaacaatcagaggtctatacgatttggaattttcagccatgttgagttgaaatggacgttcaaggtgaaggataagaaacttgcattcctgatcgccagtgagcgggacaaagtacgctacgagtaa

SEQ ID NO: 44640 - DNA, 1398 bp, Oryza sativa
  Clone ID: PAT_MRT4530_47681C.1
atggacgcggagccgagcttcccccacgcagccgacggagacgacgacgaggtttactcaggatctacgaccatgtctccgctctccctcacctccccccgcgccggatcaggctccggtggcgcccacgatgattcgtcctctccgaccacctggcatggcctctccgacgccgacgccattgcgccgcctacctccacccacctcctggatgccggcggttctctttttggatcgcccgtctcggacaggtggttcatgtttggggacgcacgccaggcgcggtgcccggcgctcctggcaggtgcgtgcgcggttgtgctcgacgccacgcgccctgacggcttcgccatggtcggtcccgagggagacgtcttcgccgtcagcagcgacatcggtggtgctgggtctgatccggccggcggcgcacgggagatatcctggcgcgttgccctcttcatagaccccaacgccgccggcgttctccccttgccagacgggccctacctcgtccacagcacgaggagagggggtcgctggcgcgtgttcgtccgcacctcccccgacgaggcctccggcgtgcgcgtctacgtcgttgggacacgttcccgggaagacttggctgactctttgcacatcgccgtcgacaccacggacgacggcggagaggacggattggcccgtacgtggcgcgtcatggtggagtcggggctggacggggacacaggctcttggcgtaccaccgtccacaccggcggcagagccacagcgacggcctcgcacgagcacgtctccagacccatctctggcgtcatacgcagcagctcgtccagctcccattcccgatcccgatcatcggagggcagcagcagcggccagcatcagcgccagagcaggtgggaccagccaccaccgcctccttgttgctccggctgtggcaccacccaccgcgtggagtgggtcatgacgtgctgccacaggctgctgtgcgtcggctgcgcggaggtcaatccatgcggatgcccagagtggcagaacaggcgggggttcgccgttcccatactgcctcagcttgcgcttgaggaggaatgcgtggtcgagggagccatcgttccacagctgccgaggtggcagatcttctacgccaggcgcaccggatcggaggtataccacgccttcttccgagtgcaggacgtcatccacgacagaggcagcgtgctctgccagctctttttctacgagatggacggggatagcagacgttggcaccaggtccgctttgagatagtggaacttccatctcgatacacatggatgagatttcctcccatgaccgaggaggatacactggcttttgagttcttggttatacagtacaggcaccgccgtcgtcagtag

SEQ ID NO: 44641 - DNA, 290 bp, Oryza sativa
  Clone ID: PAT_MRT4530_47682C.1
tgtgttttttgaattttgggtgtttttttttttttttttttttttttttttttttttttgaaaaacatcccatcaccttttatggggcaggtggggggccaaccctgccctatgccgggtcctaaaaaaaaaccaaaaaaacagtttcccagcttttatgttttttaacatcgcaacccaaaaagggtttatacaatttggacaacaaactcctttttttgacatagggaactaacccaggggagggtcattgggctccattttactggggaaacaactaaaccatttgg

SEQ ID NO: 44642 - DNA, 1221 bp, Oryza sativa
  Clone ID: PAT_MRT4530_47683C.1
actcctcttcatcattgtctgcatatggggttccattcccttcttcatcactagcttgcattgtcgctgtcacacccagaaattcactagtaatttccgaacttatttgtgcattaaatcctcgtccaggaatcagccgaggcccaaccatcctgaacgaccatacccggctgtacagatctatctccaaaccaggaatataccattccaaaccaggagctaatcaaattattaccaattatagcatcatttattatgtcttcttgaatacttccaacacctcacgaatccttcgaaacgacataaacgacaagctaacacacaaaacgaggaaaaagactaataaaaaccaaataaacagtacataaaaggatcacccaaatgatcaaccgaaaccggcgaacggaaccagcggctctgaactaaaggacgactcaacatggacgaacgaacgaagcacggggaacacctcgttcgaacaaatgagcgaacgactcagcaacggctgcaactaaatcggacacggatagacgtcccaccgaaccaatcggggagagatagatgacgacggtgaaccggcggcaacacatggagatgacgacactagggccaaacaagattagattagattagatgggattaagaccctagggataaactacactgggaacggcatgggacgacgacgaacggcaacggaagatggccggcgacgagcttcgaagggcggcgaggtactgtccacggaggcgacgactttccggcgatgtgcggcgacaacggaggggtggccgggcttcacttcgcagctgtgaatccaatggaggcagcggcgaagcttggcgatgacgggaggagcagcagggcttcgccggagatcaaaacgcgacggcgagcttcgggttgacggcgatgatggagctccggtggatttcggcttcagggagatggctgccgggctttgcggagccgatggaggtgacggcgcaggaaggaggcagatgaggcggcggctagggacggctggagcggcgccggcgtttggagagagaaggagagcgcggggagagcgtttccggcgacggcggcggacgggaaatgagaggatagggagaggacgactagggggtcctttgtataggcacgggagctcgggatcaagcccacaacgacgggaaaaactcgggaaagtctagggttctcgccggaaaaaggaaggat

SEQ ID NO: 44643 - DNA, 249 bp, Oryza sativa
  Clone ID: PAT_MRT4530_47684C.1
atggcaagcagccagccagccacatttcacggcagacggcatcctgcgtcaccgacgccgtggtcggtggaaaatggccgtggccgtgggagaggtcatcacgacgaacccactctgatcccgccgatgccgtcgccaccgccgccgctgccaccagcatcgatcgacaaggaggaggcgtgcaacaccttcgatgaggacgacactgacttcaatcttccattgattgtgagcatagacaccttctaa

SEQ ID NO: 44644 - DNA, 618 bp, Oryza sativa
  Clone ID: PAT_MRT4530_47685C.1
atggaggatgccggccctacactcggccttccaaaaaaggccgacgtgcctccactcttcttctccaccgaacagcccacgaagccaattagcccactaaccaggcggcgcgaggcggcgtgcggcggcaggggcacagctgcgcgaggcggcggcggcggggctacgcgaggcggcgtgcggtacggcggtggggcgcagcggcgcgaggcggcagcggcggggctacgcgaggcggcgtgcggtgcggcggcgcgaggcggtggcgacggcttgcgggtgtgcagcgcagcggcggggtcacagggggagtggaaggccctaggcgtccgaagatcctggttccgccactggttggcggcaagccgccatgccatcgtcaacgcaattccggcgccaaccgctgttccgcaggaccacacgaggtgcaggctgcagccgctgctttcttcttgcttctgcttgccaccgttcagaccggccagggcacgccggtcagaccgctactgtggcaccggtctgaccgcccctggtcaggccaagcccagtgaaaggcaaaatgattttgtgtgtgtgtgtgatgaaaaagtgagcacaagtgaaaatgcaatgacctaa

SEQ ID NO: 44645 - DNA, 870 bp, Oryza sativa
  Clone ID: PAT_MRT4530_47686C.1
atggagatccatctggaagacaacatgttcatgaaaatgtcacaggatttaggaatggcgtcgaaaatccgaactaaaggggggaagaggagcatgacagggccaggggggacgcactcggcctgggttgctcatcgcgaggccgacggcgaccagtgggcatctcacggcataggacagcgcctccgcacggctgcttgggatggcggcggtgaggctccaaaccccggcggcagccgggaaggccgtgcggcggcaaggcgcatggtggcggatccggcgccgccaccgtcagatctagcacctccgcagctggatctagcgtcgccgctgtcggatctaggctgcggtggtgcgggcgcggcgtcggtgacggaggcgcaggaggctttggcaggcggcggcaggcacgacggccgcggcaggcaggacggtggcggaggcacgggcggtcgcggcgagctggaaggcgcggctgctatggccagcaggcgcggaggcacgatagctgtggccggaaagcgcggaggagcaggcggtcggcagcaggcatggtggctgtggctagccggcgaggctagcggacggcacgacggaggagacgcggttggtggcgcgaggagacgtggccggtggccgtgcaacgcaaggaggagccccggaggccggcatggcgagaggaggcgtggtcagtggccgtggcgtgaggaggcgtggccgaggcgtgtgtcggtgcggcacgacgaggccgactggcgtggcggcggtggtcgtggcctgcgcatcaggaggggaggccagcggaggcacgtagagactggcccacaggggcgccggtgcactggtgcccatgcgccgacgaaggtttag

SEQ ID NO: 44646 - DNA, 469 bp, Oryza sativa
  Clone ID: PAT_MRT4530_47687C.1
gacaatcattgagaattcaagacaccgtgatggttctatatatagaaataaggcctttgaaggacatttctgtatcactaaccgcgatgagactcggttggagccaatgatgttctcggagccaacagattgccgacctagttgggaaacttgcagtatgcattcagcatgtgccatgatgcaaattttctcactaaagttggctaaaattcctattgacaatgactgcatacaattatatggatacatagcagtgcgggatgatttggataaattgcttaattatgttgtcaactatagcagggataatcccatcattatgcggcaggtacacattttgttcatgttctgttgatatggcttctaaaatatgctcagctgcattaatgaatcggccaacgcgaaccccttgcggccgcccgggccgtcgaccaattctcatgtttgacagcttatcatcgaatttctg

SEQ ID NO: 44647 - DNA, 1842 bp, Oryza sativa
  Clone ID: PAT_MRT4530_47688C.1
atggacatatctaggagtctctttagaagaatagcaagcagagatgataactgttctgataaacaaaaaggcaaatatgatgacatagatgagctgaaagatgttgcacaagtagataagcagctcgaaagatatcaacgagatactttaagggcaataaggcctcaacaagtatactgcatgggattttttgagaataagaatgggctttatagaatatctagagaagtagaattaagtgttctaacaaagccagtagaattaaaaatagtagctaaagaatttgaaaatagtttaaaatattcaggatataagtatattcaccaagataaattaagagatatagcagatgaatataataactctatgaaaagtgagtggcctaaaattagagacaaggaactttatttctatagagaactatccaggattaagaaacaaaaaaaagagaaaagcttggtcatagaaaccccgagaacccaggaaattaaaatagaacaaataaagtcagaagaaccaagagaagaaatccaaaagttagataaggtattaagtgaggaagagcaatgggaagtaaatgagaaattattactagagagttatgaagaagaaaacaacctgatagaggaaatagagaatatagaagaagaagataatgcagaacaatataatgattttatagactcattggatgaggaaggtttgcataatctagataatgcaatggaagctatggaagtagatttgggaataggaaaaaggaaaagatacggagagggttctgtaaaaaatgaaggagaaagagaaagaccagccagggcagcaggaagatggcctccagaaaaagaagaatattcatatcattatatcccaggacagtataggcacatgggcactaaaagaagagattttgagaaaccaataaaatttcaaaatcaaaaaagtgatggggctatactaaatctagcagcacatgatcccatagactggccaaatatcattagtatttggaaggggttaatagttcaaaaatacatacaaaatcagcataatatagggaataaggtgggggatatgataacttatttagaaacatttttgggtgaatctgctaaagtcctatgggaacaatgggttgaaaagaatcctaataactatgaagagctaaaaagagcaggaagtaatcctcacaactttgcaaatatagtatctaatattatcatagctgaagacccagaattaggatatacaaccctgcaaaatgaaagattaaaagaaatagaaaaattaactttaacaagctggaaagatgagattacaataagaaacttatccatgataagtgatgacatgataattggcctaaggtttttacaacaatcggtacaaaccacagtaatacatgagcaaggaattacttttatcccatatcaaaacaattggcggtggcaagcagcatgtcaaagcatatgtacgcttgatacgatcgagattcgagaggtgactgagagctcgagccaagagaccgcgagcctgtgcccgaaaaaaaagaaaaagaaggtgatctcaaagggccaaagaaagaaagaaaaaagaaaacgtgatctcaaagggccatattctttttccattggattgggccgaaatacagtttatccaatcactcttttgagcccaagaaataatctatcgaccaaaaaaattacagaaatagcccctgccgccctaatggtgggcggcaagctgacgtggcagacggtgggtcgaccgcgccgtctgccaccgtcggcaaaaattgcgattaggcccttgccacccatacagagggctgcaaggggctaa

SEQ ID NO: 44648 - DNA, 1728 bp, Oryza sativa
  Clone ID: PAT_MRT4530_47689C.1
atggaaaaattagattatgaaagtgaaataaaatattatgaagataaattaagagatatagcagatgaatataataactctatgaaaagtgagtggcctaaaattagagacaaggaactttacttctatagagaactatccaggattaagaaacaaaaaaaagagaaaagcttggccatagaaacccctagaacccaggaaattaaaatagaacaaataaagttggaagaaaaccaaaagttcgataaggtattaagtgaggaagagcaatgggaagtaaatgagagattattactagagagttatgaagaagaaaacaacctgatagaggaaatagagaatatagaagaagaagataatgcagaacaatataatgattttatagactcattggatgaggtaggtttgcataatctagataatgcaatggaagccatggaagtagatttgggaacaggaaaaaggaaaagatacggagatggttttgtaaaaaatgaaggagaaagagaaagaccagccagggcagcaggaagatggcctccagaaaaagaagaatattcatataattatatcccaggacagtataggcacatgggcactaaaagaagagattttgagaaaccaataaaatttcaaaatcaaaaaagtgatggggctatactaaacctagcagcacatgatcccatagactggccaaatatcattagtatttggaaggggttaatagttcaaaaatatatacaaaatcagcataatatagggaataaggtggaggatatgataactaatttagaaacatttttgggtgaatctgctaaagtcctatgggaacaatgggttgaaaagaatcctaataactacgaagagctaaaaagagcaggaagtaatcctcacaactttgcaaatatagtatctaatattatcatagctgaagacctagaattaggatatacaaccctgcaaaatgaaagattaaaagaaatagaaaaactaacattaacaagctggaaagaaacagatgaaattgaaaacaccaatgaagagtatgaatcaaccgatgaagagttagatttaattgacgaactagcagagatagttcatacaattgatgataatatggcagaagtctctacagacatgtccggaataaagaaaattcataatcagttagcttataatgttgaagtatacattaacggaactaaatatataatagatgagattacaataagaaacttatccatgataagtgatgacatgataattggcctaaggtttttacaacaatcggtacaaaccacagtaatacatgagctaggaattacttttatcccatatcaaaacaatgtgccatatatctcagaggtacgaaagcgtggtggagccagaatcaaacccgacaaccttgaagcactcaaccttgagtgtgaagaaagaattaatgaatatgaacttagtgagaatatagacatctattatatatcaaattccaatatagagtgcataggattacaagcatttgcaccaaattggtatagggatattaagtctaaaaaggatatagaaaaaatcgttcaaagattagaggatatccaaattataggagaaattcctatgaaatattgggagaaaaacgctatcgagtgtaaaattaatataataaacccagaatatattattaagactagcccaatagaagcaactctgaaagatatagaagaattttag

SEQ ID NO: 44649 - DNA, 723 bp, Oryza sativa
  Clone ID: PAT_MRT4530_4768C.1
atggcggcggcggctgtggagcagccggcggcagtggagaggtcggcggcgaggtggaggggccggggggaagcggccggcggtggtggagcactagtgtgcgatcttgcgcgcgcgtggtggacggcggcggcggcggaggagcggtggaacggcggcggagcggtggagcggcggcagaggcacggtcggtggagcggccgggcggcggtggagctggatcgacagccggcggcgtggtggagcacgaggccggtgcgagctcgaaggccggcggcgcgcggaggacgatggtcggcggcggtggaggacgacggttggagggtgaagtcgtcgccccggaccttctcccgtttcggcgtcgccttctttgggttcgccgcgacctcgccgacctcgtccacctctccgtttcggtcgccaacctccggaacgccgccgtccccatctacccgagccgcgccgccgccttcctaccgctaccggtcgccgttcccgtcgccgccgtcgacccggggtgagccgtggaccgccgtttcgcttcccccttccctcccctctctcgggcgccgctccgccgcgccggtggtcgctagcggcgaccaacggggcgcgggtgcgccgcctcccgtcggctgtgccggcgaggccgccttcgggcgcgccccgcggctgccatgtggggcccggccgtcagccgcccgcgccctcgggtgcggctga

SEQ ID NO: 44650 - DNA, 414 bp, Oryza sativa
  Clone ID: PAT_MRT4530_47690C.1
tcacctatcttctccacaggcggcggccagcgggcgcatgtgagcggtggagcggcgcgcgggcgggttcgattggtcgtcggtgttggaggcggtgcgggcgagcaacgacacccgcgtcaccgaggccctccgcgactgtcggatgctgctcgacgactgccgcgagatctccagcaacaccatcgccatcatccagcagggcgccgccttcgccgccatgctcgacctccacgccatcgagagccacgccggcggcagcgaggtcgacgtcgaggatgacatcagcggcgaggaattcgttgtcgggctgacaccgaacgtgacagtggccaacgacggcagcggcgacttcaccaacatctcggcggcgctggacgccctgccggagacgtacaccgggaagtacatcat

SEQ ID NO: 44651 - DNA, 3653 bp, Oryza sativa
  Clone ID: PAT_MRT4530_47691C.1
atggacatatttaggagtctctttagaagaatagcaagcagagatgataactgttctgataaacaaaaaggcaaatatgatgacatagatgagctgaaagatgttgcacaagtagataaacagctcgaaagatatcaacgagatactttaagggcaataagacctcaacaagtatactgcatgggattttttgagaataagaatgggctatatagaatatctagagaagtagaattaagtgttctaacaaaaccagtagaattaaaaatagtagctaaagaatttgaaaatagtttaaaatattcaggatataagtatattcaccaaggtatgtacataataggaatcaaaggaatgacaagaaagaaattaggagctaaagtgttaataaccttattagataaaagatgggacacaataaacaaagcatctttaggctatctagaaggagatatgaatgaaaatatgttgataacctatatagcgcctgatttaatgatgcctgtaaatgaattcatagataaaatgagttttggtttcaaacaaaaggatacgaagagtttaaaggaacaaatttattaataagtatagaatttataggaagattgactaatagaagtgccaccaaatacaaaatcaatgtaaatgatgtgatagaaaaaatgcattctaaaggaataaaattcatgagccctttaacaatagacactgaagaaagagcaggagaaaaatggccaattagtgaatttataaaaaataaaaccttgagtcagcctgaaaacttcataagttaccaagatagcaaagggaatgttagtattagatttacaaattataaaaccagagcttcggatgatttggatgcagaatcaactgacagaaatattatagataatagaagacatagtatttctgaattgatggaaaaattagaccatgaaagtgaaataaaatattatgaagataaattaagagatatagcagatgaatataataactctatgaaaagtgagtggcctaaaattagagacaaggaactttatttctatagagaactatccaggattaagaaacaaaaaaaagagaaaagcttggccatagaaacccccagaacccaggaaattaaaatagaacaaataaagtcaaaagaaccaagagaagaaatccaaaagtttgataaggtattaagtgaggaagagcaatgggaagtaaatgagaaattattactagagagttatgaagaagaaaacaacctgatagaggaaatagagaatatagaagaagaagataatgcagaacaatataatgattttatagactcattggatgaggtaggtttgcataatctagataatgcaatggaagccatgaaagtagatttgggaacaggaaaaaggaaaagatacggagagggttctgtacaaaatgaaggagaaagaaaaaagaccagccagggcagcaggaagatggcctccagaaaaagaagaatattcatatcattatatcccaggacagtataggcacatgggtactaaaagaagagattttgagaaatcaataaaatttcaaaatcaaaaaagtgatggggctatactaaatctagcagcacatgatcccatagactggccaaatatcattagtttttggaaggggttaatagttcaaaaatatatacaaaatcagcataatatagggaataatgtgggggatatgataacttatttagaaacatttttgggtgaatctgctaaagtcctatgggaacaatgggttgaaaagaatcctaataactacgaagagctaaaaagagcaggaagtaatcctcacaactttgcaaatatagtatctaatattatcatagctgaagacccagaattaggatatacaaccctgcaaaatgaaagattaaaagaaatagaaaaattaaccttaacaagctagaaaggtataaaggaattttctcaacattatctatataatgcaacaactgataagcaaggatacaataagggaatagttgagcgatattttaataaactacctgacccattaggtagtatgatttttgaggaatataaaaaggaaactgaaggagctgaaattaatatttcccaagccataacctttgtgttcaaacaattaagaaaaatatgcacaggaatacaagcccaaaggtcaatgaaacattctgattataatttttgcaataaaataatacaaatacctttatcatatggagaagataggcctagaaataaaagaaaccatagatatcaaagtagaaataacaataatataaagacaaagaaaaggtacttcttaagaagatcagataatagagcacctttcttacataaatgaaatgtaagaagatataacccaaagaaaacttatgataagacatgcagatgtttcatatgtaattctccagatcatttaagtagaacttgcccaaataaagatcaaaaaagatattctagtaaatatgaagaacaagagagagttttaattatagatagcgtaaatgaaaatatattagtatgtgatgatgaaataaaagatgacgaatcaatatattctatcatagaaacagatgaaattgaaaacaccaatgaagagtatgaatcaaccaatgaagagttagatttaattgacgaactagccggtttaaaaatagaaacgatggattagttaaattgtgaacatgattggattagaggaaaaggagattataacattaaatgtgctttttgcatctattacccaagccaagataatagagtaacctgtagtatatgcttaaaacaagcttgtgttgaatgtataaaagcaaataaacaaaaatggagaaaagagatagaattagaatcagatgaaaggatattatctagtagagtacgagtttttagaaaacagaataaataaactagaagtagaactagagaacctaaaaattaactatgatattaaggcattaccagaaaataaggatatacaaaataccgaatttaaagagcaagtgataacattaaaagacagtaatactgctaaaataattcaactaaaagatgccataactaattttggaaataaatatatagtaaaattgcctttcaaagaaattttgggaataagaataccggtaaaagtaaaactatcaccgaaggtattatataaaattctagcactagtagacactgggtgtataaaaaatattattcatgataagtacttcataaaatgttcagagatagttcatacaattgatgataataaggcagaagtctctacagacatgtccggaataaagaaaattcataatcagttagctcgtaatattgaagtatacattaatggaactaaatatataatagatgagattacaataagaaacttatccatgataagtgatgacatgataattggcctaaggtttttacaataatcagtacaaaccacagtaatacatgagcagggaattacttttatcccatatcaaaacaatgtgccatatatctcagaggtacgaaagcgtggtggagccagaatcaaacctgacaaccttgaagcactcaaccttgagtctgaagaaagaattaatgaatatgaacttaactataaccagcttaatagcaagaaaagctcaactagaa

SEQ ID NO: 44652 - DNA, 1347 bp, Oryza sativa
  Clone ID: PAT_MRT4530_47692C.1
atggcgctccgaccaccgcggccgtgtccggccggcgtgcagcagcggcagcacgacgtcgacggcgccggcaacgccaagacttccccggaacagaagctcgagttgctggacctgcaggaggaggacgacgagctcatcttcctcgacgccgacgacgaggagggacgccagctgcgcgagaagctggagtcgctggagcgggagttctgcctgctggatgagcagcgggacaacgcgctgttccagattcacgtgctggaagagacggtgcgcttccgcgaggagctcgtcaggcggctgacggcggtcacccccctcgtcgtcgcccagctcgacgaggtcgtcgacgagcaccacgccgtcgtgacgctgggcgacggatgcgagaggaagatgtgcgtcggcgtcgccggctcgctcgaccgcggcctcctcaagccctcggcgaacgtcgcgctgaacggccggtcgctcgcgctcgtcggcgtgcccccctccgacgtcgccgcctgctcggccgcgcggttcctcgtcgcggacgccgacaagccgggcgtcgcctacgacgacatcggcgggtgcgaggcgcagaagcgggaggtgcgcgaggccgtggagctgccgctgacgcacccggagctcttcgccgccgccggcgtcgacccgccgcgcggcgtgctcctgcacggcccgctgggcaccgggaagaccatgctcgccaaggccgtcgcgcgggagacctcggcggcgttcttccgcgtgaacgccgccgagctcgcgcggcacgacgggccgagggtggtgcgcgacctgttccggctcgccagggacatggcgccggccatcgtcttcatcgacgaggtggacgcgatcgcggcggcgcggcaaggcggcgacgacgacgacggcggtgccaggcgccacgtgcagcgcgtgctgattgagctgctcacccagatggacggcttcgacgagtccaccaacgtgcgggtgatcatggcgacgaaccgcgccgacgacctggacccggcgctgctccggccggggcggctggaccgcaaggtcgagttcacggcgcccgagagcccggaggagaagcggctggtgctgcagacgtgcacggcggggatgagcctggacggcgacgtcgacctcgacgccctggcggcgcggcgcgacaagctcagcgccgccgagatcgccgccgtgtgccgcaaggccggcatgcaggccgtgcgcgacaggcggggcgccgtgacggcggacgacttcgacaagggatacctcgccgtcgtcggcaagaagcccggcgacgccgccaccgagttccacttctacaactga

SEQ ID NO: 44653 - DNA, 197 bp, Oryza sativa
  Clone ID: PAT_MRT4530_47693C.1
gccgcacgtgcaacgacgcgtgcgcctgcttatatattctacgtggatgacatcactcggcgtcataaggttaacaggtgagattgtgagctatgcacaaagtgattgctccactcggccctatgcatgtcatgggcttgtttgtagctaacgtagcataaacaaccatcgagataggtgccacgatttctggagaa

SEQ ID NO: 44654 - DNA, 603 bp, Oryza sativa
  Clone ID: PAT_MRT4530_47694C.1
atggtggcagtggcattatgccgagctagtgatcaaggtgcgtcgctgctacgccaacgtctggtagaggatagaccagcgcctgacaacgtaggcatctacggagtcatggaggtgaggcatggcaacacaaggattagattgatgcatgcgtttgaaaaatttcaagcgagatggtatattggttttgatagtaccttggtgttaacagtaaatttggtaagccccaaagatgccatcggcctaaaatcaatatcggcttcaaagttctggaatcggccgatgggagttatcaagtcgccagcggttagattcttggaggattcggttaagaaaattaatctattcaaggaaacttatccagaagtgaccgagttcaaggaggatgcggcatattttttagggatgaaaatgattagggccctgtttgggggagcttgtcccagctgtagctttttccaaaagctgcttttgctagaagcagccccaaacaatccacagcttctgagaatgaaaaatgaactaagaagccagaagctgggttatagagcttttccagattctcagaagctggctaccaaacagctgcttctcagaatctaa

SEQ ID NO: 44655 - DNA, 288 bp, Oryza sativa
  Clone ID: PAT_MRT4530_47695C.1
atgaatgcaagtcggatcatcatcttccccatctacgcagtcgtgccgatctctccttacccaacaaccactgagatcgagatagcatcgactaagttgacggagaacaatcctcagtcgactacctctctcaaccaatctaagaggaaggtgctgacgacatcattttctcgaggacctcctaaggcagcaaactctcaagtaatctataggagcaggggcgcagctacggagggtgctggagggggccaacacccccctatccgaccatcctccctgctgtactaa

SEQ ID NO: 44656 - DNA, 1313 bp, Oryza sativa
  Clone ID: PAT_MRT4530_47696C.1
gcacgaggctccccgtcccccgactcgccgccggcgcgccaccggagaatccaaaccctcgccgccgccgacgccgccgcccggccgcgcagagctctgattccgcggaatccctgcgcgccttcgcgagattccctcgggtttgggcgggaccgtcgtcccctggcctgagggggggttgccgagttggcggcggcggtggcaggcggcgagatgggggcgaacgccgaccccacgggggtgcttctgggcgggccccaccaccgcaacccttcccccgcgccggcgctggcccagccgccgggcgcgagcaccgcggcggcgctgcgccacgacccggggctctccgtccggtggacgcccgaggagcaggccgtgctcgaaggagggctggccagctatgcggcggatgcagctgtagttcgctatgcaaaaattgctatgaatctgcctgacaagacagtgcgagatgtggccctgcgttgcagatggatggctaaaaaggagagtaacaagaaaaggaaggaagagtcatctaagaaaaacaaagaaaagaaggagagagccaatgattcttcatcaaaagggccagctcacctagtggcccgacctaatgctgctccatattctcttccagttcttcccatggatgatgatgatgtgtcatacaaaacaattggaggccaaactggtcaaattcttgagcacaatgcacagatcttgaaccagatctataccaatatttcaaacatgcaggtgcaggagaacatccctcttttatgtcaaactagggataatatacttgcagtcctgaaggagataggcgatgttcctgagataatgaggcagatgccaccccttcctgtaaagttgaatgaagaactggctaactctatgttgccgaggcctccacatacatgaggtgtgcaccggtgtgcgcaaccaatcaattgcgcatgaagatcagtttagatagatgggttatttgcatatgctttgtcgctatagattccagatgtctgattgtgctgtccagatcttaaatccagccatgtaacattctataccttggttctatttgttcagctgatagtaggtgctccgtgtacaagccagcagtttcagtgaaacaagttcgtagccctctagtccttgtagaaaaaaaacataggggttaaacttctgtacagtgtcgaaagaaatagcatcttttctgtttcagttatgtttagaactggcattcagcccaatcttacatgttcggacatgatataataccaccaaacttcttaaaaaaaaaaaaaaaaaaaaaa

SEQ ID NO: 44657 - DNA, 205 bp, Oryza sativa
  Clone ID: PAT_MRT4530_47697C.1
cggccgcccttctcttttctggggttctttgctaaagaacgatatttattatgaacaattcctgtgagcacggctagcatcacattgacactgatgaatatcgccgtatactcttcgctggacagctgagaaaaatcgtgtcgccctccatcgtttttcattctctccttcacctatccactcatatcctaaccgtaccagcctc

SEQ ID NO: 44658 - DNA, 469 bp, Oryza sativa
  Clone ID: PAT_MRT4530_47698C.1
ggttccatgcatgggggcgggtattagatatctgaaaaccttaatttgaacaaaaattaaacaaccatccatgcactggtatcgatatgcttgatggatctccaagtgatggatggatatatatatatatatatttaaatatatatatatatatatataagagtatatatgcatggcgtggagcttgattttgtctgcccatccatctatctactcctctatctaatggtaagaaaaaacatatatataatcctctactgattactgaacatgagaagctagatcgatcgcgcgagtaaacaacaacaacaacaacaagaagacaagttgatcgatcgtgagtagctaggattggcaatgacgatttggtgtagtggtgaagttggagatggaggaagaagaggaggaggaggaggactcggataggcggaggagctcctccaggtagtcggcaccgaggtcctccagc

SEQ ID NO: 44659 - DNA, 372 bp, Oryza sativa
  Clone ID: PAT_MRT4530_47699C.1
atggcgagcgaagatcagccacggccaacctcctcccctgacgaagcgacggcgagcgggggccgtggtgagaaggatgtccgctgccggcatcaattggaggggtggatgcccgacgcctccttcccctccaacgcggatcctgccgcccctccgtccccacacgtgtggatccgtcggcggcttcgagcgatgacgatgaccaggatgccagcggtagattcaagcgacaacgacgacgacagcaatgacaaggacagcggcgacggcttatggattctaggccaccaccattttcctcttatgctgccgtcgtgttccacctccagcgccgcaacttcgatctgggccctagcgccgaagcgagattga

SEQ ID NO: 44660 - DNA, 2058 bp, Oryza sativa
  Clone ID: PAT_MRT4530_4769C.1
tcagcggcgtaggtagacaaggtcggtgctgagcaggaacgggtacccgattcccctcctcttggacgggaagagcacgaagaggaggctgaccacgaagccgatcacgaggggcaccgtgttcaccaccttcctgggcacgccggggtagtagcacagcacgatgtcgtggtgcgacgcggcgaacgtgacgaaggcgacgagggccagggcggtgtggaagaggtccgaccaccgcagcctgtacctctccggctccctcggccccgccttcccgccgccccgccggcgacgccggccgccgacgcagaacgtgcggatgccgctcgtcgtggcgatgccgtaccggaggcggccggtgggggagcggaagctgtcggtgagcgtgaagaagacgcaggaggcagcgcagaggagcatgagggcgccggtgagggcgcggttgaggcgggtgcacttgccgtcgtcggtgaggaggggcgcgaagatggcgaaggcgaggatggtggcggtggggaggaggacgttgagccgcgccgtgccgctcaggatgaggttggtcagcaggatgaggctcgagctatcgtcgtcgtcttcgtcttcgcagtcgtcgtcttggtgtggatcaccagcttcgttgctggcttgatcgatgagcaccttgcattcttctttctcagccattggtaggggctgtatgagtgtatgcacgagcttgttgggggactttgcccccacatagaagctgagggggatgccttcagccgcatagccatcttcatcatgtttcggtattcggataggtagagttggtgggagtccatcgaccatatctttcgtcttgtgaagaagaaacgtcccagaaaggatggtaacaaaaccacacatctctgtcacaatttgagttggattttgacgatcccagtccttgaacattatcacactagccaaaatggttagtgatgtaaacattgtataatatataggcgaaacaactgcagtattgaatgtgtcaagagccttgtttagatagttcatctgagttagtatacatgcaacaacaacaatggtgaacatccatgtctgtggatagattagctggttcattcctgaaaaagtcagtttcaaggctattccaagtgctttcacactcatgaccgagagagaccctacaagagaacaaacaccaatatacaccataatgtgtgtctgaccatattgggggataaagcggaatatgagcacaaaagtcgcagcaagcacagtgactgcataaaatagaaaggctggttcagtagcaagagcccacacttcagctacagaatcaatttcacgctcctgcggcgcatgaagcacaatggttgttgaacccacaacacagaggacacaaccaagtataccaaatatgtgaagcttctccttcaacataatatctgcaagaacagcactgatgatgatgcttagcgcaccaagtggggttactaagatagcaggagcaaaggcatatgctgcaaagttagctacttctccaacaatcattgtaatcattccagcccaccacaatggttcatacaagtaggagtaacctccaacgcctgcgcggacgccggaggcgccggccttcttgagccccttcttcttgacgatgaagctggcgccgatgaagaagctggaggagagcgctagcaccagccccttgatgttgtcggccgacatcccctccacccagctcccgcccccggcaccggcggccgccgaagtggacgcctcagtcgccataccccccggcgcccccaaatcccggaaacccctctacaacctccgggggggcccgacgccgctagatcccgccgcggacgtggcgcatgcggagatccggatgcggcgaggagggactggctgcgctcgccgttccgggccggggtaggctacgggcggcgagggccacgcattcgatccgctctggactgcgtgggggccacggagaaatcgagcggcggagacggcggcgacggcgacggcgacggcgacggcgagcctcgtgccgaattcctgcag

SEQ ID NO: 44661 - DNA, 556 bp, Oryza sativa
  Clone ID: PAT_MRT4530_476C.1
ccgccgccgccgccgttttcttggagaggagaaatccgtacgctcagaggatttttggtagtcttgtttcgtgatattcgtgaagagggggggagctaaggggggattcgtaagatcagaattggatcacgcgggggcgcgctcgggatcgggggttccaaacacagcttcttcgttgaattatttcgtggtttgtagggcgtattgctatgtgttgctattgtttatgatgggaattttggtttgttggtgtagataagcttatctatgtaaaacaaaagtaagtggatgtactaatggagtcaaagggtggcaaaaagaagtctagcagtagtcgctccttgatgtatgaagctccccttggctacagcattgaggacgttcgacctgccggaggcgtgaagaagttccagtctgctgcttactccaactgcgcgaagaagccatcctgatagccctttcggcttctccatcctagtagtttacgatttcttgcaattccattatggcacttttcttctgacctatttctctggctgctgcttcctgataatcg

SEQ ID NO: 44662 - DNA, 508 bp, Oryza sativa
  Clone ID: PAT_MRT4530_47700C.1
tgcgccagtgagcccccacgctgattgactgtgagttacctcactcattaggcaccccaggcttcttacactttatgcttccggctcatatttgtatggaattgtgacggatacacaatttcacacaggagacagctactgaccatgatgtgacgcacaagctcgtaatgacggactcagctatagggaaacgctggtacgcctcaggtaccgatccggaattcccgggttcgacccacgcacgtccgcaccacgtcgtccgaatacttgccgaaagtcgagtctgaacggacacttaagaaggaatgctgctgaaccctatggcaggttccaagtaaagagggagcgaattccacagacgaggagatgcctgatgtccagaagttggacatcagatacgtcctgtagaccatgaatctctcaaggcatttgtgaaatgctcggacacatccatatatggttttcttttccagtgacagccggcgctgtatagcataccaatgaatcg

SEQ ID NO: 44663 - DNA, 1283 bp, Oryza sativa
  Clone ID: PAT_MRT4530_47701C.1
cgccccgcatcgccgccgccgccggagagggagagagagagagagagagagagagagagagagagcgagagatgaagacgatcttggcttcggagacgatggagatcccgtcgggggtgacggtgcacgtggcggcgaaggtggtgacggtggagggtccccgtgggaagctgacgcgcaacttcaagcacctgaacctggacttccagctgctggaggtggagggggtgaggaagctgcaggtggacgcgtggttcggcacccgccgcaccatggccgccatccgcaccgccatctcccacgtgccgaacctcccaaaccctcccctctaccccgccgccgccgccggcaggaaggggcaagaggaagccggcgaagatgaagaccatcctggcgtccgagacgatggagatcccggagggggtgacggtgcaggtcgccgcgaaggtggtgacggtggagggcccccgcgggaagctgacccgcaacttcaagcacctcaacctcgacttccagctgctggagggcggccgcaagctgcaggtggacgcgtggttcggcacccgccgcaccatggccgccatccgcaccgccatctcccacgtccagaacctcatcaccggcgtcaccaagggctaccgctacaagatgcgcttcgtctacgctcacttccccatcaacgcctccatcaccaactccaacaccgccatcgagatcaggaacttcttgggcgagaagaaggtgaggaaggttgacatgctcgagggggtgaccatcttgcggtcggagaaggtgaaggacgagctcgtcctcgacggcaacgacatcgagctcgtctctcgctcagcagccctcatcaaccagaaatgccacgtgaagaacaaggatatcaggaagttcttggatggtatctacgtgagcgacaagggtaccatcacagaggatgcgtaaactcctatcttcacctagtatcatgaagtgctgtttcttgtctcccgtgtctgatcatcctctgagttgcaattttctgagagactgaattttgtaatggtgggttatttaggatgtaatggagcatggtatcttatcctacatattgtttctgtttgcgattatgaagtctatttatcatcccctaaagacagtttactggaagcattcgtggttagataaacagcataatgctacttaaaaaaaaaaaaaaaaaaaaaaaaaaaggcgagtgtgagctggtatgttttcccctgcgtatgatggattgcaaactggaggagtgtttttcc

SEQ ID NO: 44664 - DNA, 655 bp, Oryza sativa
  Clone ID: PAT_MRT4530_47702C.1
taaaaaacttccaaattgaacaacttgactcccaactgcatttcaaactttgaaccataaaattcccaatattataaaccatggttcaaactttaaactatgaaaataaaacaaatttcaactgcaaataacaactttcaattaaacaacacaattgctttcaaatcaacactttgaatgcttcaggcatgacatcagatctaagggcagcggcagcacgtgcttgatccactagtagcagcatggcagtggagttaaaaaaatgtgccagatcaagtgtgagaatggagtgaatgggggagagaatgaagaagtgaaaggagattttcacatggtcgcagataacttagctgcctctaaatcatagttggcctgttctaaacttctactccctctgacagatatccaaggcaaccatgatgtcactaggtgctttcttggctggttgttggcttataagcaacagccagaatttgaattctagaacttaattttagagttgatttgggtttttgtaattgttttctatttttcagccttgtcttttggactgctaagaaagtaagaatagaaatataaaagtcttaccctaaaattatatttgattgcttcgtttatttacttcggcttaccaggttatcactgcagtatgata

SEQ ID NO: 44665 - DNA, 376 bp, Oryza sativa
  Clone ID: PAT_MRT4530_47703C.1
acaacatcaatacattaaaaaggctttagtggcaaccccttacaggggcaggatattgggaaaagagctacatccaactgatcagcagcccctctgaagtacattcctgcttgaacaacagaatggtacacataacatattacacagccagtacacttatgttgcttgccatgcatgaagaacttgtgttttatgaaaaggtgatccaaaccacgggaacctatgttacaccacctgcgtggacagggaccgggacaccgaaacatcagtcctatgcaaaggtcataggattgcaggagacaccctcaaccttgaaggttgcacgagggatgtatacttcatttgcaggaacaggagccaccttggtctcgggggt

SEQ ID NO: 44666 - DNA, 1122 bp, Oryza sativa
  Clone ID: PAT_MRT4530_47704C.1
ttttttttttttttttttttttttttttagcctaaaaccatccttttgcggccataaacattatactcaaacaaatcagagttatatactcacaacgagatggcattccgggctgctgcagtaagccaacagatatgtgaaactaggttttctgttatgaaaagttcattacgacaattatgactaattggcagcattccaaaatattcctcaacgttgacactccatgccacacaatacaatcgaaatttctagaataggcaacatttccgagcatctcggagacaagaccaacatcaccactcgaatgacactgagggggaaatatacaggggaagaagcaaaaatgctatctttaggtagtcgtttgacgacagacagttaagtgtagtgcacctgttgtagcactcgcttactcccccttgtgctccttatctttcagagcatttcctgtgatttacgaacaatgcgtctaacctttttcttgaaatcgtccctcttttctctccaatccttagccgcttcaatatttgctggagactcatcatttggactagagagcatcgaaatgatgctcagaactatactttcaactgtatgcacaggtgtccaccgttcgctcgcaagctcataaccgttgggatcttcgccaggtggatgaaggatagaaatgcatacgcgcccatcaggataaacatttggatgccacatctcagaggtaaaccttactgatgggggactattcggataattctgggggaaggtcattattgcattgaagtagcctccatcatacagggtatcgggcgggccgatgatggtgacctgccactcgaacacgttgctatcgtccacaagccccgccgagaacccatccacggggttcttcgcgagatctttgagctgcttctggagcaggaggctcgcctggctcgcggcagtcgccatgggaagcagagctcgatcggatcggagttagggttttggcgattggggggggtgggtcgccgcccttcctcgggacgagctttatttgtggaggcgtggagagttcgcaggtgcaagggcccggccggcggggcgcgcgagcggcggggagggggggggggcccgggcgcgggc

SEQ ID NO: 44667 - DNA, 2514 bp, Oryza sativa
  Clone ID: PAT_MRT4530_47705C.1
ggccctccccctctctgtccacgttcccccaccccacctcggcctaaaaccctagccgccggcggagcgggacctcaccggcggcggcgatgagcgggggcgggccgccgaagaaacgcaacttcaagatcgagctgttcaagcaccgcgtggagctcgaccccaagtacgcggagcggacatggaaggtcctggagcacgccatccacgagatctacaaccacaacgccagtggcctctccttcgaggagctctacaggagtgcctacaacatggtgctccacaagtatggtgagaagctatatgatggcctggagagaactatgacatggcgcttgaaggaaatatcaaaatcaatagaggctgcacagggtggtttgtttctggaggagctgaatgccaagtggatggatcacaataaggcattgcagatgatccgagatattctaatgtacatggatcgaacatatgtcccgcaatcccgtagaacacctgttcatgagcttggtttgaatttgtggagggatcacataattcactctcccatgattcatagtcggctgcttgatacccttctggatcttattcacagggagagaatgggtgaaatgattaacagaggcctgatgaggagcataacgaaaatgttaatggatcttggtgctgctgtatatcaagatgactttgagaagccgtttttggatgttacagctagcttctacagtggagagtctcaggagttcattgagtgctgtgactgtgggaactatcttaagaagtccgagagacgtctcaatgaggaaatggaacgtgtctcacactacttggattctggcactgaggcaaagataactagtgtggttgagaaagaaatgattgccaatcacatgcatagattggttcatatggaaaactcaggccttgtaaatatgcttgtagatgacaaatatgacgacttggctaggatgtacaacttattccgaagggtttttgatgggctatcgacaatcagagatgtgatgacttcatacctaagggaaacagggaagcagttagtgacagatcctgagaggttgaaagacccagtggaatttgttcagcgcttgttaaatgagaaggacaagcatgataagatcatcaacgttgcttttggcaatgacaaaactttccagaatgctctaaattcatcctttgagtacttcatcaacttaaacaacaggtcacctgaattcatatcgttgtatgttgatgataaacttcggaaaggattgaaaggagccacagaagaggatgtggaggttattctggacaaagtcatgatgctgtttcggtacctccaggagaaggatgtatttgagaagtactacaagcagcatttggcgaaaagactattgtctggcaaaactgtttctgatgatgctgagaggagtatgatagttaaactcaagacagaatgtgggtaccagttcacttccaaattagagggcatgttcactgacatgaagacctctcaggacactatgatagacttttatgccaagaagtctgaggaacttggcgatggcccaacacttgatgtccacattcttacaactggttcttggccaacacagccctgccctccctgcaaccttccaactgaaatccttgcaatatgtgataagttccggacatactaccttggaactcacagtggccggagattgacatggcaaacaaacatgggaacagctgacataaaagccacatttgggaaaggtcagaagcatgaactaaatgtatccacttatcagatgtgtgttctcatgctgtttaattctaccgatgggttaacctacaaagacatcgaacaagatactgcgatacctgcctcggatctaaagagatgccttcaatctcttgcttgtgtcaaggggaagaatgttctccgcaaggaacccatgagcaaagatatatcggaggatgacacattctacttcaacgacaagttcacaagcaagcttgttaaggtcaagattgggacagtagtggcgcaaaaggaatctgagccagagaaacaagagactcgtcaacgggttgaggaggacaggaaacctcaaattgaggctgctatcgtcaggattatgaaatccaggagggtcttggatcataacagcattgtagctgaggttaccaagcaattgcaagcccgattcatgccgaatcctgttgtcataaagaaacgcatagaatctctaattgagcgtgaattcttagagagggacaaagcagataggaagttatatcgctatcttgcatagaaggtcattatgtgattattgatgagcaaatggcttgtattcatgtaaaacggtttccatgacgtttgagttcagttttattcgttccactttgtccactgaatcaaagctacttctcgtttcccgtaggcaagctggtgttcagagttttccagctaatactgatgtcatgttacgagttgctgctatcttaatataatggagatggatcgtc

SEQ ID NO: 44668 - DNA, 334 bp, Oryza sativa
  unsure (1)..(334): unsure at all n locations
  Clone ID: PAT_MRT4530_47706C.1
tacgccgggcaataatgtttatgttggtntcatggtttggtctaactttaccgctactaaatgccgcggattggtttcgctgaatcaggttattaaagagattatttgtctccagccacttaagtgaggtgatttatgtttggtgctattgctggcggtattgcttctgctcttgctggtggcgccatgtctaaattgtttggaggcggtcaaaaagccgcntctggtggcattcaaggtgatgtgcttgctaccgataacaatactgtaggcatgggtgatgctggtattaaatctgccattcaaggctctaatgttcctaaccctgatgagg

SEQ ID NO: 44669 - DNA, 499 bp, Oryza sativa
  Clone ID: PAT_MRT4530_47707C.1
gttacgtttgaaagggaccaacaaaaacatctggagtaaatcattagattcgtgcgatcgagctaagtaaaggaatgaaagacgggaacaacttcaggtaggccacatgtgtatttgacacggtagactatcaagtaaggtacggtatatgtgtagtatatagccaattaggtttggaatactattaggggaacctgtagcggatggggaattatataggtagacgataagctgttacgactatctgtatgatcattgaatcctgtgttttgctagaatcatacaaatgttttaattagtgaaattcttttaatttctttctgccttaacagtcttttttatacttttatttgagttcatttaattatctttttttgtatttcacatatattgtttatatttatcttctatttttaatttttttaattaactattttttttttttatcttaattattattaattttatttatttaaatattttaattcttattattttt

SEQ ID NO: 44670 - DNA, 1114 bp, Oryza sativa
  Clone ID: PAT_MRT4530_47708C.1
gtgtgctagatactgcctatttattagaactgatcttggagtgattctgtccttccaagtgtcgatagcgcccattccaggtaaaagggttgagcaccaaggtgtcaagattgagcttctgggtcagatagagctgtaccatgagagaggccacttctatgacttcacttcgttagtgcgagaattagatgtcgctggtgaaatctatgaaaggaagacttatccatttgagttctctactgttgagatgccttatgattcgtataacggaacaaatgtcagattgaggtacatcctaaaagttaggattggcagaccatatgctactattgttgtggaatatcgagatttctgttttcagtttcttgttgcccggttatttttgatggtgtcaactataatcattggactcagcatatgcgtcttcacatgcgtggtcagcgtctttgggatgttatttctgcctactgatgaggacagagcaaaggtgcgaaagacttatgctgatgttatggagacttatcagagtcaatatgctatgtacaaggcttggttagatgaggatgctcgtgcttctgctattcttgtggctagtatggaggttcatcttactggcgatgtggtcatccttgcttctgctcatcttgtgtggacacaccttcgtgatcgttatgtgtctatcggtgatgctctttatcttgctatggtgcgtcaagagcagtctttacagcagagggatgctttagtggatgagttctatacacagactacacagctatcctctatttggtgccagcttgattctttggtccctgatgtttgtcgtacctgtaagtgttgtcagcgtcagcgttctcacatggatcttcgtcgcatctatgactttctcactcgtcttcgctccgagtatgaatcgactcgtgcacagttgcttgctcgacaccctcgtgttactttgatggaagctcttccggagattcgtcttcgtgaagcgggtgctctagtgcttccttctggctgttcgtactacagcttcggtaccttcatcaccgacagccgcttcctttactttgccatcacgtacttcttcaccagttgtgctatctaccagtag

SEQ ID NO: 44671 - DNA, 525 bp, Oryza sativa
  Clone ID: PAT_MRT4530_47709C.1
atgacatgtttgaccctgttgactgttgagtcaacttgtggggctcacttgtcagccgaccgcgtgtggaacgagggccctcaaaatcacaggaccggccctgtccacaagctcggccccggcaccctcgtcgccgccaagctctccgtccgtggcccacgcaccctcattggtggcgacggtggcatgcgtgctcgtcaattccggcgctgctcctggatggaggaatgggagacgccccacgagatgaggttcatcagcatcgtcgacgcccgcatctgccctctgccgatgataagccctgctgccgctgcttgggactggggcttgccatcctgctgctgctgctggatgagggtcagggtggtgtcgtcggggctgcttgaagacggcaatggcgatgatatctcatcaatgcctatcagctgcgctgccggggcagccgggcaggggcagggttgggcatccgggcagcggcagcagacctggggcaaggcgcaccgccagggatggggcaggcagtag

SEQ ID NO: 44672 - DNA, 2782 bp, Oryza sativa
  Clone ID: PAT_MRT4530_4770C.1
aaacaacagaattagtccaccattgccttccaatagaagagtagataaatcggtcttacataccatggttactctggtttattcactccgggtggcagtggtatcatagactcaaaaatgatacccacctctaactcaaataccgatacaaaaccagtatgcgatgaatatactttgctccagacacaaggtacaaatgcattcagcattcgtggccaaaaaaatcaaaacaaaaaaaactgttagccattaatcttgggattcacgtcttgatttagctctgttttcaagatcgctgaaccgctggcttagaacagaacttgatcgatctgattctgcaatagaagaacctgctgcaggtactgacttggatgcaccaaaaaggttgaaggtcggctgttgagccggagcaaactgagtttcgatgggaggaagatctaagaaactcctcacagctggcttccgaagaacaaaaccatacccaagagagaacaagttcgatgtgacccagtaaaagaaaattgccttgggaaagctcatcgtaaatggaatagtcaaaacagccattactctagagaaattcttcatcgtcttcaacataggatttccttccatgccatcttgcatatttaactctaccgtaaccaagaaagtaagcgatgtcaacattgggagaattaaaagctcatcaggagttgtcaaatcagtaaaccaatatatcccgcctcctttgaaagaaggaactttctcaaccatgtttgatatggcaaagaaaaagctcatgaatataggtgcttggatgaatagacccttcaatggtgtcagtggagttacgccatgccttagaaatagctcgcccaatttccttttcccctctagcattgactgaggatcagttgacatgcttccttcatctgttactcgtgtgctggatttttcattaccagcaatgcgagttgaagatatagttcgcatctccaaattaatggcttcaatttctggccgcattgccgtagccttcatctggttcagcagcagtgggacagttagcgtccggatcaacagtgacgtgagcgcaatacaagcccaccagttcagccccgtcaaggaatggacgccgtcgatgaggtgctgcagggcggcgaccggtgcaaacgagtcggcggccgccgcggccacctccccggggaacggcgccggggcggagacgggtacagacgccgcggcgtccgcgagggacgtccgccgggacggagaccgaagatgcggcgtcagagaggacctccgcggaggcatcgagctcgtcgttggagcggggcgaggtggagaggctgcggcgggacgcgtggaggaggccgaaggggagggggaggccgagcgcctgagatctcgacggcgagcgaagcgcggaggggagaggcggaggttgggcggggggcgaggggttctcggagtggtcatcgtggtgggaggggaggaggtgggagacagaggggtgaagacaccgcacgggcccagtgggccagcggacactcgatatgacggcacagcttaagcccattaatcccagtgatctccttgaaaaaagaaccttcaaactctcagttgaaggcaaaaatgcagataaaacatggagaaaatgctcaaaaattgatggaccaatccaacctgtttcatttctctcgttgacatgtgaaccacactcccattccaagggagctttctcctcttctacttctctgatctcccgctgcttgtcgtcccaatgctgcaccgtcttcctcacctgcctgcgcgggacgttctccttgttctccagcaggagcttcagcacgatgcccatggagatcagcagcagcccggtgacgtgctgctccgtcaatggcttggtgaatatcaggtacgacaggagcagggtcaccgccttcctcgccgtcgtcactttgaggagcaggacgagtgttctgaccatagctgttgttgcggcgccgaagagcgcgatgagggagagcaccgagacctggccgacgaacgtggccatcgcctcgaacaccagcacggcgtacacgtacatatgctgggaacatgcagtccacgcccgcatcagctcccctgttaacaccattggcaccaccaagaaaggtaggccaacaacagttgagcagaacaacatctccatctgtgtggtgtcagggttcatcttaaatatggcttcttgcagattacctagaaatgcatccatgacaagcgctccagaaaccatggccacaccaatcatgctgaaattaggtgatgattgtgcgtccgcgagcgtgaatagtatgaggccgataacaagcatcactgctgatatgtactcatggaacggatattttcttcttaatccaggtataaatgctcccattatcatcactggcaaaaccttggtggatttgaacataatttgggcggggtagttgaggaatgcgagggaacccttggtgaggccatgggatcccatgagcacagccgagagccgcacgtacgtccgccacgggttcaccatctgcttcaccgtgaatccctgcaggcgaatcagacccaagtacacgaacccctgcacaaatgtgaagtaccagccgaagctgaactgaagccggttgtagacgtattcctcgcagatgccattgacaaggtagccgaagaagaaccccgatgagcagatcaagaactgctgccacctgggcctgtctgtcagcgacacgccaaacagcctcctcccctgctcctcccctccggtcat

SEQ ID NO: 44673 - DNA, 1072 bp, Oryza sativa
  Clone ID: PAT_MRT4530_47710C.1
atggcaaatcaggcgctgattccgtctcagccgcccggctctatgatgcgcgctcttcctctgcgtgatctacaggctcgtactaccgatgcgccgttgatttctgcagggcgcagctttgcgacggattttctcgagataagggccaaagagccgtctgttcatgttctggttattcccggaaatccaggtatcgttgcattctacaaggactttgttgaagagctctatgagaacctcggtgggcaagcatctattacagcgattgggcatatttcacatagcaaaaaggatgcagagtgtggacgattgttttcgttgcatgaacaaattgatcacaaggtcgatttcattgagcaagaatttcaacattcggaacaatcattagttctggttggtcattcaattggtgcctacatatgcctggaaatcttcaaaagacttcagaagaaggtgaaactttgtgtaggactctatccatttttaacactcaacaagaagtccatgaagcaatcagctattggatatattgcaaggtcatctctcctaagtaaaggggttagctcatttgtttcttttatcggatcactccaagcttcagtaactaggggcatcatgagaaggttacttggaccttcatggtctgtaacggctgtcgaagctacatgcggccatctcttatggctctctgaagaaccggactggaatttcatcagtgcaaaacaggaccagattgcatttctgtttgatgtggacgatcactggggtccgcttgcacacttggaagaggtgaacagatcatttgctattccaaaactgctcttattattgtacttacgatcctgaaggccatacacacggctattactgcacggaagctggatcgttttgggctgcagactacgtggctaatttgattaaaactaaattctgattggaaattcaagatgaaaattgtaccgtagtcagactcagtatttttatcctccaaagggagatagtaagaataatgaaataaaccggttggatcaacctcatcaatcacaaattcacaatcgtcgtttggcctggc

SEQ ID NO: 44674 - DNA, 267 bp, Oryza sativa
  Clone ID: PAT_MRT4530_47711C.1
atgtccatcatgaactccttcatcaatgaaatcctcgagaaacatgtcaaagttaacaagacatctcatcaagcagcatgggagtgtgcaaggccccaggagtacatgtgggccctaggcgcggatcgtgctccgggagcgagctttggcggtgcttgttgcttgggcgctcaacctgaggactccgttggcaacgctcgctgccccgggcttagcctagcccaggatctcctcccagcgttctacgcagggtggtgggcccggtga

SEQ ID NO: 44675 - DNA, 671 bp, Oryza sativa
  Clone ID: PAT_MRT4530_47712C.1
tcaccatcgtgcccaacgtcgtcatcgtcgcggcggtcatccgcgagctgttctgggtccggcctaaccgcatctgagcccattgaggtacttggcaacgcaggctccattatagctcaacatagattgtatctgatgctggtgatttggtaattagtgcaaccagtggtttgtttgcaaccgactgaatgccttctttattgaagcagagcagtacatgagagctatagattcatgctgtagtacatgacatagatacacatttggggctctatctcttttgaacctgttgattatttatggcgagatgtccactaccgatgttgcttgtggggtcaggaggtgctatgatctcaagttctcaacagctccatcaggcatctggatcaaattatgcgtagggcccatttagcgagtccgttggttacactaaagtactgctgctacaaacctttggcattggtccttggagctgttgagcatacactgcttgcctctttgattgtctagtcatgacaaagtaacggatgttcgttgggataactacattcaggtccgctacatgttgtactggctgccgtcattgggcagagatattttgctgggatatgccatctgggtcaagtgtagcacaatggtaccagtccatattgagtctggatcttatctcc

SEQ ID NO: 44676 - DNA, 579 bp, Oryza sativa
  Clone ID: PAT_MRT4530_47713C.1
atgacgacagagggagtggagaaggcggcgagggcgggggagacggacggcgaaggaggggcgctgagaaggcgacgcggccgggggagacggacggtgacggaggcggcgagggcgggggaggcggacggcgacgaaggggggtggagaaggcgacacgggcagggaagacggacggtgacggaggaggcggagaaggcggtgaggccgggggaggcgacagcgctggagaggaaggagatgccgatggctcgaggcctcgacctccctcgaccccacgcgctcctgtcctcctcgacgcaccgccccatccacgcccagttcgccattgtcggcatctccagcgggcccagctccacgccgccctcgcatcccccaaatttcaatgtcgggtgtggggacccagtgtgtggtccgtacccgcatggggacggggatggggacggggacggggagaaatcatcccccgtctacggggatggggatggagacaggagctttttgtcagtttgggggcggggacaggatggcaatacccgtgggtacaaccccgttgccatccctagcttaaatacatga

SEQ ID NO: 44677 - DNA, 117 bp, Oryza sativa
  Clone ID: PAT_MRT4530_47714C.1
tggctactatggcaagacggtgaagggcaagcgatggtcggtcacgatggaccatgcggcggtgaagggcaagcaaggggcttggcaccgaagaaccaaatcggtggtgacggaaga

SEQ ID NO: 44678 - DNA, 239 bp, Oryza sativa
  Clone ID: PAT_MRT4530_47715C.1
cctgagcggggacaatcaagccgccttccaaacaaccggaagcacgcgcaaggggcccaaaggagggcgcaacgcgggaggaaaaagggaacggaaacaggcaacaaaaaaaagagaagggggggaaaagcacacaggaagggggagggagaggggaaggggaaaaacgaagacaagccgtaagaggaccgggggggacccaaggcgggctgagaaggggcccaagagccccaaggggg

SEQ ID NO: 44679 - DNA, 167 bp, Oryza sativa
  Clone ID: PAT_MRT4530_47716C.1
ttgacacgactatgaccgtgcttaccgtttgaccacccacagacactccctcgcacgcccggtgtgtgcttgtacaggcagactagacacgctgactagacgcttgcacccttgcccttgaccgtttggtcagacaccgccgactagactaccgggaccgacacttg

SEQ ID NO: 44680 - DNA, 504 bp, Oryza sativa
  Clone ID: PAT_MRT4530_47717C.1
atggtggcgagctcccgctacgccgcctgcacgacgctagccacagtgcacgggtggcggcggaggaggtgggatggggatttgatgatggccctagtggctcaccatcaccgcggaacaagctacttctgcaggcatggtggcgtgccccaccgcaacgccgaaagcgtgaaggccgggagcggattgaagccgctgctgtcggcgaagagccggaggatgggggcgccagccgggtggagggcggggaagcggcggcggaactccgggctggaggagaccaccacgcggacgcggcgccacggaggggaggggaggggaggggaggcggagaaagatctcctcgatgtgctcgtcaccgagggcatcgatggtggtgttgctcggttcctttccttctccggcggcggctcgctgcgactgtccatggcggtggtggggaatggggattgccggattagggaactagggtttgatccaactcctcgacaatggctttattag

SEQ ID NO: 44681 - DNA, 444 bp, Oryza sativa
  Clone ID: PAT_MRT4530_47718C.1
atgcgcatctcggccatgccgccgcctccggccctggtcggcccagcggcgccctcagtccctcattgccgctgcccctccctcactccgaaccagcggcgcggcgccgctccccctcctccccgccagcgataccgcttccccaacccctcagccagctcgccctccctctccgccgctgccactccctctcccccaactggcggcgccgcttcccctcctccccccaccggcgacgccgcttctcttggcagccggcatctcagctgtggtgccctcacactgccccccctcccggcctgtggtgtccttttccctgcggacggcgtcttctcctcggccggtgatagcaccctcctcgcgatgcacggtggcgcggccgccaagctaccacggcctcaaggcagcggcgtccttggctcccatgagcagtggcgtcgatga

SEQ ID NO: 44682 - DNA, 1424 bp, Oryza sativa
  Clone ID: PAT_MRT4530_47719C.1
atggagagggagctcctggaggcgttcgaggcggcgaggaaggcggcggacgcggtcggggaggcggcggcggcggccggggccggggaaggggagtcgccggaggccgcgcgctgcgtcgacgcgctgcggaggctgcgcggggctcgcgtcaccaccgccgccctcgtctccactcagatcggcagacgtattcgctatctcaccaagcatcctcactcaagcataaaagcaacagcttcagacctgttaggacactggaaaaaggttgtcattgaagaagacaagaaaaatggggcactgcagaatggaaaatcgagttctactgtggtaaaggttgagaaggtggagcctatgaaagttgaaaaggcatcaccaagggctactgtcaataataataatatggataccagagttgtgaaccacaaaggtggaaaggttgagaagttttctaatgctgagctgagaacccaatctatcaaggttgagaaagtacaaaaggtagttcacaaagtatcttctgttgagaagccgtctcctgtccaaggtggtcctccaagactgacatccgttgttaaatgtggtgatgctagtcgagacagaattcgggcgatacttggtgatgccttctccagagtttctgaagagactagaaaggatgacagggaggaagtgaggaacatcatagaagaagtaaaagcatgtgacccattcaggattgctgtgatggtagagtgtgccttgtttcagaagctggggaattttaatggacctaataagcaaaggtacagatcattgatgttcaatctgaaggatgatcacaacacagacttccggagaagggttcttctaggacaagtgcagcctgagagaattgctgacctaaccccgacagaaatggctagcgacaccaggaagcttgagaacaagaagatcgaggagaaggctctgttcgagtgcgagcgtggaggagcaccgaaggccaccactgatcagttcaagtgtggcaggtgcggccagcgcaagactacctactaccagctccagactcggagcgccgacgagccgatgacgacgttcgtgacctgcgtgaactgcaacaatcactggaagttctgctaagctaggcacatcctactgagaagtgttagtgtagttgaccctggagtttgacaggcaggttagtttcgggccctgcttatctgggcccgtttcatcttttttccccttaagttagcttgttccgaattcgatttgttctagtgccatttgactgcataatggccggccgttgggcttgcattgtcaggctactgctgttgtacttatcagtcttgtttattgtaccattggatgcaataatgccataatggtcatgctcaaaagaaaaattgcactggcccgacctgcccaacttgaactga

SEQ ID NO: 44683 - DNA, 209 bp, Oryza sativa
  Clone ID: PAT_MRT4530_4771C.1
gtagtgcacatgcaggattcgtacatgaagactgtattgatttgcttgagcatgaatgaatcatgcgcttgctgctgaagtatcactatcctatgctaacctttgcttgggcacattatataaagtctgtgtacgacttagcgctaaagtgattactgatgatgccaagcaatctccagacattgtccgcaacaagctgtgtgacctga

SEQ ID NO: 44684 - DNA, 630 bp, Oryza sativa
  Clone ID: PAT_MRT4530_47720C.1
atggcgaccttaggacagagggcgaaggaggcggtgggcggagcatgggggtgtctagatccggtggtccccagccacctaaagaccggatatagtgcccaggagttcggggcagcggagaggcgacaagcagtgaccttggggtggagagcaaaggaggcggcagccggagcatggggcgtccagatccgatggtgtaggggtgatgcatcagagaacaacacaaattctcccgaagagctacagattcaagatgagttggaggccgacatcgaggaggatttagaacgggagatcatcgacgacatgtgccgtctcactcggcatctgcagaggctatatcaacaaagggatttgagacaacttactggctcagctactagttaccagatgcctttgtaccatacaacaactgaagttctttctgagataaatatcaggataaacttggatgggcaatgcaatatcaacataactaagattgagcaagatgatgatacagaaaatcaaaggaagacatgccccaatgcttaccaatctgacaaaaggcaagggcatgtgaaggcaaggcagacttacacagtttctcgcaggaagcagcagaaccatccagttgcaccgtggagataa

SEQ ID NO: 44685 - DNA, 656 bp, Oryza sativa
  Clone ID: PAT_MRT4530_47721C.1
ctatgttgtcgtattttcgtcagatactgttcatcgttctgaactactcagacaagctaggatagccacaatctcgcgtgtgttcagagtgttctagctaacagggtgagcttcacagatagagctgctacattttgattgaaattctcgatttttgttgtcccaggtatggggcatacgtcgcttccctgatgatggacccaggccaatgcgagttgtgacggtgtgcatccttttctggctgccattacgttaacacgctcaaatatttcagcattcttctcgagattcgctggttgaaatctaggaagatgcttgcgaacatcctgaacagatagactccactagtttagctccaccagaaaagaaccctctaccaagtgggctgtaagctactattccaattccaagttctagcatgagcccttctgattgttgatgcagatgcttccgatagaccaatatattttatctttccttcttcaactagtttcttgagttcaccaatcgtgacctcgatgggcaccttcttgtcgacacggtgctggtagtaaaggtctacgcaatcgacgccgagccgccggaggctgccctcgcacgccgcccgcacgtacgccgggtcgccgcggatctccaccttcccgcggacgcgtggg

SEQ ID NO: 44686 - DNA, 1338 bp, Oryza sativa
  Clone ID: PAT_MRT4530_47722C.1
gattgcaaaacattattttattattagcacacgtactgcgtgcagtgcacaggcttatagaaccgcacttcacacaagtaggttgtaggcacaaacatgacgaaagcatagaacataacacaatacagacagacaggacatctcattccaaatatacgtgatgtataacaggagcaagcagcgtccagcgactgatgaatacgttctacaaaatcttgtgtgcgctctgccattcagctattttggaccaggactttgtatttgaacagatgaaaacaattactctgctttccaagacgacaatggaggggtctcagaatccttccaagtgccggccgtctgagcatagcggtcaccttgaacaacatctgtgctggcataggactcaagttcagtcatttccccaggggtgagcttcacagatagagctgctacattttgattgaaattctcgatttttgttgtcccaggtatggggcatacgtcgcttccctgatgatggacccaggccaatgcgagttgtgacggtgtgcatccttttctggctgccattgcgttaacacgctcaaatatttcagcattcttctcgagattcgctggttgaaatctaggaagatgctccttcatccccattcttagggaaaacttcaaaatcccacagctattgtctaataaaacaagccctcctctgtatctaagataaatgtacttatttctatcattatcatgcaaactttccccactaccacgcatctggttatgtataatcgtgacctcgatgggcaccttcttgtcgacacggtgctggtagtaaaggtctacgcaatcgacgccgagccgccggaggctgccctcgcacgccgcccgcacgtacgccgggtcgccgcggatctccaccttcccgtcggcgaacgagacggcgaacttcgtggccacctccaccttctccctcacgccgccctgcagagccttgccgaggaggagctcgttggtgtgggggccgtacatgtcggaggtgtcgaggtgggtgacgccggcggcgacggcgtggtggatgagcgcaaccatgtcggcctccggcttgggtggcccgtagaaggcggacatgcccatgcagcccagcccctgcgccgagacctccagaccctgcgagcccagcttcatgcgccgcaccgccgccgtcgccggagcagcagctgccatggccggccggaatcggatcgatcgatcgatcgattaatttctctccgccgcgcgcgcgattcccggacgcgtgggcggacgcgtgggcggacgcgtgggcggacgcgtgggcggacgcgtgggcggacgcgtggg

SEQ ID NO: 44687 - DNA, 663 bp, Oryza sativa
  unsure (1)..(663): unsure at all n locations
  Clone ID: PAT_MRT4530_47723C.1
tgttatgagttctagggaagagtagggtgctactttctgtgtacttacaaattaacaaaaggatgctgtgaaacaaatgggtgttgtgcaaaaatattggcgacacnnngggctgttcggcttcttcatttgctgttgcgctgcagccagcaagaatagtgcctcagaaacaaggccagccgcagtttctggcctgccaaacagccccactggtactttatgcaactcatggccatttaggtttgcaatgtcaactctttaaatagtatgttttcgtgaccatgatatggtcagtctttgacgtgcttaaattgaccagaggagtttaggcatcttcttacattattagtactgctagtaagagagctagtaaactaatgcttatgagttgtgcttttgtttgtgacataaagctatagtatgttgttttcagattattagggtaccaataggttaaatcagcaatattttttgcttggacatttggtaataggtatccgagttggaattgcatagccatcatcccttttttgactaactcgttcaaaatgtgggtaagttgttctatatacaatgacttttaggctaagttattacgtatgttggcgttagtctacgctaatgcccatggttttcaagcttgtttttccacttacggtgcag

SEQ ID NO: 44688 - DNA, 1579 bp, Oryza sativa
  Clone ID: PAT_MRT4530_47724C.1
tggacgcgtgggtgcagcgatgcttgcagtgagttgtatggtactagcattaacccctatgtatgtgagtggccagagccccccacgcgtccgcacggtcggaatcgcgcgcgcggcggagagaaattaatcgatcgatcgatcgatccgattccggccggccatggcagctgctgctccggcgacggcggcggtgcggcgcatgaagctgggctcgcagggtctggaggtctcggcgcaggggctgggctgcatgggcatgtccgccttctacgggccacccaagccggaggccgacatggttgcgctcatccaccacgccgtcgccgccggcgtcacccacctcgacacctccgacatgtacggcccccacaccaacgagctcctcctcggcaaggctctgcaggggcggcgtgagggagaaggtggaggtggccaccaagttcgccgtctcgttcgccgacgggaaggtggagatccgcggcgacccggcgtacgtgcgggcggcgtgcgagggcagcctccggcggctcggcgtcgactgcatcgacctttactaccagcaccgtgtcgacaagaaggtgcccatcgaggtcacgattggtgaactcaagaaactagttgaagaaggaaagataaaatatattggtctatctgaagcatctgcatcaacaatcagaagggctcatgctgtacaccctatcactgcagttcagctcgagtggtcattatggtctagagacgtggaagaagatataattccaaaaaaatttatccactgcaaaaaatcacttgccccattttaactatttttcttacttccatttcagagaacttggaattggaatagtagcttacagcccacttggtagagggttcttttctggtggagctaaactagtggagtctatctgttcaggatgttcgcaagcatcttcctagatttcaaccagcgaatctcgagaagaatgctgaaatatttgagcgtgttaacgcaatggcagccagaaaaggatgcacaccgtcacaactcgcattggcctgggtccatcatcagggaagcgacgtatgccccatacctgggacaacaaaaatcgagaatttcaatcaaaatgtagcagctctatctgtgaagctcacccctggggaaatgactgaacttgagtcctatgccagcacagatgttgttcaaggtgaccgctatgctcagacggccggcacttggaaggattctgagacccctccattgtcgtcttggaaagcagagtaaacgttttcatatgttcaaatacaaaatcccggttcaaatttagctcaaatggcagagcacacaccagattttgtataagtgttcattgtatcagacgcgttgctcgctcttgttaaaccatcgcttatgcttgtttgtgtctaaaacctagctagtggtgttgtaaagtgtggttttattagtttgtgcgcagtacgtgtgcgaataataaataaagttctgaggtcacattttttttttgttgccgaaatataagataatgaattgcaataaataaataaaaaaaaaaaaaaaaaaaaaaaaaaaaaa

SEQ ID NO: 44689 - DNA, 198 bp, Oryza sativa
  Clone ID: PAT_MRT4530_47725C.1
atggatggaaggcggattgggcctaggaacttctccacgtttggatctagtcgtcgtgacccctccctaccggaggcagctttggtcagtgagatcaaagcgcagcggtgctgggtggtggacatggaacttggcggtggggacgagcggctcattagagcacaacattgtctacgtgaaggggacgtggtgcactaa

SEQ ID NO: 44690 - DNA, 1419 bp, Oryza sativa
  unsure (1)..(1419): unsure at all n locations
  Clone ID: PAT_MRT4530_47726C.1
atggaggcggagaagaagccgccggcggtgtccgacgtcggggcgtgggcgatgaacgtcgtcagctccgtcggcatcatcattgatctctccttctcttaacccgcctcccgtcccgttctccccgcagatcgcagttttttcaccgtcctccgcccgtgcagttgacgcttccgcctcccacactgcgtctgcgtgcgcacacagcaccaattcgaaacccctccccgcactccctccccctcccttccttgccttgcctaggcggcaacgcctcccgtcctttataaccctgcggctcctcccgcgtgaggcaccgaggcccgggtggtagaccgcgggacccgagccgagccgtgccctgccctgcccttcctccgcccagggtcgcagccaggtcgtcgtcgtcgtcggagggggaagagagccgcggcggcgtcaggaggaggaggaggggcgagatggaggcggagaagaagccgccggcggtgtccgacgtcggggcgtgggcgatgaacgtcgtcagctccgtcggcatcatcatggcaaacaagcagctcatgtcctcctcctggctacgccttctccttcgcctacgacgctcgaccggattccacttcacggtcacggggctcttcaaatggacagcaaaagtgcaccaatacaggctgtgtctcttagtacacttggtcgctttgctgactattacctcaatgggcgatggttattaaactacaacttctcaactggggcaactttcttcatattgctttcttgctccttggctgtcttctgcaacatgagccagtacctctgcatcggccggttctctgcaacttcgttccaggtcctgggccacatgaagaccgtgtgcgtgctgattcttggctggatcctgttcgactcggccctcaccgtgaagaacatcctcgggatgctgctcgccgtgatgggcatggtggtctacagctgggccgtggagaccgagaagaaggcctccgccccaatcccccggaacaagagcgacatgctggacgactccgaggacgttcccctcaaggccagggtgagcggcctcccctcgtccgacctcgaggaaggcgagatgaagagctagctaatgacatattatttattcattcttcttgttcctttcttttttgtacgtgttcaaatccatatattgcccccattctgggggaagttcttgaagctatcggcacttgtgttaattttgcctcctcccttgttcctggggttcatagatgatgatgatgctgatgaaccccagccggtctcgacgtagatgaccattttagaagccatgttcttgatggcgtgttgttattatagatgacaagacttataatggaatacaggtgtttatccgttgtaggatgattcaaaananntttnata

SEQ ID NO: 44691 - DNA, 500 bp, Oryza sativa
  Clone ID: PAT_MRT4530_47727C.1
aaaaaaaaacggggggttataaaaaaaaatcttcccggaaaaacaaaggcccaaaattaaaaggggttttcaacattttacaacttaaaagagggggcaaatatacaagcccaacttttttaaagaaagcgggaggaggaaagggaaccctttttaacaacgggaaaaatatgggttataaaaggaaaccctttgaacaaattaatggggaaataaattaggaggatcgtttccgcccgatctcaaaaaaacgggacgtttgaaaccaaaaggggggcgggcatccagttgaccgggaagacctttttgggaaagaggcttttgccggacccgggggggacccaaaaggaaaagggggccttgaggggggggggggggcccatcccccaaaggggcccccacaaaagtttaaggggcccccaccctggaaatccggcctccgggagggccatcgggatgacgcccccggcgggggggacaaacttgacaagcacggggag

SEQ ID NO: 44692 - DNA, 372 bp, Oryza sativa
  Clone ID: PAT_MRT4530_47728C.1
atatgaatagtttgtactttcatacttgttgtaaggtaccgaattttacaggaaatatgggaagtttgaaaccaatcaagaatagtaacctgaatagtgtcaaaccaaggaaaccagaacagaaacccaactagctatattaacctataatacatcttaagagcaagtggaaaatcagacaatctaaacaatctgaactctgaagaagactaaagaacaagattaatcaacaaataccgtgggcaagactgaagaactgccttccataggtccataggcaaaaggcgccgtcgagctccaaaactctggacagcacctccaaaagaaaaatgctgtattgaagctcaaggagcaaatttaccgtctcctcac

SEQ ID NO: 44693 - DNA, 1738 bp, Oryza sativa
  Clone ID: PAT_MRT4530_47729C.1
ggttttcggctctggttctttttttttttttttttttccaagcgattcttgatatccttgtatcaaattttgtacaagtttctaaacaaaaatctatccacgttcttatactacttatatgaagcaatggagaaaataaccaacacaaataatgtattatgtacagtctgcttctaacctatacctccaaaaaacaaccaatgcaaacaatcatcatttacagttacacgtctccattcattctattcctcgtcactacttgaatcagagtctgcattgtccttcataaaatgtgccggcaagttggggaatcttggcatgaccctcttccttttgctatctacctcttccggtggtttctgagccggtgctggtgcgtcatcagctgcccccttggttgtggccgctggggccgccggttgtgatgatgacggtggtggtgttggcttcttttgctgctgcaatttcctcttgatgtctacacatgcctgatcaaccatccccaggaagtccctaactatgatgaacagctggaggggatgtgcattcttgtccttggtggcaccagtatggtaatactccgttgtccgctgcaccagttcaagcactttctcctggtttccttttagttcattcagttcttgttctgcagccttcacaaatcctcgcaaccctcttgcgaatccatcgtccccataggtctccaagagcttcttggtacctgccagccggttgcccagaattgcgcactcgttgacaacagtgtcatagtccaccagtgccgccttcttcacattggcaaactcagtgctgagacctccaacaatcggtagcccgaggttcaggtattcattttgcctctcctcccgtgatggaccctgacttgtggagcttgctgctgggttgccaccatcggtgctcttggcaaggctgccagagcgtcgaagactgtagttgcggttgatggctagacgcttcccctctgaacgcacaacctcctcaatgacaaagtggagcaaggtggtgctcccgtctgtgctcttcacatcagaaagcttgcggagtgcagtaaggttgaaggcctgtgcattaccgcgtgctgtcccagcattcatccgattgcctgccttgagcacagcctcgagcagtttgaagaacagcccctttgtcctcagctcctggcttgccatctcaagagtccggagtgactgcttgagctgtgcaacctcagcagcatagtttgccttgaaaagcagtgcattgacgcgtgcaaatgggctgggcacatcaaggaggagccggagtaggaagaactccgctggagcaagcctgtcagggttcccagagaacttcagaagtgtgttctcctcttccttggagatgttgagccgagacagcttctcaaggacctccgtgctgagctcggtatggccgtttaggagggcgtcaatgatttcctctcgccccacggtgagggaccggaggatgatggaaatgttgtgcgacttgcgtggctcaagcaagaatatttgctctggcgagttcgagcgtccgaggccagctgaggtgctgccaccagaggcatccttggagtctgcaggctttgtcttgcggtttaccgcggcggtgccaaacagtgcctcgatgatgccttcatccaagttgaatgagccgccggtgatattgtcccacaccatggagtgatcggtggccgccacattgaccttgtcccaatgca

SEQ ID NO: 44694 - DNA, 393 bp, Oryza sativa
  Clone ID: PAT_MRT4530_4772C.1
aagaatgccaaacatggtattatttatctaaaaactatacaagagcgcgacataagtctgtgaccaactaaactcacatgtcgcataattttcaagaacttcataaaaaacagacgctgaaataaaaccttgaaacttctcagtccggtttccagtagtgagataaatcatgaaatctttgttcggatatattaccatcatcaagatagggccaacttctgtatcacaactatctcagctggaagatcgtgttctaggactcgagaaaattactgaatactatggagcagagtcctcaggaccaagaatcatcaattatgatgcaaatgctacagcgctgtcagccacatcgaggatccatcaaatctaaaaaacgaaaagcaagcaaaggaa

SEQ ID NO: 44695 - DNA, 649 bp, Oryza sativa
  unsure (1)..(649): unsure at all n locations
  Clone ID: PAT_MRT4530_47730C.1
gcaccccaattcccttaattatcgatattcttgcatttcagatgacaaattaatagacggcaaaagaatacaatcgatcgaagaagtcccttccatgaatcataatcgaaagcaataatataaattaaaaaggaaaaccacagatccacagctactgaaattgggatgccgcggaccgatcgattggaatttggaaatcgaatcgaaagatggatatgatgctgcgtgttcgtcctggatcagaactcaaaatggatggacgttaatgccgatggactccaagttagggcccgcgccgggcgaaagaacccgacaacgctgcccgtttgtttgaagacggggacggggaaagggcttgccggcgccgtttgcccaacggcccaatggtgcctttngntggtgacaaacttgaacnaggtgacacttngtttttttcccccaatgggccccaccgaccctgcaccccctcncttntccgaatggtccaantttatggtnttcccgaaaagccccctggcnccccagggcaangttntnaaggtcttntcntntcaagtngaaaaaaantcntcaanactgcgacgaccaaccccacgtnngaactccttttctccccngntcnnccnccccattccnnnacggtttnttt

SEQ ID NO: 44696 - DNA, 464 bp, Oryza sativa
  Clone ID: PAT_MRT4530_47731C.1
gcgcccacgcgtccgcgcaaatttcgccatggccaccaccaccaccaccaccaccaccatgggcggcctccaccggctaataagcaggagcagctgcagccggagaaccttcgccgcctccacgccgccgcagcgacccagagcgatagccgtccgagtccgaagcagcagcgccggtgtaacgaagagccagaggcagaggcagaggcaggtgaagctgacatacctggagatcaacagctgggtgtgggaggtcggcggcgcgcgcatcctggtcgaccccatcctcgccggcaacctcgacttcggcgcgccatggctcttcgacgccgccaagaagcgcctcaagaacctgggcgtccaagatgtgctgcagcctccgggggtcgacctgctcctcaacccgcggaggagccactgcacgtgcgacgcgcgcagtctgggcccgcctcgccggcgcgccc

SEQ ID NO: 44697 - DNA, 669 bp, Oryza sativa
  Clone ID: PAT_MRT4530_47732C.1
caaaacgccactcgactccacaatatcatttcttggcttttgattttaattttcgagcagggattcatactgctggccgtgcaggcgcacctgccgcagctgcggccgccggcgtgcgacatgatggcggcggcggcggcggaggggggatgcgaggaggcgagcggggtgaaggcggggatcttcttcgcggcgctgtacctggtggcgctggggagcgggtgcctcaagcccaacatcatcgcgcacggcgccgaccagttccggcgcggcggcggcggcggcggcgacggcgatggcgacgatggcggcgacgggaagcggctgtcgagctacttcaacgcggcctacttcagcttctgcgtgggggagctggtggcgctgacggtgctggtgtgggtgcagacgaggtcggggatggacgtggggttcggggtgtcggcggccgccatggccgtggggctggtcagcctcgtcgccggcgtcttcttctaccggaacaagccgccgcagggcagcatcttcatgcccatcgccaaggttttcgtcgcggcggtaaccaagaggaaacaagtgtgcccatcatcatcgtcgacgacagccgcctccaccagtgccgcccctgtccaccgcatcaacaaattcaggttcttggacaaggcgtgcgtg

SEQ ID NO: 44698 - DNA, 297 bp, Oryza sativa
  Clone ID: PAT_MRT4530_47733C.1
atggcgaggagagcgaccgcgcgcggggctgggctgccggcgccgttcgtcgtcatcgtctctgtactgctgctgctgctgctgggatcgctgccgctccacgaggtcgcggcggcggaagacgaagatcagattggtggcggtgggctggaacatggtgcaagtgcgttaaaaccggaccgcggccccctttggcgggggtgctgcaaccagtataaagagggaggtagctacacagggagagggaggtttggaccttgcattcctacgcagccatgccccaaaccaataccatag

SEQ ID NO: 44699 - DNA, 828 bp, Oryza sativa
  Clone ID: PAT_MRT4530_47734C.1
acacaaacatcagctgctatgcttcctgttttgatcttgtttgggcttctcttctccctacagtgcaatttccctgcatgctctgccacaaataatggcagtactctcatggcaggccaagtgctcaccggtggaaacaagctcatctcaagcaacggcaagtttgcgctcagcttcttccaaacaggcagcagtaagtcatcagacaacaccaccttgcccaactggtacctaggaatatggttcaacaatatcccaaagttcacaactgtgtgggttgctaatagagataagccaataactgaccccatctttaaacagtcagaactcagagtctcaagagatggcattcttgtcatcttaaacaaggtggccaagtcaatgatttggtctagccaaattgagaatagaccaaaaaccagcaggaacaatagtgtagtgctgttagacaatggaaaccttgtcatacgagatgcctcgaacccatccaatgtgtggtggcagagctttgatcacccaacagatgtcttcctccctgaagcgaagattggtcggaacaagattactggtcagaaatatagttttacttcaaagaagaattccgaggacccagctctaggcttatattgcatggagttagacccctctggttctaggcaatactatgataagctttgcaactcgtccactgtgtacttttccactggggagtggaacggaagatacttcaactcagtgccggagatgtcaagcaatgttttatttgactcccaattcattgacaacgatgaagaggagtactttacttacactccatttgataaaaca

SEQ ID NO: 44700 - DNA, 361 bp, Oryza sativa
  Clone ID: PAT_MRT4530_47735C.1
ggccaagtgcctgatgaacgacggcgtgacgagctgctcgagctcgccggcgcggatgctgggcacgttcgggtacttcgcgccggagtacgccatggtggggaaggcgtcgctcaagtcggacgggttcagcttcggcgtggtcatcctggagctcatcacggagcggcagtcgatccaccaccaccggccgccggcggaggcggaggagagcctgtgcctgtgggcagagccgcggctgcacgacagccggctggtggtggcggagctgacggacccggtgctgcaggggctgttcccgtacgtggagatgcagatcatggcgcacctggctcggtagcgcctgcagcgggagccctag

SEQ ID NO: 44701 - DNA, 1254 bp, Oryza sativa
  unsure (1)..(1254): unsure at all n locations
  Clone ID: PAT_MRT4530_47736C.1
ttttttttttttttgaaatcaatcacagcctcgacgctgaattctgtctgttaaacatgaagaagtacaatactacagtttcagtaagtgagagcccagaaaacgaggcagggattacacaaccacacacaagctctaaggaaaacgcatgaacaaaaactagaagacatgaccaataaaatgaataagcacatacagcctccatgtccactaaatcctactcagcgaagggcagatcgacagttacagaaccgcaattacaactaggtccatacatggggggcaaaaatacatagttcttgtgtgatctagtgtaactcgttaataatacaaaccaatgcttagcgatggcccgggatatcctactctgtatgccatccgagatcttctccaactacaatgtggcagaccagacatgaccaaaatccaacatatatggtctatttgtcagcatgccggcgtttgtgtttccgatggccatggttagcattaacattccgtgtggctttcttcttcttcttggagcagaatgtttcaaccaggacattgtaaaaaacataaatgggcataatcagcaaagcagaagccaggtaccaggccaactcttcagtcgcaaattcttttgtcaattcatgttggtgcaggtagtccaagacagttgcttgagcctgttgatgataagctgtagccttctcaagaaaatttccatatatatggactgctctttttgtataaggcttcaaataaattctaattttctcgacatgtggcttagtggccttagcaacttgatcaatgtaaggtttggatactttcttggcttcctggaagtagggatcagcaatcttatgtgctttcacttttttttttttttttttttccttaggtgcttgatagagctctatagcccttgctgagaccttttgcacataaggctctgcgtttgtcttcatggtaacccatttttccttgataacaggtatccatttcgtcttggcagcttctacatgtggctcggcccatttctttgcctgaactgatttctctgatgccttctgcaataaactgttaacagcaggtttcccatgttcattccagtgacttaacatcatttccttagcacgagctgtgtgtgtcactaaccaaggtggcaaccaagctccatgaacctctttcagctgatttaattgtgttgttgtttctaactgcaccctcataagctcctcctaagaacatgagaagcaaagaantata

SEQ ID NO: 44702 - DNA, 633 bp, Oryza sativa
  Clone ID: PAT_MRT4530_47737C.1
atgtccctggaggattacgcctaccgtcagtacagcagccgaccgacgatcacttaccgatcacacccgccggcgcagctgagcaggtacgagtcgcagaagcggagggactggaacacgttcctgcagtacctgcggaaccaccggccgccgctgacgctggcgcggtgcagcggcgcgcacgtgatcgagttcctgaggtacctggaccagttcgggaagaccaaggtgcacgcgtcggggtgcgccttctacggccagcccagcccgccggggccgtgcccgtgcccgctgcgtcaggcgtggggatccctcgacgcgctcatcggccgcctccgcgccgcgtacgaggagagcggcggcacgcccgagtccaacccgttcgccgcgcgcgccgtccggatctacctccgcgaggtgcgggactcgcaggccaaggcgcgcggcatcccgtacgagaagaagaagcgcaagcgctcgcaggcggcgcagcccgccggcgtcgagccgtccggctcgtcttctgctgcagctgcagctgccggtggtggagacgcgggcagcggtggcggtgcagctgctactaccacagctcaacctggagggagtggcactgcaccaagcgcctcctga

SEQ ID NO: 44703 - DNA, 717 bp, Oryza sativa
  Clone ID: PAT_MRT4530_47738C.1
atggagggaggaggaggtggggcggacgggcaggcgcagccggtggcgcaggcgccgccggcgatgcagccgatgcagcagctgagcaggtacgagtcgcagaagaggagggactggaacacgttcctgcagtacctgaagaaccaccggccgccgctgacgctggcgaggtgcagcggcgcgcacgtcatcgagttcctcaagtacctggatcagttcgggaagacgaaggtgcacgcgtcggggtgcgcctactacggccagccgagcccgccggcgccgtgcccgtgcccgctgcgccaggcgtgggggtccctcgacgcgctcatcgggcgcctccgcgccgcctacgaggagagcggccacgcgccggagtccaaccccttcgccgcgcgcgccgtccggatctacctccgcgaggtccgcgacgcgcaggccaaggcccgcgggataccatacgagaagaagaagcgcaagcgcacgcagcagcagcagcctcccccaccgccgccgccgccgccccagcaccagccgggcgccgccgccggggaggcgtcgagctcgtcgtctgctgccgccgccgccgtcgcagcagaaggcagtggcagctccgccgccgccgccgccgccactagccagacaggaggaggaggaggaggaagcaccaccaccaccaccgcttctgctgctgcaccgaccaccgccacccgagtatag

SEQ ID NO: 44704 - DNA, 416 bp, Oryza sativa
  Clone ID: PAT_MRT4530_47739C.1
gcgcagagctgtcctaaaaatcaagaagacagatgatgaaactgctaaaattggacagggtagatgatgctatataagtcatttgtggacactgcaggcactagggaatctaatccactgaaacattatctggagaaatgaactacatcagtcttacagatactgtgaatatgacagtcagttcttcttggaacatagatggatataggtattgtattgtggcacatatttggaatatagcctcaatctgtttggggccaccacatggggacgcctctacttattaggtagcataacatggagaatggtattattgatatttatacttttatcaatgaccagctttcaagaacatcatcgtattgaaatgtgacacgttgtgtatgatgataccttccgcatctgggttggggtga

SEQ ID NO: 44705 - DNA, 186 bp, Oryza sativa
  Clone ID: PAT_MRT4530_4773C.1
atggatttctccggcggcgccggcgcgacgttgctggagatgtaccagaacgcgtggctgctgctgctgctggtctgccggtgccacccggacgcgtgccccaccctcgtcgctacccccaggctagaggcaaaggggagttcgctggggagaggttccaagaaggttggtgtgagggctggctaa

SEQ ID NO: 44706 - DNA, 240 bp, Oryza sativa
  Clone ID: PAT_MRT4530_47740C.1
atggcgtccgcaccgagcaccaccgcgtccggcctcgcgccgccgccgttctcctcggcgcgcggcgcgcgcctcctccccggcgcgctgctgcgcctcccgccgcctccggctcggtggagcgagttcgaggcggaggtgttgcagtcggacctgcccgtgctcgtcgacttcgtcgccgactggtgcgggccgtgccgcctcatcgcgcccgtcgtcgactgggccgccgagaaatag

SEQ ID NO: 44707 - DNA, 155 bp, Oryza sativa
  Clone ID: PAT_MRT4530_47741C.1
cgcgtccggagcgtccgagtccttttacacctgtccccaccctcgctctccgctccttcgactccgactccgcctccgagtgctcccgtaaccgtgccgtcgcagcctccgtctccgagcggttcctcccgcaagcggcttctccgccgcgcgcg

SEQ ID NO: 44708 - DNA, 858 bp, Oryza sativa
  unsure (1)..(858): unsure at all n locations
  Clone ID: PAT_MRT4530_47742C.1
ggaattcggcacgaggggcgccttcgagaagattcctcatcccccttccattctcttccctctcatggcgtccgcaccgagcaccaccgcgtccggcctcgcgccgccgccgttctcctcggcgcgcggcgcgcgcctcctccccggcgcgctgctgcgcctcccgccgcctccggcctcggtgggtagcttccgcgtggtggggcccgccgccgccccacccggcggccgccgcatcgccagcgcgcgcgtgcggtgtggcgcggcggtgaggttcatcgggcagagcgagttcgaggcggaggtgttgcagtcggacctgcccgtgctcgtcgacttcgtcgccgactggtgcgggccgtgccgcctcatcgcgcccgtcgtcgactgggccgccgaggaatatgaagggagattaaagattgtcaagattgatcatgatgccaatcctcaactgattgaagagtataaggtttatggtctcccatctcttattctattcaaggatgggaaagaggtaccagggagcagaagagaaggcgcaattacaaaagccaagttcaaggaatacctcgaacctctcttgtcaacctcaacagttgcttaatatcatcatctgcagtatgcatcactgaatctgatgtctggagggtgccaacgcacaacacgaccagcatgttgaagttttttcccccctccatgaactccccattctaatttgtaattacctcaagatcatggttgcatatatttttcattattgatggtaaaaattagtatgttcnaanggctatctgangtgcagtttgacctggcacaattcctnaaattgaacttctgcccattagtttcttgttc

SEQ ID NO: 44709 - DNA, 181 bp, Oryza sativa
  Clone ID: PAT_MRT4530_47743C.1
acgtacaaattcagactaaagattgtctgcaaacaaaaagccatggcttccaacaggtagtgttctcggcgttgcttcctcatcatcgctcctgctcgccggacgggaccatggcggacacccaaaacagtgggacagcctgggacgtgcagcagatggctaccgagactgtgacctgcgc

SEQ ID NO: 44710 - DNA, 329 bp, Oryza sativa
  unsure (1)..(329): unsure at all n locations
  Clone ID: PAT_MRT4530_47744C.1
tttttgttattggaaaaacattgggtttttttttaccgccccagtgttcgacttactttttatggacatcacttaggtaaaggcacccaatttggtccaaccggaaggagggcgaacgagactgtcacaaaannaaacagccaccacgaaccactgctaggcaaaggaaccccacttcccccgccggggccgaaaaaaacagaaaaagaccaggcggtgaaagcacaggagacggcgaggaggccccagaggccccggggggaggaccaacaacattccgaagggccggcccacaatcccaaacagaggagcatacagggcgggggccg

SEQ ID NO: 44711 - DNA, 1060 bp, Oryza sativa
  Clone ID: PAT_MRT4530_47745C.1
ttcatatccgtagagcaaataactcatattcctagagtttatcattggtgtaagcttcaataggttagtgcgcttggcgaattcacaggccctatcttgtggtatgaactgggtacgcgatgatttgcactgcgtattgggggcttaccataagataatgccatgaatttgtcaagcgttcaaacccactgaaatgttgtgtgaaggtaaatatttcaaagtgttcatgaagaaaaggcaggtaaatatttcgttacttccccgtgacatgctaagccagaaacaatctcgctgcatgtgatatgctcagccagaaacagaaacaaaagagaaaaagagagtgattcttcccagcttttttcatgtgttgtctggctagagcctactcgctgagtgcctataaaaggaacgttacgaacgaaagaagcagactcaagaatagtatatcctaagcctcatcatcgaaatttcgggacgtgccagtttcctttttctttccctttcttctagcaccagttggaggtctgcgccctgacaaagataatctttcaggtgaatatcgctcgcggacagacctacggacgacttcaacaccgcggagatcaacatcgtcgtagtcttgggctggctgagttattggtggtggttcatcatgttgcaatggtcctatgtcgtgttgtgctgttgacgagcccccaccgtagctacatggttctccgtatgactgtatgctgccggcatatcccatcatttgttcagggttgtacattcctgttgtttgtggttgcatgataggtggttgattgaacaaccaatctccatggcctaacatttcgagaaagcttggtccttgtggttgtgtgttttcattcatggacatttgatacatccccctgcaggtggagagccgttgaaaacatgggcatgttaacttgaggtacaccggaaaacgatacttggaactgagagcttccagcttctgtatgcatggggggaaccatttggctggatcctgtgaaccacgcaaaccctccctgccattgaccagtggtatttgcat

SEQ ID NO: 44712 - DNA, 287 bp, Oryza sativa
  Clone ID: PAT_MRT4530_47746C.1
tgagcgcagataccttaagtggcggtggaagccgcggcggtgcgacgcgccgaggttcaccgcccgcgccgcgctggagcggctgcgcgggaagcgggtcgtgttcgtgggggactccatgagccgcacgcagtgggagtccttcatctgcatgctcatggccggcgtggacgaccccaaaacggtgtactaggtgaacgggaacgagatcaccaagacgatacggtcctttggcgggaggttcgcgtcgatcgacctcaccgtggagatcttccggtcggtgtttc

SEQ ID NO: 44713 - DNA, 182 bp, Oryza sativa
  Clone ID: PAT_MRT4530_47747C.1
gtgtttttaattttctaggagctggtcactgatgttaacttgcgtgcacttgtaataggcgaatccgtcctaaatgatgcgatggcgatttttgtctacaggacaatgtcgttgttcataagtcaagcgtcagctggtgagaacttctttatgatggtttagcagattgcttggagaccttt

SEQ ID NO: 44714 - DNA, 219 bp, Oryza sativa
  Clone ID: PAT_MRT4530_47748C.1
atgcatgaccatcgtaaccaggcggagatggacgcgaggccggacgaaaaaagacaagggagcaacaccgggaggaaaggaaagcgcgacgccagacacagaagatggaacaggcacgcaagccgaccgcgccgcctagtggacgagccgaccgcgcctccgcgccgccgcgccggcacgccgccggccaccaggccctccgcccgccggcgctcgtag

SEQ ID NO: 44715 - DNA, 126 bp, Oryza sativa
  Clone ID: PAT_MRT4530_47749C.1
atgttgtcgttggttggccgcgctgttcggctgtccttcgcagtcgcgaggatcttctccaaggctgcagccttcttcttcttctacgcgatcacagctgggcggctggcgcaattacgcggctag

SEQ ID NO: 44716 - DNA, 247 bp, Oryza sativa
  Clone ID: PAT_MRT4530_4774C.1
gcgccgccgcgccgccgccctcgtgctgtcgtgccgccgcgttcgtgcccccgtgccgccgtcccagtgtgccgcaccagagaccgagggagccgcggatccaggtgaaggctaagacccgcaagacctcgagcaaggcaagtcatcactattccttgaacatgttgatcccaattgcgaaattgttttgtttataaataaaattgcatgcaattatgaacctcctacttgtgattatgccatgcct

SEQ ID NO: 44717 - DNA, 2676 bp, Oryza sativa
  Clone ID: PAT_MRT4530_47750C.1
atgggctgcgtcgcgtcgaagaacgcggtgtcggtgacgccggcggccgactcgtcgggggcgctgcgggagaggagcctgccgcgggcgccggaggccgcggcgacggtggtgtccgtcaccgcgtcctccctgcgctgctcctcggctgcggcggcgggtaggaggtcggagaagaagagggacgaggcggcggtggcggcggcgggggaggagccgtcggagaaggccgtcatcgcggcggcgaccgcgtcccggagcttccggctgcggagcctccgccggagcctggagggggagcaggtggccgccgggtggccgccgtggctcagcgccgtcgccggggaggccatccaggggtggatccctctcaaggctgactccttcgagaagctggagaaggttgggcaaggcacctatagcagtgtatttagggcacgggaacttgatactggaaagattgtcgccttgaagaaggtgcggtttgacaattttgagccagaaagtgttagattcatggcaagggagatacaaatattgagaaggctcgatcatccaaatgttatgaagctagaaggtttgattacttctcggctatcatgcagtctctatctagtatttgaatacatggagcatgatcttgctggactttcttcctcccctgacatcaagtttagtgaagcacaggtcaagtgctacatgaaccagttactgtcaggactggagcattgccattcacgtcgtattgtacatcgcgacatcaagggtgccaatctccttgtgaataatgaaggggttctaaaaatagctgattttggccttgctaattactttgaccccaacaaaaaccatccgctgaccagccgtgtcgttactctgtggtatcgaccacctgaactgctactaggttcaactcactatgatgcagctgttgatttgtggagtgctgggtgtgtatttgctgaaatgttccgtgggaaacctatcctgcagggaagaactgaggtggagcaactgcataagatttttaagctatgtggttcccctgctgatgagtactggaagaagtcaaagttgcctcatgcgacaatattcaaaccacattgtccttatcaaagtacccttcaagatgtttttaaagaaatgccagcaaatgcattgagattactagaaactcttctatcagtggagccctacaaacgtggtactgcatctgctgctcttacatctgagtttttcaagacaaagccttacgcatgtgatccctcaagcctgccgaagtatgcacccaacaaggagatggatgcaaaattacgagaagattcacacagacgaaaggctagcagaggtcatgggccagaagcatcaaggaaatcaaggctcagcagagctgcaagagaaacaactacagttaataagcaaactgatggcaaagaggagtccaaaactaaagcaaatggaaccaaggacaactcaatattggatcgtacaaaggtaaatggtgatgctaggttattttcagacatacagccagtttcagtggcccaagtcaaagaaaggtctcgccatgttaagaatgattcacgagaagagatccctttctctggaccattgattgtttcatcatctagtggctttgcttgggctaaaaaaccaccagaagatcgttcattcgctagatctcggaccaaatctagttcaaggggccaatttactgctgagttagatcaggacaataagatgccagctaaagagaaccagaacctcggcttgaaggaacaacctaacagagacatgcatatagcacgtgccaactccaaagttcgagagcctcatgatgcagcaaagcgtgccgttctgaagaaatggtcacagttaggacgtccagattcctttgattcttacgacacttaccactctcagaatttttctaatgcaatgtatcttggggataccctctcgtcaaaaaacagcatcaagggtgatcatgatcaaggagagagggttgaatattctggccctttgttatctcagtcacacaaggttgatgaactattagagaaacatgagcgccacatccggcaagtagttcggaaatcatggttcagtagaggaaaaaaataatacaagtgaggaaaagactggccatttttgcgttggagaagcggcatctaggtatatagcagtgaaggggatatgtcagtttctggtgtcttctgtcaaccggaaactcgcctttggtggtaacattgttgataagattaagacccaactgaaaacattatatgattctcatatcatagtaaaatcaaaactgtgcctcgctgcttctactagataataacttgtcgcttgttgtagattccccaaagactcctgtgtcacaccatagaatggaatggtgtttttttttttctcctctccaccttgtgcctaggaataacagctgacgagagtggttaattcgagtgatcattgtgttgaaccaatcagttattatttgtgtagctgaaccaataaccaccacagaatggtgcagttcttgtaaagctaacctctgtaaaaagtagaacagaaaacgtattatcccatcgatgtatcccttgctggtgatgaactaatgatccaaccagttaatggaaaagatacaaagaaaacgtattatatttttgtaaa

SEQ ID NO: 44718 - DNA, 363 bp, Oryza sativa
  Clone ID: PAT_MRT4530_47751C.1
atggctgcggctagacaacttggctaccacgtgacgagcagcagcgagatagcgacgacgacatgcggtggcgcggctagcgcgggcggcaccggcggcactagggcatggcttggcttggctcaacaagctgcagcacggccaactcgcggcagcggtgcagtagtggcggcaacggagcgcgcgcagcagcagcatggcatggtggcgccgctagggcaccgccggcggcaacaacgcaacagtgactacacaacgacggcgacgcacaaaactaaaacatggcgtgaaaaggagtcctcaccgggagacgacggcggcaatccggcggcaacacccggagacaacgatgacgctagataa

SEQ ID NO: 44719 - DNA, 4224 bp, Oryza sativa
  Clone ID: PAT_MRT4530_47752C.1
atggcggcggcggtgccaatcctgtcggattggtggggattgttgccttgtgcgacgaatcccacaaaagcttcggctccctcaactaggtccgcaagatttgagcgttttgccaccacggctctttacgagaagccccgctacgtcaccaagcaggccgcgaagctcatggatcacgacggcaagcttgatcttcttcttcgcaagatggaggagacggagaagaaacgggaagaaagcgacaagcgtctggagaaattggaggagcaaagcagggcagagttcttagccctcaagctggcggttgagtcgcggatcccagcggtggagaagcatgtggatctcctacacggctcggtggtggatctgcaagagaagatggagaaattgcagtccgtggttcaggatccttcccgtgaatgttctcctgctccggatgcttctggtcaaaccttcagtactccctctcctacctctcccaatcatgattctgatgttttggatcctactttggggaattgggctagtgctggcaatacatctggaattgggggatcagtaccacctatgtcctgtccacagtttgacggtgataatcctcaaatgtggaagtgcaattgcgaagaatattttgaggtctatgggattaatccaaagcactgggttagagtggctggcttgaatttcactggtaatgcagctttctggctccagtctatgcgctctaagcttgtggaggtttcatggggagaatttactgaacatgtttgccttcgattcactaaggacaggcaggaagtgttgattcgtcagtggtttcatatgattcaggattcttccgtttctgcatatgtggagaagtttgatagtgtaatgcatcagttgttggcttataatagttcactgcctctcaattattttgtcaccaagttcgtggagggattaaaaaaggagattcgttccggtgtgcttatgcagaaaccacaggatctggactcagcttgttctttggccttattacaagaggaaattcttgaaggagttccttctgtttctttaaaacgagtggattctgcttcttttgttaaacagtttcctagacagttctctctaggcccttctactcccaagcctgtttcagttatgtctcctgaatctcagtctgcttttaaagtcagagctgataagttggctgcattgaaatcgtatcgcagatctaagggtctttgtttcacctgtggagagagatggagcagggagcacaaatgcagtccatcagttcaattacacattgttcaggagttattggaggctctacaacaggatgattcacatcaggaacttgctgactctgattctgttgagacagttgtgatggctttgtcacagcaagctttctctggcactgaatctgtcacttctttcagattaagaggttgggttcagggtattgaggttctgatgttagtagactctgggagttctcattcctttttggatgtttctctgacctccaaactaaaagggattagacctttactcaaatcggtatctgtcaaagttgctgatggtggcattttgtcctgttcttcttttatcccagcttgtacttggtgtactcaaggccaatattatcaaactgaattcaagatacttccattgggggcttatgatgtgattttaggcatggactggaatttcagtctgtctttgaagaacccactaccttaccccccaggcgagcttgtgatcatcacattcctcttctccctcattttaagcctgtttttattcgaccttatcggcataaccctgctcaaaaagatgagattgagaaacaggaagttgaatgctattactgttaaagggaaatttccattgcctgtgattgatgaactcttagatgaattgtctgggtcaaagttcttttctaagttggatctcagggcaggttatcaccagattagattggttgccggagatgaacataaaactgcttttcagactcattctggtcattatgaatatagagtgatgtcttttggtctcactggggctcctgccacttttcagggagctatgaatgatactttagctcctgtattgaggaaatttgccttggtcttcttcgatgatatattggtttacagccctgatctttcctctcatttgagccatctcaggcaagtgctgcaattactttgtcagcatcaatggaaagttaaactctctaagtgctcttttgctcagcctcagctttcttacttaggtcacatcatcagtgacaagggagttactactgatcagtctaagattgaagaggttgtcaattggaaagtgcccacaactgttaagaaattaaggggtttcttgggtttagctgggtattacagaaaatttgttaaaaattttggcatcattagtaagcccttaactcaactgctgagaaaggatgttccctttgtttggtcccctgcagctgaccaggcttttctgtccttgaagcaagctttagtttcagcacctgtcctagccttgccagatttctctttgcctttcattgtggagacagatgctagtgatgggggcattggggtagttttatctcagcagggtcatccaattgcttttgttagcaaggctttgggtgttaagactaaaggattatctgcctatgagaaagagtatttggctattttactggctgttgatcattggagatcttatctgcagcaagggttgcagtttaagatttgttataggaaagggtccagcaattcagcagctgatgccctttctaggaaatataatgatgactccagtgaattgcaattggtttctagctgtgctcctgtgtggcttaaggaagtcactgatggttatcttgaggataacttctctgcccaacttttgactgatctttctctgaaggccaatgctcgaccacctttttctttatgcaatggtgtgttgaaatataaaggcagggtatggctgggtaacaatcttgagatgcaaaataaagttattgctgctcttcatcacagtcctatgggtggtcattctggctttcctattacttatcagcggatcaaagctttgtttgcttggcctcgcatgaaacaacagattcagcgttcgattaaaggctgtcaaatctgtttgcaagctaaacctgacagatccaagtatccaggtttattacaacctcttccagtccctgatggtgcatggcaaattatttctatggattttatagaaggtttacctaaatctggtcgatttgactgtattttggtggtggttgataagttctccaagtactctcactttgttcctctatctcatccattttctgctgtggatgtgtcccaagcttttatgtgtaatgtgtataagttgcatggtttgccttctgtgataatttctgatagagataagatcttcaccactttgtcaaagaccccttttgaagtgttgtatggctatcctcctggtcattttggtattcgtgaagatgcttgtagtatccctgatttgactgaatggctcacagagcgaaggttgatgactcaattgttgaagcagcacttgggcagagctcaacaacaaatgaaacagtatgccgacaagaagagaagcttttgggaattttcagtgggtgattgggtttttctcaagcttcagccttatgtgcaatcttcagtcgctaggagagctaatcacaagttgtgctttcgttattttgggcctttccagatcctgagtaaagttgggttagtggcatacaagttacagttacctcctgatagcaccattcatcctgtttttcatgtttctcaacttaaatctgctgttggattctctccttctgttcaacctcagcttcctgccttatctcatctgaaggtgccggtggctgtgcttgacagtcgtcagtctcatcgaggtaactctgtggttccacaagttttagttcgatggtctggtgatgttgctggacaggaaaccttggaagatcatgtggagctgcaacagcgttttcctggtgctccggcttgggggcaagccttgtctcaaggggaggggattgtcagctctgctggagtacctgatctgctacaaggtgctgctctgaaggagggtgtcaagcagacttccaaggacaggccagcaagaatgattaaacgtaatccaagggtgtttggaccaaagtgggcttaa

SEQ ID NO: 44720 - DNA, 432 bp, Oryza sativa
  Clone ID: PAT_MRT4530_47753C.1
atgatgccgtcgggtggcacatggggtcggggagcggggcagagaagagctgggcatgggggcacatggtttgaaagacgtacaaggaggcggcgacggcggtcatctacggcggcagcggccgtcttctgctacagctgcattccgcgcagctgcgccgtccgctgctccgccatcgcagcggtcaccgctcctacacaggcacgccaccacgtcgctagctgctgctccacctccgcgccgaccaccactccaccttcatgctggctgccactcctgcatgagtgcgccaccgtgtcgcccaccaccttgcgcagcacgcgcgccgccctgcgccgtgcagccgctacaagccgtgccgttgagggagaaagagaggaagaagataggaagagaaagagaaggaaggggcaatttggtcaaggcatgtaa

SEQ ID NO: 44721 - DNA, 1874 bp, Oryza sativa
  Clone ID: PAT_MRT4530_47754C.1
cggtctcatgtcaccgacaggatacgatatggttatgctcaatgtcgacttctccaccttcgacgagatatgacgacttctccacatgattcatatgaggtacttgactataattttgcacgagttgaatctaagttaacattctacgatgggaagtatgattatgttgcttatattgattgggagctagcagtagacaatgaatttaataaatatgatttttttcatgctcaaatgattaaggctgctagtaataagtttacctcttctgctttattttggtggagttatgtgagtaacaaacctgaaacttgggatgaatgcaaaaccttgatgagaaaatattttgtgagttcttattacagatgtacacttctggagaaattagaacatatgaaacaaggtgataaaactgttagagagtatatccatgaatttaaagtttgtatcatctatagtggtctaaaagagtgcaatgaaaacacaatgcgtagatttttcaatgggctcaattttgaagttcaggttatgcttgctaatgtggcatataatcatagacacttattcatgcttgctcgtagcgttaagagtaaaattttacaagatttcatatcaaatgagcaatcttttgtgtctcctgttactaacgttttgcagggagttcaaaacaatcaacaaaaggaggagactaatgttcttgataagaaagcggagaagtatgaagcacctacaatgtttgaaaaaagtttgcaaggtaaattaaatggtgctgagataaatgaagtagagcaactattagtggaaccaattgttgacattcttttgtcacaagttgatttgtttgatgttccttgtgataaaaaagaattgtgtgataatgcttcacttatatcaatgccacaactagtgaataaccgtgctatttctagtgtgagttctttctgtgctgattttaagcatgtttttcacatttctcatgaagtagaggaacgtgaattgctttcttctttaaatacttagggctatgttcggtttgatgacttttgtgagctcgataattttaaggagaaattatttgctaagtctaatttgccatgtccgactaatgctatttttcatatctttggtgaatataatggtaaaggaatatatttggtgcatagagtttacatctgttcggatttagaacctcatgtagatgtggataaaacatggacgctagggagatgttattgctaatcatattatctcgagtttgtcttgttttgatttaaagaaacaggttggttatcatgcactacgcgatgaacaccatatgaaaaaaccgatgacgtttttccatgaagaagaggaggatgatgtgactatgactactatagatacaatcattgctcacattgtgaatcaacaagaagacatcacgataaaatccaccaagtgctggaatccgattcggccacttgctagagtgctgatttcaaacagccgccaggtgtgcatatgtgctccgttttgggcccgtgagtacttaatggaaagctatcggagtcctctttcaaatggatccaacctcatctccaaattccatctcagtcggccgcaatcatatgaacaaagaataaggttgatctacactggctagatcaacaacccacggaaaggtgtatcgatcgctaaggcgcaacacaacaacatctcgtatggttgtagttgggtcgtcaacaatcatgcaagtgacctgactcactgaaccatcccacttaactagatctttcgttcactttcaatacactgccttgcatactataaaaagaaaataattaggtgcagtggtgatttctttaccaatctgaaaaaaattacccgactgccct

SEQ ID NO: 44722 - DNA, 1275 bp, Oryza sativa
  Clone ID: PAT_MRT4530_47755C.1
gcacgaggcgaccttctcaccgccgcgcctccgcctccgcctccgcctcaagccgccgcccgccgccgccaggagcggcctctccatggcggcagcgccgtaccaccagccgaccagcctggaggaggtcaggacgctctggatcggcgacctccagtactgggccgacgagaactacctctacaactgcttcgcccacaccggcgagttacaatctgtaaaaataatacgtaacaagctaacaagccttccagaaggttatggattcatagagttcatttctcatgaagttgccgagaaagttctacagacttacaatggcacacaaatgcctggaactgagcatacattcagattgaactgggcctctttcagctctggtgagaggcgtcctgatgcaggacctgatcattcgatttttgtgggagacttggcgcctgatgtcacagattacttgctacaggagacattccgtgtgagctatccttctgtcaaaggggctaaggttgtcacggatccaaatactgggaggtccaaagggtatggatttgtaaagtttgcagatgaaaatgaaaagaatcgtgcaatgacagaaatgaatggtatgtattgctcaacaagacctatgcggataagtgctgcaatacctaaaaaaaccactggatctcagcttcagtatggagctgctaaagccatgtatccagcagcaggttatgcagttccgcaagtccaaccagttctaccagatagtgatccgacaaacaccactatatttataggtaacttggatcagaatgtgacagaagatgaactcaggcagatctgtgtccaatttggggagcttatatgtgtaaaaattccagccaataaagcttgtggatttgtacaatatgcatctcgggcatcagctgaagaggcagtacaacgtcttcatggcacaacgattggccaacaagtagtcaggccttcatggggcaggagccctgcgagcaagcaggatcaatcagctgtctggagtcaacaagctgatcctaatcaatgggcaagtgcttattatggctatggatatgatgcatatggatatgcccaggacccatcatatgcatacaattcttatgcaggatatacccagtacccccagcaggttgagggagcgaccgatatggcatcagcagctggaagccatgccccaggaatggaaaaggaggaggtgtatgatccaatgaacttacctgatgttgacaagttgaatgcgtcgtacatcgctgttcatgg

SEQ ID NO: 44723 - DNA, 372 bp, Oryza sativa
  Clone ID: PAT_MRT4530_47756C.1
atacaatctatcaatgaattaatcattcattgatatgtgtacattataaaatgcaaccatctcccactactggcaaaataactagtctttctccctctccttcctcattctaattttgcgtaacatatcctcatcttcatactcgagcgcttatgtctcccttcctcaacaccgctattctacaccaactggctctttatactatcatttcccatacctttcatttttaactttattcctcttcaatgtattcctatctattttaatttactcctcttcctactccctatacttaattttatctaattcaaccttccttaagaacctatatttttcataacttctaccatccccattaccattaaccttatt

SEQ ID NO: 44724 - DNA, 255 bp, Oryza sativa
  Clone ID: PAT_MRT4530_47757C.1
ctttagctatagcgcacgcctcctgtccagctcattagggttggactaagacaacgccctggtccttgcagccatagcggcaacggtcgtgatagtgcaagaggaatgcgacgcccccgtccagaagagctataacaagggcctccttggccctgtcgaatagcgctgggatgagggaacataaggcaccaacgaggcttgccgactcccgttgtggctgcttgccccaccagcaaaaaaagatgacatttgaag

SEQ ID NO: 44725 - DNA, 537 bp, Oryza sativa
  Clone ID: PAT_MRT4530_47758C.1
acgctcatttacggttgacgtaccgaagtaccggcaaaaacatctttaatttttataatagtagagaagagatagagatgtgtaaattatagtgcatgtaataaagtatcatctttcataattaaaccatgattgcaaaagaaaacatattgatgaaaacaatattacctaccatttatctaaaatatatttagaaagtttcaagataactcttttttttaaaaaaaaaaccaatttcgataccggaacaccaaattgtaggtgctaaaatcaatgatttataatttagaactgcattagaaaatgttgaggtgcacatatattaatctgaatcatatttatatgattctcatgaattaaaagtttaagattcaaattgaacaaaactattaatacgtcacaggcaatcattttcccgccatttagttttacacaaaaccacgagttgcgtagtcgtttccgctggggccatttattagtgcagggcatgctgcccatagcccttgatagactgaccaatcatgggcctatttctac

SEQ ID NO: 44726 - DNA, 110 bp, Oryza sativa
  Clone ID: PAT_MRT4530_47759C.1
tttcggttagccctggcggcaagaccgatcgtgctatgccagtcaatatgcagctgatgagacgatcagacaggtcggccctacgatctgaccctcaggatcatatgtga

SEQ ID NO: 44727 - DNA, 285 bp, Oryza sativa
  Clone ID: PAT_MRT4530_4775C.1
atgtacccgaacgatgtgtgcgacaggttcgccacggctggcttcaacacgaacatgatcgcgtacctgacgcagcagctgcacctgccgctggtggcagcctcgaatctcctcaccaacttcaccggcacggctgattccttcgccggccacctctggaccaccgccgcccccagcgttctgtcccagctcggcatgctcggcctcgtcgtgtccgcgctcgtccctgctccgccccgcgccgtgcagcgctgccgccgccgccctgtgacaatgactatttag

SEQ ID NO: 44728 - DNA, 3348 bp, Oryza sativa
  Clone ID: PAT_MRT4530_47760C.1
gggaagaattggggaattttcatctgctggctcctcggaaatggatgcctcttcgggttcaatggcatggttacaatcgaagattactatgtttacctcttcccgccattcgtcctcaccacaacagctctgttcgcatatcacgaggcaaagatcaacactaggatgcgcaacttggctagatatatgctgttcttcctgagctcatttggagtgatcgttctagacgttgcatcttcaggaagaggagggattgcaccgttcgttggtttgtgtctgatcgccgcggctttcggcgttgcagacggccatgttcagggtgggatgactggagacctgtccttgatgtgcccggaattcatccagtcgttctttgctggcattgctgcatcgggtgcaataacctctgcattgaggttcttgacaaaagcaatttttgagaactccaaagatggccttcgcaaaggagctatgatgttctcctcgatagcatgcttcttcgagcttctgtgtgtcatactctacgccttcgtcttcccaaagctgccaatcatgaagttctaccgcacaaaggctgcttccgaggggtctctgacggtcactgctgacctcgctgccggtggcatcaaaagtcagccagaaaatcctttgaacatggactacgctctggacgtgttcatgatctatgtcctcacactgtcaatcttcccgggctttctggctgaagacaccgggacacacagcttgggttcttggtatgcgcttgtgctgatcgcaacgttcaatgtgtccgacctgatcgggagatacatgccactgatcgagcagatcaagctgacatccaggaaatggctgctaatcgcagtcgttgcaaggttcttgttcgtccctgcgttctacttcacggtgaagtattgtgacgagggctgggtgatcatgctaacgtcgtttcttgggttgagcaatgggcatctcaccgtttgtgtcatcactgaggcgcccagaggctataagggacctgaacagaatgctttgggcaatatgcttgtgttcttcctcttggcgggcatattttgtggggagcatggacgtggagtcacctggaagcttccctccctgctcccactcctgtccctcatcttccgccttggccacgtcggggaagtcaacaccgacggcagttcgctcttcaccgccatcgacagggccaccgccaccaagccccgtgctcgcaacctcaggcaccgcatcgtccaccgctttgttgacgtctacagcgccacccatgcccccaatagggacaccatcggtgcggctgtgcgccacctctacgcgctggatctcaaggtcagctggggcgtcaacgtcgcgcatgagctcaagttgttagcgcccaagtcccactgccacgacctcgatgctgccatcaatgacattgtcgatctcgacatccaaagcatcgccgaggattacggcaagaagatcctggacttggccaccggggaaggaatgttgacaagcgtagccccgcgagcactaaaattcagaacctccctctatacagatgatgcagcaatgttcctaaatccttcacgccaggaagtgcaaaccctattgggaatcctggacaaattcgaggatgccacgggcctgcagctaaacacaacaaagagttcaatcatgccaattcgatgcaacgacatagatctccaagatatttctcaaaacttcgatgggcagctgggtgctttcccccaaacctaccttggactgcctcttactacggggaagttaaagcgggtccatttgcagccgcacctcttcatggagtgccccttcacgcagcagttggatgttgcaacttcagggagaggtggaatcacgccatttgttggcgtgtgcatcattgctgctgcctttggtgttgccgatggtcatgttcaaggtggaatgacaggtgatctctccctgatgtgcccagaatttatccagtccttctttgctggactagctgcatcaggaatgataacctctgcattgaggcttataacaaaggcggcttttgagaattccagggatggccttcgcaaaggagctagtatgatgcaacaatcgtatgcacttgtcttgatcgcgagctataacgtatgggatctgatcggaagatacatacctctgattgaacaagtcaagctaaggtcccgcaaggtgatactgatcgccgtcgtctcgcggttcttgctcattcctgcattctactacactgcaaagtacagtgaccagggctggatgatcatgctaacgtcgtttctcggtttgagcaacggatatctcaccgtctgcatcctcaccgaagcacccaaagggtacaaggcgcaggtgaactttatcatgagcctcgaggtcgcaggtgcgggggcacctcaggctcaggggaagttcttgggtatacttgtctgctgggttttgggaaatggaagcctcttcgcttggaatagtatgctcaccattgaagattactattcaattctgttcccggccgaggaagatcccaaaaaatgcgatcgtttaagcaccaaagatctgttgatacagaacatagactacgcatttgacattttcctgatatatgtcctgactctatcaatcttccctggatttttgtctgaagatactggagcacacagcctgggaacatggtacgcgttgacgctcattgcgatgtacaatgtgtgggatctgattgggaggtacctgccactgatcaagtgcatcaagctgacctcccggaagggtctcacgggggcgatcctggctcggttcttgttcatccccgcgttctacttcactgccaagtacggcgatcaaggctacatgatcttcctgacgtccttcctgggcctcaccaatggcttcctcaccgggccggagcagaacgcgctgggcaacgtgctggtggtctgcctcctcggcggcattttctccggcgttgtgctcgactggctgtggttgataggaaaaggctgccggccagtggtacgtggagacaccggcgtcgagctcattgccatcgacagatcgacgcgtcgtaaagatgccaggatcgtacgtcctgcacgactgcatttctcttctggaaatccgcgcgcgacagcgacctatgcccgggacaccgaccccgtcgtggtggtcgtcaccgtcggcgtccgcgcgacatcgccgtggggagggggactttccgccgccatcggtggagcactaggcgaccatgcgtggatcggttttccgaggaagctgtgcctgcattcccgcaccgtcgatcggcgaaggccatgggtgggcgagtga

SEQ ID NO: 44729 - DNA, 1916 bp, Oryza sativa
  unsure (1)..(1916): unsure at all n locations
  Clone ID: PAT_MRT4530_47761C.1
cggacgcgtgggggcatcttcaacttcaacatctgaattctgaaactttcagtttggaatagcagaggaactgaacaatcgtatttagatacttctgtgccctgttctttatttaactaaggcgttaggattattttggtcttgtttaaccatgctctctgaaactatagtattttatcggctaacgaacaaaatattccagttctgcttctgtctcatctctttgcagtattgaattctgaaataaatgctacatgtctctttgcagtgtgtgcctatcctagaaactttcttgaataggcgcaggtgaactttatcatgagcctcgaggtcgcaggtgcgggggcacctcaggctcaggggaagttcttgggtatacttgtctgctgggttttgggaaatggaagcctcttcgcttggaatagtatgctcaccattgaagattactattcaattctgttcccgacataccatccaacaagagttcttacaatagcttaccaaccttttgccttcggaataacctgcatcccgacataccatgaagcaaagctcaacacaaggaagaggaatctaattggatttgcacttttcttaattagttcttttgcattaataatgctggacattggtactaaaggaaggggtggacttggtccatttatcggtgtctgcataatcagtgccttatttgggacagctgatgccagtgttcaaggcggtttggttggcgacctttccttcatgtgcccggagtttattcagtctttccttgctggcttggctgcatcaggagttctaacatcagccttgagattaattacaaaagcagcatttgagaactcacaaaatggtcttcgtaatggagctatactgttcttttcgataacatgcttcttcgagctagtgtgcctactcctttatgcgtatgtctttcccaagttacccatcgtgaagcactaccgatcaaaggccgccgctgaagggagcaagactgttgcaagtgatcttgctgctgcaggaatcagcaatgaacattctatacaagccgaggaagatcccaaaaaatgcgatcgtttaagcaccaaagatctgttgatacagaacatagactacgcatttgacattttcctgatatatgtcctgactctatcaatcttccctggatttttgtctgaagatactggagcacacagcctgggaacatggtacgcgttgacgctcattgcgatgtacaatgtgtgggatctgattgggaggtacctgccactgatcaagtgcatcaagctgacctcccggaagggtctcacgggggcgatcctggctcggttcttgttcatccccgcgttctacttcactgccaagtacggcgatcaaggctacatgatcttcctgacgtccttcctgggcctcaccaatggcttcctcaccgtgtgcgtcctcaccgaggcgcccaaaggatacaaggggccggagcagaacgcgctgggcaacgtgctggtggtctgcctcctcggcggcattttctccggcgttgtgctcgactggctgtggttgataggaaaaggctggtgatcgtgttgtaatatctctggcatgagagacccattggttctccctgctcggatgagcggggctgttttaacatcagaatggcaggaaagaaaaaaagaatcctcctataaatctggctgttagcaactcgtatgggaccagattgtgtgccattttgacgacttttggctgcaatgtgttagtgtagtgctgtagttcaaccccgtcgtaaattttggggttcaatnaaaaaaaaaaaaaaaaaaaaaaaaaaaaaaaaaaagaaaaaaaaaaaaaaaaaaaaaaaaaaaaaaaaaaaaaaaaagggggggggaaaaaaaaaaaaaaaggggttttttttt

SEQ ID NO: 44730 - DNA, 1008 bp, Oryza sativa
  Clone ID: PAT_MRT4530_47762C.1
ccacgcgtccgattcggaggcggagaagaagccggtggtggtggagaaggctaatgggggcaacggattcgatgatctgatcccggggttctctgggagcggcccgcagaggagtaggaagattattgatgataacaaagatgagccagcagttcgaacttctaaatcaacagccagtgtattagatgatgacccatttgttgttctagaaacaaattctgcctcaggttcaacatatccatcccctagcagcttcatggatcccttggaacatctgaataattctgcaagctctaaaggcaagaatgttgataatactactgataatgatagtctgcctgatgattcaagtgcctttaaccaggttccaaaatcagatcctttgtttacctcagaattcaatggtgatacaaagtatatgaatccaccaagcaaagcccgagactcaaaccctctacatggttcaatgaatggaaattcagcacggggatcttctacggaggacttaggagatgccaagacaaagtcacagtctgcaaggtactctgatatttatgtcgatggctcaagttcagacagatatgctactgatggcgttggggatcagtcaccaagatctactgaatccgaagatgacatatggcttacagtttctgaaattcccctcttcacacagccaactaatgctccaccgccctcaagatcaccacctcttcttaaacaaagacctctgcaagcaaaagctaatggtaattatgatgggtatgtgcggcaatcaaaccaaaatcacaaccaatacagagacatgccagatcaagcagaggtttcttcactagatgagatggaaggttttgcgaaggacaagtcccaaatgccttcttatgacgacaatttttttggtgaagctgaacaatctgaaagaacttcatcagatcgtgaagagaaagagaggcaggccagattggaccaggaacaggaaatgaaactgatggaggaaaagaagagaga

SEQ ID NO: 44731 - DNA, 300 bp, Oryza sativa
  Clone ID: PAT_MRT4530_47763C.1
atggaaggaaggaggcatggtgagaacgagtcaattgttgggcagatggtgctaggagtacacttctactaccactgcctgcctactccatgtgcacgcctgccccaggcgaccgcatcccaacaccggcccacccccacgcgaccaccaccacacgcatccaactcgggaccacccacccagcgacccaaggacccaaaggccaggccacacccagccccgatctaccctgcactgcactgctcctaccagtacaacggaaagatgagagggatttgcactattactactgtacattag

SEQ ID NO: 44732 - DNA, 254 bp, Oryza sativa
  Clone ID: PAT_MRT4530_47764C.1
ggtgggcccgcaaacacaatctgcacctgatcagggacacattgaaaccttgtgtcaggccactagcgcagctagctgacaactccagccagtttggtgatctctactgttgatcggaatctggctcaagctcaagctctgttggcttttaacgtgtccagtctagagtatggtagtcgtacccgtagggtactatggtgcaccgtaggtacccattaccacccgttggcgggggtcttggtaatgaggtttgt

SEQ ID NO: 44733 - DNA, 2127 bp, Oryza sativa
  Clone ID: PAT_MRT4530_47765C.1
atggagagagaagtaggaggtactgaaccccagcctgtccttggtcgcatggttgcgatcgaggactacattctttgtcgttttctccctccactttctgaatttcttctcttggtcttgaacttctacagcctttctttgctccatttgaaccccaattccattgccttccttagtatctttgcacacctttgtgagacctacattggggtagagccctttcttgatcttttctgcttttactatgaattgcgttggatggaatccaacagggtgtctggatgcgtcggattccgacttcgggatggcctgaagtcgcgttatatccccttccagtgcccttcttctcgtagcaaatggcgggcaaggtggttctatcttcagatagagaattcggattttatctttgttgttcccgaggaacaaccagacaagattttgtcttggaccgcaaagcctaccttgacccctgcccttcggtccttcgtcaaggccatcgatgacctccgagtgcgaggtttgtcggggtatgaagtcgctgccgacttcgttggcttgaacagcaaaacggtggagcgctgcgttggccaactgatgatcagcggcccgacaatggcaggcgacatccccgttcccctttgtgagaaggaggcaaccgagcgtgaagcggtgatcaacgctctccctctgactgacgtcattggaccgctcgtggaccatcaggcggcggcctcgttgaaggagcgagtcgtccaggagacgtccgatgcggccactgctgttgccgcgagtagtgggagccgcccccagaggaggggaagaaagttcacctccgtactggcgtcggacgcgtctccgccacctcctcgacgacaaaagctggtgacgctaggcgagaagtgggcgcgggcgaaggcggcacaagatgggtctggtgagacctccagcgcgtctcctgcggtggcctccacggacgtcgtggtcgccccacgaagtcggaaggcgacgccccactgcctggccggtgatctcgggcctgttcgcggcccgcctgccgatgtcctcagcaggggggagctccaagtcgagatggggcgcctcctcgaagctggtgctcgtggcataagtcgcgagattgccgaggcgaggacagcggcggcgtcgtcggccaacaagcgcgccgacaagctggagcgtaaactggcggaggttcgcgaggacctccagaagatgagggagctggtggccggcaacgagcgacagcggcggggtctcgagggccgtatggcagaactcgagagcaacctatcggagctccgtggcttgttgcgagtcacctacactggcctacaccagctcgccggggaatgtggtgtcaagaccacgatcccggtgaaccccgacaagttctcgctgacgtctttgctcgaggaactggctacggcgatggaggcgatatcctccaagcacacggccaggatcggggaggaggcgtccaacgggatctacaccggggcatgtcacgtcctcgcgtgtgtcagagatgtcgatgtcgaggatgtccagcagcgtgggcagcctgtggcgccagcgatcattccggctctcgcgtttgaggcacacgcgtcgccggacgatgtagatgagattttaccctcgacaacgggggtggcgacgacttccttagatctcgagagtgcgcttactgaccaagatcgtcgtatccaatattggaagacgaaatttgaagtagcgaaacttgagagaactatgctggaagtgaagaaggagcaggctgtggaaacactccgaggtcatgaggtgtggttcaactcgtacttgaagagttgctgcacgtccatggccgaaatttgtagggagctccgagtaccgcgtggaaatcccgaggagtcggcggccggatacatctcgtggctgaatggggcctgtactcagctcgaaggcgtcgtcaagcgcattgacggagccctgaaacaggaatgccgtcgatcgagccgatatgttggagggcacgtgttggcttgcatacgagatcatcgtccgaactgcacctcgagtttctccatgaagggttcgctcgttctcgggggactccagcggagatag

SEQ ID NO: 44734 - DNA, 2389 bp, Oryza sativa
  Clone ID: PAT_MRT4530_47766C.1
atggatctcggcaagtctacttccaccaacgcgtcgctaaagaggctccaggaagatggcgcccttcccggtcatggaaccatggagagagaagttggaggtactgaaccccagcctgtcctgggtcgtatggttgcgatcgaggactacattctttatggttttctccctccaccttctaaatttcttcttttggttttgaacttctatggcctttctttgctccatttgaaccccaattccattgccttcctcagtatttttgcacacctctgtgaggcctacattggggtagagccctttcttgatctcttccgcttttactatgaattatgttggatggaatccaaccgggtgtctggatgcgtcggattccgacttcgggatggcctgaagtcgcgctatatccccttcgggatggacgaagaaatggcgggcgaggtggttctatcttcagatagagaattcggatcctgtctttgttgctcccgaggaacaaccagacaagatttcgtcttggaccgcaaagcctaccttgacccctgcccttcggtccttcgtcaaggccatcgacgatctccgagtacgaggtttatcggggtatgaagtcgctgccgacttcgttggtaggcgaatccagccactccaggctcgagcccatccagcttttgactattctgggccggaggacacgacccgagtttctcctcagggcttgaacagcgaaacggtggagtggcacgtcgatcaactgatgatcagcggcctgacaatggcagacgacgtccccgtccccctttgtgagaaggaggcgaccgagcgtgaagccgcaatcaacgcggcggcctcgtggaaggagggtgtcatccaggaggcgtctgacgcggctgctactgctgtgactagcgggagccgccccccgagaaggggaagaaagttcacctccgtacttggtagtcgccggaaggcgtcctccccatcggcctcggacgtgtctccgccacctcctcgatggcagaagctggtgacgctaggcgagaagtgggcgcgggcaaaggcggcgcaggataggtctggtgagacatccagcgcgtctcctgcagctgcctccactgacgtcgtggtcgccccacgaagtcgggacgccccacggcctgtccggtgatctcgggcttgttcgcggcccgcctgccgacgtcctcagctggggggagctccaagtcgagatggggcgcctcctcgaagccggcgctcatggcataagtcgcgagattgccgaggcgaggatagcggcggcgtcgtcggctaacgagcgcgccaacaagctggagcgtgaactggcagaggttcgtgaggacctccagaagatgagggagctggtggccggcaatgagcgacagagcggggtctcgaggaccgcatggcggaactcgggagtaacatgtcggagcttcgtggctcgctacgagtcactttcaccagcttgcaccagctcgccggggaatctggtgtcacgaccacgatcctggtgaaccccgacgagttctcgctggcttcttcactcgcggttctggctacggcaatagaggggatacactccaagcatgcggccaggatcggagaggagacgtccaacgggatctataccggggcgtgtcatgtcctcgcgtgcgacaggttggcgcatccggaactcgacctccagcgggtcttggagcagggagcgacgaacgacgcgcgtagaggcgtgatggaagaagtcggagatctgggagaagatgtcgatgtcgaggatgtccagcagcgtgggcagcctgagtcatcaccgatccttccggatcttgcgtctgagggacacgcatggctggacaacatggatgaaattttatccgcgagaacggggacgacgacgacttccttagatctcgagaatgcacttgctgaccaagatcgtcgtatccagtattggaagacgaaattcgaagtagcggaactcgagagagccatgttggaagtgaagaagaagcaggccgtggaaacactccgaggtcgtgaggtgtggtttaactcatacctgaagagacaagatcccgaggaatcggcgaccggatacatctcgtgactgaatggggcctgtgctcagctcgaaggtgtcggcaattgcattgacgaagccctgaagcaggaatgccgtcgattgagccgatatgccggagggcatgtgttggcttgcatacgagatcatcgtctataactgcacctcgagtttctccatgaagggttcgctcgttctcggaggactccggcggagatagaccacctggcgaagtcgatggcgccgctggcggagaaggttttccagtctatggactggcgttggccttccagg

SEQ ID NO: 44735 - DNA, 636 bp, Oryza sativa
  Clone ID: PAT_MRT4530_47767C.1
atgggcttgagcctggagcggctggattcgcctaccaacgaagtcggcagcgacttcataccccgacaaacctcgcactcggaggtcatcgatggccttgacgaaggaccgaagggcaggggtcaaggtaggctttgcggtccaagacaaaatcttgtctggttgttcctcgggaacaacaaagataaaatccgaattctctatctgaagatagaaccaccttgcccgccatttgctacgagaagaagggcactggaaggggatataacgcgacttcaggccatcccgaagtcggaatccgacgcatccagacaccctgttggattccatccaacgcaattcatagtaaaagcagaaaagatcaagaaagggctctaccccaatgtaggtctcacaaaggtgtgcaaagatactaaggaaggcaatggaattggggttcaaatggagcaaagaaaggctgtagaagttcaagaccaagagaagaaattcagaaagtggagggagaaaacgacaaagaatgtagtcctcgatcgcaaccatgcgaccaaggacaggctggggttcagtacctcctacttctctctccatggctccacgaccgggaagggcgccgtcctcctagagcttcttcagtga

SEQ ID NO: 44736 - DNA, 537 bp, Oryza sativa
  Clone ID: PAT_MRT4530_47768C.1
atgagatccgtcaaggcagccgtggcggcctatcgctactaccagatctccaggatggtggtggtgtccggccgcgccggccgtctgcagaacatgtcgactcaacgccacaatccaacggcaccagcggagagaatatacacgcaaggggaaggatccttgtttgacaaactcgaggttgacaccggcctcaacatcatcgacgtcttcgccaagctaatcctacagaagttcaccgacacgatgaacaggagggagctactcctccagagcgacaagaaggcagttgcggaggccttctggcggggcatcatggatggaagggtcgatgacatggtccccacggaaacgatgaggactccgtggcgtagtggcagccttttacctcacacgcaggggtacacacatgaggagcagcagcatgattgcgcagctttggccgtggagccctcgcggcggagcggtgtagcagtgaggacggggcagcggggcacacgtgcgtggtctatgaccttacgcacaacagggggcgtgtga

SEQ ID NO: 44737 - DNA, 758 bp, Oryza sativa
  Clone ID: PAT_MRT4530_47769C.1
gtgaggacaggccacttgagcatgtacagttcccaaccactattgaggagcttgaaggtaagagaagagtagacatagaggcacaattaagaaaacaagacattgccaggaacaagattctccagaggcaggatgctcctgctgcaattatgcaggcaaatagactcaacgatccagaagctgtcacaaagaggtccaaattaatgcttccaccaccccaaatctctctcccaactcccctcccctccccttccgcccgcatcgccgccgcgccgcgccgcgtgcgaatctccggcgaggatcgagggcgcctctggtcccgtctggtggtcggtcagccatgtcgctccgcgtgctgaacccgaacgcggaggtgctcaacaagtcggcggcgctgcacatgaacatcaacgccgccaagggcctccaggacgtgctcaagaccaaccttggccccaagggcaccatcaagatgcttgtgggtggagctggcgacatcaagctgaccaaggatgggaacactctcttgaaggaaatgcaaatccagaacccaacagctatcatgatcgcaaggaccgcggttgcacaggacgataccagcggtgatggcacaacctccactgtgctttttattggggagcttatgaagcaatctgagcggtgcattgatgaaggcactcatccacgttttttggttgatggttttgatgttgcccagagagcaactcttgaatttctcgagaagttcaagacatcag

SEQ ID NO: 44738 - DNA, 2364 bp, Oryza sativa
  Clone ID: PAT_MRT4530_4776C.1
gtccgcccgtgtcgcgtgctgggctccttttttttttacttcgtcaccaaatgcagaaaattcagacattttattgaaccaacttatacaagatttcatgttattgttacaatcaaaccttcaaacacgtttcccccacaaatcaacgacagaaacgaacaacagtacaggcgcaaagatctaatcatctaatctttaccagctccggcgtccacctctttcacagcatcagcggcggcggcggaagcaggcacatctccggcatccacctgttccgcaacatcggcggccgcggtggcagcaggcgcatccccggcatccacctcttccgcagcatcagcggcggcggcggcagcaggcgcatctccagcatccacctgttccgcagcatcggcggcggcgatggcagcagacgcatctcctacacatgcacacttgtatggatcttcctcgtcttccaacgagagcgcaaggggcaccctgatatccctgtagctgcagacgtatggcgcgtcgcggccgtggtaggtgccggtccacttcccgtcgttgatgtggctggcgtcccacacggacgcgtacaggaacatgggtttctccggccacggctcgccggcgacgcgctcctccctccggatcagctcgccgtcgatgcgccactcgatggcgtcggcgccccaggcgatggcgtagtggtggaatccgtcggaggagtcgaacgggaggacgtggatctgctccctcccgccgccgccggcgacgtggaagttggtctgcacggcgcacttgtcgtggccgaggaactcgaagtcgatctcgtccatgtcgcgggagccctcgagggaggagaggtagaggttgtagttgaggccggcggtgtccccggccggcgcgcggatggtggcggcgacggcgccgcctgggaggaagcggcagcgggaccgccagcgcgcgccgccgcggtcgtcgtaggtgacgtggatctcgccgtcctcggaggcgtggtggcaggcctcggggcagtagtcgacggcgatgtgggccagtggctccgtgccgtcggggtgcaggtgcacgtgcacgtgcggcggctcagcaacggcgacgcattcggattccgacgccatgatggacagggacagggagagctcactgtgctccacatccttcagtggaaatgactggctcccaccaaacgccaggtcgctcggccctttgctgaccgcccagacaggcaggagctccacaacaaccttctgtaccagcttgtcatcctgaaaattgttcagaagtgatgcaatgcctcctccagcctccctgaaatccaccagcacactacatagccctcgttgtgcaagaagttgaagaatggcatccaggttcatctgatcaaggactaaaacatcaactcctgctggctccacagtgataggactatccgacagaactactgcctcggctgcacgctcttctttgagaaacggaatgtttaattgggaattttcgcactgcgctatgatgatataaagaggctgcttcgcaccagcttcacgggatacaggcaaggtatttgtcttggcaaaattgcttgaaattattactccatcgtattctttcaataactgcgagtagtatccttctggttgatcagctccactcccaatctgattgatgacaactccattcatcgagagtgtagttcttaaagttgcaaaggccttcccagtaagcatgcgatggatgtaagcctcatttagcttgcggcatgacgcttcttcatccacgcacaacctcacatctatcccggcgcttctgagcctttcaatccccttggatgccacaataggatttgggtcagtcatccccaccacaacatctttaactttggcattgatgagtgcttcagtgcagggaggtgtccgcccgtaatggttgcagggctctaagctcacataggctgttgcattctctgctaaatccccagcatctctcagagcaaacacctcggcgtggggctggccggctttgggatggaatccctcgccgacgacgcggccgtcgcggacaacgacacagccgaccatggggttagggctggtgtgtccggccgccttgcgcgccagctccacgcaccgccgcatgtagtggccgtccatgtcgctcgcctgcgcctggcaccgcacaccgccgacgaggccacggcgccgccggaccgcgaagcgggcgctgcaaggagaggccgtcgaggcggcggcggcggggcgcggagtgaggtgggtgcgcgagacgagcgaggaggccatgtccgtcgcgcagaggagactcccccaatccaacgagccgtttgtgtgatagaaagaacga

SEQ ID NO: 44739 - DNA, 843 bp, Oryza sativa
  Clone ID: PAT_MRT4530_47770C.1
ctacagacggccgacgcggcgatgccacctgcagcatagcattgcagcgccgcgccgcgccgcaccgccgacggtggctcggccttgaggcccctgcgtccgggacacccggcgagcgtactcctgcggtctgcgtctcttccctgcctcgggcctccgcttccacctggcggatcgtactcgcatcgcatccacggcgccgtcggcggcaagcaggtgaaggtgactcggctggctcggcctagcgttctctgacctcgtcatcgacgagcgcggcccttgttcacggcgccaactgcccagccctctccacggcgtccggtaagcattccgagatgaatccccttgtttcacgaacggcatctgttgttgtgttcttgtgtaccaggtaccaagatgaaggtcaagattcttcagtggcatgcggtggcttcttggacatgggacgcccaggatgaaacctgcggcatatgcaggatggcattcgacggctgctgccctgattgtaagttccccggcgacgattgcccgctcatctggggctcctgcaaccacgccttccatctccactgcatactcaagaaaacttttctggaacttagaaatgttgtcttcaagtactatgtactaatattttctgcaaatgctgatggtcacaatctgctaagtgaaactggcaggaagctgcacctcgtccatgttgtgctgtccagggtccaggctccaggctcgcttgcaactgtgggcaaatctcgtgatctcccattctacatggcaccaaatttcaggttgcttgaatttctgggaagcttcctgttaggctacaacgttaacagtgtttga

SEQ ID NO: 44740 - DNA, 645 bp, Oryza sativa
  Clone ID: PAT_MRT4530_47771C.1
atgggaggggaagtagaggctgacacgtgggacctatgtgggtcccacgctgagtcagctgcacgtcggtcaaaactggagttaaaaccgctgagggatctagtttgcactggttttctggacgtaaatgggcctctcgatggcccatccacctcgccgccgacggggcgccatcaactgcgctgccgcatccaatcccagcacccgcgaatctgcgagttcggccttagcaccgcggtcagcagagcaggcgattggtggcggcgccggcgggactcgccgggccagcgcgtgccacagcctgccgacgaggtcagggattcaggaaggcgcaccgcgcactgttgcttcatctgcagggccggcgttctttcggcgggggagtgccgggtggcggtgggcgtcgatcccctcgaggtgctcgaccgtttgcctgaccggggcgcggtgcatcaaatgaatcgacgggaagccgggaactcgaccagatcaacagtgcgagcccccaagctggtcagtggagactggagcaatgtctcagtctcacagtttcggggagtctcctccgattcagaggttggtgtggccgtgtgggcaggttgcggatttttccgtttactcctattcagggatatgatggattga

SEQ ID NO: 44741 - DNA, 362 bp, Oryza sativa
  Clone ID: PAT_MRT4530_47772C.1
tcggccacgcgttcggccacgcgttcggccacgcgttcgggccacaattccatgttccattcacttttcttttcttttcgggggggggtacaggcgatgaccgggtgcgggggggtcctccttctctattggcggtcgcgggggcgggttactcttccccaccggttaccacgccggcttcggcttcggcgtcgccaggctcgggaggcggggatcttgcggcgattgggccggctttcgggccgggattcggcttccgcgctgctgggcacgggagccggggatccggcggcaccattcaattccccaacaccggcgatcccctttttatgcatggcttaagccggcggaataccccttcc

SEQ ID NO: 44742 - DNA, 260 bp, Oryza sativa
  unsure (1)..(260): unsure at all n locations
  Clone ID: PAT_MRT4530_47773C.1
agctgtccgagtacataccgccaattcgagcnctgngctccaaccacgccccgggcggtcgcaaggggttcgcgttggccgattcattaatgcatctggcacgacaggtttcccgactggaaagcgggcagttctgcctagatacagttgagggtattgagagttggcccaagtcagataggcctagcccacaagcacctggctcagggttctcagcacagctccacacgtgccaacacagattctacaccccacagtga

SEQ ID NO: 44743 - DNA, 114 bp, Oryza sativa
  Clone ID: PAT_MRT4530_47774C.1
atggctgaggtggcgggcagtggtggttgctgtgcgcgacctatgatgaccaaggaggggccttcactagacttgagcagcaatggaggagaggccttcggtggacctggggcg

SEQ ID NO: 44744 - DNA, 529 bp, Oryza sativa
  Clone ID: PAT_MRT4530_47775C.1
aagaggatgtctacttttgttggaatcccaattccagatatgagaccctcaatgatgttaggcatgggaggaatcaatgatcccgatgtggaaatggacaagaacaagagagcatcatgtttctagatgtggggattctagttttggtgtagttgcgatgtgcgagatgtgtcgacgagtgacaatactgttggccatggtggcacatgaggggtgtgagagactttatccgatgtaatatcgatatgcaatgtttttattttctagtggctcgttatgcaattgagcgggagcaatgcattgggagtgatttggcttaccagcggttatgatatggccatgcaggatcacctcgattcgatgttgtgtcctacgtagaggcgcgatgggagcgggagatggacaaaagtacataaacatcctatatctttaatagtagatgtatagattcgacacataaatgtgtttttcagacatgggaaacatcatctcgctttttcttacaaggcaaaaaaaaaaaaaaaaaaaa

SEQ ID NO: 44745 - DNA, 394 bp, Oryza sativa
  Clone ID: PAT_MRT4530_47776C.1
caaaacggcaccccaggaggagccatgccttttttttaaacatgggacccattatccttttaaaattaagccccagcccccaccagggggggaaaggcccccgggggcaaggaagaagtggggaaagaccccaaaaagggggggaaggttaagggccaaaaaagctggacctggggctggggtctaaaaaaagaaaaaaacccccccctgctgaagtggaggtggctgaaaaatcgccggaaccttataaagggccgggaagggaaatgggggcccacccacccggggtgggggaaaaccccgcccgggggccgggaaattcggaccgggacccggggggcgaccaagttttccttaaagggggtcgaataagagctgggcgaaaaaagggaaa

SEQ ID NO: 44746 - DNA, 749 bp, Oryza sativa
  Clone ID: PAT_MRT4530_47777C.1
agctcggcatagacttccgtcgtctcctcctcgtgagctcgcccctgcgccgcctgcgccgatctccatcccgcgagcgagcaggggcgcccggcgctggcgccgtcgttcgtcctgttgcttccgcccgcatcctggtctcaggagatggaactcttcaagttgattatttcactttttcgccaagcattgctgattatataagggatgcttccctggtcatcagtcatgcaggttcaggaagcatattcgagacgttgcgacatggcaaacctctaattgttgttgtaaatgaggatttgatggacaatcatcagagtgagttagcagaggaactggctacaaggaaacacctcttctgtgcaagcccacaaacactaggagagacgatccaggaaatggacatagagactctcaacccttatgtgccaggggatgccaaaccagttgtatcgctgattaacaagttttttggcttcccagatgactgattttttttttcttattcccgccttttctgttgtaagaaaatgaagtcacatatggaagaggtagctgacaaaagtgaagtttcatagtggcatgtcacatgcaagcctatacccaaccattttggtatgattccaactcaccaagtgtaatccgagagaactctttgaattgtttgaaaacggaggaaatgcatcttaaactccattgttaagccattgggtgcgaagtagtatgatttttttttaaaaaacacaaaa

SEQ ID NO: 44747 - DNA, 790 bp, Oryza sativa
  unsure (1)..(790): unsure at all n locations
  Clone ID: PAT_MRT4530_47778C.1
cttccgtcgtctcctcctcgtgagctcgcccctgcgccgcctgcgccgatctccatcccgcgagcgagcaggggcgcccggcgctggcgccgtcgttcgtcctgttgcttccgcccgcatcctgacagtgctcgtttcagaataaatgggagatagggaaagacgaactgtgtttgtcacagtagggaccacgtgttttgatgctcttgtcaaggcagtagattccccgcaagtcaaagaagctctactggaaaaaggttatactgatctaataattcaaatgggccgaggtacatatgttccatctaaggtctcaggagatggaactcttcaagttgattatttcactttttcgccaagcattgctgattatataagggatgcttccctggtcatcagtcatgcaggttcaggaagcatattcgagacgttgcgacatggcaaacctctaattgttgttgtaaatgaggatttgatggacaatcatcagagtgagttagcagaggaactggctacaaggaaacacctcttctgtgcaagcccacaaacactaggagagacgatccaggaaatggacatagagactctcaacccttatgtgccaggggatgccaaaccagttgtatcgctgattaacaagttttttggcttcccagatgactgaatttctctttcattccttttaaattggcactttaccagcgcggggtcccngcttgttccgtatgtcttttcctcgtttgccgcttttttctggccctggtttcgctttctcctctccctttttccc

SEQ ID NO: 44748 - DNA, 387 bp, Oryza sativa
  Clone ID: PAT_MRT4530_47779C.1
atggagcaggagctcggcggcgcaggtcgaagagggtggtgcagctcgccgctgggcgcggcacagcgcaggagctcgacggcatgggaactcgccatcgctcggtgcaaagggaggggcatggccagcgatgcggtgaggaggcgcatggagagaagacctcgacgactcgacgcaaagcacttgggcgctgctcacggcgcaagaaagggggtggcgtcctccttctccctttgcggcggtggagtagagagggggcggaggtggtcccgcgacgctgtagatctgaccatcggcgtggtggatggaggcggcgagccgtcggtcgtggttgcaggcgatatgcacaccaacgacaacaccatatggggattcgaggagatgtag

SEQ ID NO: 44749 - DNA, 394 bp, Oryza sativa
  Clone ID: PAT_MRT4530_4777C.1
tctttctctgtctctctcatcttgttacccctaggacatccccgacgagctcgacgcggcggggctattggcaccggtggtggctaccctggtggtgtccactggagctccctcgccgagctctatcatgctaccgtcgccatccaccactagtcatcgtcccgtgctccctcgatgtcccacgtgaataagaaaaggagaccagcgtggcttgcttcaccaggcatggccagccaacgtctgctccttgtcactatcatcatcctgatggagctcccgcaggcagggggcggtgttgaccacctatgagagatggagctcgccgaagctcctccaataccacccaaatctaaccgaggcttgagagcgaggcttggcgtcgaccaccctcctt

SEQ ID NO: 44750 - DNA, 508 bp, Oryza sativa
  unsure (1)..(508): unsure at all n locations
  Clone ID: PAT_MRT4530_47780C.1
agctgacggcacccgtcccgttccggtgtcggcacntgtgtttgtgctttgtgatgttcttgtgttgtcgttgttggttggatggaaatatgttcttgtgatctgtttagtagtggttttctctaggattttgtgatggattcccatttgtatttggacttgggacttgagattgagattttgtcttttgggttggattggatgtgggactttggacggggaggtgcgccactgaatcggatgaggaaaaattagtccgtaatgaccggatgaaaacgcgatgaaggacggatgttacgaccgaaaaaatccgaatatttatattagttatagatttgaatataaatgtagtttgactttgacccaagtcaaaatattttgataacctaaaatggagggtgtagtagtaatcattttccttgtatgcataaaagaaacccaaataaataataatttcattgttccgtttgttacttcagacgggacgacattcaaaaaaaaaaaaaaa

SEQ ID NO: 44751 - DNA, 423 bp, Oryza sativa
  Clone ID: PAT_MRT4530_47781C.1
atggcactgagactaggtacatcagcgccacgcaccctggcactgagatgggacttagcaagctcggccatagcccagcccagcaagccttctggatggcttgcgggctgggacgtcagcgccagccataatggcgctggccctgggcacctcggcgcccacctggcgctgaggttggacttagccggctcggccatgacccagcccagcaagccttctggatggcttgcgggctgggatgtcagcgccagccataatggcgctggccctgggaacctcagcgccaaggcacctggcgctgaggttggacttagccagctcggccatggcccagcccagcaagccttctggatggctgggctaggagctcagcgccaaggcatctggcgcaggcctggagtatgtcagcgccattttgcctag

SEQ ID NO: 44752 - DNA, 911 bp, Oryza sativa
  Clone ID: PAT_MRT4530_47782C.1
ggaggccccagcaagtcagcaatggcggcggcggcggcggcgatggcgtgacggtggttgggcgggcggagatcgacatgagggcgccgttccggtcggtgaaggaggccgtcgtcctcttcggcgagaaggagacgcctctgctcgccggtgatggtgatgttcatggacctggactacatcgcctccgattaatgaatcgtgccgccacaacgccgccggcaatatggccaacatttagccaacagcaagtctccggcggggtcgtcgccgtgacccgccacgtgccggcggagctggaggaggcgaggcaggagctggagaaggagcggtccgagaagcagaagatggccggctgcatcctctccctgcaggaggagctcagcaacgccatgagcgagctcaacaagatcaaggcacgcgacgacgtcggcgacggcgacggtggcgaggcggccgccaaggtgatcgacctgcaggtggaggacctcaagttcgtcgagatcgacgacgacaagccacagccgcgccagcagtcgccgtcccccggcgagttccagaagaggaggtacgtgacgttcgccgacccgccgccgccgatggcatcagcgtacgaccgcgcgccaccgcaggcgccattgccggacgtggtgatcgagctgcgccatcgtcacaaccacagcagcacaccctcgccgccgcagctccgcgaggtgcggttcatgaggcagatgtcggccagccatggcatgatgaaggcggcggcggtggcagcggtcgatcaagaggggagaaagaagaagaaatcgttgattcctctggttggagcattgttcatgaggaagaagaagagcagcagctgcagctgccacaacgacgactcggcgctcaacccgcgcacctccttttga

SEQ ID NO: 44753 - DNA, 616 bp, Oryza sativa
  unsure (1)..(616): unsure at all n locations
  Clone ID: PAT_MRT4530_47783C.1
aattgtaatacgantcactatagggngaattgggtnccgggnccccccncnaattttttttttttttttttttttttggncncnaatgtnananatngttctgtcnantntcnaaangcttaaatatccananctgtttacacagcatcntatttaaaaccncagcaagcaaggaattgtccgaaaaggnnaaacncatttaaacaganttgcatgctcagtcntcantctaattcntgantcntcnccaaaacttcnccatgggccatacacttttanggacaaaanaaatntntncaaaaggaaaanccgggacgccttgtttcnncaacancagtggnanaattcacatcttccnttgtccanctcnttggttgaaancntgtttgaagangttagctctcncaaanccaaganttaacatctctctccaactcattgcctgtttgaaagaaacgttgaaaattgcatttctttngtcagcatgcncccataaaaaatctgttgtgggatctaccnaaccgtttttgtcccngtgacgtgactactcttctccactggaacggagtctaaacncacctccgttaaatannaanaangatttcgttnaactttt

SEQ ID NO: 44754 - DNA, 612 bp, Oryza sativa
  Clone ID: PAT_MRT4530_47784C.1
attcagagagagagagagagagagagaccgtcgtttgagctgagcaggagtaggagtagcagctgtatgaatgaatgaatgaattatcgggcggcgtcggtcagggtcagggtcacgtcgactctgagctgccctcccctcccccccgctgcgcctcgcgctcagccacatgcccgtcggttcatcggctgtaccacacctcgcttctcctccacccaacgctgccggagagaacagagcatcaccggagatggtgtgaccccaagcccctaggagaattatcacatcgccaatagtcggattcttgttatattcggttaaggaaattaatctatcaaaggaagcttatccagaagtttggattttatgacattggaccttcaaccgatgtatgctttaaccttcagatcagtgcttattctatcatatcattgttagctgattggtttctactggattatattattgttatattgcatcatcatcggccgactgcctttatattattatctacattggacatattgtcgatagctcaaaaccttatcactatcggttggtatcggcatcggctggaattactccatcggcttgtcagccgatcggctcatt

SEQ ID NO: 44755 - DNA, 182 bp, Oryza sativa
  Clone ID: PAT_MRT4530_47785C.1
tgctgtcacaaggagaccgaaccccacgcagggggggggttgaattgaaaagcccgggtccaagccacacaaggcgcctgggaaccgtgagactgacagcgttcttggggagaccgcccgggcacaaaaccctgcagaacagtccagagataaggcaccctgcggtgggtatcgaggaggcc

SEQ ID NO: 44756 - DNA, 171 bp, Oryza sativa
  Clone ID: PAT_MRT4530_47786C.1
agtgatgggttttaagagcactaagaaaatgtatatgcaatgacaaccaggtgaagccgggggacaaagaagagaggaaagcgggacaagcaaacgccccgaaaaaatgacaggcgaacaataagggggcaaacaagccaaactgattaatcaaacactgtatggtcaacc

SEQ ID NO: 44757 - DNA, 131 bp, Oryza sativa
  Clone ID: PAT_MRT4530_47787C.1
atgatgcggtggtttgagggttttgaggaagattctgcagcttgcgataccgacgagatcgtagtcgagggattcgacaagacctcccggcaagtcggctccacgtactcctgcttcgtaaactttggtgg

SEQ ID NO: 44758 - DNA, 401 bp, Oryza sativa
  Clone ID: PAT_MRT4530_47788C.1
gggtgttgttttttttttttttttttttttttttttttttttttttttttttttttttttttttttttttttttttttacccccctaaaatttggtacaaactctaagggttagctttttataacccacaaggccacaaataagaaaaggaggccgtcgggggctttttctaaaaaaaactttttaatgggcaaacaacactggtggtggggggaaaccagagttactaggggatatcatgggcctgggttatgaaatcaactagtagtaatcattaagagcaaactttaaaaaccctgccccctttaaaaatttacagaatcatcatcagcggcggcccgattaaacctcgaataactaaaataaacatgacatttaaagttcaggggaatggcagctgc

SEQ ID NO: 44759 - DNA, 162 bp, Oryza sativa
  Clone ID: PAT_MRT4530_47789C.1
atgactcagtcacagacgcaatttggcctccttctaaggaacaagctgccaggccagctgcatcacattgtcatcgatgacaatcacacttgcaaaagacactgctccgtccagccaatcttcaggctgttgttcatcctggtacaagaaatctcccagtga

SEQ ID NO: 44760 - DNA, 489 bp, Oryza sativa
  Clone ID: PAT_MRT4530_4778C.1
aaaaaaaaaaaaaaaaaaaaaaaaaaaaaaaaaaaaaaaaaaaaaaaaaaaaaaaaaaaaaaaaaaaaaaaaaaaaaaaaaaaaaaaaaaaaaaaaaaaaaaaaaaaaaaaaaaaaaaaaaaaaaaaaaaaaggggggggcggtttaaagggataaaggttaacaaaggggggaaggggaggtaaaatttttaaaatgggggaacgaaaaaaaaatgaaggggccgaggttaaaaaacgggggaaagggaaaaaccgggggggtcccaaaaaaaatggattggaagaaaatccccttttggcaagggggggaaaaagcaaaaagggcgaaaggaatggcctttcaaaaaagtgacaaaacctaaagggaaaagggaaccccccctgtagggcccaataaagcggggggggggggggggtaaccccaaggggaaccgtaaaattggcaagggccaaagggccggttttttgggtttaagccctaaatttg

SEQ ID NO: 44761 - DNA, 1017 bp, Oryza sativa
  Clone ID: PAT_MRT4530_47790C.1
atggggaagggaagaggcggccagcgagcctgggagaggaggcggcagcgacggcaaccacgagaatggtatatcgacagcagcatgcgaacgtcgaaagcagcgccatgggtcgtcgtcttcctcacgctcgctgtcttcggcgccgtcctcctgctcccgactgggctcccgctcgctgtctccatcatcgcgctctgcccatcgtgctgctcaccagccctatctagtacatcgaaggtccctcatgttgtcatcgggttacaaaatcatcctccaactacaaaaccagcctttttccaccagacgcaccaccatcaccccaacctcaccggcaacggcaatgatgaactccctccaccattccccttccttccgccatcgccctccttcgcctctccccacctcgccggcgacgacgacaacagcaacgacacgagcgcaaggtatgtgagcacctccttcctctccgccccaagtattgccaccatcgccaccacagccgctggtagcagcctcagctcctcttcgccaatgtcgctgctgcctacatcctctgcgccggccagctcctctccgcggagagctccacccgccaccgtcaccgcggcgctcaagggcctccccgagcgtcgacttgtgcttccgccgctcggcggcatgctcctgcacctccttcccggtgtgcttcgctgctccttagccacccacaacttccatgaactctttcatgcgctgctcttgttcctcaaccttccttgtcagctccgccacggcctcgccatgcgccgcatcccgtgcccccactgcagcgaagacggcgtgcatatgttgtcgcacaccccttcctctcctgcagcgcgggctctatatgcggcgaccaccggcaccgccgcctcccgtcggtcagtctcgtgcactggaaagagatggtggaagagaaaggaaagaggaagaggagctgaggctgttgtcggtggctgtggtggagatggcgacggtgctcggggtggttga

SEQ ID NO: 44762 - DNA, 643 bp, Oryza sativa
  unsure (1)..(643): unsure at all n locations
  Clone ID: PAT_MRT4530_47791C.1
gnaattgtaatacgactcactatagggcgaattgggtaccgggccccccctcgagtttttttttttttttttttttttttttttttttttttttttntttttntttntttnttttttatttntttttttttttttttttttttttttnagggaaaangaanccctantnanggaaanaanactntgcanntnaatatncnntgnaaacncnagggncnanctnttccttaaaaatntncgattttttttaatnttanttaataannaagggtncannaantncaatngccngggaggnnnaaacccnaaaaaaaaaacaaggncntaaaaancnttncncnnaangnnntgccccaanannncaccccnccaaaaaattaaaaaactnccanncgnggccaaatccctgnaacccgggggattcaatngttctaaaanggccnnccccgcgggggacnccncctttgtccctttaataanggttaatccancccggcctaaccagggccaantnttccctntttnaaatgtntcgccccaatccccnaannattnaaccgganccttatttttacccngggtcccaanaataactaccccttnttgcttncccctaccctncaatnggaaaanttttccccct

SEQ ID NO: 44763 - DNA, 255 bp, Oryza sativa
  unsure (1)..(255): unsure at all n locations
  Clone ID: PAT_MRT4530_47792C.1
ggattttaatggaannnnnttttannttntattaaatnntgcaatcaacttttcccataaggatattcctgtgactatttatgaaagagcgttgtgcaattccgatgggagtcccccggtgagctttgtccaaggaaactatacagttgagccatgtgtttgtttagttataaatactagttaannncgtacaacgatgttttattgaagattgtaggacgagagaggatatctttnnnnnatntgatttctcta

SEQ ID NO: 44764 - DNA, 1221 bp, Oryza sativa
  Clone ID: PAT_MRT4530_47793C.1
atggcccctttcgcctccggcggtggctactgctccgaggcgtggtcctacgtcgcctcgcttgaggaacacgccgcggacgctgccgccgcgaacttcacgctcgctatcgcccaccacggcgacctggagtcgccggagttctggctcggcttgcccgaggagtccaagaacatggcctacaggctcgccaccgcgcggtgcgagctctcccgcgccgtggttgtgtgccacagcgagcctggcgcgtggtacccgccgatgtacgagtccctgccttgcccgcccaccggctacgacgagccggctttcgtcattggacgcacaatgtttgagactgaccgcgtctcgccggagcacgtcaggcggtgcaaccagatggacgccgtctgggtgccgacggaattccatgtgtcgacgttcgtgaagagcggggtggatccctccaaggtcgtcaaggttgtgcaggctgtggatgtaggattcttcgatccggcgaagcacgccgccattcctttgccgatcggtgtgcctgtgatggtgcctgatgattcaagattggaccctgttaactccaaagggaaaggctttgtgttcctcagtgtgttcaaatgggagcagaggaaggggtgggatgtgctgctcagagctttcttgcaggagttctctggagccgatgatgttgtgctttacctactgatcaatgcttaccactctgacacagacttcgataggaaaatccgtagcttcgtcaaagattccagcattgagaagcctatggatggatgggcagaagttcggctgatcgatgagcatatcccacagtctgctcttccaaggttgtacaaggctgcagatgcctttgtgctaccatcccgtggtgaggggtggggcaggccggtggtcgaagccatgtccatggaactgccggtgattgtgacgaattggtcaggtccaacagagtacttgaatgaggagaatgggtacccattggacattgacaggctgactgaggtcacagaagggccatttaagggtcatctctgtgctgagccatctgtcgatcggctgaggactttgatgagacatgtattcagtgatcgagaagaagcgaggagaaaaggtaagaaggcaagggaggatatggttgagaggttttcaccagcaatcgttgcaacgattgttgctgataagatacaacaggcgcttgccagtacttag

SEQ ID NO: 44765 - DNA, 1564 bp, Oryza sativa
  Clone ID: PAT_MRT4530_47794C.1
ctacccgattctgccactcatccccgccacgtggcaccgccacgtgtcagatgacgtggcctctccccgccggtataaatcgcccgggaaaccgctcgtgctcacgttcatggtggcggcggtgcgcgcgccggtgaagccggagatggtggagctctcgccggcggcgatggagaggtactcctccgacgccgacacgacggcgccgaactcgagccttagctcggcggcgagcagcacggggagcctcgcgcggtgctcgagcctgtcgcgcctgtcgttcgactgctcgccgtcggccgccgtggcggcggcggcgacgtcgtgctcgccgccgcgggcgtcggtgctgttgcggccgcacaggtccggcgacgtcgcgtgggcggccatccgcgcggcttcgacgacctccgcggcgccgctaggcccgcgggacttcaagctcgtgcggcgcatcggcggcggcgacatcgggacggtgtacctgtgccgcctccggagctcgccggagagggagagcccgtgcatgtacgcgatgaaggtggtggaccggagggcggtggcgaggaagcagaagctggggcgcgcggcggcggagaagcggatcctgcggcagctggaccaccccttcctccccaccctcttcgccgacttcgacgccacgccgcacttctcctgcgccgtcatggagttctgccccggcggcgacctccactccctccgccaccgcatgccgtcccgccgcttcccgctcccctccgcccgcttctacgccgccgaggtgctcctcgccatcgagtacctccacatgatgggcatcgtctaccgcgacctcaagcccgagaacgtcctcatccgcgccgacggccacatcatgctcaccgacttcgacctctcgctgcagtccaccacctcgccgtctctcgacggcgacaccgacaccgacgacgaggccagcggtggcgcgtcctgcttcccggaccacctcctccggttcaagcggcggcggaacgccgtggcggcgccgcgtccgcggttcgtggcggagccggtggatgcgaggtcgtgctcgttcgtggggacgcacgagtacgtggcccccgaggtggcgagcggcggcgcgcatggcgcggccgtggactggtgggcgtacggggtgttcctctacgagctcatctacggccgtacgccgttcgccggcgctacaaacgaggcgacgctccgcaacatcgtccgccgcccgctcgccttcccctccggctccggctcgtgcggtcccgccgacgccgacgcgcgcgacctcatcgcccgcctcctcgccaaggaccccgccgcccgcctcggctcccgccgcggcgccgccgacgtcaagtcccaccccttcttcaagtccctcaacctcgccctcctccgttcgtcgcgcccgcccgtcgtccccggcgccggcgccggcgccgcgccgctacaccggtcgcagtcgtgcaaggcggcgccgacaacgccgccgccgccgacgacgacgaagccggcgaacgccaccgcgcggttcgacctcttctga

SEQ ID NO: 44766 - DNA, 214 bp, Oryza sativa
  unsure (1)..(214): unsure at all n locations
  Clone ID: PAT_MRT4530_47795C.1
gattcggcactagctcgtgccgaattcggcacgagtactcgttaaccaaatctgctcttggcaatttccnccccaanctaggctaggatcggcataatggccatatggggttccggtgtttnaantttngtccaaaggnaaaccggcantttnccccccatttaaattttntnccaccaaccnntnatttaaaanccaccctaaatttnttttt

SEQ ID NO: 44767 - DNA, 4513 bp, Oryza sativa
  Clone ID: PAT_MRT4530_47796C.1
cccttaaccttaaagaaaagaaataaatttccaattttccttttcgaaaaacaattgggggaaagtttttttttttttttttaacttaattaatcgttcaagcccttgtacgtgtggaacccgccgggaaaacccctcagccgccgccgcccgagcagagaagccgccttcgccgccgccgccgcactccaccgcgcgctctccgtctccggccgccgccagacaagatggtgagagtcagtgtcctcaatgacgctctgaaaaccatgtacaatgctgagaagcgtggtaagcgccaagttcttatccggccctcgtcaaaggtgatcatcaagttcctcatcgtcatgcagaagcatggttacattggtgagtttgagtttgttgatgaccaccggtctggcaagatcgtggttgagctgaatggacgccttaacaagtgtggtgtcatcagcccacgctttgatgttggtgtcaaggaaatcgagtcctggactgctaggctgcttccctcccgtcagtttgggtacattgtccttaccacctctgccggaatcatggaccacgaagaagcgaggcggaagaacgtcggaggcaaggtgctcggctttttctactagagatattcatctcacatggaagattttctcaggtgttagcaagaagagctttgttagtagtgggagtctgagaacttgttaagattattgtctcctatgtctgaattaccccccaatctgtttttattttgcttggcgactgagtgagctgctgtacttttctccatcgtatgatggctcagaatcttgcatgatgcgtgcctgcctttttgatactactaatcaattacaagttactataaatttactaagatattttactgagtgagctgctgtacttttctccatcgtatgatggctcagaatcttgcatgatgcgtgcctgcctttttcgtactcctaatcttttacaagttactataaaaaatatttacaagttactacttgcaaaaaaaaaaaaaaaaaaaaaaaaaaaaaaaaatttgggtttttttttttttttttttaatattaattcaattattcgtttaatattaattcagttcgcaaggcatttgaatgagacgatctgaatatatcagatcaatccaccgatgcaacactttattcgaaaacttacatatcacaatctccacattttttttttggaaaataatataatatcacaagcttcacttcttctcagtacactggcacatcgccgtcgccgacgagccatggccagtagcaccgctccgtctcgccggagccaccccgcaggtcgcactcccccgccgccatgagcgcggcggcggcggccctctgcgcctccctcgggcacccgcgcagctcgcccacgccgtccatgaacagccgcagcgcctcgcaccggcagcgcggctggacggcggcgagctcgcggcagcaccgcgccttggccatctccgggcggcgcggcccgtggcccgggcaggcgcggctgatcacgtagccgcggcagccggagagcgggttgtgcgggaaggcctcccacggctggcactgactctcccactcccagcggcggccggcggcgaggccggagaggaggacggcggaagcgaggaggaggaggagacgacggttggaacagctggatccaattctgaaggtcttataaccagcgacttgtcacttgggtttgggtcgcggatgatgccggcgtgcgtgcagaaggcccagaggtaggtgatgaggtcgccgccgttgtcggcgagcgccatggcgtggccctcgacgtcgctggacggcgcgaggtagacgaccatgcggacccagaagtcggcgagctccttccacgcggagaccaccaccgcgccgccctccgtcgtcgtcgtccgcgcatgcagcttccggaacaacgccacgccggcctgcgccgccgggtccgccgcggcgtcgaccaccatgtcgtccatcaggaaggttcgccagcacccgcacttccagaggcggcggcgcaggcagcagcagcagcggcggcggcggcgcgacgccgcctcgtcgaggaaggccctcatgtcgccgtacctgtcggccacccacctctcgttgtccggcagcagctccggcgaccgcgccaccaggtacatgcagtaccgcgacagcgccgtcgcgacgccccggtgcaggtcgtgggctctccgatcctccctcttcatcttcttcttctccttcttcgcctccttgtccaccatgacgacatgcttcatctccaagagctccgtggcgaggtgacacgccaggacgacttgtgtagcagtgtcatcaacacctttcttaggttgaaggccgcttaacttgggcatgctgacaatggccacgttgccatcgtctttgagactgtcacggacaacgtcctccaagaagttgacgatggccgtctggccttccgtggccagcttcacctgaggcgaccacgtcaagaccttgtggaccggctcgcaaacccgcaggatggacacctgcttgagcttgatcttgtcgacattgacgcccctgcaactcagccgcagcatgcactggaacgagtagaagagcaggaagcggccggcgatgaacatccagatcgccggcttgcagacccacctccagacccggccgccgccgtcgccggcttgcaggcagaagaggtgcaccatgaaccagttggagaggatgtagttggtgaggagatccgtgaactcgacggcgacgagggtgacgacgagcaggatggagacggcgatgtagagccctgggcttgggagatgacttttgaacgtgcccatgttatactcgacgtcgacgaggacgacgatgatggcggcgaggtaggtggagacgaagacgagggagaagaagtagttgacgatgaacagccatggcgacgacatggcgacgggtgagccggcgtcgtagtagctgtcgaggaagtcgagctcctggcgcatcacccggaacgtcttcttggccccgccgacgaggagctcctccagcagcagctgcctcgacgtctgtgacccggcctccaccatcgggtagtgctcgaagcggcggcggagcagcttgaagagggcgaaggagaagcacagctggtatatgtagtcggtgaaccggctgccggtgacggtgaagcagcagcagcaccaccaccgtggcagctttatctttctcttgatcttctgcacggtgacgacctcgtcgcacttggccatgtcgacgaggaggttcacgtgcttctgctcgctctggtgttggggatacgtccccacgccgtagccgcagtgaggggtggtgatggtggtggtgaccacatcgtgcttcttcttctttacagcgtgcacgacgagcttctcctcacccatcaccacgtacttgcagcgtgccaaggcggtgccggcggcggcggcggcggcggcggcggcggtcgcctccttgtcgacgacgagctgcatgtagccggcgatgaggtgagtgttgccggcggcggtgagcgactcctgggccttccactcgttgaacaccctctgcagaagcttggcgacgacgagggaccagagcacggcgaacatggcgagcaccttgtggtcgccgcacttggagtcggagtagtaggtgttctggaagatgagccagccgatccaggcgagcttggtggcctcgtcgcagtggcccatgagcctgaaccggccgccggtggccctggagaaggcgccgccgtcggcgcccgacgagcgcgccatggacgacaccttcttgcgcatgagctcgacgaggagcatccagaggaggacgaagaggacgctggggcggtgcacggtgtcccgcgacatggaggagaggagcgggaggatgaggacgaaggtggagcggaggaggaagcgcaccatggagaagagcgtgaaccggccgcggatcagccgctccacgcccaccaccgacatggcgccggagacggtggccatcaccaccaccaccaccaccagcgccggcttcgtataatcgtgcgagctcggcgtgcacgacgtcggcgcgccagtcccatgtgtatcactcatacttctgtagctgtatgctgttgcgatggagttaattgaagagctcacttgcaatgcactgccaccggcttctacaccgccgccaccaccacttcgcccggcctccacgccaccacctagccatgcctgcctccgcgccggcggccgccacccaacgctgcgctcgccacgtcggtcgccatgccacgccatgctagaggaggagaagggaagggggcgaggtcccccgggagagaggaggccagcgagatccaggcctcctccaccaccgccgccgtcgcagccacctcgccgcgccagcctcggcgccggcctccgcctcccccgcactgcctcctcgcccacgtcggccagcattctccaccgctgagcctccctggaggactgccgcgccat

SEQ ID NO: 44768 - DNA, 318 bp, Oryza sativa
  Clone ID: PAT_MRT4530_47797C.1
atgccggcctccaccgaccaccaccgcttccctcttcctccccaccgtacgccccgatccacctcgctgccggcaacctcgggacgttgccgaagccccgccgcctccacgctcccgaacgacgcccgccacgccgggtcgattcgtccccgcccgagcgctgctcctccggccaccgctcgctgccgccacggtggcctctcctccaagcccagacgaccaccgcccgtcgccaacgccgccctcgcctcgccgctcggaagaagacgagacaaggagagaagaaggagaaacaagtcctcggccccacctctttaa

SEQ ID NO: 44769 - DNA, 951 bp, Oryza sativa
  Clone ID: PAT_MRT4530_47798C.1
atggccgacgacgacgagatcgctcttgagccaggctacgtcttccacccttccgacgacggcctcatcaccctcttcctccgccccagcatcgccaagatccccttcgaggaccgcctcatcaaccacgccgacgtctactccgccaatccggccgagctcgtcggcgagcacagaccggcgccgggcacccatgggagcagcagcgtctggtacttcttctgctccccgcgcttcaccagcaagcgcaagacctccgggaggcggcagcgcgcggtcggcggcggcggcggcggcgagagcgtgtggaagtcggagggcggcaagaaggccgtgatcggcgccgatggccgccgcgtcgggtacctccagaagttctcctatggcgtctacgagtcgtcgtcgtcggggtcggcgcgcacgttcacgaggctagggtggtgcatgacggagtacggcctcgacgacgacgccatcgacggagcagacaagcaggtgctctgcaaggtctaccgctcgccgcgcgcggtctgcgcggaggcgcgcacggcggcggcggcgaagtcggccgattcgccatgctccggctcgaagaggaaggcggacgacggcgcggatcacccggaggcgccgcccagcgcgcggccgcggcaagaggaggccgggagcgagcagccggcgatcctgccggagttggacctggatgcgttgctgtcggcgccgatggacgacagtttgggagtggaattcgacacggccacgacggagcagtacatgaggtatctgatgaacgacgagccattgccgtgggctccgacgatggaggttgccggcggcggagacgaattcatcgagacgacgaacggaccttgcatgggcgaagaggagatcatccagcggctggcttccggagaaaccctcgacgacattcttggctcgaaccctaattaa

SEQ ID NO: 44770 - DNA, 483 bp, Oryza sativa
  Clone ID: PAT_MRT4530_47799C.1
cccacgcgtccgatcaccagctgagctgcgaggaagagagagtgcgagagtgcgcggcagcggcagtgtagcgccagtcactgggtgtgcgcttgcttgcttggattgaggatgacgtcatcgatgtcgccggcgccggcgccggcgtacgcgcaggtgatggaggacatggagaaggggaaggagctggcggcgcagctgcaggggctcctccgcgactcgccggaggccggccgcttcgtcgaccagattctccacaccttctcccgggcgatgcgggcgctcgacaaggcggcggtctccgccgccggaggagaagggtcggaggtgcagagcgaggtcacctgcggcggcggtgccagcgccggcgggaagaggaaagcccccgccgccgaccggaaggccaactgccgcaggaggacgcagcaatcgtccgggaattcggtggtcgtcaagaacctcgacgacggccaggcatggcgc

SEQ ID NO: 44771 - DNA, 211 bp, Oryza sativa
  Clone ID: PAT_MRT4530_4779C.1
ctacataagctagcctcctcaatagttgcccccctttttttttttttttggtggttttttaaacacaggggggtctcaacaaaatatttttccctattcattttttttttttactctacacttgaacatttgacgctttttaaattttttaccaccttttgtctcaaaaaaggacaacccaccattggatgttttaaacaaacttggccca

SEQ ID NO: 44772 - DNA, 1013 bp, Oryza sativa
  Clone ID: PAT_MRT4530_477C.1
acatcatccctccgcgcaaaagcctatcaacagctaagccaaacagggtcaggagccggagccgtccgggagagggaacactcgagcgatccgtccgtccgcccgcccgtcgtcgtcgcgcgccatggctgaggaggaggccaagaaggtggaggtggaggtcaccgaggcgccacccgccgctgccgctgccgcggagacggagccggctgccaaggacgtcgccgaggagaaggccgtcatccccgcccccgcgccgccggccgaggaggagaagcctcccgtcgacgactccaaggcgctggccatcgtcgagaaggttgcagatgaacctcctgccgagaaacctgctcaagggggctctaatgacagagatgttgctcttgcaagggtggaaactgagaagaggaactcattgatcaaagcatgggaggaaaatgagaagacaaaagctgagaacaaggcttcgaagaagctatctgctattctttcctgggagaacacaaagaaagcaaacatagaagctcaactgaagaagattgaggagcaactggaaaagaagaaggctgaatatgcagagaagatgaagaacaaagtcgcgatcgtccacaaggaagctgaggagaagagagcaatggtcgaggcaaagcgcggcgaggaagtcctaaaggccgaggagatggcagccaagtaccgtgccaccggccatgctcccaagaaactcatcgggtgctttggggcctaaagaaattttcgattcacaacgagcaaacgtgaaagtgttcatcagtggttgctttgcttctttcaccctcccaagtgcgtagtgtgtttgttggtgcaagaaaggtcgtgcctggtgtgtaaagtctgccgcccctgtatataacatattactcccaagacagatatgtttggtgctgtacatgtttgatgcttgacaggcaacattcttatgtgtagttaagaagccacattgttattgttattgacagtaagctgtttgttctttt

SEQ ID NO: 44773 - DNA, 461 bp, Oryza sativa
  Clone ID: PAT_MRT4530_47800C.1
attaatacaaaattaacttcaatttagactaaaagcagtcaacttttaaatttgttgggatattctgtcttgagtttaactctgcaaatcatctttaaagttcaactctagcgacaacactctataaacagtaaactttcacttttgtttgtcaacaacaaccaacggtggttaaatataccgggataaaataacctttcaatcaattttgtccaactttccaagttaaattttcattttaaatttatccgtcttgtcatgtcatacaaaatgtctgagaaagaagtgatcgctaagaatgacaataaagagactgaaaccaaagatgtaacatctcaaaaacgaagtatcaatgaagttacttcagaagactctaattctgtattggatggtcttgatgatgattctaactccaatgtagctcagggtaaactcaataattcaaagagcaaaaaacagaa

SEQ ID NO: 44774 - DNA, 1674 bp, Oryza sativa
  Clone ID: PAT_MRT4530_47801C.1
ccccgggccgcagcccggcggctcggcgcccccccccctggtgtccccttttttttttctttttttttttaggcacgtgaagctatatgtttttttttttcgaaagcggaagaacaggattacattgtacccaaatcctcttctcttgcttgtcacacaaaaaaggttaagacccccagctcataatcaggaaccacattactacgtactaatcgtgttgctacttgctagcatgtctgcagcttaaagctgagacgacacatcaacaaggaatttacaaactaatctagccaggctaattaggagtatctttgcaagttccaaattaagatccgcgctgccgctaattatttctgtacacacgcgtggaatccatcttctttcgatcgttttacccggcccgtgtccatccatgattcttcggtgatcaaaagctcaaacccataatgtcgtccagatcgaagacaacctcgtcgttcttgaagaactccatgccggcgacggcgtcgtagctccagtgcagggaggacgtgacatcgccctggtccggcccgaagggacccgcgactccgccgccgccgccccgccgcgcgccgcggagctgccgggcgtgaggctgctcagcacctcctcctggtcggacgagccgacgccgccctccaccttgagcggctgcagcagcgggcccggcgcggtgaccgtggtgatcgtgctggtcgtcggcgccgcggcagcgtctactggcgccgccggcgcggcgacgaagctgatgaggcgggaccccgcttggaggccgccgcagccgtcgtcgttgtcgccggcggcgacctggtggatgacgtgcgccgcgatgatgggggcggtggccgggtcccggcaggtgtgctcgccgatgtaggtgaccctgtagctcgccgggtcgtcgtcgcagcgctgcacctgccgctgcgccgtgcacagctggtcgtacttgtgcgtgcaccggaagtaggcctttgggtgcttggagttttggatctccttctgcccgtacttgcgccatgcctggccgtcgtcgaggttcttgacgaccaccgaattcccggacgattgctgcgtcctcgttttacgtatcttcccaatctcctcaatccccttctcaaacactccccgcctcctgcggcagttggccttccggtcggcggcgggggctttcctcttcccgccggcgctggccccgcccccgcaggtgacctcgctctgcacctccgacccttctcctccggcggcggagaccgccgccttgtcgagcgcccgcatcgcccgggagaaggtgtggagaatctggtcgacgaagcggccggcctccggcgagtcgcggaggagcccctgcagctgcgccgccagctccttccccttctccatgtcctccatcacctgcgcgtacgccggcgccggcgccggcgacatcgatgacgtcatcctggagcggattgatccgtccccattgctgcagccggcggggggggggcgcaggcgcggtctaccgtcgatgacgcgtaccgtgtcaatgccaggtgggaccgtgcggctacgcccagtgagcggctcacgaggggtttccatggactggggcgctcgctgcgtgggcgatgggaaaaagggacgcggctcggcaccacgcgagaaccatag

SEQ ID NO: 44775 - DNA, 726 bp, Oryza sativa
  Clone ID: PAT_MRT4530_47802C.1
caggcaaaccactaggagcaggagctggtgccatatctccctctgaatctgaaggtgctgatgaaggaacttcactaatatggagcctctcccacaactctgaacagttagttttccaaaagccaatcttctcattgtgacggtcataggttacaagagtattacggacaacaattccccctaatagtgttgtcggatcttttccattccggaacaaatagttttcaggtgaaagcgaaagcttctgcccatttccaaataccatgtcaacatctggaaatacctctgataattgggagacgttccttccagcacctgcaaagcagatgtctttataatttggatctgggccacggattttcttcagagaatttactttatttgtcacagcatctttaaatgcaacaaatgcttgttcaggcaggtaagcatatgtggtttcactatctaagacagtgccatgtttgctgttgaatatctttgggtctaccgcaatgcctttccggcaacatgagtttcctttaactcaatgttgtaatacgggctgcggacagggtttgaatgagagaaaaccatgtcaggaggagcaggcatcccaccaagtaccatagtaccaccaccaacatccattccaccatagcacagagagaatgaatcactaatgacacccttctcaacaagctgatccattatgctaagttgaccgcggcccagccccataaaacc

SEQ ID NO: 44776 - DNA, 441 bp, Oryza sativa
  Clone ID: PAT_MRT4530_47803C.1
atgaccgtcaacaatggcaagcgccgtgtccggtttgagcaccttggtgaccttgctcggcattacgtcgaccacgttggggtcatcggtggtgacggtgcatgcgtcaccaacctccaacagcaagtcagccgcgtcaggccgagtggtgaggtgatgcatcagcacgaggtcatgaggctgcccggcggcgggcatccagacggcgcaggcgtggagtccgagagcgtcagcgagctggagcgcggtggtgcggaggatggcatgcgggttgggcggggagccgtggatctagcccgtgagctcccgcacaacgcgggaggtggcctcctcgtggtggcggacgaggccaaggccgagatcgcggtagtggagccagctggccttgtcacggagcagcgactccctgaccttgtgaagcatctaggccctcggtgttaa

SEQ ID NO: 44777 - DNA, 2189 bp, Oryza sativa
  Clone ID: PAT_MRT4530_47804C.1
gcagggtaagaaacttgatggcaagatttattatattcatcatcaaagacattaccacccaggagcaataatacagacatagtcagcactgggtagccagggagtgttcacaaaagaagtaacaatatcacatcagcgttgataagagttgctctagcttacagatttacaatggcggtgctttgcctgttgctcaaggtttgtcctaactacggaagtttctgtctaaatccctgtcctaaatcataacttaaccaaaaccaactcctttggacgttatacaacaactcaatgatggaatgtaaatggatggggtggtaaaataaagtaaatcctatggctgctttcactaggagcttgcagacttccagtgtcgcttctcccagtagcagcatgcccactcacatggaacatcgtacaaacaaacttaaaggcgattcctggttatactgcgatttgaggatgatttcatggatacttttcactcactcaggccattgggaccttgacctttgacacggtatactaccttagtagcctgctgtctcttgtcatgctgtgatctcgagttatcttgtttgggctgcctatccatggccatcctaggatcctgcttggcaggtactcctgctgggactccacttattggcctgccaatccatgcactggggggtaacggtggttgaatcccatttactgctggctgatgttgaagtcctatttggacaggcctctggtgtggaaatcctgaatattgtgcaggtcgctgtggcgtaaaaccggagttctgcatgggacgctggggtgggaatcctgcatactgattgggatgtggctgattaggtgaaaatccggagttctgcatcctgttgttttgatgcatccttgggccatcttggattgttagttgcgacatccctgaatggatggcactgtcgttgtttcgatagtttggtcgttccagtatcctcacattctgtctgttggcttgagcgtcgccgaagaactgaggatgagaatttggaacgcttctggacatgtgtccattgtatgaattttcaacaaaacctctctcatatcccaatggtccagcaggcctaggtctgtttccaggaccatagggggcacccctgtatggcatgtcaagcagcccagcagagtagccggattttatctgcagtgagtttttcaccaggcgatgtgcagcctctcctaagacagagcctgacagagctccagaaacctgaggcctttctcttggctgacgccgactattatcttcatgccacaaaataggaaagggtttgaaatcactaggcttcaatatctttgcaggtatgatgacaccttccggaggctcaggaatgtgtttgtgatactgagggttaaggtaggttgcattcagaactctgttctgggcgatgccattgaaccccttaactggagatgttaccacgatgctgtaacagttcctttcagataaacaaagaaatccgttcattccaccactagcagcagggtcaatgggaattatataggaagcatttggtgattgagagcacatctgatatagaaatgcaatttgagcggccaatggatgagtttcccgcacgtaaaggatgtcaaacattgtcctattcctgaatctctcttcatctgtcaatgtttcttcaagcttctgcgtctccgcaagcagacgcctttcatcgataaaaggcaattttgcaataccctgccatgcaaaacgtttgccgttcatgtctatctcaaaatctttgggatagaaagacttcaacggtgaattaggatcattcatcaaatccccatagtactttggcaacgcattggaactagcagctggtagtgttcccattagttgatcaaatggcttgaaaggttgacccaagaaaaatgtaatctccaattcagccaagcatttcaggtctgatgcaaaaggtgcataatggtatggataaaaccactgccatgagcaaacaccttgatagtagtatctcataacccagcaaagaccttccacatatttctggacaacatctctctgaacttgatcaatgggttttagttctgcctcttctttaaacttctcagcgtagtatctcaccctgtatcctggttctcctaattttaccttgtccacatattattatcctcagagttccggacgcgtg

SEQ ID NO: 44778 - DNA, 321 bp, Oryza sativa
  Clone ID: PAT_MRT4530_47805C.1
atggcgggagagagtaggaggaggaggagggcggcggcggaggcggtggcgtggtgcttggcgctgggcgtggtggcgctgctgctggtggggtcggtggagaaggaggaggaggtggtggtggtgcgcggggcgcggctggcggcggcgcggccgtgcgaggagatatacgtggtggaggaaggggagacgctgcacagcatcagcgacaggtgcggcgacccgtacatcctggagcagaacccgcacgtccacgaccccgacgacgtcttccccggcctcgtcatcaagatcacgccgcgccccggccgccgcaactga

SEQ ID NO: 44779 - DNA, 536 bp, Oryza sativa
  Clone ID: PAT_MRT4530_47806C.1
gggacgcgtgggaaaacttgaggacggagtacttaatggtaaggaaaggggtagatctccaagctaaaggctgctactctgcaatgcaggtcgccatgcgattcaagcaccaaaaccgaaccgtcccgcgctcggtggccagcctcctgtccgaccaccacggggggtgcggcggctgagcgctgtgccggcggagggagtactagttatcgtgcatcaacagccccgacgtcgagcatggaggtgcggctgtcgaggcggcggatcggatacttcccttgcctcaccgcggaggacgacgtattaaacgccggcgcgagcgcgactgcggcagcggcgttgcataggatcgagtactatggatacgccgtggcggcggcgtactccccggcgccgtcctccacggggttcatggtgcgcgatgagctgctaacaccgggggacgagtgcagcacgccggggctctcgccgctgctgggcaccaccggcgggttcttcgtgcggatcttcaactactcggcggaggaggaagagga

SEQ ID NO: 44780 - DNA, 447 bp, Oryza sativa
  Clone ID: PAT_MRT4530_47807C.1
agcaaatcaaagctcatcgaaaataactctggcattggcatcagacaagttcgacctctacgacatcgagctcgcacggctaaccgtcgcggcagacgtggtggactacagtagctactgtgacgtatgcaagtactgccgcccggggaaagcggtgtaccggaacccggacccatcgcgccagaactacatcactcgggggggcgaccgatgccagcggccaaactaggactccaggcaagcaaaaccacgcggcagctactggagccgtgctgacggcagctcggcgcattgcctatgcagtgacggtgcgacgcgttgaccgtgctgccgcgtgtcgtagacactgacgaggacgaccgcgtcctcctgatgatctaccagaacgccgagcacggttgcgacgtcgcaacgatacgtcatatggctagcgcgatgaccgactac

SEQ ID NO: 44781 - DNA, 811 bp, Oryza sativa
  Clone ID: PAT_MRT4530_47808C.1
agtataagaacgatttaagtagattgtattcgggggttttacaataaaccggccttgtcccttaaataggggttggtcttgccatttacaggcccttctccacatccaactcgggatagaaaccaaaggaaacacgaaacctgccttcccgagtaaggaaacccgtcactttccaaactttggcaattttcccgtatttcgtccataggtgccaaatttgggtgtaaacagaacctgctgtgtataactatatatatgtggtatataaagcgcatgtccaataatatacgatgcccaccaccagtctcgcccctgttggtctcctaattgccgcatcttcaccgctgctttgccaccggtcatgagaaccaatccaagcaaaagtgtgacataatggcgattacttacccaaatccaatatagctgcaacaataaaactaatgcaaaattgcaaagtcggtcatagttgggttataaaaattaggccttaagctaaaatgctcaatgaatagcaaaacacaaaacagcaaggtcttgagaaatctaatgatataattttgttttgaacaaaaggttttcctccctatgcatcattccttttcgttttgaaattaaactacattgctactatcctctgatcatcagctagcacgaaattgcttatattgccctttaaagcttatattgcaatgaatgaatctgattcagaaaaatgtcgctcatccccagattagctacaaatctgactgcaccacaacttaatacctgtccatagagggtggcaaaccaatattagttttgcctggatcga

SEQ ID NO: 44782 - DNA, 189 bp, Oryza sativa
  Clone ID: PAT_MRT4530_47809C.1
atgtggcgaagcacgcaagcaaaaggccaaagacctaaatccaagctttgcaatcaagagaactacgcaggcgaaggttatatgggcgaatggcatgtgacgaagcacgaaggctccgcctggactaggatccatgcgaaggagaggaccagagggccctccagcccagggaagccccttccgtcataa

SEQ ID NO: 44783 - DNA, 1455 bp, Oryza sativa
  Clone ID: PAT_MRT4530_4780C.1
tcaaccgcccgcatccccgatccgttctctccctctttcctccttcctcaccgtcgctgccgtcctccccggcactcccatccctttctcctccatgccgcacccctccccatcgtcgcagccgccccgtcgcccctgctcgccgcgccgttcaatccaccgcctcaagcaccatgcatcgtcgtcgttgcaggcgtcggcacgggcgcgggcgctgccgatcccgagtcgagacgacgtcgtccgctgctgcttctccaccactgacggttgccctgcgtatatcctccctattatcgcggtccccatctgctcccgcgactcgccgacgatggtgctccacaaaccattcaggccgtcactggtctccggagcgcccgaggccgacgtgtctcgcactccctccgcgtagcacctcgccgccgccgtgtcgtacgggtagctgacgtacgccgggcacgcgtcccggaacacccgcgagtacgcgctgccgcggcacgtctccgccgtgccgtgcgcgccgcggcagcagaacgcgtccgtcccgaacgccacgcacgcgctcttgcacgccaccaccgccgccgccgccgtcacctgcagctccggcgggcacaccgcgttgacgttcttggcgcagccggggatgacgcacttgcgatcggcggcggcggcgccgggggtggggggcttcgtccacacggccaccggcaggttgtagccgtcgacgaggctgacgtcgtaggagctccccttgctctggtcctcgtggaggtccacctcgacgagggtggccggaggggcgccggcggtgccgttgcacgcgaggcggccgccgcagtcgccggtgaggcaggacgcggcggcgttgccgtggtggttggtggcggtggaggtgaagttgcagccggtgcggccccagaagcggccgttccaggtgggcggcgcgctgacgcgcctggactggcccggcgggaggaggaagccgccgccggcgagcaccgggtggccggcgttgggcgccgccgccggccacaccgggaacgggcacttgttcaccacgcggaaggtgacgccgcgcacgagcgccaccggtccgctggagccgtgctccacgctcctcctcgcgtgtattgctgccgccgccggagccctggtcttccccagtccgtcgccggagccgaggccccccccccctcttcccctgccctcgaagctgaggtcttcccatccggcgacgccactgcagtccaccgctgcgctcaacggagccgaggtcatcctcatttcacatattaatttgtagtagtacatagctaatgtggcaagcagttgtggcaggctgcagcgttgtggcgcagcgccgtagtgacgagcagacgcggcaaccgggcgacgaggagcgagcagcaggaggtgagggcgaggagctagcagatcaggccatccctccat

SEQ ID NO: 44784 - DNA, 2261 bp, Oryza sativa
  Clone ID: PAT_MRT4530_47810C.1
gcacgaggcctctcccatcttccatctctctctccctaggacgcgcagcgctgcttattcctctccgctccccttgcttctcgcgcacactaaccaatccgagcatctcgcctcgccccgccccgccccgatcgatcgactcgagcgccaccccacgccgccgaccccgcgccattggccccagccgccgggaggcattcgtctgcgctgccccgcggcggtggcggtggcggtggaggtggaggcggtgtggcatgatcgatagaggagtcgggagaggcggcggaggaggagggggaggaagaggcggtggagatcgctaggagtggtggtggtggtgggaggaggaggcgatgaaggcgacgcccccgccggcgaagaggcggaggggcccgcggctggcggtgctggcgctcgtcttctgctcgctgctcgtgccgatcgccttcctcttcaaccgcttccctgccgtgtatgtgacggatgagcgcccccaacaggagattgatttgccttcattcggacgcatggggttggaaaggagcggtggagtaaccgtagtgaagccggaagatggcagtggtgctaacgcagagacaaaggatacacctgagatgattcacaggggcggtataaactcacatcaccatagtgataatgtcccttccaaagttagtgctaacccaaaagtcccccctccaccaaaaattgaaccactgaagccaaaggcaaagtcagtaccagttccagttcaacgtacagaagttattagtggcaataacatgaaacctgccaaagttcaaaatgcggacgatgtggaaaaggctaaggcttgtcagcttgaatttgggagttactgcctctggtccatagagcacaaagaagttatgaaagacaccattgtgaaaagactaaaagatcagctatttgtagctcgctcgtactacccaagcattgccaaactaaaaggaaaggaggcactgactcgtgggttgaagcaaaatattcaagaacatgagagggttctcagtgagtccattgttgatgctgatctaccatcgtttatcaaaagcaagatagagaagatggaccaaacaataggaagagctaaagcatgcactgttgattgtagcaacgtcgacagaaagcttcgccaaatacttcatatgacagaggatgaagctcattttcatatgaagcagagtgcatatctgtacaatcttggtgttcacacgatgcccaaaagtcatcattgccttaacatgaggttgacggtagaatattttaagtccgctccattggattcagatgactctgctgtgcataagtttaatgttccagaccataggcactatgtcatattatctaaaaatgtacttgcagcttctgttgtcatcaactcaactgttagtaattctgaggagaccgaaaatgtagtatttcatatattaactgacgctcaaaatttctatgccatgaagcactggtttggaaggaactcctacagggagtcagctgttcatgtcataaactatgagcatattattttggagaatttgcccgagttcagctcccagcaattatatttacccgaagaatttcgtgttttcatcagtaatcttgaacgacctagtgagaaaaccagaatggaatatttatcagtgttcagtcactcacatttcttcatcccagaaatattaaaagatttaaagaaggtgattgtgttggatgatgatgtggttgttcaacgtgatctctctttcttgtggaatattgatatgggagataaggtcaatggtgctgtcaagttttgtggtctgagaatgggacaactaagaaaccttctgggtaaagcaacatatgatccgcagtcgtgtgcttggatgtctggggtgaatgtgattgatttggagaaatggagggagcataatgtcacagagaattaccttcaactactgaaaaagttccaacacaatgatgatgaagcttcagtgcgagctgcagctttgccaataagcttgcttgcctttgaacatcttatatatcctctcgatgaaagattgactatatctgggcttggatatgactatgccatcaaagaggaacttgtccggaattctgtatcattgcattataacggtaatatgaagccttggcttgagttaggtataccggactacaggaagtactggaagaggtttcttacacgagatgaacgattcatggatgagtgcaatttagagaaattagtcttaagctga

SEQ ID NO: 44785 - DNA, 215 bp, Oryza sativa
  Clone ID: PAT_MRT4530_47811C.1
tgaagatgcattttcttctttgctctccttgctattgctgcatgtagcgcctctgcagcgtttgatgctgttactcaagtttacaggcaatatcagctgctgccgcatctcatgctgctgcaacagatgcttagcccatgcgtgagttcgtaaggacgcagtgacgcacagtggcaaccccttcttcatcaccgtgtttaactgagaactgccag

SEQ ID NO: 44786 - DNA, 197 bp, Oryza sativa
  Clone ID: PAT_MRT4530_47812C.1
cgggctgcaggaatcgcacgaggctgaaatttataatggaggtctgaatgattcagttacctgtaagttgcacggccggaagaatgaatgctacggggtggcatccaatccatgcatgttcggaagatcaatcggcaagtaaggtgaggctgctgtctcagaattgaaggaatcttagcttggatagtactatctga

SEQ ID NO: 44787 - DNA, 338 bp, Oryza sativa
  Clone ID: PAT_MRT4530_47813C.1
ttcaacttcattcatactaccacaacataggcatccactaaatcgccccatacatttcttcacattttgcttgctccttttgtgcattggctctctatcccagcagttattcggtcagatcactatattatggcagactactcgttgtggtaatccttacaatgcacgttcgataggttgaatcatttgagccaattcgagaggatgagggtttcaagctggcacaatctgagttctttgatgtctctaatgagcaaatttcaatgtaccggactatttgttgtccgacgaggttaatgaacctaaaagccttctactatcccaatacactaatggtg

SEQ ID NO: 44788 - DNA, 260 bp, Oryza sativa
  unsure (1)..(260): unsure at all n locations
  Clone ID: PAT_MRT4530_47814C.1
gnggggggccaataaaaatttctggcaaaaaaaatttaccctgtaggggggggggtccccgggcaacccttttttaaaaaaagcttattccgttgggtgggttttttgaaagcaaaataatttttggggaatttttttttttttggttgggagcggccccaaggacttcttttctttcaagggtggtcccattatttacggggattacggcacttgtttggccgccaaccaccaccatgatttttttaagcattgggggg

SEQ ID NO: 44789 - DNA, 2201 bp, Oryza sativa
  Clone ID: PAT_MRT4530_47815C.1
ttttttttttttttttcacaaaatcattttagatatccattttataaataaaaaacctgtgccagcaatgatgtaaaattacacaatgggaacaaggtaaacatgaccccacggcctgtttggcaaaaaagggcatcgccattttctatttcttcccgaacaaaaaaaatatgcaattatgaattctacaattacatgcggtgttcaaactcaaatgcttgatctgttagatactccacgcatgctaaatgaacaaagcaagcacatcctgactgacagcaggtggtactataacaaagcctcaacgtcaatctcaacgaaagtgcaggggtctggaatgccgaatttccttaggacctcggcatgcacaattcctaagtagccaatctgctttccatcactcataacaattttgcattgtcttttcggaaagaattcaggttcatttgtaggaacatagtaattctggccaaatttgatgtggggagctctcacaacattcacgattctatctaccaaacccataatttcctcaaacccagactgcttattacagtacaaagctgcgagtcgacgattattagaagcaccaacatcacgtgacccatccaatgtcactacatcaccaacttcaaatatctttatgggtcttggatggtctatgttatgcttcaaagttttcaataaacatgacatcagactggttcgaaccacctcaaattcagaagtgcgtggattcgcaataataactgctttatttacatcctgtgtcctatttaacatgtcaaagtttccttcacgtggaccacaaggtaaatgtgagcacctccatataaccagctcttgcaacctcagcacgaagtttatcagagaaacggtttaatggttgccttcctcctattgtcatacactttggctttgattttggcacattgttgtaaccataagctatagcaacatcctccaccaaatcacgagcatgcagaatgtcacttcttgttggagggacagaaactgaaatacgtggttccccttttgatggacaactttcagcttgcaactgcattttgttcagaagggaaataacctttgtctcatctagggagatgccaatgggtccaacaacctcagatagtgagacctccattttatagcatgaaaggtcagggtaaatggttttgcttccatcatgtgacacaacttcaactggttccacttcaaacttgttttcgcagtactcagagaacattgtgaccattgtattgagaacaatctttgcttttgtaaggtcagtagcggtacactcaataaacacattccttgtcttcagagtgatagcagaatgtgcaccattgatgattggtggtaaagacaatacggtcctgttgctatcataaataactgggtatactggcgaattctcaattatatgcaggaacttcttcaacttcatgtctgatttatagaattccatcagtttatcagccctgaagctttcctcctgctttaatgggacaaagttgatctcttgtggtggtagaacctcatatgaaaagggtcctttcagagtgtcaagatcgtgggtacctatggccaccagagttctcttcctgcaaatatttttgatggagtttgtcttgaagatcgatgaagctgttatatcttgcttcatcgaaagttacccctctaaggacagcacagaccacatagggccttatttgtgaagtctgaggtttaacatgcatcagaagcattgaatcgcgagggatgcaagaaattttgtacataggggtcgcttcagtcccagtgaaaatgcggagggcccttgccaatccttcaagacataacaaatcatacctattggcggcgacctcgatcttgtagatgacctcgtcgtcatcaccatccacctcgccgtcatcatcctccaggtgcttctccttccggatgatggccttctccgtggtcacgtcatcgagctcgatgccgaactcgaagcagagcacctcgaactcctcctgcgtgtatgtccttccgagggcgacgaagaagcggtcccggccgacgctcaccgtcggcatcgctgaagtcggcggcctcccctctcggcggcggtggcggcggcgaagaccttagcggcgatggagaggacgatgtctgactgaggttcgcccggccggattcctgcagcccggggatcc

SEQ ID NO: 44790 - DNA, 339 bp, Oryza sativa
  Clone ID: PAT_MRT4530_47816C.1
agaatccctaagaacggatgaggatcacactggatggggatatatctcggctccgggaggtggcacaagaaatcgaagtgctcctatgggtggtcatacaaggcgtatcctcaatctcctcctgcaactgtaccggctgctggtgaggagaaccaagtgtcccttcattgccgcaagccgtaatagactcttcatgagcaagaccaagcgcgcgccggtctccctgcgccggctcgccaagttcatggaaggcaaggaggagaacaccattgctgtgattgttgatacaagtactgatgacaagaggatccaagagattccgataatgtaagttactgc

SEQ ID NO: 44791 - DNA, 655 bp, Oryza sativa
  Clone ID: PAT_MRT4530_47817C.1
gatactgaaccgtttgtgccgaacaatcaaaccattgggaccagggaaacatcataagttacagatgaagtctcttacagctatgaactgatcatcacttgtacagttgcactaaacaccagtcaaaagagaacatcagatcctcatttcttacctacacattttcactctcactagcactcaaagcatcgcaaatgttcaaccttaagggattcagagaccactacactccacgcattttaacctaaaagagctagtaggaacatggaagaagttaaaaagcaatttaacaccgggctaaaattacaagcgaaccgaggttcagaggattcaggcatctcctgcaagctgcttcttttgccttgataccttggcttgcagcttgtcgagcttcgcgctcatgctcttgtgctgctcgctgactgatccctcctgggcactgcacatctgcgatttcagcttcaggttgaacttcttggggacgcgggaagcccaccaccgtcttgccacgccccagctttggatctcctgcctcatggttgagcactccttctcgagctcagacaagcgcatcctcatgttgtccatgccaacttgaggacctgttctcccttacagcgtagccatcccccggctcgctgatgtgtgatgctgt

SEQ ID NO: 44792 - DNA, 423 bp, Oryza sativa
  Clone ID: PAT_MRT4530_47818C.1
atggcgcctctgctgagggggggtggatgccgtgggccggcccaggtgagtgggccggtgaagcctggcgcaaaggggaggcaggggagctgccttgtgacgctccaggggagtgggccggtggcgtgtgtggcgcagggaatgtcggggaagtctcctgggccggcccaggcaaaaaagtgtgagagcgtggaaaaggtctccgacttgaagcgcaagggaaaggcgggtgttgcggctgagttggcaggcatgatagaggccggtggagtgctccttggtcattggcaggatggtgcgaaggcgggcgagggcatcctgaccgaggtggccaagacgccggtgccaaagaacgtcggtggaggtggcgacggtgaaggctgctgcggtggaaggtggcagagtgcgatggagggcgtataa

SEQ ID NO: 44793 - DNA, 1080 bp, Oryza sativa
  Clone ID: PAT_MRT4530_47819C.1
agctcagcctttttaccccagggtggtaggctgacacttatcaactatgttctttctataatcctcacatactatatgtgttctcttgaactgtctttaactgtcatcaaagccattgatacagcaagaaagaacggtttgtagagaggaaataacccaaattccaccagaaaatatttagcttcctgggagctagtgtgcaggctaaaggacaagggtggtttaggggtgataaatctaagaaaccagaatgttgttcttttattgaaacacttagataagttctatagaaatgttgatcttccttgggtggatctcatatggaaatcttattgcacttcaaagtctcttcacttagtttcaaatagagcttataacaaagatgaatttgttaagatggcttgctccaagcctttggaagatgctttatgctaccaatgaatgctgaagcttatggggaatttttagttttgcaatctgaacttgacaatgtccatttaagtgaggggttgggtgatcattggagctatatttggaatgttgataagtattctgctcaaagattttaaaaaatgaattattcatgcttacagcctccaaggccgcttgtttggatctggaagacaaagcgtgtgatgaaaatcaaagtgtttgcttggctcctctctttagacagaattaatacaagggacatggtggattgcaggcactatgctaaggaaaatgatgatctcacctgtgttctttgctctgggggtataagagagataaggctacatctcttctttacctacccttttagtctccgatgttgacagtatttgggttttgattggtctccttatttaaatttcttccagatgattgttctagtgagaattcgttttggtacgaaggtttcctggagatcttctttacaactcctggtatatttggaagcaaagaaatggcttgatttttcataatgtacctccaacttttcatggatggaaagttcagttcaggaaagagcttcttctacatatgtgtagaatgaaggagcctctcaagcaattagtttttgattagttacaaattttg

SEQ ID NO: 44794 - DNA, 1859 bp, Oryza sativa
  Clone ID: PAT_MRT4530_4781C.1
ctaagtgaccgagagaggtaaggggggaattagagtttctcctttcccattcattgtccgcaacggcgtccaccgcccggtgcaccggcccctcgggcacggcggcagcgttggaggccgtcgactgttgactttgaagggatttagggcggtgcacggcgaggaggtcatcgacgacccatccactaccctgattggcaggacggcggtgacgacatcactcccgtgtggcaatttggtgcggtggcggctcggtggcacacgacggagctccgcgtcgacccgcgcatcctcatgacggcggcgaggcgaactcaacgacggcaactgagaccctaacaatggcaaccaaattgcatctggccatatcgtctcggcggaggttaatccggtagtggacagccgacgacccatcatcctcccaccacggctcgacggcagcgtcgatgggaggtcaacggcggtggcgcctcgcttcggcattaactccagcggcaacggcgatatgggtttagggctttctccaagacggcggtttccgtcgctgccgtcctccccggcactcccaatccctttctcctccatgccgcaccgcctccccatcgtcgcagccgccccgtcgcccctgctcgcctgcatccaccacaccgcctccctccccagtcgagacggcgtcgcctcctcgcccccttcgcagccagattgacaccgcgccgttcaatccaccgcctcaagcaccatgcatcgtcgtcgttgcaggcgtcagcacgggcgcgggcgctgccgatcccgagtcgagacgacgtcgtccgctgctgcttctccaccactgacggttgccctgcgtatatcctccctattatcgcggtccccacctgctcctgaatcctgatccacaaaaacagcggagcgccgtcggcctctctgcctccctgcgaccaccagtggcatctgccccgccgtcggctctccctcacccgcgactcgccgacgatggtgctccacaaaccattcaggccgtcactggtctccggagcgcccgaggccgacgtgtctcgcactccctataatcttgctttgctgtagcagtaacaacatcataacatatcgtggttcatacaatggatcaggctggtaattcgattccaattcttgctcctgaacttttttattggtgataatgttcagcagattggtttggtggtggcagtgcggcaccactgatttgtgttagacattggtccttatccaaccctctaatctcttgattatgctcacttacgatgacttcagctcaggtggttgaaagaaacactcctagactgctatttatttttacgttacagggatttggctacagatagttgcaagctgcaatgttctgatatttgttatgttttagaccaaatctgccttatatataatgttataattaggcttcgaatttcttgcttatgttctttaaaaattccacagtaaccttttcagttctttatgtcaggttaattgacagatcgagttgcacttacacatatcttgttttaggaaatgctccaatggcccttgaatccagcaaaattggtagttcctctcgtcctccaggcaccagctatggacaatatctatacctcaaggaagcctcttcatgttcccctcaatatttctttctgggtgcatgcactctatgcttgctatgcaaaacccaatgtatgtgaatgtgatccttatgctgcaaaggtgctactataaacacttcgttttttatctatttatttaaacattctttgttggtgtcggtgcattgcctctgaattttagatccttttttagtgcaaaatgcatatgaatgtgtggcattg

SEQ ID NO: 44795 - DNA, 238 bp, Oryza sativa
  Clone ID: PAT_MRT4530_47820C.1
cctcctcccctccccacatctctcccctcctccttccctgcgcccctcatttgcagaggtacttgcttgggcgaaagaaaagacaccgagcgtaaggaatgcatggatgatcaaagaagttgattggggaccaaactaagacctactccaagtttacttctacctcaccgcgtcacttttggtccatagaagacaagagataaaattctacatattttggattcggattcgggcctcc

SEQ ID NO: 44796 - DNA, 311 bp, Oryza sativa
  Clone ID: PAT_MRT4530_47821C.1
gcacgagtcatgggagaaagtgcttgaagaatacagtcggtccagtttctgtccacagataatctccttcgagcgtatcgacccagtttcagaagtcacagtctagacaactgcttacagttctacctggaaaccgaatcacgggggctatttttgatggctgagtaatcacctttttaggtagaatacagacagcttgatgacccacagctgaattttctgtcatgtactgtcgatatggctttcacccctatatgccttgtccttaactttacagttctactaccagatatcatacgcagcgcaaggta

SEQ ID NO: 44797 - DNA, 336 bp, Oryza sativa
  Clone ID: PAT_MRT4530_47822C.1
atgtgggccaccgggcacggcatggcccaggcccggccgtgcctgggccgaggcttgtcgggccggcacggcccgaccgacgcaccgggccgtgccgtgccagcccactccctatactttgtgtgccgggcctggcctgtcggcccatcgtgccgggccagcccagcgtgcaggcggggaggcccaggcacggcccggcggtcgggccgggccggcacgggccgacccatgccgggccgtgccgtgcttgggccgggccaaaaagccgtgccatgggccaggccttcgggtctcaggccttatggccatctatagcggtcggcgtgttattggtgt

SEQ ID NO: 44798 - DNA, 306 bp, Oryza sativa
  unsure (1)..(306): unsure at all n locations
  Clone ID: PAT_MRT4530_47823C.1
aacagcagaaagacgtcgctaattgagaggaccgtccggcgttcgctccccgcgtgaangaaccgggcggggcgtcaaccctangcgccgccgccgtttccctctccctcccccaggccgccgctgccggaagcggccgggcctcggctcantgtgcaaggacggcggcggcggggcatttgccgtggaacgggggcccggtcctgcgcggggaagtcggtcggcgttcggtggtggctgcggngacccgacggcgaatcatctaagcgacggcgnggggtgggacgacgaagagcagcagtcctt

SEQ ID NO: 44799 - DNA, 1148 bp, Oryza sativa
  Clone ID: PAT_MRT4530_47824C.1
atggttggagggcggtgggcgaagggcgtcggatccatcgacgcgagggtgattagcgccggcaagggtaggccgcggtggagtgcggcggcggtggggaactacttcatctctgtcgagggcagagggaggaggcgcggagcgagtagcgcggcggcggagtcatcgcgcggtggagtcatcacgccgaggtatagatggccaggtgggccgcccggcacggcacggcccaggcccggccgtgcctgggccgaggcttgtcgggccggcacggcccgaccgacgcaccgggccgtgccgtgccagcccactccccatactttatgtaccgggcctggcctgccggcccatcgtgccgggccggcccgaccgtgccgggccagcccagcgtgccggtggggaggcccaggcacggcccgacggtcgggccgggccagcacgggcccgacccaagtcgggccgtgccgtgcttgggccgggccaaaaaggcgtgccgtgggccgggccttcgggcctcgggccttatggccaactatactagacaagaaagatcggtctctcagatcgatgaaggtccatataggaatatggagaaaaaggtggaggaacttaaaaaaagtataaaaaattcttataatcttgatcagatggtcaatgaagcaaacgtagaggcacattataagtggacaggacctgaaatttggaaagatacagcaggcaaagtggatatttttgtgacgtctgtcggttcagggggcacattagcaggagtaggaaagtacctaaaggagaaaaaccaatctataaggatagtcgccgtggaacctgcggaaagccccgtactgtcaggtggcaaagccagcaagcacaggatccagggcataggggtgggttttgaaacagaaattttgaaggcacataaacctattattacctatgaagtgaagacaatatatagtgaggatgccataacaaaagcgaggatgctggccagggaggaggggttgcttgttggtatttctgctggcgcaaatatagctgtttgcttggagcttgcggcgaaagaggagaacaaggggaagatgatcgtcaccatgctcccaagcggcgccgacagatacctaagctccgatctcttcaagtactga

SEQ ID NO: 44800 - DNA, 1029 bp, Oryza sativa
  Clone ID: PAT_MRT4530_47825C.1
ctacccttgagggtggcttaggttctgcgacaggttctccaagatcttcactccggggtcgacaaccgcacaacgggcacggggcgacaccgaaaggacgaggacggggcagcgagaggaggcacccttaccaccacgcgaaaaggcgcggcacgacgacgacgaacgggcgcggcggtgacgtctcggggacgacggaggtgaacgacttcggcggcgatccttggacgaaggcgagacgcggccggcacgaggcttgacgacgtggagccgaggacgaagacaacgatggggctgcagcggctcacttgacaaacgagaacggcttgacggagggacgaacgccacgacgatgaccgggccggcgagaggacgacgatgacgatgaactgcggaggggttcgggtggaggggaggcaagtccgagggcgaccttgtcactgcgatgccggaggtggagatggcgacgtcggccggcgcactggcacggcggaaggggctgccgtagtgggtgccgacgagaccgagggagaggcggcgcgggcgacggcgttccggcgaaattcgggcgacgccgtggccactggacgacggcgggaacacgcctccgatggtcaccgcgcgaaacggagggcaggccggaggagaggaggtggctgcgatgccgaggatggcgacggcacggcctatcggcgcacgggcgaggagggagaggcggctggaggcggccggcggcacgggagagcggacgacagcagggaggggtggtacgaccacggggagatgcgggacgaggctaaaacgagagaacggaaggagggggttccattttataggcgcggggagggagccggccacgggagagggtggaactgaggcgagaatggcggccggcggccaaggaaggtggccgggaatggcagggccgttccaggcgacagttgtaataaggggtatccttccagacaatgtccgggcaacaataacaaagctatgtgctttcatgaacgcaatttcacagaaggtcat

SEQ ID NO: 44801 - DNA, 2508 bp, Oryza sativa
  Clone ID: PAT_MRT4530_47826C.1
atggagcactactcgagaggcggcggcggcggcgaggggaggtgggtagtgatgcgggacatcgtcatcaacaacaagacggtgtgcacgacgccggggccgatgctggtggcgacgttcgcggtgtcgcccgacctgcgcacgacggagaagttcatggtgacgacgacggtgctcatgaccttcctcggcgcggcgctgttcgccgtcggcgtcctcggccgcttctccggcaggcacaggggccactcgtcggcgacgcgcatcttcttcagggcctccttcgcgctcttcctccccttcatgtccttcatgttctcccaggccaagggcagggacctccccttccgcgcctacctcatcctcctctggatgctcctcgtcgagctcctccgcaagaaggtcttcgccatggtcgcccccgccggcgacgccttctcccgcggcgtcggcaggtacagcctcttcgacgccgtcgaggacgccgcccgcatgatctggatcggctacctcgtctactcctacgtacacggcttcgccgtcaagtccctgttcgtcatcctctggatcttcagcgtcgccaagctctgcaagcgcgccgcctgcatccacctcgccaagggctccttcgacctcgccaagaacgccacgctcgtctccggctacatggcgcagctcgtcggggagcaccgccagctggacctgcaggttgtcgacgacggaggcgacgtccgcggcaaccgcaccatgagagcatgcaactacacggtgatgggtgagagcgagctcaagatcaaccggacgccgcacggcttcgagatcgacggcctcgaggacatcctcgccgccggcgggacgagcggcgatggcgatggcaatggcaagacggaggagcagctggtccgagtgagcaccatctggaagctcgccgagagcgacccgctgttcaagtacaacgtgcggaggaggcagaagctggaggacatctgcctgggcatagcgctctacaagctgctccggcggaggatagagcggtgccacatggcggagagaggcacaccggaggcgcgggcgttcgtcctcaggggcctcctcgccctcggcggcggcgaccggggcggcgaggccgccgacgccgagagggcgttcgacgtggtggagatggagctgaggttcttggtggagtactaccaggcgatcatcccgctggcgctgccgaagccggggatcttcatcgccaacttcgccttctccgtcgtcttcatcctcctctactgcatcgccgtgctgctcgtcaccggcaacggcaacatgttcagggtgctgggctccctgttccggggattcatcggcatctccatcgacacggtggtgcagttcaggtgcttccgccaccaggtgtcggcgctcgtcggcatggtgtgctcctcctccgacctcatcgtcaccttcctcctcacgctcaccctcttctccgtcgagacctacgagctcgcgctgtacctgctctccgactggttcgccgcctccatgctctgcaactacgcccggatgcggatcaaccgcgaccaccagcgcaggcaggcggcgcagcagcgccacgcccagcgcgccatccggagcggcctctgggtgaggcaccggtcgcgccccgtcatcaaggcgcaccaggtcaccatgctcaagctccaccagctgcacccgcgccgcgtgtggatgctcgcgtcgcgcatcctctcgcgccgcctcgccggcctccgccccgccgtcgtcaccgccgaggccaaggtggccatcgtcgcggccctcaaggccttcctcgagagcgacggcggcgacggcggcgacctccagttcaccagctgcgtggccgtcctgcgcaggcacgggttcttccaccacgggcccgagtgggcgtgcgacagcagcaagggcgccgccacggtgatcctggcgtggcacctcgccacggcgctgctcgaggcccgctgcgacggcgagccgctgccgcgcaagggcgaggcggcggtgacgctgtcgaggtactgcgcctacctggtatcctacgagcccgggctgcttcccgacgacccggagtggacggagaaggcgtacaacgacgtgaagtcgggcctcggcagcttcttccgtagctgcagctgcgccaccgcgggccggcgggagaagctggtgcggttcggcgacgactgggaggcggaggcgccgtccgccatggccaggggggtcaagctcgggaagctgctcgaggaccgcgcctccgagtcgaccgagggcttcgaggaggtgtggacgatgcttctcgagttctgggcggcgttgctcgtcgtcgtcgcgcagaggccgtcggcgggtccggaggggcacgcgctggcgctggccaacggcggcgagttcatcacccacatctgggcaatgatcacgcacgccggcgtgcgtgtgcacaggcaccacgactatcagagctttcctgtcactcatgtggtatag

SEQ ID NO: 44802 - DNA, 879 bp, Oryza sativa
  Clone ID: PAT_MRT4530_47827C.1
atgaggcggctggggtgtctctgcatcttgatttcgtgtatgctcgttctggtctacgcgtccgactaccgtgatgatattttcggccgggataaagcaaaccaggagggggcgaaggctatcaacgagaaaaatgggttcaattttccattcatactctttggcggtttgttatcgatgttaacctacgttactcctttcgtggtccactggagtaccggtagcaatccaaatgctctcaagattgtttacaccaacaccgacttcatcaaaacaggaatggcaactcttgcgtggctatcgttttccctatgccaactacatggagccaatggaaaaattgttggtgctccagctgtggctatctattctgctgggcttatcatctatggcacatcactagttttcaagtggagcccgagtggtgttatgagtgatgcggtatgccacaccacaatgttatcgatgttgctcatcgtcattctattgctggatgtgggagtttttggacatctcaagagagaacataaaattgcaaataccatatctgcattggccaccctgacacaggtggcatcttcgctgctcccacatggtgacctgtgcaagggatgcatttgtcaagatcaggcacctgatgccaaggttcctcgaatcagaaacaggaggaagttggttgtctacatacgctccttggaggctggtttcacgctgtattgggcaggctgctgcatctatcgttatgaccacacgtatttcaggatagctaacattacctccgtgattctatcatgtatagcttcttacatctccatcttcgaggcgctcaaaccagttctgggagataacgatgaggaggcactcaaaactgtaatctaa

SEQ ID NO: 44803 - DNA, 2457 bp, Oryza sativa
  Clone ID: PAT_MRT4530_47828C.1
agccaacgtatgacttgatgcattggccatccagatggcactgagcaattgtgcaccgctacaattcaatgatcaaacatggtaaaactcaatatctcccaaggaaaacccctccattttccacaaatctaagtaaagaatcaacacgagaaaacaagtggaagctatgatgtgcaagggaagaagaatttcaggggctctgctcgattcgtggccggcgaggccgcgccaccaccgtgcgctgctgtgactggcacacctgcgccgggaacttgcacccgaaccgcttcgtcaccattgatccccaccgtccttccatcgccggcgttgctcctctctcccctggcgtgctgccgccgccacgccggtccatcttctcaatggctttcctcatgcttgtgcactcacgctccagctcctgcacccggtttcgcatgctgtccatgtccagcctcagcatttggttcccccttgtcgccacccgccatgttccaccggcatcgctgtcgccttcttcctccccttgaccagctgctccaccttcgttcgccatgattgtccttgcaatggcgcgacgcagctggagctgctcgaagaagagcacctgcaccaccgtccgcagcggcagccgctcgttctgcgccgcgtgcgtgcatgcctctagcgtcagcttgcggccgtcgacgacaccgctcaccttctccttctcttcttccctcaatccaggatgagccttgagatagatgtcgacggcacggtagaggccgtcgtcgtagacgcgggcgccgtccggcaatgcccaggcgaggtcacagaatttgtccggcttcaggttggcatctgcggcgatctcgcccaggtaggcatccatcagcctcccaacggcgagcatggctcgtcggctggcctctctgcccggtgtctccagctcgctgccgtcgtcgttgccgtcgtcggcgtctcggccttcgaggaagtagcgcacgatgcgctcgacgcactccacgtcgtagagcgtctcgacgaggtaggagtagctcgggatgagcaggtcgtcgagggccgcgtcggggagcctcgcggctatgcgccgctcgagcatgtcacgggcggattccgacgcctgtaggatgctcgtcgtgcgcaggaggccgaagaggacgcgcgccgtcgtggcgcccacggccgtgccggtgtgggcgttgctcttgatggtctcctccgggaggttggcgatgacggtctccagaagcgccttctgctcgccgtccgatgacggcgcagccgcggcggcggcggtggcgccgcctacatggcggccggagcgcgacagcccagggatggagcgcttggcgtaggcgatgagagcgccttcaatgatctccgggccgacgttccgctccttcatggcggcaatgacgcgggtgaacgtggccagcgacaagccggcgaggtcgtcgaaccacgtcgcgccggcgccggcattgttcttgcggcgcggacggtcgccggcggcggcggcggcggcggcggcggcatcgttgatgggccaaccgaacagtgcggtgggcgtggacgcggcggccttggcggcgatggcgtcgacgcagcgtgacacgaggccgaggtcgtcggcgagggggaggaggccctcgcacgacctgagggctcggatggcgtccctggggttcctcaggacggtgtgggacatgaacctgtcggcgcgggagatgaggttgtcgtcggagtggtcgtcggacatgccgaggcgctcggcggcgcagcggagcggcgcggcggtggccggcgtgaggtccagcttgacgccgtagcagaacttggccgcctgctcgaacgcctccgcgccgccggggaagtccgggaggcggatgcggtgcacgtcggagtcctcgtcgacctccagcaccacctcctcctctctgatctcgccggcatcctcctcctcctcctcatcttgctctcctccgcccgcagctcgcgactccctgttggtgatgaggtcgtggagcttcttgctcctcgacattaacgggaacttgtggagatggaatgtcatgtcgccgacctcgatcacgacgtcgctggggagtccggtggtgcagaacctcttgaaagtagtgctcctaacctgctgccgctgcatccagccatctttctttgtcaggtgaaggccaagacgtgctctgaaaaacctggattttgaactttgaactccagctgccgccgcctgaaaaagagaggcttctgtgtcaatacccagcactcgtgccagtggcagcatgccagtgtagtgcgtgggcgtgcctgggggctgggtgtgctggacaatggacctggcaggcgccatcatttgctgtcgctatgggaatcagagaaggggaaggacccccgggagagacgagagacgagggagcctcgtgccgattcctgcagccc

SEQ ID NO: 44804 - DNA, 695 bp, Oryza sativa
  Clone ID: PAT_MRT4530_47829C.1
agtggaaaaaagtatatttattaaaggcatcagaaacagcaaaccattacataagcaccttcgatttgtgaaggtacgactttcatgtaagaactaaagcaacagcgaaagcttgcagttttaaagatgtcgcatcacatgaaatttcccagaccatactttgttgtagacataaaaaatagaagagttaagagtacatatttgattagtcaaggagaaaaagactagttcattcaggtagcgactaaattacatgacaggttgcaggacaaaatcaacctatacttcaagctctcaccacaccagataagctgtgaacaaccgccacgttgtagtgagtcgtattagaagtagaagtaacttaactgaattgccacttcttcatgttcaggaatgatgctcattcatttctacagtacctaaaaacttgtacccattttttttaagaaaagagagtaatagtgcactggcttatcaaatgttgaaactaagctggctactctcaagtaatctaggaaatcaatttctacatgtcagtctcaagcagtcttaatttaccatcaaagatatagttagtgataaatggctactgaaggacatcagcaaatccatcccttttgttgattaaatgaagattgccagtacggtatgattcaattgctaccagttaaactattgtcatctcatattgcaca

SEQ ID NO: 44805 - DNA, 2143 bp, Oryza sativa
  Clone ID: PAT_MRT4530_4782C.1
tgtttgcccctttttctttaattgagagctaagattgtcgacataactttgtgttagattttccaagtgctaaatagctggatcgctcaacagtgtttagataccatgtttacaccaaaatttggtgttattaaaaccatagacgacaagtaacataattctgatggataaaagggataatagtaattcatggatattttgcactatgtaaatggccacttccaagagcttcttgcatactgaagtgttgttgttccatatgatcaaagggtcaaagtcatagccatcatttctcaagcaagggctactgtctacacagcgcagtttcaactgacaaacaatcttcagtctcacctgcctatagtgaaaaaagtctttaaactggagcaattaactgatcaagattgcaacgagtggcaggagtggtccatggtcttctgagtttttcctgatgaccaaggatgatagcatcatgttgaagaggataagatcttatttattctttttccttagatagctcctagcaaacaagagtgtagtgctaatcttccataatgaacaatcccgttctacctcacaaaattctgatggtgtatctccttgagtgaggcctcgcagatggtgatagaagagatgggcaccaatgtcgtatatgtgtgtacatttcaaccaatatttgtattaactctacaagtgaatcagttggaacacatatagaacaacctgtaggaaattatttacattagatccattgttctttaaataataaaaaaagtttgtgctagatggttgtacaataataagtgacttaaattgcacaaccctgaaataaacatccatataatgaacaattctcatatcgtgtgtaaatgggcctttggttgaagtcgctcgtacaattcttatatcttattctgaggattatggtgtcacacaatcaacgggccaaccgccgctgaaggtagaaaatgacctataatatactcccataacaatccaacacagatagtttgcccactacacaacaaaagatgattagaacaatggactcaatcaaaaaggaaatgagaactcgaccaactataaatgacacaaatagctcgtaaaggaaagaaatttcttccaattgaaaccattaggggagaaagaatgttttatgaggtagaatggatcatttggtaatggagctagcgatcctaatttgttaagagtggtgttgatttaatctttaagccacaatgtataacaatctcaaattgtggggggaagccaaacccctcctctcctccccctcccgccaatgaggtctagtgatccagtattagctagcaagtctatggacagaggtttcataatttcctagtgaccagggaagcattagcaatattcttcgcatctttgttaagtaagcaatttaaagatatacatacaaactactttgttgacatacctatgaaaaatactaccatgtgctagtaacactaaagcatgtgagagaaaactgagctaacccccaatgcatatatgtatacaggtaaagctagtagatatacaaagccagacagcaaaacagggagactcttgttagagaaaaagcctgaaatgacaccattgttcttggtcaatgatgggtaaatgttagaaaaaaaaccaaaaatatcgtgtagataaaaaaccatgtttgaagaaataccttactggctgaattgatatgtaagaagctagatccttggagattacagagaactgaattgttgtaaaccaaatgcacctgttcccccattcaccaaatttcctattctcaggctaagggaaatatggccctcgttccggtctttgcagccgctgcgagatatcctccgccatggtccacagggatcgttttttttgtcctaggtctggccctggtgcctggcgttcagggtgggcccgctggtgttcaccgtgatgaagtccatgacagcagcgttgtcaaccacgtaatagaacgcctcgcgctcggcgagagtcttggagaagaagcaccagctgtaccaagaatccaagatcatagaatttcagatttgcaaccgaattggtgaatggttatggtggatcactattcaatgggacaagcttgcggccgctcgcgatctagaactag

SEQ ID NO: 44806 - DNA, 747 bp, Oryza sativa
  Clone ID: PAT_MRT4530_47830C.1
atggtggggcccacatggccccacatatcattgtcacccctcctcttcttcctcctctctcaccgtctctccactctcctccctccaggcgccacggggccacggggaggtccggcggcggcggccagcgacgcgggagaagggcagtgggcagggcatcggcggcgggagcgctgggtcttcgctcacgacgtcggcgcggaccctgcgcgggggctcgtggaggagatcggggccgcggcgccgcccgtctccgacgagctagagctcgtgcgagcgcggttcttgctgggcgttctctgccgtggcggcgatagaggggatcaacaagaacggcgagctggtgtcgctgtcggagcaggagctcgtagactgcgacgacgaggccgtggggtgcggcggcgggtacatgagctgttcgagttcatcgtcggcaaccacggcctcaccagtcaccacggaggcgagctagccgtaccacaccgtgaacggcgcgtgccaggcggcgaagctgaaccagagcgcggtcagcatcgcgggctaccggaacgtgacaccagcagcgagcccgacctggcgagggctgtggcggcgcagccggtgttcgtcatcgtcgacgccggcaacttcatgttccagctctacggcagcggtgtctacacggggccgtgcaccgccgtccgccgacgtcaaccacggcgtcaccgtggtgggctacggcgagtcccccaacactcccgccactga

SEQ ID NO: 44807 - DNA, 300 bp, Oryza sativa
  Clone ID: PAT_MRT4530_47831C.1
atggggcgaggcgtgcgtcagatcgcctgtcgccacctaacccgcgatctgaccgaggggatcaacaagaacggtgagctggtgtcgctgtcggagcaggagctcgtagactgcgacgacgaggccgtggggtgcggcggctctacggcagcggtgtctacacagggccgtgcaccgccgtccgccgacgtcaaccacggcgtcatcgtggtgggctacggcgagtcccccaacactcccgccactgacggcccgcccttcccccgcgtcgtcggccgccgccgccagacctccccgtga

SEQ ID NO: 44808 - DNA, 1056 bp, Oryza sativa
  unsure (1)..(1056): unsure at all n locations
  Clone ID: PAT_MRT4530_47832C.1
atggtggggcccacgtggccccacatatcattctcacccctcctgttcttactcctctctcaccatctctcccctctgctccctccaggcgccacggggccacgggaaggtccggcggcggcggccggcgacgcgggagaagggcagtgggcagggcgtcgncggcgggagcgctgggtcttcgctcacggcgtcggcgcggactccgcgcgggggctcgtggaggagatcggggccgcggcgccgcccgtctccgatgaactgagctcgtgcgagcgcggtgccgggagctgcacgaccgccgacgagaagcagaggaggttcgaggtgtacaggagcaacgttgagcttgttgagaagttcaactccatgggcaatggctacaagctggctgataacaaagcaatgcctggagagagcagtgatgatattctgccgaagagcgtagattggaggaagaaaggagcagtggtggaagtgaagtaccatgaagattgtggttcttgctgggcattctccgccgtggcggcgatagaggggatcaacaagaacggcgagctggtgtcgctgttggagcaggagctcgtggactgcgacgacgaggccatggggtgcggcggcagttttctcatacgggccgaccatgggtgcgaggaaggaaagggtcgccgacgacgagtggtgtggtggtgcggcaacaccggagaaggggcgacgcaccagcggcgagtgagatgtcaagaccgctcttggcgagatgacacaagcgacgggaagggctctgcgaggttcactggcacgggggacgacggcggcttgggggcatcgaggcgccacgctcggtcagaggccacctcagcgtgcgcaagcaggaggagcgctggcacaaggtggcgcgccgagagcggtattgcccaccactgccactcgcccaccgccgccacactcgcccgctcctctgctccacccacgtccagagccgctgcttacccaccgtcgccgctccgtagccgcgctcgcccgccgacgtcgccacttcgcccgctccggccgtga

SEQ ID NO: 44809 - DNA, 1467 bp, Oryza sativa
  Clone ID: PAT_MRT4530_47833C.1
atggcggccgccgcggcggcggtcggcgtcgtcgccttgctgttgttgctgccgctcgccgcgtcggcgtacggcgacgggctgggccgagcggccgtgggggtcaactggggcacgatgacgtcccaccccatactcccgtgcgaggtggtgcggatgctggcggccaacggcgtcgcccgggtgaagatgttcgacgccgacccctggacggccgcgccgctcgcccacaccggcatccaggtcatgctcgccgtccccaacgaccagctcgcgcgcctcgccggcgacccgcgccgcgcctaccgctgggccgagcagaacgtctccgcctacctcgaggccggcgtcgacgtcaggtatgtggctgttggcaatgagccttttctaaagagctacaatggcagcctaatcaatgtaacctttcctgcgctcaagaacatgcaaagagctctagacaaacttggtttaggtgatcatgtaaaggcagttgtcccactcaatgctgatgtctacaactcccctgagaataaaccagtgccatcagctgggagcttccgcaaggatatcaatgccctcatggttgacattgtcaatttcctcaatatgaataatgcaccctttgttgttaacatctacccatttctcagcctataccagaatccaaacttcccactcaatttttccttctttgatggtggtagcaagccagtttatgacaaaggtgtggtctacaccaatgtgtttgatgccaactttgacacccttgtttggtcactaaggaaggctggtgtgcctgacatgaaaatcattgttggtgaggttggttggccaactgatggtgataaacacgcaaatgtgagatatgcacagaagttctatgatggttttctgaagaagatggtcagaaacattgggacacctctcagacctggttggatggaagtttacctatttgcactgattgatgagaaccagaagagtgtactgcctgggcgctttgaacgtcactggggactactcacatatgatggaaaaccaaagttctctatggatctcagtggagatggcctagacaatctggttggagttgaagtggaatatttgccagcacagtggtgtgttttcaacaaggatgcaaaggataagttcaaagacttgccagccgctgtaaactacgcatgctcaaatgcagattgtacaccactgggctatggatcctcctgcaataatcttagccatgacggcaacatatcatatgcattcaacatctatttccaaacaatggaccaggatgttagggcatgctcttttgaaggcctcgcaaagatcacaacgataaacgcatcgcagggaggatgtttatttccagtgcagattctaagtgcttcagaaagggttgtgccactgagatttttgcctacatccttcttgattctcctaatggttgtgtccattcttacatag

SEQ ID NO: 44810 - DNA, 440 bp, Oryza sativa
  Clone ID: PAT_MRT4530_47834C.1
ctttcctcccgcgactatcctcgccacaaacggggacttgcccgtcgagctctccggtatcctgaccatctgccgtagctgcctacctccctaaaattgcatcctcacgccatcgagccgacaccacttcctcttctgatgacatgacaatgatggcatggtgatcaatctggtgacccacacccttctcttcataacatggggagtggaccatgcacagctagctttgggggcactgtgatagaaatcgatagtgtagctctatggggatcgaactggagggccactgacagattatgggcaggggcactcaagctcaacatgaagttgtcaatccaaggcaatgcgctcgagggcggtataatcaacgccgacgtctgtgtagcttctagctctactttacaagaaggtgacggactgtgaggggaccagagacagcg

SEQ ID NO: 44811 - DNA, 1826 bp, Oryza sativa
  Clone ID: PAT_MRT4530_47835C.1
gggtcaattcaattttcacatttcgtttgctatatacttcgttattttcccgtggggaatcacagaattgctgaagggcgtgccaacgcattttgtgcaggcaggagctaccttttttttgcatggtgatttatacacagctgcgtgcagaaagacgcagtgcaccatcatctacgtacaaaacttggagaggcatgtgcagaggttaggcagccatgtcatatatattatgcaatatttatatctaatttcccgatccgttgagcatgccttcttgtacaaaagggagagacacaccagtcgtcacatcatcaccgtttcaggcacacgccaatccgcgagcctgacgctccgatcgagcacgaaacatatagtcgtacacaattaacgcagctagccaactaatgaaacgcataaaacttgggggggaaaatcatatggacgatccacgagggcgctcaaaatcgaccttcgtcgtccatctcacgctcgaccgccgcgtcctccaccgtgtcgccaatgtacaagtacgggttcttcgccaccggctggaagttgtagaaaacgaacaggtagaaggcgaggctggcggcctcgatggccacgttgacgccccactggtacttgtagctgagcaaggcgaggaacgccgacgcgatgatccgggtgaagtagaggtagccgacgacgacgaggtagaagcgcttgaacagcgtgagcttctggaggttgagcgccgccttgccatcggtcttggatgcctcgcgcatgctgcggatcgaccagatgatcgggaagaacacggcgcagcagcagatgacgtccaccagcaggaacacctggttccacacgacccagtcctgccccgtcggccccgtctccccgatcaccaccagcaacaggttctcgaccacttgcagcgggatcacgatcataagcatgttcttctccctctcctggaggtagggcttgaggatggaccagccggtgccgatgaggatgatgacggtgaagagcaggacgcccttgaagaagccgaagacgtagaacgccacgtcccagccgtgcggcgtgccggtgcgctccacgtaccacgagtcctccgccgcgcacgccatcttgagcgccttgaacagcagcagcgcgcccatgacggcgtggatccgctccaccgtcgcgcggtgccgcacgcacacgcacgcccacagcgccaggaacgcgaagtacacctccgacacgaccgtgtagatggtcggcagcggccgcaggcccacgggtaggtagtccctgggcccgtcggagatgccgtcccgcacgttgtacatctcggtgtacacgtcgacggtgacctccacgccgtcctggcagttgctgaacacgacggcgtactggtctgggtcgtcgatgctcacggtggtggtgacgccgccgggcgggacgtcgccgagccggagcaccgggagggcgtactcgctcgtcagcacgcagtaactgcccccgccgtcgtcgccgttgtcccccgggtcggcggccgcgtacgcggacgcgttgttgatcttcgggaactgggttccggagatgaggacgaaccccatgaggctggggtcaaccgcggtgcgccgtgacccccgccggagattccaaaacgagcggcgtatggagatggtcgccttcccgccacgctcgaagccaaactgctcgaacagaatgagaggccgagcgtccgacacgatgagcgtcgtcctgatctcggcatcggcgccccgcacgaggagcagcagcacgacggcggcggctgcgacggcgatggagagggaggtgtccat

SEQ ID NO: 44812 - DNA, 579 bp, Oryza sativa
  Clone ID: PAT_MRT4530_47836C.1
cttggctccaagggctcaattccctatggcgcaagtcccttaaattgagtattcttgaattattggtctccggggcaaaatggccttccgttaccatttccaaccaccttccaacccgaaaccttaagtggtaagacccgggggggcctattaacgaacctactcaccataattgccgtgggcttaatggcccgtttcccgggtggaaaccctgtgagcccacttgctttattaattcggccacccccggggaaaaggcggttggcaaatggggcgtttttccctttctttgttaattgccttcttgccttgggaggtcgggtgccggtaaggggcttaacctccttcaagggcggtattccggtgttccccgaattaagggattaccccagaaaaaacacttttaaccaaaaggccacaaaagggcctgaacccaataaagggctcattggtgggggtttttccttaggttcgccccccttacgaaccttaccaaaattcacgcctaagttctaaggtggcaaactccgctgggcctttaagaataccagccgtttccccttgaaggttccttaggcg

SEQ ID NO: 44813 - DNA, 1448 bp, Oryza sativa
  Clone ID: PAT_MRT4530_47837C.1
gaaaaaaataaataaaaaaaaatcgcttggcttccccccgtctccttgcgcctccgccccctactccggcgagccgagccgccgtccgccgccgccgcatcgcgagtccttccctcgtcgggcagtcgcctgccccaggatatcaattcagccacacattccctacatcgttgctagttacacatgtagcacctctggttgaaagccaatactactactgctacctaatccaaagcaaggtgctgtaaattcaggtgatgagcaaatgcaatgtatcagccaaatcctatttccagcagtggtcagactcatggcaatcctactgctcatgagcaaatggagttagggaacaatgctattgtccctagtaacggagggaacaataaccctaatatggcggcaagacagcggttacgttggacaaatgagttgcatgaccgtttcgtggaggctgttactcagcttggtgggcctgatagagccactcctaagggagttctgagaattatgggtgtgccaggactgacaatataccatgtgaaaagtcacctacagaaataccggcttgcaaagtacattccagacccttcagctgatgacaacaaggatgaagataaagatccaaggaatctgctttctgcacttgaaggttcatctggaatgcagatatctgaagccctgaagctgcagatggaggtccagaagcggctacatgaacaattagaggtgcaaaggcagctacagctgcgaattgaggcgcaggggaagtatctccagaagatcatcgaagagcagcagcgtgtcattggtgcaggagcttccagagccacgtcaagcgaacaattgcctgactctgagaaaactaacccaccaactccagtaccaatttctgaatctccagttcagggtgcaccccatagcaagaacagtcaaagccaagttgagccgacgaagagcccttcgcatgatgatgctctcccgtgtggtgaacctttaacacctgactccagctgccggcctggttcaccgacgctcagcccaaagcatgagcgtgcagccaagagacagaggggcagtgatgcaggcgatgtcacagcattcgcagatggagaatttgtacttccaccaggcatctttgagtcaagcacaggatccgagttccaagaatgttcgatgccttattcaggccattagcctatggtgctctgatcatcagtccatcaccttgacaaagcttacatggtaagatttcatctgtagccgttggtagattttggccttgtcaacacaaatacctttagacagagagtctaggtttcaaaaggaaattgggcacatgacatgcagagtagctgtaattcttgcactgttgttagatgttcatggggactaatgtaactgatatttaattaaaaaatattattttagaatgacttatgttatgctta

SEQ ID NO: 44814 - DNA, 244 bp, Oryza sativa
  Clone ID: PAT_MRT4530_47838C.1
attcctgcagcccttgaagcgctcttacaaaatgaactggagaaatgtaactgggtttagcctcctccacaactccactgcaaactcggctctcggagatgggcggatcagctacgaggagttcgtggcgatgatgaaatccgggacggattggaggaaggcgtcgcggcaatactcgagggagcggttcaagacgctcagcaacagcctcatcaaggacggctcgatcaccatggcgcgctag

SEQ ID NO: 44815 - DNA, 408 bp, Oryza sativa
  Clone ID: PAT_MRT4530_47839C.1
atgtcaggtggagatagcagcccaatggatttcaatgagtctgtcagtcacactcagatgcaaggtgcaatagaccaaaccatgaaaagggtggaagacttatttgcaaagatggacgcaacgaactccattgagcgcatggaaaaacggttgcctactataaccgacaaacttgacgatattgacggtcgtctaccactccttcgagacggtacccacaaacatggagaggtggtaaaagtatactttgattgggagatgatagtagagaaaaagtttcattcacacgtagttcctaagggctatagagttagacaagccactagtgagttcaaggactttgcaataatatggtggaatggtctatgtgaaaccgaggacggtttccaatcaagaaggggaggatga

SEQ ID NO: 44816 - DNA, 231 bp, Oryza sativa
  Clone ID: PAT_MRT4530_4783C.1
atattaaattatggaggttttattaatatctgggcaagttaaaacacgattcatattactttacatttttacattaatgcattcatgcattctatgacttgacacttgtacaaactggcacactaaataactaaagctagaatttgctacataaaaaaagaaaccgacttttttattatgcaaatgattaactaaaaactaataaaagggctaataactattaaatcaaac

SEQ ID NO: 44817 - DNA, 1086 bp, Oryza sativa
  Clone ID: PAT_MRT4530_47840C.1
aaagcctccctgcagcttagaggacccaggtgtcttcgctcctggaaggaataccagtcatgagggtgtgcttcccaataaaatacctaggtttgcctctttcaacatgaagactgcgaaaagtttacatgcaactgcttttcgacaaatcggctgggcgcgcgtgtgatgggctggagatggaaaaaccaggacatggctggccgaacgatcatggaatccctggaggtcctgcacaaacagaggaaacaatttctatgggcaagaaccgatgacatcataggaggaaaatgcaatgttgattggacaatacgtgcttgccaacagaaaatgggggcctaggaatcctacatctagtgaaattcgcaagagctttcaggatatggtggctatggcatgaatggaagttacccaagaaaacatgggttgggatggagacccacgtgatgacacagacaatcctctttgcagcagccacaacaatcaagatcggagatgggccacctatgattttggaatttggtgtggctcaatggacaacgtcctaaagatacagcgccaagggcgtatgaactcttgaggaagaaaaactagaccttaaaaaaagccatccctaacagtcaatgggtacaagagctaggtcttccaatcgcccaaggaatgacaattgaccttatagatcaattggtacaattatggaatacagtgcaaggagtgcaactaacacctgagagacagatgacatcacttgtaagtcaccattcatagacaatactctgttggctctgcatagaaagcgcaattcatcggcttgaccaagacgagctacgaagccttgatctagaaaccctgggtcctacgaaaatgcagatcttttgcctgtctagtaatccaaaacagagtttggacttccgataaacaagtgacaaggggataaccgaacaacacttactacccactttgtcgccacacacctgaaacttctttccatctagaattggattgtagatacacaaaagaatttgggaaatgcatgcaacttggacagcttgtgaacaactaaggttgggatcatgggaggcgaca

SEQ ID NO: 44818 - DNA, 291 bp, Oryza sativa
  Clone ID: PAT_MRT4530_47841C.1
cttttcctttggctggctaactaactacgtggctagtggggcctccatgatggacgcgtgggtgctcctctacagtctactgcaagggctcaggtccaccagacgggctccacgatagacgccgttccagcaacattgacttcggccacgccaggactggcggcaggatcatgagcactgcttgtgtgggcaattgagggcatcaagacttcctagaccctatcgtacctggcaccactcaccgttgaggatcttttgaagcaaatcgagtacctgcttcgatccaagtgg

SEQ ID NO: 44819 - DNA, 549 bp, Oryza sativa
  Clone ID: PAT_MRT4530_47842C.1
atgaacattgcgaccaccttcggcaaggtggtggtcctcgcattcggcgcgtgggtggggctcaaggacggcggcgtggtcactgggctcgccgcctacggcgtcatcatggcgaccgtctccaccgcctccgacctcacccaggccttcaggacgggctacttcatgttagatagatcccctccccgttgggcccaacggcacaacggggatcttgacctgcgccctgatcgggggcgcccagcccaatggctggtgggccttgtcaccctgcgccacataaatagagggtggaggccggggcggcacacggcacgagtgacgggaagcatcactgcgcgccacgcctcatcgtcaccacctacgaccgccgctgccgcgaccaccatcgccatcaagtccaccgtcgccaccgtccacgtcaagcacgcgacgacaactagggatggcagtgggtcaagaaaatcggacggtactgatgtccccgaacgcccagccgcctccgcccccggtagtgggagccatttcccgctgtctctgcaagggtag

SEQ ID NO: 44820 - DNA, 1209 bp, Oryza sativa
  Clone ID: PAT_MRT4530_47843C.1
ttagatatatacctcaaggtactttttcaaatattgtatgatttttctaataaaatagtatatatgagttgtacgtccgcggcgcctcctgcttattccaggagcgcgccgccgtcgccgacacccctcgccgtcgtggcgcgggtgccgagggactgcgacatcttccgcggcgagtgggtgcccgccgccgacggcgacgacgacggcgcggcgccgtactacacgaacgcgacgtgcggggagatccaggagcaccagaactgcatgaagtacgggaggccggacctcgggttcctgcggtggcggtggcggccggagcggtgcgagctgccgcggttcgacgcggcggcgttcatggaggtggtgaggggcaggtcgatggcgttcgtcggcgactcgctcgccaggaaccatatgcagtccctcatgtgcctcctctccaaggtggagaaccccaaagatgtatcgacgacgaaggacccagagttcaggacggtgcgctacgagtcccacaacttcaccgtcgccgccttccggtcgccgtatctcgtgacggcgaaccaatcgtcggaccccgccggcgggatgtgggacctctacctcgacgagccggacgccgcctgggccaccgccgtggcgggcttcgactacgtcgtcgtctccacggccaactggttcaaccggccgaccatgttccacgaggccggccgcctcgtcggctgccaccactgcctcgtccccggcgtcgccgacctcaagcgcacctactccctgcgcgccgcgttccgcaccgcgctgcgcgcgctcaccgccggcgccggcggcgccggcttcgacggcacggtgatcgtgcgcacgctgtcgccgacgtcgcacttcgagggcggggagtggaacaagggcggcgactgccggcgcacgcggccgaccgcggcgcggatggctgggctggacctcgacttccacacggtgcaggtggaggagttcaggagggcggaggcggcggcggcggcggcgagcggtggcgcggcgaggctgctgctgatggacacgacggcggtgatggtggcgcgggcggacgggcacccgagcaggtacgggcactgggcgcacgagaaggtgacgctgtacaacgactgcgtgcactggtgcctgcctggacccatcgacgtgtggaacgagatgctgctccagatgctgctgctt

SEQ ID NO: 44821 - DNA, 225 bp, Oryza sativa
  Clone ID: PAT_MRT4530_47844C.1
atggagcagttcgagcagccaccgtcgtccctcgaagccacagaacccccggaggcggagatcgggcacagggtggaggacctgtgggaggtggcagagccgcagctgtcaccgtccgagaagctcaactcctgcttcgaggacatcgtcgtcgcctccttcccctgcccccttggctcgcaagatcactgctacaatagctatttttccgtgcggttgttttga

SEQ ID NO: 44822 - DNA, 895 bp, Oryza sativa
  Clone ID: PAT_MRT4530_47845C.1
agatctccatcccggcgtccgagctgcccaacttcctgctccgggacgaccagctctccgtctcctgggaccggatcagggcgtcccagctcgccggcttcggcgtcgccgtcaacacgttcgtcgaccgtgatggacctgcctcgtccaatggagggcctcggcgaggccgggccgccgccgttcttgtgcaagacgtacgaggtcgtggacgaccccggcacggacaccgtcatctcgtgggggttcgccggcaacagcttcgtcgtctgggacgccaatgcgttcgccgccgtgctcctcccgcgctacttcaagcacagcaacttctccagcttcgtccgccagctcaacacctacgggttcaggaaggtcgatccggatagatgggagttcgcgaacgaggggttcttgcgggggaagaaggagctcctgaagacgatcaagcgacgccggccgccgccgtcgagccccccgtcgtcttcgtcgtcgtcgtcgtcgtcgcagcaccagcagcagccggcggcggcgtgcctggaggtggggcagttcgggcgcgacggcgtggtgaaccggctgcagcgcgacaagagcgtcctgatcgcggaggtggtgaagctgcggcaggagcagcagacgacgcgcgcgcagatgcaggcgatggaggagcgcatctcggcggcggagcagaagcagcagcagatgacggtgttcctggcgcgcgccatgaagaacccgggcttcctccagatgctcgtcgaccggcaggccggccagcacggcgcccggaacagggtgctcgaggacgccctctccaagaagcgccgccgccccatcgacgcccaccgacgccatcgccggctcgccgcccaccgaagccgtcgtggcaatcgag

SEQ ID NO: 44823 - DNA, 827 bp, Oryza sativa
  unsure (1)..(827): unsure at all n locations
  Clone ID: PAT_MRT4530_47846C.1
cccacgcgtccgcccacgcgtccgcccacgcgtccgcacgtaattcccgggatttaccgaaatgccactcttcgcttccaaattcgcgccgctgatcccccggctccgccgcctctccaccgcggcggcggcggcgacggcgacggccgccggggaggacccgaagctgtcgcgcatagcggaccagctcctggaactctcccctgccgagctcgacgactactcggcgctcctgcggctcaagctccgcctctcgctcacgtcgagcgccgcatcgggggccgcggccactggcgcggccggagacgccgcctccggctccgccggcgcggaggaggccgcggcggtgaagacgtcgttcgatgtcaagatcgagaagtacgaggcggcggcgaagataaagatcatcaaggaggtgcgcgcggtgacggacctggggctgaaggaggcgaaggagctcgtggagaaggcgccggtcgtggtgcgatccgggcttcccaaggaggaggccgaggcgctcgccgccaagctcaaggccgccggcgccgccgtcgcgctcgagtgatcccgagcggaagaacgggttcgccctttttatttttggttcctactgttatccttagatcgaagatgctacgcttgtgggtgccttggtttgtttggattgaaattcgatgcaattggggcaattgatcaggtgtataagaagatgcaggtcttgattgcattgttgtagcttgcctanttactgatttatcttgttgaatcacgcaataatgtctattttagtggtctgggntcnctggntggtnaaaanaaaaanaaaa

SEQ ID NO: 44824 - DNA, 564 bp, Oryza sativa
  Clone ID: PAT_MRT4530_47847C.1
tatacgtttgagagggatcatgcaaaacaacagggggaaatctatagatacatgcggataagctaactacatagatgaaggacgtggacgaatagatgttggaattgagcattatttgagacgcatagttatgcaaaatttctttgtttactttgatttattttattgtttatttttattttaaatattcttttctgtttattatttattttttattaataatatttatttttttattatatttttatatttctattcttaattatattttttatattctatattctatttataattattttattttacatttttctattattatttttatattttattcatattttactatttaattatttttatatatttttctatactatatatttattttttatatttttctatatattattttaaaatttatctttatttttttatttacttaattttatttctatttttctttattttttccaattttattttattaataacattctatatctttttttattaaatttaaattattttttatctttatacttatatatttttatttat

SEQ ID NO: 44825 - DNA, 114 bp, Oryza sativa
  Clone ID: PAT_MRT4530_47848C.1
gcctagaacacactcgggagcaaacaaccaaatatgtggtgatccagagcagctcaccagcacattggacagtccgacattccaccgagccgacgatgacctgcggctcaaggg

SEQ ID NO: 44826 - DNA, 294 bp, Oryza sativa
  Clone ID: PAT_MRT4530_47849C.1
atggccgatagttcgtcgtcctccatgacgaaccagctacgagagacacagaaacaagaaaccaccattagagcccacattctcaaaccaaacacctcaaatcatcatcatcatcaacaacaacaacaacaacaacaacaacaacaacaacaacaaggagaagatttaagtaaaaaaaaacaacaagaagaagaaacctcaccgaggtggccggtgggtgggcatggaggaggcggtacctggcgttcagatctgcgcatccccggcctcgtggaggtcggatctggcggctag

SEQ ID NO: 44827 - DNA, 327 bp, Oryza sativa
  Clone ID: PAT_MRT4530_4784C.1
cgtgtccatgcacagcacacaatttagaagcgcatattgttctgttaggctgccatgctctctttgacaggatattattgaacacgctgtgttctatcctttcttactctaagaatggacggagcaactctgaacagcccatctagctagatccgaaaataatggcaaacttgacggtccaaaatacttaccaatgttgaattgaacgtgatcctgtctctaacggcacgcagcgacaaacctgaaggctctcccgtctccaaaggctgaaatgctgatactacaactggtgcgagaacgacctaaaagctatagaggaactgaaca

SEQ ID NO: 44828 - DNA, 363 bp, Oryza sativa
  Clone ID: PAT_MRT4530_47850C.1
atggcagcagacttcgagggcgtgaaggcttccaaccaggctatcgaggccttcgacgccgcctcctccttgcagcagccgacgctgccgccgcctcctcacagcagccggcctgctcactcgccgccgtcgctgtcccccgtcgctgctgcgcccgtcccctgtcgcctccgccgccgccgtgcccatcccccaccgccgccgcacccgtcccccgtcgacgacgccgccgccgccgcgtccatgccccaccgccgccgtcgcaatcccccgccgccgccgcgctcgtcccctaccgccgccgtcgccgtcctcatctacaagggacatctgcagggggccgaccgcacgtatcacacctga

SEQ ID NO: 44829 - DNA, 238 bp, Oryza sativa
  Clone ID: PAT_MRT4530_47851C.1
aaacttgcatgacattactatcaaaatttgtatgacccgggtgccaaaagttgtgacacacgatgatgcatgactatgtttaggtatcgtgtcctactttcctggtacgatgtaaaaccaaatgccaccggtggtgggaatgctccagggagcagcggcctagcttgggtatgataccgtatattgacagcatgtttagggccaacatagcttgggcttgagattaactctgatcgaa

SEQ ID NO: 44830 - DNA, 718 bp, Oryza sativa
  Clone ID: PAT_MRT4530_47852C.1
tttttttttttttttttttttagaacaccagttaaatgggagccctccccccattacatgcagctagatcatcagtcaaaaatgagttttacacgacaaactttggagaactaaaaataccaggagaccgacacggcacaaactagaaatctgaacaataataaaaacaaaaatggaaaaaaaaaacgtacagcacatttccaagaacaccaagttgtataccttaccaatggtcactgttgccctaattattctcatacaacatctgtattttcactcacgaggaaaataatcacagggacgaatattaacaataaaacttttgcttgccagcgtgctgctgctaaggggaagacattctggacatctgacttgcgaattagttccaactgtttcgagagattaggaactggcagcggctgaatctgcagcagtttacaataagccaaaaatttggaacggcgattcccttgattcatcgtgactagctctgcgtttggcggtggatttggagtatccagtccatgtaactgctagtcccagacatctgatcctcgaccaagttagatagaagcaaaaagccttctcttggctgttcaccctgacgtacgacgcggcagagctggtggtaagaaggatccctctcccttagggtccctagtattttcatgaaatttctggagtactcgttatcacattctctcaacccacgcgtccg

SEQ ID NO: 44831 - DNA, 1404 bp, Oryza sativa
  Clone ID: PAT_MRT4530_47853C.1
atggcggccgccggagcatcggctctccggccacacctcgcccttctccccgccggcgggcgtcgaggcaggcgcagcggaacccaagagtatgttggccgttcaagatctgtcgtatcaccccccccacctcggtatgaccgtcagaagcgtagcttgctctattccagcgaaatcacgtttaaatcctgcacaccgacttaaggctgggatggtgtcgctgtcaacactggggaagttggcgtcgtgcccagcaagagtcctgaaggtgtcactcccggtgaagatgtctatataatcctccgattggatggtcgtgtcagaagatctggaagaggcatgccaaattggaacgacatagttgcaggaacttccacgaacttgaagacactgactgagcgaacttgaacggttgattgaaggtgtgtatacaaactgcagtttgtatcatcccatatgtttctccctctgtattattaattccctaaatctagtgtatagaccataccagagtaatttagaggaaaaatttagtttataccgctaatatagtgaattcccaatcttcagacttatactatacttaatgatcctgacttggcaccgttcagggcatcaccggaattcaaggaacttcaagaagaggcattgcgtggtggagaagatattggttctgggttccgaagagacctgaaactcattagtgaagtacaagcaccatttcgtggtgtccgaaggttcttttatgtggcgttaactgcagcagctggaatttcaacattctttaccattcctagacttatacttgcagttcaaggtggcgatggtgcccctgatctgctggaaactgttgggaatgctgccatcaatattggaggtattgttgtgctcgtggctttgtatttctgggaaaacaagaaagaagagcagcagatcacacaaatttctcgcaatgaaaccctttcaaggttacctgtccgcctgtcaaccaatcgcattattgagcttgtgcaactccgggacattactaggccagttatactggcaggttcaaaagcatccattactcgagcaatgcaaagagctgagagatatcggactgaactgctgaaacgaggtgttcttctaattcctgtgatctttggtgcttctcagaaagcccaaacgaaatcacggttaaaagctgaagagcgatttaaggctgatattgtctctcctgaacaatgggaaagttggatacgtgaccagcaagagtctgaaggtgtcactcccggtgaagatgtctatataatcctccgattggatggtcgtgtcagaagatctggaagaggcatgccaaattggaacgacatattgcaggaacttccacgacttgaagaactgctgagcaaacttgaacgttga

SEQ ID NO: 44832 - DNA, 421 bp, Oryza sativa
  Clone ID: PAT_MRT4530_47855C.1
actatttctccatggctgactcgcattcggactctgatggttctattccggctgataggactcatcgccgaatgatggccaaaactgccgctcgccatgctgattgaagatgcgatagctttctcggttgagtgttacagaatcagctcgcgcaagctctgttatgctttcctctcattgagaagccacaactagcgtgtggagatggtggtgctcacaatatggcattgattctactgatcagacacttgagcagccttatggtgcctcttccacttttgctgcactgcctatgctgcatctaccttcagatgatgctgactagggatcaactctgatatatatatctgtggctgttgtatgtgctatagaggatctgtccttccttgaccactttgcatctattgattgctaagttctc

SEQ ID NO: 44833 - DNA, 206 bp, Oryza sativa
  Clone ID: PAT_MRT4530_47856C.1
gctttttggaccaaacttgaaggtcgcgaccacgaggagcccaacctatacactggtagatggaagaggattgttctctattgattgttgaagctctgagatggaccgtcacgaggtttcaccggacgactgagcggatggacagacgccagagctcttgcaatgtgtctcatgcctcgcgcatggtggaggggcttgaccaggac

SEQ ID NO: 44834 - DNA, 377 bp, Oryza sativa
  Clone ID: PAT_MRT4530_47857C.1
aaaacaaggttaaggtcctgaaaaggggcacatcataaccacataatttgaataccagggtctgtttaagcatatgacaactttgcatcatttactataattacttgttagatgatcaccggaaagagctgcaaataactaactacttggagcgatatgcatctaactttggtgctaaaagagagcctcaaaatatattgggccataaactattggatcattaaccttgatgataaggcattttagatgccaaaacatgtaacactcaaagccctctgaatttacagtaaagtatgccaaccagctatagacctatcatacttctattaaaagtgtcatcgtctaaaacttgctacagaatttccaatttcccactc

SEQ ID NO: 44835 - DNA, 4868 bp, Oryza sativa
  Clone ID: PAT_MRT4530_47858C.1
tcaaaactcatcttcagatccaagtcgacgacatggcgaagcaaaacgagggattcgagaagactttgttggagattcaagcggcgatcggaaccatggtcgtcaagcaaggagagacacaagagatgctgctcaaactggacaaatctgtggctggatggcgacctcaagttgatgctgctatacaagggttgcacgaggagggcggcaattcgtcgaacacctcgcaggcgtcaaggatggcggaggaagggagtcaccaaactcctctgcttcctacgcccagcacgccgccgttgttttccggaacagcggcgagcgaactcggtccagatggccaccgcgtcgcaaattttcaccgggggaaggcatcgggggtagttcatactctcgggccacctccggtcaagggtacgtaccaaattcccactgaattttctgttcctcatgggattgagtttggcgcaaattcgagtcggggaaatcgggatttgcatggggagcaagggttcaatcatagactaccaaagttggattttcctcagtttgatggctcggatccacagggttggaggttgcgttgtgagcattattttggggtttatggaactcatccaaatttgtgggtttgggtagccaccatttacttcatggggagggcagcgtcttggctacgttcatctcgtgctcatgaagtttttgtcgattggggtcgattctgtgaagcggtgaaccgaaaattcgatagaaatcaacatcggcaactgattcgacagcttgatcagattaaacaaaccggttcagtgagcgagttttatgaatggtttgatgatctgatgaatcagttgttgacgtatgatcctatgtataacactttgaatttggttcaccagttcatagaagggttgcgttttgacattcgcaaagctgttttgttacattgccccaaggatttggagtctgctctggttttggctctattacaggaggagttgtctgagcggaatcaagagcaaaggaaatttggggatggatcgcagaagtttaaaaatgcatatccattaccattgccaccaaccaaggctctgaaatctgaggagaagaagggtggagagctcaatcggggtactaatctttctgacaaggttagtgcacttcgatcgtttcgtcgtgcacaaggtttgtgttacttatgtgccgaaaagtggtcgccgacacataaatgttcaggaacagttcagcttcacgctgttcaggagctctttgcactatttcctgacaacgtaaatgaggatcaggctggcatatcttctgaagatagtgattcttcattgttagctatgtcagttcatgctgttcagggtactgattctcagtctaccattcggttacaaggcaaaattcaggggttgaatatactgatgcttgtggattctggtagttcggctagctttgtcagtgatcaattggctgaccgtcttactggagttcagttcttagctcatcctctgtctgttaaggtggccaatggacaggtgttgcattgtcagaaagaaatgccttctgctgaatggtttgttagtggtcagaagttcttgaccacatttaaagtggtggctttgggaggttatgatgcaatattaggcatggattggttaactaagtatagtccaatgcacattgattggcagcttaagtctattcacttgatagttatgggtcatgaagttttgttgcgtggggtgcagtccaatacgtctgattgtgctttgatttctagtcagcatttacagcatctgcacagtatcgactcattatcctcaattccagatgctgtccagtctttggtacaggaattctctcatttatttgaggaaccaagtggattacctcctgctcgagattatgaccatacaattcctttgattcctggggctgtgccagttaatgtgagaccttaccgttatacacctgctcaaaaggatgagatcgaaaaacaagttaaggatatgttacaaaaaggaattattcagccaagtgctagtcctttttcttctcctgttttgttagtcaaaaagaaagatggcacgtggaggttttgtgtggattatcgccatcttaatgctatcactgtcaaaaacaagtatcctcttccaataattgatgagttaatggatgaattggcgggagcttgctggttttctaagcttgatttgcgtttagggtatcatcaaattcggatggcagttggtgaggaggctaagacagcttttaaaactcacaatggtcattttgaattcaaggtgcttcccttcggacttacgagtgctccagctaccttccagggggtgatgaatacagttttagctgatcaattgcgtcaaaatgtcttggtctttgttgatgacattttggtatacagtcgcactttggaggagcacaagaatcatctgcgtcaggtgtttgagactctgagtaagcatcagttacgagtcaaattatccaaatgttcttttgcacagactcaactgtcttatctagggcacattattagtgctgatggagtttcaacagatccagaaaagattcaggtggttcggcaatggccagttcctgtatctgttaaagatgtgtgcagcttcctaggttaggcagggtattatcgcaagtttgtccgacattttggcatcattagtaagccatttactgagctattgcgtaaagggcagccttttatctggactcaacaccatcaaaaagcttttgacactttgaaacagagtctgatatcagcaccggtgttggtcatgcccgatttccagaaaatgtttgtggtggagactgatgcttctgaccgaggaattggtgctgtgcttatgcaagatcagcatccggtggcatttttgagtaaggctttaggacctcggactcaagttctttccacttatgagaaggaaagtctggctattattcttgctgttgatcattggcgctcgtatttacaacacgaggaatttttaattcgcactgatcaccgcagtctggcctttcttgataaccaacgattaaccacctcttggcaacataaagcaatgactaagttgttgggtcttcgttatcgaattgtttacaagaaaggattagagaatggagctgcagatgctttatctcgtagatcttctgatggtcttccaattttgagtgcattatctgttggtctaccggattggttacaggatgttgtttcgggttataaatctgatcccgaagctcttcagcttttgcattcttttaaggaaggtacacctcattctgctcattttgagttgcaaaatggtattctttatttcaagaaacgtgtttgggtgggcaataatcggcagtttcagcagcaagttctagcaaatttgcacactgctgctctagggggccattctggaattcaagtaacttatcagcgcgttaagcagctgtttgcttggccaggtttaaggcaaactgtgcaggattttgtgcacagttgtgtagtctgtcaacaagctaaacctgaacatgtgccttatccagggttactacaaccagttcaaatacctgaacatgcttggcaagtcatatcaatggattttattgaaggattgccccgttcagcctcttataatagcattttggtgattgtggataagttcactaagtttgctcattttttgcctttatcccatccattcactgctgtgtctgtggcacaattattcatggacagaattcattcaatacatggactaccgctggccatcatttctgatcgtgatcgagtgttcaccagtatttttttggaaggaattgtttcggcgttctggcactcaattacgaatgagctcttcttatcatccacaaacggatgggcaaacggagcgcgtgaatcaatgtttggaaatgtttctgcgctgttttgttcatgcttgtccatctaggtggagtcagtggttatctcttgctcaattttggtacaacacttcatttcattctgccttgatgttgactccttttgaagcaatgtttggtcataaacctcgtcattttgggctctcagtggattcggttggggtgcctagtgcattggatagttggatgcaggatcgtcataacatgcaaagtttgattcatcatcatttggttcgagctcaacaaagaatgaagagtcaggctgattctaagcgtactgatcgtgtgtttgcggttgctgattgggtttttatgaagcttcagccttatgtgcagcaatttgtcatgactcgtgctaatcagaagctggctttcaagttctatgggccctttcagatccttcagcgtgtgggttctgttgcctataagttgcaattacctgctaccagtttgattcatccagtggtgcatgtgtctcaattgaagaaagcagtagctgcttctgaagttgttcaatcaacattaccacgattggatcctgattctgggcatctggctactccagtagaggttctgcaacagcggctacgtcgtcgtggtgataagatgattgttcaagctttagttcgttggtctggtacttcgtcttccaccacttcttgggaagatctggaggagttaaggcatcgctttccttctgccacagcttggagtcaagctgtgtttcaaggaagggggaatgttacatccggcaccggcacacctgatgatgaacaggaacaagtgtccaagatcgctggctctgttcagagtacggcccagcaacggcatgttcgtgtaactaggcccaacccgaactctcgggtcgctctcccctttcgccggccttgttgaccaacggcccgacgcagtagaacggcggcaac

SEQ ID NO: 44836 - DNA, 239 bp, Oryza sativa
  Clone ID: PAT_MRT4530_47859C.1
catatggtggtaagctggaaggtaacgccaagcgtggtattctcccgatggcaagcatgtcgaagttagctcaaggtgcaaccaaggacaagtcaggtgaaaagaagattccatctgcaacaggagatcaagccaagcagttcagagtggggaagttttgctgggcaagcccgttcaagaagatgcaacggaagaagtcagacaagaagagaagaccacccaacctatcttcttgctag

SEQ ID NO: 44837 - DNA, 402 bp, Oryza sativa
  Clone ID: PAT_MRT4530_4785C.1
atgggtcaaggggtgaggcaacagattgacctccttactatcgaactccatcaccgtgccgcggatctagtgccacgccgtccgctccctctgcttgctgggaggagagcggtgggggagtgccaggagatgggggagaacaggggagagctcgagggggaggctgtcgtcggcgaaactccatcaccgcacccaaatccaatcctgcaccatcgagtcccccagtccccttgctccactgggaggagagtgatggagggagcaccaggagaaggggaggataggggagagcgcgaggagcaagttgtcgttggcgaggagaagccggggagggaaggcaaggcggcggcggcgcaagagcggggaaaggaagagaaggggtgggtgaacagtggtggctag

SEQ ID NO: 44838 - DNA, 576 bp, Oryza sativa
  Clone ID: PAT_MRT4530_47860C.1
gtggatccccgggctgcaggcgcgtgacgctgctggccggcgcggcgaggcggtgcaacatggatctgtctcctgctcgcgccgtctgcggtggcgctgctggtggttgcctcggcgtgggttccggccgccgctgacccgcagatcacgctgctcaacctggggtgcagccagtacaacgcgacaccggccgccgccttcctcgccgccctcaacgccaccttcgccgtgctccgcgccaacctgtcgtcggctggtggcggtggtggcttcgccacggcggccgagccgcgcgccgccgcgccggcgttcgcgatggcgcagtgccgcccgtacgtcgcggggacgggcagctgcgccgcgtgcttcgacgccgcggcgtcgcgcctccgcgccaggtgcggcgccgccaacggcgggcgcgccatcctcgacggctgcgtcgtgaggtacgagagcgccgccttcttcgacggcccggccacgctccccgggaacacgcaggtatgcaacggcaccgccgtcgccgacggctctttcgctggcgcggcgcgtgggctcgtcggtgacctcgcg

SEQ ID NO: 44839 - DNA, 364 bp, Oryza sativa
  Clone ID: PAT_MRT4530_47861C.1
cccacgcgtccgcccaaacgtccgtctacacgtccgaacaaacaaagcggatgacgcgcatgatgggatgccactgactgtagcccagaaagctgttatagctctcaccgtacgagcaatcgatgcctgtgtggttagtcctgcggataagccactcatgtaggatgcaggctgatataacgacgacagcaggccagagatacaattataagaatgctttggatgcactgtatagcaatgctgctgatgaaggcgtggtagcaatgaagaagggcgcaggtgcaactgtaaagggagctatgaccatgaagatggagatgcagcggctgctatgatcagagtgcagcgttatggagagacactc

SEQ ID NO: 44840 - DNA, 4134 bp, Oryza sativa
  Clone ID: PAT_MRT4530_47862C.1
ttaaacaacttcagaggcagctactgctttctttaattgagacacatgcaccactggatgaatcaaactggtggcaggtaattgtaacttataggcaacagaacccacgcgctgaaggatctggaagggcccgtagaacttgaaagccaacttctgattagcacgagtcatgacagattgctgcacataaggttgaagcttcataaaaacccaatcacccaccgcaaacacgcgatcagtacgcttagaatcagcctgactcttcattcgttgttgagctcgaaccaaatgatgataaatcaagctttgcatattatgacgatcctgcatccaactatccaatgcactaggcaccccaacagaatccactgagagcccaaaatgacgaggtttatgaccaaacattgcttcaaagggagtcaacatcaaggttgaatgaaatgaagtgttgtaccaaaattgagcaagagataaccacttactccatctagatggacaggcatgaacaaaacagcgcagaaacatttccaaacactgattcacgcgctccgtttgcccatccgtttgtggatgataagaagagctcatttgtaactgagtgccagaacgccgaaacaattccttccaaaaaatactggtgaacactcgatcacgatcagaaatgatggcctgcggtagtccatgtatagaatgaattctgtccatgaataattgcgccacagacacagcagtgaaaggatgggataaaggcaggaagtgggcaaacttagtgaacttatccacaatcaccaaaatgctattataagaggctgaacggggcaatccttcaataaaatccattgatatgacttgccaagcatgttcaggtatttgaactggttgtagtaaccctgggtaaggcacatgttcaggtttagcttgttgacagactgcacaactttgcacaaaatcttgaattccagaatggccccctagagcagcagtgtgcaaatttgccagaacttgctgctgaagctgcctattattgcccacccaaacacgtttcttgaaataaagaataccattttgcaactcaaaatgagcagaatgacatgtgccttccttaaaagaatgcaaaagctgaagagcttcgggatcagacttataacccgaaacaacatcctgtaaccaatccggtaaaccaacagataatgcacttaaaattggaagaccatcagaggatctatgagataaagcatctgcggctccattctccaatcctttcttgtacacaatacgataacgaagacccaacaacttagtcattgctttatattgccaagaggtggttaatagttggttatcaagaaaggccagactgcggtgatcagtgcgaattaaaaaatcatcatgttgtaaatacgggcgccaatgatcaacagcaagaataatagccagactttccttttcataagtggaaagaacttgagtccgatgtcctaaagccttactcaaaaatgccaccgaatgctgatcttgcatcagcacagcaccaatacctcgatcagaagcatcagtctccaccacaaacattttctggaaatcgggcatgaccaacaccggtgctgatatcagactctgtttcaaagtgtcaaaagcttcttgatggtgttgtgtccagataaaaggctgccccttacacaatagcttagttaatggcttactaatgatgccaaaatgtcggacaaacttgcgataataccctgccaaacctaggaagctgcgcacatctttaacagatacaggaactggccattgccgaaccacctgaatcttttctggatctgttgaaactccatcagcactaatgatgtgcctcagagtctcaaacacctgacgcagatgattcttgtgctcctccaaagtgcgactgtataccaagatgtcatcaacaaagaccaagacattttgacgcaattgatcagctaaaactgtattcatcacaccctggaaggtagctggagcactcgtaagtccgaagggaagcaccttgaattcaaaatgaccattgtgagttttaaaagctgtcttagcctcctcaccaactgccatccgaatttgatgataccccgaacgcaaatcaagcttagaaaaccagcaagcaccagccaattcatccattaactcatcaattattggaagaggatacttgtttttgacagtgatagcattaagatggcgataatccacacaaaacctccatgtgccatctttctttttgactaacaaaacaggagaagaaaaaggactagcacttggctgaataattcctttttgtaacatatccttaacctgtttttcgatctcatccttttgggcaggtgtataacggtaaggtctcacattaactgccactgagtcgatactgtgcagatgctgtaaatgctgactagaaatcaaggcacaatcagaagtatcggactgcaccccacgcaacaaaacctcatgacccataactgtcaagtgaatagacttaagctgccaatcaatttgcattggactatacttagttaaccaatccatgcctaagattgcatcataacctcccaaggccaccactttaaatgtggtcaagaacttctgaccactaacaaaccattcagcagaaggcatttctttctgacaatgcaacacctgtccattggccaccttaacagacagaggatgagctaagaactgaactccagtaagacggtcagccaattgatcactgataaagctagccaaactaccagaatctacaagcatcagtatattcaacccctgaatttttccttgtaaccgaatggtagactgagaatcagtaccctgaactgcatgaactgacatagctaacaaggaagaatcactatcttcagaagatatgctagcctgatcctcatttgcattgtcaggaaatagtgcaaagagctcctgaacagcgtgaagctgaactgttcctgaacatttatgtgtcggcgaccacttttcggcacataagtaacacaaaccttgtgcacgacgaaacgatcgaagtgcactaaccttgtcagaaagattagtaccccgattgagctctccgcctttcttctcctcagttttcaaaaccttggttggtggcaatggtaatggatatgcatttttaaacttctgcgatccatccacaaatttcctttgctcttgattccgctcagacaactcctcctgtaatagagccaaaaccagagcagactccaaatcctcgggacaatgtaacaaaacagcttcgcgaatgtcaaaacgcaacccttctatgaaccggtgaaccaaattcaaagtgttatacataggatcatacgtcaacaactgattcatcagatcatcaaaccgttcataaaactcgctcactgaaccggtttgtttaatctgatcaagctgtcgaatcagttgccgatgttgatttctgtcgaattttcggttcatcgcttcatagaatcgaccccaatcgacaaaaacttcatgagcacgagatgaacgtagccaagacgctgcccttcccatgaagtaaatggtggctatccgaacccacaaatttggatgagttccataaaccccaaaataatgctcacaacgcatcctccaactctgtggatccgaaccatcaaactgaggaaaatccaacttcggtagcctatgattgaacccttgctccccatgcaaatcccgatttccccgactcgaatttgcgccaaactcaaccccatgaggaacagaaaatttagtgggaatctggaacgtacccttgaccggaggtggcccgagagtatgaactacccccgatgccttcccccggtgaaaatttgtgacgcgatggccatctggaccgagatcgctcgccgctgttccggaaaacaacggcagcgtgctgggcgtaggaagcagaggagtttggtgactcccttcctccgccatccttgacgcctgcgaggtgttcgacgaattgccgccctcctcgctctgcttctccaacttgaggacatgcagcttcagctcctccatgtcgtgctgcaacccttgtacagcagcatcaacttgaggtcgccaccccgccacagatttgtccagtttgagcagcat

SEQ ID NO: 44841 - DNA, 702 bp, Oryza sativa
  Clone ID: PAT_MRT4530_47863C.1
atggacgccggtgatgcgtggggccgctcctcctcctcatcctcctccgccgccgccgccgccaggcgcctgcaggcgcgctacgatctgtacatggggttcgacgacgcggacgcggcgggcgtggaggaggtggaggcgcgcggcggcggggaggcgtacaactgccccttctgcggcgaggacttcgacttcgtcgccttctgctgccacgtcgacgacgagcacgccgtcgaggccaagagcggggcgaagagtccgaaaaatatcttcagggtcccattctttgttgtctttgttgagaaaggacttaagagatggcatttgcctgtggctgaaccatccaaagatttacattccgactcatctgacaataactttttgctaaataaattcccagatgacaagactgcagagagagctgaaccatctctgtcggagaaggatcagaaggagagggctcaaaggagtaaatttgtccgtgggcttgtgctctcgacgatatttgaggatgataacttcgccgccaccccgcctcacgcatggacgcaccgcctccgcctcgacctcctcctcccctatgcgcgccgtcgccatggccgccgccgctgccaccgctgcaacgacgacgaagacgacctatacgacgacggcgaggacatgcgatgggagtccatgttccaagatctcaagcccacatag

SEQ ID NO: 44842 - DNA, 5631 bp, Oryza sativa
  Clone ID: PAT_MRT4530_47864C.1
atggcgaagcaaaacgagggattcgagaagactctgttggagattcaagcggcaattggaaccatggtcgtcaagcaaggagagacacaagagatgctgctcaaactggacaaatctgtggcgggatggcgacctcaagagctgaagctgcatgtcctcaagttggagaagcagagcgaggagggcggcaattcgtcgaacacctcgcaggcgtcaagggtgacggaggaagggggtcaccaagctcctctgcttcctacgcccagcacgccgccgttgttttccggaacagcggcgagcgatcttggtccagatggccaccgcgtcacaaattttcaccgggggaaggcaccgggggtagttcatactctcgggccacctccggtcaagggtacgtaccagattcccactgaattttctgttcctcatggggttgagtttggcgcaaattcgagtcggggaaatcgggatttgcatggggagcaagggttcaatcataggctaccgaagttggatttccctcagtttgatggttcggatccacagggttggaggatgcgttgtgagcattattttggggtttatggaactcatccaaatttgtgggttcgggtagccaccatttacttcatggggagggcaacgtcttggctacgttcatctcgtgctcatgaagtttttgtcgattggagtcgattctgtgaagcggtgaaccaaaaattcgatagaaatcaacatcggcaactgattcgacagcttgatcagattaaacaaaccggttcagtgagcgagttttatgaacggtttgatgatctgatgaatcagttgttgacgtatgatcctatgtataacactttgaatttggttcaccggttcatagaagggttgcgttttgacattcgcaaagctgttttgttacattgtcccgaggatttggagtctgctctggttttggttctattacaggaggagttgtctgagcggaatcaagagcaaaggaaatttgtggatggatcgcagaagtttaaaaatgcatatccattaccattgccaccaaccaaggttttgaaatctgaggagaagaaaggcggagagctcaatcggggtactaatctttctgacaaggttagtgcacttcgatcgtttcgtcgtgcacaaggtttgtgttacttatgtgcagaaaagtggtcgccgacacataaatgttcaggaacagttcagcttcacgctattcaggagctctttgcactatttcctgacaatgcaaatgaggatcaggctggcatatcttctgaagatagtgattcttccttgttagctacgtcagttcatgcagttcagggtactgattctcagtctaccattcggttacaaggaaaaattcaggggttgaatatactgatgcttgtagattctggtggttcggctagctttgtcagtgatcaattggctgaccgtcttactggagttcagttcttagctcatcctctgtctgttaaagtggccaatggagaggtgttgcattgtcagaaagaaatgccttcagatgaatggtttgttagtggtcagaagttcttgaccacatttaaagtggtggccttgggaggttatgatgcaatcttaggcatggattggttaactaagtatagtccaatgcaaattgattggcagcataagtctattcacttgacagttatgggtcatgaggttttgttgcatggggtacagtccaatacttctgattgtgccttgatttctagtcagcacttacagcatctgcacagtatcgactcagtggcaggtttggttcaattatgtgctaccctcagtgactctacagaccagttatcctcaattccagatgctgtccagtctttggtacaggaattctctcatctatttgaggaacccagtggattacctcctgctcgagattatgaccatacaattcctctaattcctggggctgtgccagttaatgtgaggccttaccattatacacctgcccaaaaagatgagatcgaaaaacaggttaaggatatgttacaaaaaggaattattcagccaagtgctagtcctttttcttcacctgttttgttagtcaaaaagaaagatggcacatggaggttttgtgtggattatcgccatcttaatgctatcactgtcaaaaacaagtatcctcttccaataattgatgagttaatggatgaattggctggtgcttgctggttttctaagcttgatttgcgttcggggtaccatcaaattcggatggcagttggtgaggaggctaagacagcttttaaaactcacaatggtcattttgaattcaaggtgcttcccttcggacttacgagtgctccagctaccttccagggtgtgatgaatacagttttagctgatcaattgcgtcaaaatgtcttgatctttgttgatgacatcttggtatacagtcgcactttggaggagcacaagaatcacctgcgtcaggtgtttgagactctgagtaagcatcagttacgagtcaaattgtctaaatgttcttttgcacaaactcaactgtcttatctagggcacatcattagtgctgatggagtttcaacagatccagaaaagattcaggtggttcggcaatggccagttcctgtatctgttaaagatgtgcgtagctttctaggtttggcagggtattattgcaagtttgtccgacattttggcatcattagtaaaccattaactgagttattgcgtaaagggcagccttttatctggacacaacaccatcaagaagcttttgacactttgaaacagagtctgatatcagcaccggtgttggtcatgcccgatttccagaaaatgtttgtggtggagactaatgcttctgaccgaggtattggtgctgtgcttatgcaagatcagcatccggtggcatttttgagtaaggctttaggacctcggactcaagttctttccacttatgaaaaggaaagtctggctattattctcgctgttgatcattggcgcccgtatttacaacatgatgaatttttaattcgcactgatcaccgcagtctggcctttcttgataaccaacgattaaccatctcttggcaacataaagcaatgactaagttgttgggtcttcgttatcgtattgtgtacaagaaggattggagaatggagccgcagatgatttatctcgtagatcttctgatggatgttgttttgggttataagtctgatcccgaagctcttcagcttttgcattcttttaaggaaggcacatctcattctactcattttgagttgcagaatggtattctttatttcaagaaacgtgtttgggtgggcaataataggcagcttcagcagcaagttctggcaaatttgcacactgctgctctagggggccattctggaattcaagtaacctatcagcgagttaagcagctgtttgcttggccaggtttaaggcaaactgtgcaggattttgtgcaaagttgtgcagtctgtcaacaagctaaacctgaacatgtgccttacccagggttactacaaccagttcaaatacctgaacatgcttggcaagtcatatcaatggattttattgaaggattgccccgttcagcctcttataatagtattttggtgattgtggataagttcactaagtttgctcacttcctgcctttatcccatcctttcactgctgtgtctgtggcgcaattattcatggacagaattcattctatacatgcactaccgcaggccatcatttctgatcgtgatcgagtgttcaccagtattttttggaaggaattgtttcggcgttctggcactcaattacgaatgagctcttcttatcatccacaaacggatgggcaaacggagcgcgtgaatcagtgtttggaaatgtttctacgctgttttgttcatgcctgtccatctagatggagccagtggttatctcttgctcaattttggtacaacacttcatttcattctgccttgatgttgactccctttgaagcaatgtttggtcataaacctcgtcattttgggctctcggtggattctgttggggtgcctagtgcattggaatgttggatgcaggatcatcataacatgcaaagcttgattcatcatcatttggttcgagctcaacaacgaatgaagagtcaggctgattctaagcatactgatcgcgtgtttgcgaaagcagtagctgcctctgaagttgttcaatcaacattaccacgtttggatcctgattctgggcatctggctactctagtagaggttcttcaacagcggctacgtcgtcgtggtgataaaatgattgttcaagctttagttcgctggtatggtacttcgtcatccaccacttcttgggaagatcaggaggagttaaggcatcgctttccttctaccacagcttggggtcaaactgtgtttcaaggaagggggaatgttacatccggcacaactgatgacgaacaggaacaagtgtctaaggtcgctggctccgttctgagtacggcccagcaacggcctgttcatcacaagaaacaacgatccaattacgtccgcattgatgcctttccaagagaatctaggaaaatgttggcatatggttgcaactacacatcaaaccatcaaagtggacaaactacgcaaccatgcaagagtggtggacaacaagaagctatgcgcaaaacacgccaaaaagccacacaaaatgatccaagctatttgcacatgatcaatcgaattctcagaatctgggtaagaagctggactatttgggggagcttctggcaactggagattctaggagaagctgcagctgctagaaactcctccaaacaggctctaatactgtctccttcagtgcggaaaggaaaaggcatttggatttggtatattgagaaagatggtccaaatgatgggaaaaaatgtcaagcacgtggtcttttggattatgtcaaggattttgacttcgtgtttcatttgcacttgatgttgcttatcttgggacatgcaaatgctctggcactgtctttacaaaggaaagacaaggatattttggaggccatgttagagctcacagagttcaatgatcgtttcaatgagataaattctagcttgcttactcatatggctgcattcagtccaaaggattccttcgattcctttaagcatgaccatctaatagagctagcaaagtcctatccggatgattttgatgcaaggcaattgaaggatcttgatcatgagcttcagatttacattgacaatgttcgagaagatgaaagatttgggaaattaggcactatttcacaactggctaagttgatggtcgatacaaaaaaacatcttgcttttcctttggtctatcggagcctcaagctagtgttagttcttcctattgctacggcatcagtggagagatgtttttcagcaatgaagattgtgaagacagcactacggaatcgtattagtgatgaatttatgaatgatgctatcttatggttcgtggagaaagctttactagctacaattccaaatgacgacgtgatagctctctttcaaaacatgggaattactcgtagggtggaggtggaagtataa

SEQ ID NO: 44843 - DNA, 1353 bp, Oryza sativa
  Clone ID: PAT_MRT4530_47865C.1
gcgccgggtatgccccaccccacgcgtcagagcacagcggagaaagagagagagagagagagaaaggaaaaatcggcaccaccgcgaaagggggaaaaggggggaaggaagcgaggcgaggctagggtttcgattcgatcccgccgctgccatggacgccggtgatgcgtggggccgctcctcctcctcatcctcctccgccgccgccgccgccaggcgcctgcaggcgcgctacgatctgtacatggggttcgacgacgcggacgcggcgggcgtggaggaggtggaggcgcgcggcggcggggaggcgtacaactgccccttctgcggcgaggacttcgacttcgtcgccttctgctgccacgtcgacgacgagcacgccgtcgaggccaagagcggggtatgtcccatctgtgctacaagggttggagtggacttgataggtcacttgacaatgcagcatggaagttactttaagatgcaacgcaggcgaagagtccgaaaaatatcttcagggtcccattctttgttgtctttgttgagaaaggacttaagagatggcagtctgcagtcctttcttggtggatcatcctatgtatctaatcctcctgctgctgcaccagatccatttttgtcatctttaatttgtagtttgcctgtggctgaaccatccaaagatttacattccgactcatctgacaataactttttgctaaataaattcccagatgacaagactgcagagagagctgaaccatctctgtcggagaaggatcagaaggagagggctcaaaggagtaaatttgtccgtgggcttgtgctctcgacgatatttgaggatgataacttgtaagggaggttatcaaccttaatatagcgacggcatggcatggtcaaggaacagaaaatacaggagaacaatctatgcaatgcagcaaccttgttcatgccgtcgctaatgctgcttccagccttcaaggccaactgggggccacccatcatgtttatgtatgcacgtacgtataatgtatgtctgccttcctgcatttgccgagagggcaacaggaaccagctgagtagaggagaaaggtgtttgtgtcccaaccttccacgtcgaataaatgaggacattgtgttccttgagtggctttgtgcatatatgaagagaggagagctactcgcaatgtattaggttctctctattttatttgatcaatgtaatgtaataataggaagtgttgtacaactgtattgtaatcccaatggtatgtgatactgctttgttttgtatttattgaataaacagtttatccaatcacccccgtgggccaatggttctaaaaaaaaaaaaaa

SEQ ID NO: 44844 - DNA, 330 bp, Oryza sativa
  Clone ID: PAT_MRT4530_47866C.1
atgcagcattggcagttgggttgcatcttctttggcggttggggtaagctggcccccatcctctctgttccaccccctacaagtacaaagatcaaaacggacttggtgatggtgattgtattgaccaccaagcagttagaactagactcctacactgccaccatcactgaatgcacatctggttctcccttatttttgttggattttcccttgccaataatattggtggagaacagtggaaggtgcaaaactaatgagcatggggagaagcattcagatccttttctgcccattgtcaaatgggatggcaagccagttggtgatgaatga

SEQ ID NO: 44845 - DNA, 5682 bp, Oryza sativa
  Clone ID: PAT_MRT4530_47867C.1
ttatacttccacctccaccctacgagtaattcccatgttttgaaagagagctatcacgtcgtcatttggaattgtagctagtaaagctttctccacgaaccataagatagcatcattcataaattcatcactaatacgattccgtagtgctgtcttcacaatcttcattgctgaaaaacatctctccactgatgccgtagcaataggaagaactaacactagcttgaggctccgatagaccaaaggaaaagcaagatgtttttttgtatcgaccatcaacttagccagttgtgaaatagtgcctaatttcccaaatctttcatcttctcgaacattgtcaatgtaaatctgaagctcatgatcaagatccttcaattgccttgcatcaaaatcatccggataggactttgctagctctattagatggtcatgcttaaaggaatcgaaggaatcctttggactgaatgcagccatatgagtaagcaagctagaatttatctcattgaaacgatcattgaactctgtgagctctaacatggcctccaaaatatccttgtctttcctttgtaaagacagtgccagagcatttgcatgtcccaagataagcaacatcaagtgcaaatgaaacacgaagtcaaaatccttgacataatccaaaagaccacgtgcttgacattttttcccatcatttggaccatctttctcaatataccaaatccaaatgccttttcctttccgcactgaaggagacagtattagagcctgtttggaggagtttctagcagctgcagcttctcctagaatctccagttgccagaagctcccccaaatagtccagcttcttacccagattctgggaattcgattgatcatgtgcaaatagcttggatcattttgtgtggctttttggcgtgttttgcgcatagcttcttgttgtccaccactcttgcatggttgcgtagtttgtccactttgatggtttgatgtgtagttgcaaccatatgccaacattttcctagattctcttggaaaggcatcaatgcggacgtaattggatcgttgtttcttgtgatgaacaggccgttgctgggccgtactcagaacggagccagcgaccttagacacttgttcctgttcgtcatcagttgtgccggatgtaacattcccccttccttgaaacacagtttgaccccaagctgtggtagaaggaaagcgatgccttaactcctcctgatcttcccaagaagtggtggatgacgaagtaccataccagcgaactaaagcttgaacaatcattttatcaccacgacgacgtagccgctgttgaagaacctctactagagtagccagatgcccagaatcaggatccaaacgtggtaatgttgattgaacaacttcagaggcagctactgctttcgcaaacacgcgatcagtatgcttagaatcagcctgactcttcattcgttgttgagctcgaaccaaatgatgatgaatcaagctttgcatgttatgatgatcctgcatccaacattccaatgcactaggcaccccaacagaatccaccgagagcccaaaatgacgaggtttatgaccaaacattgcttcaaagggagtcaacatcaaggcagaatgaaatgaagtgttgtaccaaaattgagcaagagataaccactggctccatctagatggacaggcatgaacaaaacagcgtagaaacatttccaaacactgattcacgcgctccgtttgcccatccgtttgtggatgataagaagagctcattcgtaattgagtgccagaacgccgaaacaattccttccaaaaaatactggtgaacactcgatcacgatcagaaatgatggcctgcggtagtgcatgtatagaatgaattctgtccatgaataattgcgccacagacacagcagtgaaaggatgggataaaggcaggaagtgagcaaacttagtgaacttatccacaatcaccaaaatactattataagaggctgaacggggcaatccttcaataaaatccattgatatgacttgccaagcatgttcaggtatttgaactggttgtagtaaccctgggtaaggcacatgttcaggtttagcttgttgacagactgcacaactttgcacaaaatcctgcacagtttgccttaaacctggccaagcaaacagctgcttaactcgctgataggttacttgaattccagaatggccccctagagcagcagtgtgcaaatttgccagaacttgctgctgaagctgcctattattgcccacccaaacacgtttcttgaaataaagaataccattctgcaactcaaaatgagtagaatgagatgtgccttccttaaaagaatgcaaaagctgaagagcttcgggatcagacttataacccaaaacaacatcctgtaaccaatccggtaaaccaacagataatgcacttaaaattggaagaccatcagaagatctacgagataaatcatctgcggctccattctccaatcctttcttgtacacaatacgataacgaagacccaacaacttagtcattgctttatgttgccaagagatggttaatcgttggttatcaagaaaggccagactgcggtgatcagtgcgaattaaaaattcatcatgttgtaaatacgggcgccaatgatcaacagcgagaataatagccagactttccttttcataagtggaaagaacttgagtccgaggtcctaaagccttactcaaaaatgccaccggatgctgatcttgcataagcacagcaccaatacctcggtcagaagcattagtctccaccacaaacattttctggaaatcgggcatgaccaacaccggtgctgatatcagactctgtttcaaagtgtcaaaagcttcttgatggtgttgtgtccagataaaaggctgccctttacgcaataactcagttaatggtttactaatgatgccaaaatgtcggacaaacttgcaataataccctgccaaacctagaaagctacgcacatctttaacagatacaggaactggccattgccgaaccacctgaatcttttctggatctgttgaaactccatcagcactaatgatgtgccctagataagacagttgagtttgtgcaaaagaacatttagacaatttgactcgtaactgatgcttactcagagtctcaaacacctgacgcaggtgattcttgtgctcctccaaagtgcgactgtataccaagatgtcatcaacaaagatcaagacattttgacgcaattgatcagctaaaactgtattcatcacaccctggaaggtagctggagcactcgtaagtccgaagggaagcaccttgaattcaaaatgaccattgtgagttttaaaagctgtcttagcctcctcaccaactgccatccgaatttgatggtaccccgaacgcaaatcaagcttagaaaaccagcaagcaccagccaattcatccattaactcatcaattattggaagaggatacttgtttttgacagtgatagcattaagatggcgataatccacacaaaacctccatgtgccatctttctttttgactaacaaaacaggtgaagaaaaaggactagcacttggctgaataattcctttttgtaacatatccttaacctgtttttcgatctcatctttttgggcaggtgtataatggtaaggcctcacattaactggcacagccccaggaattagaggaattgtatggtcataatctcgagcaggaggtaatccactgggttcctcaaatagatgagagaattcctgtaccaaagactggacagcatctggaattgaggataactggtctgtagagtcactgagggtagcacataattgaaccaaacctgccactgagtcgatactgtgcagatgctgtaagtgctgactagaaatcaaggcacaatcagaagtattggactgtaccccatgcaacaaaacctcatgacccataactgtcaagtgaatagacttatgctgccaatcaatttgcattggactatacttagttaaccaatccatgcctaagattgcatcataacctcccaaggccaccactttaaatgtggtcaagaacttctgaccactaacaaaccattcatctgaaggcatttctttctgacaatgcaacacctctccattggccactttaacagacagaggatgagctaagaactgaactccagtaagacggtcagccaattgatcactgacaaagctagccgaaccaccagaatctacaagcatcagtatattcaacccctgaatttttccttgtaaccgaatggtagactgagaatcagtaccctgaactgcatgaactgacgtagctaacaaggaagaatcactatcttcagaagatatgccagcctgatcctcatttgcattgtcaggaaatagtgcaaagagctcctgaatagcgtgaagctgaactgttcctgaacatttatgtgtcggcgaccacttttctgcacataagtaacacaaaccttgtgcacgacgaaacgatcgaagtgcactaaccttgtcagaaagattagtaccccgattgagctctccgcctttcttctcctcagatttcaaaaccttggttggtggcaatggtaatggatatgcatttttaaacttctgcgatccatccacaaatttcctttgctcttgattccgctcagacaactcctcctgtaatagaaccaaaaccagagcagactccaaatcctcgggacaatgtaacaaaacagctttgcgaatgtcaaaacgcaacccttctatgaaccggtgaaccaaattcaaagtgttatacataggatcatacgtcaacaactgattcatcagatcatcaaaccgttcataaaactcgctcactgaaccggtttgtttaatctgatcaagctgtcgaatcagttgccgatgttgatttctatcgaatttttggttcaccgcttcacagaatcgactccaatcgacaaaaacttcatgagcacgagatgaacgtagccaagacgttgccctccccatgaagtaaatggtggctacccgaacccacaaatttggatgagttccataaaccccaaaataatgctcacaacgcatcctccaaccctgtggatccgaaccatcaaactgagggaaatccaacttcggtagcctatgattgaacccttgctccccatgcaaatcccgatttccccgactcgaatttgcgccaaactcaaccccatgaggaacagaaaattcagtgggaatctggtacgtacccttgaccggaggtggcccgagagtatgaactacccccggtgccttcccccggtgaaaatttgtgacgcggtggccatctggaccaagatcgctcgccgctgttccggaaaacaacggcggcgtgctgggcgtaggaagcagaggagcttggtgacccccttcctccgtcacccttgacgcctgcgaggtgttcgacgaattgccgccctcctcgctctgcttctccaacttgaggacatgcagcttcagctcttgaggtcgccatcccgccacagatttgtccagtttgagcagcatctcttgtgtctctccttgcttgacgaccatggttccaattgccgcttgaatctccaacagagtcttctcgaatccctcgttttgcttcgccat

SEQ ID NO: 44846 - DNA, 1548 bp, Oryza sativa
  Clone ID: PAT_MRT4530_47868C.1
atggaaaagagaaagaggatagcctcaaaagaagacctgcatggacaaatgatgaagaggaagaaatggagacttcagttgagcaacctacccgaggatattctctgcactatcgtgtcaaaattaccgttaagagaagctgctagaacgagcatattatctagccaatggaaccgcacttggtgcagccacacaaacctaaaccttagttatcgatcaataatgtcaaggcgctacatcgaaagagacataagacctgaaggcaggaagctaaatgctgaagagtttatcaggagggtggacgcaatcttgcagcagcacaacggtggaggcgttgagaaaatcgaagttataggacttttagaaaatgaaaatgcgtatcacatcaatggatgggtgaacttcgccatcaaatcgaagacaaagcaacttgttcttgatttcagatctttccactggcccatagatgagccatataactttgcatttcagatttttgatgctgctaacatggaaaatttgcagtctttgaaacttggttccatttctctgaagccacctgcagattttaagggttttcagaaccttaaaaggcttaagctactagatgtgggcattactgatgaagatctacaacttttgttgtccaattgcaactgtttggagtttcttggaatatattgctgtaaattgattacaagcttacggactactcatctttcaacccagcttaagcatttgtatgtctatgaatgcccatgtctcaaagagatagagttaaactctggcctgacaacactcgagtacattggtccattgatacctttagcacctcctggaatttatgtgcttacaaatttacgcataaagtcattggacatttctgattctcttcagtatattttcaccgaacttcccagcactcttccacgtctcgagatgctgactttgcaatgtcgtgaacttgagaggattactttgccagacaaaccaatcaaatttatttatctaaaacatctgagattggaattggcattttctggcccaaggaaatgggatgctgacattctagattttgcctgcatcttggaggctgctcccttgatggaaaagcttgaatttcatatgtggatgaattgtcgtgatcacctccggtatcgcaaagctcatggtaaactaagaactcttcctccatgcccccactaccatctcaaggaggtcaatatcgcaggattttacggtcagaaagaccagctggagttggcacatcatattctcaggaactctgtcgtgctccaagccatgaacatagatccgaggcctatagcagcctgtgatccttcgagaatggcaattcttgaggcgttcaactttgtggatggatctaaagttgccatgaaatatctctgcaaggcagaccaccgtaacgtcgttcatgtttcagatgtgtcacgtaaggatgtcgaaaatgtaccagcttaccggctggtatctccattttggattgagtttgataagaccaaacgttccggcttgttaattaggtga

SEQ ID NO: 44847 - DNA, 500 bp, Oryza sativa
  Clone ID: PAT_MRT4530_47869C.1
tttttttttttttttttttttttttttttttttttttttttttagcacttagaacagatataatttcatcaaagaaaaccaatacaacatataacaatattacaataataataaaaaaaatctccttttcccaaaaaaataaaataaaataaaaatctcccatttggggccacatgccatctctcctatatgggcctcatttcttgatccgaaataatcctcataaaccatactaatatttttccccttttccccatacaccattgtaataattatgtcaatggattttctacgtaggcttaatgatcaacccatcataatcttcgctagtgtcaacggattattcaaagaagactggagaaaaagaaatggtgatatgaagaaggaaaaatctgtgtagccatgcatgcgccgtacgtcgctcagtactcctcggaatccggtgcgctggcgccgggtcccggcgcgtcggcggagccggacgacgacggcgatggaga

SEQ ID NO: 44848 - DNA, 5829 bp, Oryza sativa
  Clone ID: PAT_MRT4530_4786C.1
atgtcgtactacgtagatccttgtaccagcgtaccccaataccctctatatccggtctgcgggtatcacccgtcgacagtggcgcgccaggtaagggcacttggtactcaaggttctactactatgccatcaagcttcgtcgacaacaacgtcaacaccagctccagccaagcactctcaacttcaacaatgctggtatggactcaagtcggcgaaatcgtcttcccggtttacaccacgatgccgatctcaatcggtccttcaatgactgaaaacgagaacgcagtggctacgaaccaagacggctctatgtcgaaaaatccacccgttgaaacggagaatggattaccgactacatccaaactcgggaaggattctgatgcggccaagtcttgtccctccgacataaatcacgggccgacaaagatgacttccgaagctatcaggtcttggtgtcctatccacaaaaccaagaaacatacccttcaagattgctgggtattcatcaacgtccgtgctgaacttcgcgcctgcaaagaacgtggaattcagcgtatttctccaactcgggatgtctattgtcctatccaaaagacaaagaatcacgatctctcgagctgcaaagttctcctcggcgccatgaaaaccccgtctcctaagtcatacgtccccgtcagggataacggcaaggaacagggagcgactccagcctcagatcgattcgttggggtaatcgatctcgatcctcacgaaccatcggtcttacatctcctcgaagactacgggtcatcgacaacaagtgcgccgcgggaggtactagttatcgatgacgttggcacgacagcgcaagccaacgcagaagcggcgaatcaatcgattactccagcccagcacatcagggctattcaagctatactgagggaaactccttacgatcccgttctgaacgacgacctcgagcgttggacagaacgattacgggagtcggtgaccaacctcagcaatgcattcgaagaggccgttaccgcgggcacaccaagatcagccaccaatcggcgaccccaatggctacccctccacctcgtggcactggcgatcttcgagatcaaattaatggtcgccgagaagcacggcgcacacgggatgacgcaaatcgctctcggcgtcatgtttcttcacggcgccatgatcgaggagaccgcccaaacgaggaccgagaatgcaacgatcgcgaacggcgggggccagacaatactggtcatggccgtcgccgcaacgacgacgacgaaggagatcggcgtcgaaataacagcgagagacaacgacaagattcctgggatccaggtcgtcatcctcgtaatcagattccgacccggggccattgaaaagtatgatgggagcaccgacccggaagaattccttcaagtctactcgacagtgctttatgctgccggagcagatgacaacgcgttggcgaactatttaccaactgcgttgaagggttctgcacgttcatggctaatgcatcttcctccctattcaatctcttcatgggcagacctgtggcaacagttcgtcgccaatttccaaggaacatacaagcgccacgcgatcgaatacgacttacacgcgctaacacagaactcaggggaatcattgagggaatacgttcggcgcttcaacgagtgcagaaacacaattcccgaaattaccgacgcttctgtaattcgcgccttcaagttcggtgtcagagatcgctacactacccaggagttggcgacaagacgcatcacaactactcgaagattattcgagatcgttgagcggtgcgcccatgtggatgacgcgctaagacgcaagaacgacaagccgaagactgggggagagaagaaaccaaccgcagacgcctctgagtcaaataagaagaaaaatcgcaaaaacgggaaaaggaaagctcaagcggaagtcctcgcagcagaatacgcgaaccctcccaagcgcccagacccacaagccagcgatacaaaaaaatcatggtgccccatacacaaaacggacagacattctctggaggattgccttgttttcaaaaagtcgctcgagaagcacatgacgtttgaaaaaggcaagcgagtacgcgttgtcgagaagaacgaggagacacctcctcacgaatcggattctgcgtacccagactccgacctccatgtctcacacatcttcggcggctccacaacgtactcctccaagcgggaatacaagaaagtggaacgtgaagtctattcgacatggcagggggctgcacccaagatgaagtggtctgaacagagaatagagttctcggaggaagaccaccccaagacctctgttagcccaagacgatatccgattgtggtcgaacccactattcggaacatcaaggtagcacgagttctcatcgacggtggcagctcgatcaatctcctcttcgccagcactctggatgcaatgggaattccacaaagtgagttgacaccaaccgatcaacccttccatggaattactccccaatcatcgtccagacctctgggcaagattacgttgcccgtgactttcggccaagccaacaacttccgaacagagcagatcactttcgatgtcgctgaattcgatacaacttacaacgccatcatcgggagaactgcacttgcgaggttcatggccacatcccactacgcatatcaagtgctcaagatgccgggaccgaagggaacaatcactattcaggggaacgcaaagctggcggtgcagtgcgacaggcagagcctcgacatggtcgagcaaacgcccaccccacccgccacgtttgagccacccaagaaaccgtccgacatgccgggggtccccagggaggtgattgagcacaaacttatggtacgacccgatgccaagccagtaaagcagagactgtggagatttgcaccagaccgaaaacaagccatacgagaagagctcgacaaacttctcaaagctggcttcatcagagaattacttcatccagagtggctagccaacccagtcatggtgcggaaggccaacggaaaatggagaatgtgtgtcgacttcacacacctcaacaaggcgtgccccaaggatcactttcctctcccccgaatagatcagttggtggattcaacagccggttgcgagctattaagcttcctcgacgcttactctggctaccaccaaatcagcatggcaaaagaggatgaggagaagacagcgttcattacgccgttcggggtattttgctacgttaagatgcctttcggactgataaccgtcggaaatactttccagcgcacggtccagggcacacttagcaaccagcttggcaacaacgtcgagtcttacgttgacaacatcgttgtcaagaccaagacaagcgactcattgattgacgacctgcgggaaacgttcgacaacctccgacgatatcgcctcatgctcaacctagagaagtgcacattcggagtaccgtcgggcatgctactcggattccttgtttctggcagaggaatagaggcaaatcccgagaagatcaaagcaatcgagaacatgaagtcgcccacaagactcaaggaggtacaaaagctaaccagatgcatggcagcattaagcagattcatcgctaggatgagagaacgaggacagcctttcttcgctttgttgaagaaacaagacaaatttgtatggacacaggaagccgaagagtcatttattgcactcaagcgctacctatcaaacccacctgtactcgttgctccccaacctaatgaagaattatttctttatattgccgccacaccatattccattagcactgtcattgtagtcgagagagagaaagtacaacgaccagtttattacgtcagcgaaactctccatgacgcaaagacaagatacccacagattcaaaaactgctctacgcagtcatcatgacatcaaggaagctacgccactactttcaagcccacagagtcacagttgtctcctccttcccccttggcgaagttgtgagaaacaaagacattgtcggccgcatcgcaaaatgggtagtcgagctaagccaatttgatatccactttgtgccgcgaacagccatcaaatctcaggtactcgccgacttcgtggccgattggaccatgccagataacaagtcagacaaccaaggcgacaacgagacatggacaatggcgtttgatggcgcactcaacagccaaggagcagaggcaggatttatcttgacatctccctccggagatcaattcaagcacgcaatccacctcaacttcagtgcaaccaataatactgcagaatacgaaggactactcgccaggatacgagctgcagccgcacttggggccaagcgactaatcgtcaaaggggactctgagctagtcgcaaaccaggtgcacaaagactacaaatgctccaatcccgagttatccaagtatcttgcagaggtcaggaagctagagaagaggttcgacgggatcgaggtccgacacgtctatcgcaaggagaacgtcgagccagacgacctagcacgacgcgcatccagacgagaaccgctcgaccccggcacctttctcgacgtcctgacgaagccatcggtaaaagaaattaacggtaaatctggcccgagcacccccgacattagctcggaggtcaccgaggcagaacgtgccgttgctgacatcgaaataacagacgactggcgcaccccattaatcaaattcatcagcagcgaggaattgcccgaggatgatatagaggccgagaaaataacccgtaaagcaaagatctactgtatggtcggtaacgatttatacaaaaaagcaccaaacgagatacttttcaaatgcgtctccctcgacatacatgaaggcatatgcgggtcatacgccgccggttggacattagtcggcaaggcctttcgacaagggtttttctggccaaccgcccttaaagatgcatgcgacatggtccagcgatgtgaagcctgtcaattccatagcaagcacacaaagctacctgcacaagcgctccagacaatccctctgacttggccgttctcgtgctgggggctagatatatttgggccattcccacgaggacagggcggctatagattcctatttgtagcgatcgacaaattcaccaaatggatcgaagcactacccactggggaaatcaaggccgacaacgccattaagttcatcagagggatattctgcagatacggactaccgcactgcatcataaccgacaacggctctcaattcatcagcgccgacttccaggattactgcatcggtttgggagtcaaaatatgtttcgcctcggtctctcaccctcaaagcaatggacaaatcgaaagggcaaacgacatagtactacaagggataaaaacccacgtctacgacagactcatgtcacaggacaaaaaatgggttgaagaactcccatcagtactatgggccgtacgcaccacaccaacaacatccaacaagaaaacacccttcttccttgtgtacggctctgaagccatgctccctggcgagttacgacatcaaagtacacgagtacagaagcattccgacgagaaccaggaggaacagcgagacatcgatgtaaaccttctcgaggagcatcgtgagcgagttgccgttcgagcagctagctatcaacaagccctccgccgttatcatgagaagcgcatccgagcacgcatactttcgatcagtgactatgtcctccgacgagttcaaacccaagcagggtga

SEQ ID NO: 44849 - DNA, 183 bp, Oryza sativa
  Clone ID: PAT_MRT4530_47870C.1
atggcggcggatctggcaagtggcaacgcgaccacaatggcggcagtgagcggcgacgacgaccatgacgagatggggatttggggtgcgacgcttcaagcgttccctctgcaagcgcatttccagcctgcggaaccacgcattcggctgccagctcggcttggctccgacatggagccgtga

SEQ ID NO: 44850 - DNA, 471 bp, Oryza sativa
  Clone ID: PAT_MRT4530_47871C.1
ttcaggtcagaaagaaggtgatgaattccggaggaactctgatgttcttgagatactgaggcttacactgttttcaaggatttgcaggagaggtgtgcgaaaaatcccagagaaaattcttgagcatgataaggtgatatggttcggagatctgaactatcgtatcgcactgagctatgcagataccaaaaattttttgatggaaaataattgggatgttctctttgaaagggatcagctcaaaatcgaacgtgatgctgggagagtatttaaggggtggaatgaggggaagattttttttgctccaacatacaaatactcctataactcagatgcttatgctagtgagactgcaacatcaaataaaaagaggagaacaccagcatggtatgcaccaattttaattagaggtaattcagtttatgatttggttgtatatttatatattagtaaattttccttttttaattt

SEQ ID NO: 44851 - DNA, 351 bp, Oryza sativa
  Clone ID: PAT_MRT4530_47872C.1
atggcggtgcacgacgcgctccggctgggccagctctacttcgtgctgcccgtctcagcgctccaccggccgttctccgaccaggacatggccgcgctcaccgtcaaggccatcgcggcgctcggggcctctgccactgccgccgccgccggcggcaacagcagcagtatcagcgtgtcgtcgcggggcaagaacgcgagtcccgccagcaaacagcggcagcagacgacggctcgagtggcgccgatacgacgaggatcaacggaggtagcattgctcgccaacgcgcaggattgcagatgcagaggtcgagcgccatctcggaaggcgatgagtgatccaacttattaa

SEQ ID NO: 44852 - DNA, 2349 bp, Oryza sativa
  Clone ID: PAT_MRT4530_47873C.1
atggcggagaaggggaggacggagatggaggtccggcccggcggcgtcgccctcatcaccatctccaaccctcccgtcaatgccctctccatccacgtcttgtatagcttgaaggaccactatgaagaagcacttaggaggaatgatgttaaagctattgttgtcacaggaaaaggaggagtattttccgggggactagacattaatacatttggtgctattcagagaaacaaagcggagcagctaaaggttgattatgtgtccatagatgtcatgactaatactcttgaagctgctggaaagccatcagtagctgctatcaacggtcctgctcttggtggagggttagaaatttccatggtatgtcaagcacgcatttcgattccaacggctcaattaggtcttccagagcttcaacttggagtgatccctgcatttggaggaacacaacgacttccccgccttgttggactaacaaaagcacttgaaatgatgctgatgtccaagcctattaaagccgaagaggcccatcagctggccctcatcgatgccatagtttcacctaatgatttgctgaatactgcctgccgttgggccttggatatatccgaatctagaaggccatgggtccataccctcagtagaactgacaagctagagtctcctgatgaggccagggagatcctcaagtttgccagagctcaggttcagaagcaggctgccaatcttcggcacccacttgtctgtattgatgttatcgaggaaggtatagtttcaggaccccaagctgggctacggaaggaagccattgctttccaggaccttgttttctcagatacatgtaaaagcttggttcatgtctttttttcacagcgtgcgacatcaaaggttcctgggatcacagacttaggtttaatgcctaggaaggtatctaaagttgccattgttgggggtgggcttatgggttctgggattgcaactgcactgatgctgagtaattatcctgttgtactcaaagaagtaaacgacaaattcttggacgcaggaattgacaggatcaaagcaaatttgcagagtcgtgtgaggaatgggaaaatgaccaaggagatatacgaaaaaacgctctcacttcttacaggtgtcgttgattacgagagattcaaggacgtagatttagttattgaggaaagtaacacatctaactgctatctagctatatatttcatagagcaatattggatggcagttgtagagaatgtgaaggtgaagcagcaagtgtttgctgacttggagcggtactgtccttcccattgtgtacttgccactaacacttctaccattgatcttgacctgattggagagaagacaaactcccaagatcgcattgccggtgcgcacttttttagtccagctcatgtgatgccacttctggaaatagtccgctccaatcatacctcaccacaagtagttgttgatttgctggatgtggggaagaagatcaagaagacaccagtagtggttgggaattgtaccggctttgcggttaaccggatgttctctccctatactagtatagcgctcttgcttgttgatcgtggaatggatgtttacaagattgatcaagtttgtaccgaatttgggatgccaatgggtccattcagattgctagacctggttgggtttggagtagctcttgcctctggcatgcagtaccttgagaactcccccgggagtgtcgacaagtcaatgctaattcctctcatgtttgaagacaaaaggacaggcgaagcctctcaaaagggattttacaagtatgagggtaatcggaaggccatccctgatcctgatatcttcaagtatgttgagaagtcaaggagaatggctggaactgtgcctgatcttgagctactgaagcttgacgacaaggaaatagtggagatggtgttcttccctgttatcaacgaggcctgccaggtcctcagtgagggcattgccaacaaagcctcggacctcgacatcgcctcaatcttcggcatgggatttccaccatacaggggtggcatcgtgtactgggccgattccatcggcgcaaagcgcattcacgcaaggctatcagagtgggagatgaagcatggccagttgttcaggccttgctcatacctgtcagaaagggcagcagaaggtgttcctctgagctccaccgcgaagaacaatgccaaggcccggatatcactggacgtgatgacatactacatgcagctcggattcttatacggctgcttaaaaggcctcattgattggtgtatagatcgaaattttctacttgttcaaagatttattgtatcataa

SEQ ID NO: 44853 - DNA, 132 bp, Oryza sativa
  unsure (1)..(132): unsure at all n locations
  Clone ID: PAT_MRT4530_47874C.1
agngaaactagcgtgagcaggcactgctcccaagacacacagcacacgacatggatagttaaaacgaccatatcgttaccaaatacaacaatcaagtacgaatgaatcaagacgacccagccgctttttttt

SEQ ID NO: 44854 - DNA, 482 bp, Oryza sativa
  Clone ID: PAT_MRT4530_47875C.1
gaacaagtagaaaatttcgatctatacaccaatcaatgaggccttttaagcagccgtataagaatccgagctgcatgtagtatgtcatcacgtccagtgatctgaatttttttaacattcatatatgaattctgtgcgtaaattggtctctcttttcatacacatttcgtacggtttctcactatacacactatatactgttattttttagataatacacactgtatactgttattcaatctcctgactctctttgctccacacttcacagcagccagtgaagtctgaaactctgactgaggctgcattattactgttcttcatcaatctcggctggaaaacacatgatggcagtaagatcagactcacatccgggccttggcattgttcttcgcggtggagctcagaggaacaccttctgctgccctttctgacaggtatgagcaaggcctgaacaactggccatgcttcatctcccactc

SEQ ID NO: 44855 - DNA, 1622 bp, Oryza sativa
  Clone ID: PAT_MRT4530_47876C.1
ctcctcaacctgcagcttgagggagagaggagctttggttgcatatgcctcacgacaattaaggctgcatgaaatgaactaccctacccatgatcttgaattagatgcagttgttcatgtcctcatgatacagagacactacttaattggtaacagaagcgaagtgtttggtaacagaagcgaagtgtagactgatcataagagtctgaaatatatctttactcaaacggagctcaacctcagataaaaaagatggcttgaattaatcaaggattatgatgtcggaatacattatcatcccagaaaagcaaatgttgttgctgatgcactaagttggaaggtgcactgtaatgttcttttgacctcgccccatcatccagagttgtgtaaagaattagaaaggctaagaataaacatggttaagctaggaactttagcaaccccagtggttcaaccgactctagaggatcaaacccgtgaagcccaagaaggcgatctagaaattatgaatatcagggaattgataaagaaagacaaagcctcagaatactctgtggatgacaaaggaattgtttggtttggaaagcgtatttgcatgcccactaaaaaggagataagaaatttgatacttcaagaagctcatgagtctgcttattctatccatccaggaagtaccaatatgtaccaggatatcaagagtcattttcggtggtccggaatgaagcaagatattgctgaatatgttgccctttgtgatatattccaaagagtaaaagctaaacatcaaaagccagcagggttattacaaccgttaaaaattctgcaatggaagttgaaagaaataggaatggacttcagaacaggatttccaaagacatcttcgtgttacacttccatttgggtaatagtggatcgactaactaaggttgcccactttatccctgtgatgactacatattctggcaagaaattagcagagttatatatgacaagagtgatgtgccgacatggtgtccccagaagattgtgttagatagaggtacacagtttagctcccatatctagaagaagttacatgagccataggcaccaatctcaacttcagtatagcttaccaccctcagactgatggacagacagaaagagtgaatcaggttctagaagttatgttgagagcttgtgcattagattttgctggcactttggatttatgcctaccctatgcagagttctccaataacaacaaccatcaagcaagcatacagatggcccccaacaaagccttgtatgggcgtaagtgtcgaacgccgctctgttagatggacatcggagaaaagacaatttttggaccagatattctgaaggaagcagaagaaccagtgaaagtaatcagggaacgtttgagagcagcccagtctagacagaaaaattatgcagacaatcgtcgaagagacttggagtttaaagttggagatcatgtgtatctaagagtgtcacccctacgtggaatgaaaagatttggaatagcaggaaagttggcaccacgtttcatcggaccctatcctatttcttcacaccatggagaagttgcctatcggttagagttacctgcagaactcgcc

SEQ ID NO: 44856 - DNA, 567 bp, Oryza sativa
  Clone ID: PAT_MRT4530_47877C.1
tttctctcctttcacttcttctctcctctccgctgtggtttcttgctggttcttggaggcctccacttggttaaatgatgggtgtaggtggtggtcttggtatggaagctactaactgtggtgctttgctcagggagcttcagcaaatctgggcagaggtaggagaaagtgaaggtgagaagaacaaggttctgtcagagatcgagagggaatgcttggaagtgtaccgcaggaaggtggacgatgccaatcggaccagggtccagctgcaccagtctgtggccaccaaagaagctgaagttgcatccttggttgccactctaggggagcataagctatatctgaagaaagacaagagtgttgttccactcaaagaacaacttgcggcagtcgttccagtacttgagaacttaaaaggcaagaaagaggagaggctcaagcagctttctgacattcaatctcagatcgagacaatccgctcggagttaagtgaatatagcgatggcgatgataaagcagatagtctcatcgtcgatgaaaatgattatcaacaagaagcttacatta

SEQ ID NO: 44857 - DNA, 2477 bp, Oryza sativa
  Clone ID: PAT_MRT4530_47878C.1
tgtttgctcctaaattcccatgctctctcatccttctcttccattcccagctccctccacagctttcttcacctgtgataccttcaagtagcacaaaacaacaaaaaggaagcagagctagcttaaattttccaaaatcactaggaaaagagcttctttggtccctaggttgctggcattttggtgcctacttttttgctcgctgttgccgccttctctaatcccaagaggggagaaatggagtagaaggctaaaataattcagatgcagctttgctcatggcttcctcaggcagttagggcctaggggtggagaagcctgaagctttgcctgattgcctccccaatcttcttgcctcctctcctttcacttcttctctcctctccgctgtggtttcttgctggttcttggaggcctccacttggttaaatgatgggtgtaggtggtggtcttggtatggaagctactaactgtggtgctttgctcagggagcttcagcaaatctgggcagaggtaggagaaagtgaaggtgagaagaacaaggttctgtcagagatcgagagggaatgcttggaagtgtaccgcaggaaggtggacgatgccaatcggaccagggtccagctgcaccagtctgtggccaccaaagaagctgaagttgcatccttggttgccactctaggggagcataagctatatctgaagagtttcttggttcttgtgtccaagccggctaaagacaagagtgttgttccactcaaagaacaacttgcggcagtcgttccagtacttgagaacttaaaaggcaagaaagaggagaggctcaagcagttttctgacattcaatctcagatcgagaaaatccgctcggagttaagtgaatatagcgatggcgatgataaagcaaatagtctcatcgtcgatgaaaatgatttatcaacaaggaagcttaacaattaccaagcacagcttcacgcccttcagaaagaaaagtctgatcgccttcacaaagttctggagtatgtgaatgaagtgcattgtttgtgtggagtccttggaattgattttgggaagactgtaaatgggattcatcccagtttacatcagaatggtcttgagcaatccacaaacatcagcaacagcacactggaaggccttgctaatacaatatcaaatctaaaagcagaacagagatctagaatcgataagatgggtgctgaggttgagaggttaacaaaacttaaagctagaagattgaaagaaattttcatgaagaaaaggtcagagttagaagagatatgcagatctgcacacatagaacctgatgccagtacagcccctgagcaaactaatgaaatgattgactctggcatgattgacccttctgagcttctggcaaagcttgaatcgcaaatattaaaagcaaaagaagaatcccttagcagaaaagatatcatggacaggataaataaatggatttctgcttgtgatgaagaagcttggctcgaagaatacaaccaggactcaaagaggtacagtgctggaaggggtgctcacataaaccttagaagggcagagaaggcacggattttagtcaccaaaatcccagctatggtagataacctgataaatcgaacatttgcttgggaaaatgcaagaaacaagcccttcctctatgatggggggcgtctaatatctgttctagaagaattcagactaaacagagagcagaaggaggaggaaaagaggcgataccgggaccagaagaagttggagagcatcctactcaaagagaaagaagctatttttggatctaaaggaagcccaaaaagggcagtcagcttaaatagaaggacaaatgggtaccgttcaagtggaactaccagtggactaatgactccaaatccccggagatcatctcttggtggtgctactcctgagcttttgacacccagatcgtgttctggtcactataatagatactttagtgattcaaggaggctatcagctactcaattgaacttcggtgacgactcgctatccactttcacatccattagtggttctgaaccagaatccccttctttgggataaattcagtaccttttctggtcaatttattggtcttattgccaagtaatcacctgttaatggagcactattctatgagtttctcgcatttgtatgtacattactgatgtattgtatttagcttgtctgctggtattgacttgtaagcactggaatggttgacttggtttgggtttggagttgatgttttgagttgagggctttgtagattgacggttaggtgaaagatacaggaagtggttttggttgggggtcagtcacctgtataatatatttatgtgattggcttgtctaattatatacttatgtgttgcaaccatgcacaactagcttgaaacctatctacagattctactttgcagcctcgaggctggtgcgctccctactca

SEQ ID NO: 44858 - DNA, 321 bp, Oryza sativa
  Clone ID: PAT_MRT4530_4787C.1
atggtcaggagaacaaagaaaaatatgctcggtgcttcgatgctggatgttgtgcctgccttgggcggtggtggccctgataacctggccggttggcctccgcctcttaagactagcgatggaggtgctgcgcctgtgtggatgtgcacccatcagcgggaacttaggccggccatctcacggaggaggcctgtgccgccgggcgcggcggtgatgcagctgcacgcctgcacccggcatgtggcggcgacatcgctagggcgcatgatgcaacagtgcccgacggacggcggttctgtgcaacaacggcgaacagtgtag

SEQ ID NO: 44859 - DNA, 672 bp, Oryza sativa
  Clone ID: PAT_MRT4530_47880C.1
ctactctaagaggcccgccataaaaaattgggttttcgctcgccgccgccttcccctcgccgcaccgcccctgcacctcctgtcctccagcctctcctcctccttctcctccaccacctcctcctcctgtcggcgtaggaaacacagcggattagcgacggtgactacggcgaccgggaggggccgggaggggtgccgtgatccacggccgggaagggcacgggcgcaggtgcaggcgtggcggatccggccaccgcagagccgcgggcggcggatccggccgccggaggaccgcgggcggcggatccggccgccggagggccgcggggagcggatccgggcgcgggcggcggcgcgcggctgatccgggcacgggcggccgctctcggacgccggcggcggtgcgcggcggatccaggcgcgggcggcggctatcaggcgctggcggggaggcatttctgcagcgggctgcggtggaggctgcggcggggctctgtgcagcggcggtggaggccggcggggctcggcagcggcgtcgtcgaggcggaggcagtggaggcttgaatgcttgaatttttttatgcttgaatgcttgggggaatagaaatttttgaacgcgatcttcaggaaggcaaagtggtgcccaccggccaccgtccacttcagcaccat

SEQ ID NO: 44860 - DNA, 1114 bp, Oryza sativa
  Clone ID: PAT_MRT4530_47881C.1
atggccacggcggatccggtggtggggagggcggcggcggcggcgtatccggaggtgggctcaggcgacggcggcgaatccggcggtggcggtggtgaaggcggggagggcggggatggctcggtggcagcggtgaatccggaggcgggctcgggtgacggcgacagatccagtggtggggagggcggcggcagtgaatccggaggcgggctcgggcgacagcgttattggaattctagattatcaacagaaagacagaggcttgttgaccatgttttcaaaaattctgatgttgtttgtgatgtgttctctggtgttggtccaatagcaatatcagctgcaagaaaggtcaaatatgtctatgcgaatgacctaaaccccactgcagtggagtaccttgccaggagcattgttcttaacaagctcgagagaaaaatcgaggtttttaacatggacgctagaaggtttatcagttcaatatactcaagccaacatgtgcatccagtcacacaagtagtaatgaatttgcccaatgatgctgcagaatttttagatgtgttcagaggaatctcatggaaccaccatttggctgtgccttcttgtgtaatgccaaatatacacgtgtatggattctccaaagcagaagatcctgaatatgacttccatgagaggataaatttgacgctgggtgagaacgtgtccgatgttgaaatgcatagagtgcggctcgttgctcctggaaaatggatgctttgtgcatcatttacccttccagtatctgtggcgtttgcaaagccaaattacattgcatgttaagaggggcctataacaaatttatcatcttgtatattctttagtgggtgaatgaaaataaaagtagtgtttatgcatcagctgaagttagaattgatcgtcttggcctactacatgcatgatgatacatcattcgtgatcatcatatatctaaattgaaggtcgttcgtttgtagaaattgcttcaataatccaaaaggattttacgatgagaaagtataaaaaaaaagctatgggtgaagcgccagggacatttaactatttgtcatctatgtgttaatgacatatagctccgcgtggt

SEQ ID NO: 44861 - DNA, 235 bp, Oryza sativa
  Clone ID: PAT_MRT4530_47882C.1
atcgaacgagaccgtatgctccaaagagattcaacgtctkctcaacaatcaaatgraacagactgcgataggtgtcaacgagagatrmctctcgcttgctagagcayagacctacttacttgtacyacaaccaactatgatcagttgtcaaagatatggcgacaatatgwgargkatgtgcttacatkgcgttccaaggcaatcccttaactctatggtgggtgacgttgcggga

SEQ ID NO: 44862 - DNA, 201 bp, Oryza sativa
  Clone ID: PAT_MRT4530_47883C.1
atgacgtcgctcgacttcgagacatctatcttcaacaaggagaaggtcttcctcgccggccacgaggaggaggggcctgcacaagcccagaacctgagggattcactagctgaagcgaagtcagacattgttctacataagaattttgcagaccgaggcttggccaccgaggcgcaagcgcagatggagcagttcgagtag

SEQ ID NO: 44863 - DNA, 711 bp, Oryza sativa
  Clone ID: PAT_MRT4530_47884C.1
tatgaagcgtgcactcaccaccactttgccattttggccattttgtgcattttcaattgcattttcgctggaatgtggcttgatgggaccaaattgcccttgctcaccggatggcggcggtggcaatgacggtgacgtgggcatggcgatgccgcagcgaagggagatgcacggcctccacgccaccgccgacgaagaagctgacgacggcgacgtgccgatgtcgatggccgggatgctcaacgaggcagagacgaggtcgtcgaggtggaggacccggcggcgcttgtagatgaagcggcggcggcggcatcctcgaggtcgggcgggtggaggacccgacagtgcttgtagacgaagccgtcgcagttgcagatctcccgctcctcgtcgttgtcgctgccggtggtggagaatgtccattttcttcctcccccaaccctcctcctctccctccgccccctccgcctccctcaccggcggcgcttgccccctctacctctccctctcgccttcctcccgcggtggatttggcggcggtggtgacggtggcggctgcgggcggatccggccggatccgggccgcggcgggtaccagcagccgcagcaagcagatggtggcgcacggtagggagaagaagaagaggaggaggaggaggaggaggaggaggagaagtggtggagaggatgaggcgaaggggcggccggctg

SEQ ID NO: 44864 - DNA, 703 bp, Oryza sativa
  Clone ID: PAT_MRT4530_47885C.1
catgggcaacacggcgctcaacgtcgcgacagccacggcggccgccggaccaaccgcatggagcagccagaaatacaggccggggtttgcgacgaacgcccagcgaagcatcatcaggccgccgccgcccggagcgatcatcatggcaccggcgccggcagcgcccgccgccgtgaagagggcggcaatgaacagcccaacggctaccgccaccgcaccgacggcaatggccaccctggcccagaacgggatctcgatgcccagcatcctctccaagaaccggaagccgcgggcaagagccttcctgacgctggtggagaagatggcggccgaggccttcttgatagccttggaggccttcctagccttttccaacaactccgcggcggcggccatggccgccttcccggcgctctcgcaagccgccggcagagcgctcgtggcgtcagccgcggccttgttagcgttgtcgaagaagtccgaggcggccttgccggcagagcggcacgtcgctgaaacggtggtcgcaacatcgatcgcggcggccatggtcgccttgcccgccgtctggcatgtcgccgagaaagcagcactcgcggcggcacccatgtgtgctgctaattcgcacgcacgcacacctatccctcgacaccttggagcaattactccagtttgctatacgtttgtgttggacagaatttag

SEQ ID NO: 44865 - DNA, 450 bp, Oryza sativa
  Clone ID: PAT_MRT4530_47886C.1
atggaggaggtggcgagcgaacgcatggcggcggtggcaatgacggtgacgtgggcatggcgatgccgcagcgaagggagatgcacggcctccacgccaccgccgacgaagaagctgacgacggcgacggccgggatgccgaacccccacccccaccagcgtgccgatgtcgatggccgggatgctcaacgaggcagagacgaggtcgtcgaggtggaggacccggcggcgcttgtagatgaagcggcggcggcggcatcctcgaggaaagggaaggcgacggcggtggaggaggaggaggtgaacgggttcttcgtggaggaggaggtgggggcggtgtcgaacgcgtcgtcgatcggggtggcatcgtcggacagctcgacgggagaactcgtcatcggagaaggaggggcattctcgtctcttcaagccactttccagagaaaatga

SEQ ID NO: 44866 - DNA, 146 bp, Oryza sativa
  unsure (1)..(146): unsure at all n locations
  Clone ID: PAT_MRT4530_47887C.1
cgccgactcccgacctngacgacggcgacgaccgacgacgaggtgcgggtgaatttgctggaggagtgattggttggccatgtcaaccgctgngaaagcgttcctgaacagcgccgtgggccccaagaccacccatttctgggggc

SEQ ID NO: 44867 - DNA, 539 bp, Oryza sativa
  Clone ID: PAT_MRT4530_47888C.1
taacgtacctataacttcattaatcagttgaaattattcatagaggttattaactatagagaacaacatgccaactataagcattactactaatataccaaaatacaaaattccatcaacatttttagctgatacatcaaaattagtcagccaagtactccaaacaccagaactatatattgctgtgagagtcaaggctggacaacagatgaattggtgtaatgatgaatcaccgtgtggactagggaacttaaccggaactggaaactttggaattgatgaaaataagcagtatgcttcaattatatacgacttcattgaaaaaaaacttggcataccgcaagacaaattttatttatcatttgtggaacaaaaaccaagcgatattggagtccgaggtacgactttggaagatattattcaatagattatcagatattcaatgattatgtgacaataaaataattgttttttttttttttaagtcttaaatctattatgtaataatattattataatactaataaataattcatttt

SEQ ID NO: 44868 - DNA, 471 bp, Oryza sativa
  Clone ID: PAT_MRT4530_47889C.1
ttttttttttttttttttttttttttttttttttttttttttttttttttttttttttttttttttttttttttttttttttttttggaaccgggaacaaaaaaccatttccaaattaggggaaaaacccacaaattcaccataaattacaaaactgaaccctttccggggggggggccatttttttttttaacaaaacgggaacaaatatttggccagttcattggaaaaaatggggggaacataaaaaccaacccaccttttttccagtaaagcaccaccctatttcaacagttctaggggcccaaaattaacaaatgaccaacccccacggttttttacaaaaaaacattttcccgcaaaacaaaatatggctaacatgtggaggaagtacccctacccctttagcttaaaaccccaaagggtaaaaggatcaaagggccaccctttccgggttggtattccaacggg

SEQ ID NO: 44869 - DNA, 930 bp, Oryza sativa
  Clone ID: PAT_MRT4530_4788C.1
ttaattacgctcgccgaccgaagcggcgttaccgtatctccgggcgagacaaatctgctcacccagattcgcgcgctgctcaagtggtgtggcagtcttgaagagaccgcccatgactgacggccaagacaccgttaccgatatgcgtagtttgagaccgttgggtttctgctcaatcacggagaccggtcccactgtcggtgatatgggaccgggggtattgcgcccggaggcttgaggcagatggaatcgcccacgtggcctggcaccttcggggacgtcgggcccgagggtgaggtatccgccctcctcctgatttccccgagggggggtcgggttgctcctgccccggccccgagggccaaggtgccccgaccccttgtggggtttgcatggcggtctgacgcacgcctcgccccatcccgtcaagacgagagcctctaggcactcgtcctcagctggagctagcgtgttacatcccggagatggcacgttagccccgatcgatatatgccaggcttcatcgcttcccagcggcccgaacctgtatacatcgtccgtgtctcgtgtttcttcctggcacgcgatctttccacacacagcgagagcttgagatctcaccctaagcccccggccgaaccggcaaaggggggcctgcgcggtctcccggtgaggagccacgagctccgtcaacctccctcctagttcgaatctaatatcatcgagggctggagggggtgggaccctggccggcgcgggcttgccggggggatgggggccgggggggggactcgggagcccccggccgggacccctatggaaaccgccctcggctctgggcacgggcccccccgggggggcgggcctcattgggggggcccggggggcctgcgggaaaatggggcgcagcagggggacgcgggggccacc

SEQ ID NO: 44870 - DNA, 330 bp, Oryza sativa
  Clone ID: PAT_MRT4530_47890C.1
atgtgggggaggaaacacgaggtgaggactgcgcatcgacaggagatcgtcagccgtggcaatgagatcgatggcgacaacgaggactttgtggaggtgacgtcctcgctcgcgatcagaccggcgatggcggaacgtgactggaagacggggcagggagtggccaaaggcgttcggagagatcggagggacggcgcccaatgcacgcggcgatcacagatccgcggaggcagggaggccagtgacggaagggcgaagccggcgagcatgtggcgcagcgcggcagacgtgcagggccgaggacgatgtgatcgtggatggtggacatga

SEQ ID NO: 44871 - DNA, 423 bp, Oryza sativa
  Clone ID: PAT_MRT4530_47891C.1
atggtggacaacggcgacgacaacgacgcggctgccatccatgcgcgcatcctctcctatgcgaggcggcgttgcagccgccgacctccgctcgccgcgccccgcctactccgctcgcagcgacagccggcgccactccctcctacctccgcccccatcccaatgcccgacgagccgccttcaggctgctgccgcgccgacgccgccctctgcgccgcctccgccgcgcgccgccccaccgcgcagctcctcgccgccggcctccgctcgccgcgaccgccggccagccgccgtcctccgctcgccgcgacagccggcgccacaccctcctacctctgctcccatccccgacgccgacgagccgtcttcaggccgcggccgcggccgcgccggccggcgcccggctgggcacggttgtgctga

SEQ ID NO: 44872 - DNA, 1205 bp, Oryza sativa
  Clone ID: PAT_MRT4530_47892C.1
ttaaaaatgatactatgtgcctatgagaagttatccggcttaaagattaatttccataagagcgaaatgttttgttatggcaaggctaaagaaagggaagacatatatgaaagcttgtttggatgcaaaatgggatcttatccatttagatatttgggcctcccaatgcattacagaagattggccaattaagattggaaggaactagaggatagaatccaaaagaaactcagtagttggaaagggaagttgctatcgaccggaggaagattaattcttattaactccgtgttgagtagtttagcaatgtatatgctttcattctttgagatccctaaaggtatccttaaaaaactggactattataggtccagattcttttagcaatgtgacgagcataaaaagaaatacagattagccaaatggagtgtgctttgcagacctaagagcagcgggggcctagggattcaaaacttagaaatccaaaataggtgtatgttaagtacatggttatttaaactaatcaatgaggatggactgtggcaaaatatgcttaggaggaagtatctggcaaaaaaaaaaccattatgcaagtacaaaaacatccaggagattctcatttttgggctagtcttatgacagctaaagaatcctttcaatcacttggttattttaaaacgtgtgatggcaaacaagtacgattttgggaggattgttggataggaagtcaacctcttgagaaagaataccctaatctgtataatttggttaggaataagaatgcagtagtggcagaggttttgggaagaactccgttgaaggtggcctttagaagagcaataactggaagaaatttgcaagattggtataatttagtttccaaagcagtgaatgtcactatgtctgatcaaaaggatcaatttatttggaaagcaaacaaggatgagctctttatggttaactccatgtacaaggtgcttatgtataatggagtgatacctagaaagactttgatttggaagctcagaattccactgaaattaaaatattcttgtggtatcttaaagaaggggttattctaacaaaggataacctagctaagagaagatggagaggtagtctaagttgctgcttttgtaactctaaagagtcgatgcaccatcttttctttgactgtctcatggcaaggtacatttggagtgcat

SEQ ID NO: 44873 - DNA, 449 bp, Oryza sativa
  Clone ID: PAT_MRT4530_47893C.1
cacgaaaaggggaacaaaacattgaacctataaaacaaaagagtgattaatgacatcattgcatgaagtcaacttataatgaaagcttcataatcatatttgtgaaaacaaaaaaattcaatccaaaaggatcgatcttctaaaattccaataacatgcagtgcaaggcaaaaaaaaaaatcaaagcaagaatattactttagagggaaagaaatattaactgtcccaactacaaccattggagcatatggcaggacctatctagaatggtttgaactaagaagaggtttcaacgaattgaatgtcacatgccataatatactgaagtagaacttcatttgcaaagcacaagagaaccacgcagtatagctagagatatggaggcatgatcaattgaggtataacatatactcttgatgtgaacactgataagaaattcaataaatcat

SEQ ID NO: 44874 - DNA, 1510 bp, Oryza sativa
  unsure (1)..(1510): unsure at all n locations
  Clone ID: PAT_MRT4530_47894C.1
atggggaggcttccactcctcctcctcctcgccgccgccgccgtctccaccgccggcggcgcgccggtgtaccgggctgactacctggtggacggcaaccagctggtggacatgcagtaccacatgggccccgtcgtgtcggggtcgccgacgaacctctacctcatctggtacggccggtgggaggccgcggcgcaggcggtgctccgagacttcctcgcctcgctctcggccccggcggcgccgtccccggcggtgtccgactggtgggcgcgcgcgccgcggctgtacgcggaccagacgggcgcccacgtgacgggcgcgttcgccgtcgccggcgagcgctccgacgccgggtactcgcacggcgcgtcgctgcggcggatcgacatgcagtccgtcatccgctccgccgtgtacgcctacccggacccgctcccgctcgacccctacagcggcgtctacctggtgctcacctcgccggacgtccaggtggaggagttctgccgcgccgtctgcggcttccactacttcaccttcgcctccgtcgtcggcgtcaccgtgccgtacgcgtgggtcgggaacagcgccacgcagtgcccgggcaagtgcgcgtacccgttcgccgcgccggactacggcggcggcgccggtgggcagcaggtgctgcggccgccgaacggcgacgtcggggtggacgggatggtgatcgtgctcgggcacgagctggcggagctggcgacgaacccgctggtgaacgcgtggtacgccggagacacgcccacggcgccgacggagatcgccgacctctgcctcggcgtgtacggcgacggcggcggcgcgggcgggctcgtcgggaacgtgtcgcgcgccgccgacggcgcctcctacaacgtcaacggcgtcaacggccggcggttcatggtgcagtggctctggaaccccgtccgcggcgcgtgctacggccccaactccagcagctgaccgccgccgccatggccgccgggattcttgcgaggatggatcactcgatgccattgcgcctaatggctagtagaaacggaagactccatgggcgggttcagagctcgacaccttgaaacgtccgaccaatttgatctgatcccttcttgatcagagattccgggtgggttttggtcatatccggaagaaatactttgggttctgaatctgatcgatcttgacgagggggaagcttgctttctgttcatttaaattattttattggccgataaatgttaacgatgaggggattagatgcgttctgcaatgccaccttgaataaaataaaaaaaaaactacaggagcgtgcgagcgatgtgttaatgtagacagacacctgtgggtggcgggtcgatacngtctgtgtaatgttgttgcgccgtcatgcctgctataacgtcggagngaaacctgnttacacggttgggttgaggcttcgcgtcctgtgatgaggataactcgtgcgtctccctcacttgttgtaggc

SEQ ID NO: 44875 - DNA, 254 bp, Oryza sativa
  unsure (1)..(254): unsure at all n locations
  Clone ID: PAT_MRT4530_47895C.1
ttgccctgcttttagagatnnccgctngtagttttttggaananaccgggatactnggnccttgcncgttgtaanaanttttgncatncgnaaaaacncctnancncgtnggcctgtctagntgggttgtnanncntgncttggttgcattggcncctttttcttgcgatacancgcgcnaantggncgtgntattgtgntattttttttccccctgttcaaaaaaaaaaaaaaaaaaaaaaaaaaaaaaaaaa

SEQ ID NO: 44876 - DNA, 415 bp, Oryza sativa
  Clone ID: PAT_MRT4530_47896C.1
catacactgtcctctcaggccgggctcacttacatctggtagctttcgtaggtcatagactgccctcacagaccaacacaaatcttttctgcacactttgtcctcactcgtgtgcatgcacttccgggttggtcacccatccctaaattgcttcaggccaagcacacttaacctcggagttctttagagattggcttccggaaaagaaattgcaacttgttgatacgagtattctattaatcatattaagccctggaccgggatgttggttgtctgtggattactgtttgtttctttccttggaagcacaatttgttagctgtgttatgctactgtcaatccgctactaatgctgtaattagacatatttgatctactaaccaactatttattttagctatgcgctgtgtatatc

SEQ ID NO: 44877 - DNA, 900 bp, Oryza sativa
  Clone ID: PAT_MRT4530_47897C.1
acaccaatacaaatatctcacatatatttcagaaaaaaaacaacaaacatatatctcacgtacaaacaaagctcctcgtcttcaagagcgaagcctgagttattcacacgatgcatatatatgtatatatagcacaaactaattaacggcaaatactccatccgtttcacaatgtaagtcattttagcattttcaacattcatattgatattaatgaatttagacatatatatctatctagttttattaacattaatatgaatgtgaaaaaaatactaaaatgacttacattgtaaaacagaggaattagcatacatagcgagaatctgtaccgtaaaccacgcagcaacacgtacgtatatgtgtgtgttcttaacacacatgtataataaacttaatcatgtactacgtccatttcatcttaattaaaagactttttagcatggttaatatttatatatatgctaatgaatttagacacatatatatatatctagattcattaacatatatatgaatataggcaatactataaagttttataatatgaaacggagcaagtagcttattatcgatcgctaattaaatccgccgtagggacatctaccggctcatccgcgcgccgctccggagtgaccggggccggggcttggaccggggttcgtgttaaccctgccgaggtagctgtcgccggtcggcggcgagaccaccacccgcaccagcagcctgcgcacggcgccggcggctgtggtcgttgcggcgccgcccctcgccgccgcgcaatgaacgaccatcgccggcagagcgtgcccggcggcaaggaggacggcgatggcgatcgcggcgaaggttgttgttgaagctgaccacttggcccccacgcgtccgcccacgcgtcaa

SEQ ID NO: 44878 - DNA, 1663 bp, Oryza sativa
  Clone ID: PAT_MRT4530_47898C.1
ccggccgggctcggaggctcggacgcgccgccgccggttgcccggtctcctcgccggccggcggatccggtgaagctacggattagtgagtggtaggagcagcagcggccatggacgggagccgccaggagatgccgccgccaacggagctgagcgctctcggccacagggaagttgctgctgcagaaaggccctttaagaaaacctgccactcatcagtgcctacatcttctaccttgtgtgaaccccatgtttggccaggtctcctggaaagcctccttcaccaaatcattgctttgcttagctcattccaggacttgcttgcttttagtgccacctgccactcttggcgagctgcgctatcttcctttccatccgtatatactttcaacttcccacctctctgcctcaaactaaatacacctaatatccgtccccttcgcgtccttttgaaggacaatcttttatcttactgcaaatggcagcttgatgatccatccaagagaaacatatcccttcgttgttcagctccgccagatgctccaaatcgcatgcgctatttgggctgctcatatggatatctcatcttctcctatcatgagaagaactgcctctttgttgatgcttacactagcactaagctgaagtctcccaaactcaacttcatgggcgacagggatatctactacggcatccttacggctccacttaattcacccaactcacatctgatactttgttcgaggtcttccatattctattggcaggttggaacaaactcttggacaaagcacggttatggcggtgagcacattcttcagattgtgctcttcaaaggtgagatttttgcgatggatgttcttggcaggcttcacaccatgcaatttgcacctgagctcagcatacaggaagtagcggttctgcgacgagaagaaatggttacaggcccacgttctgggccatggctggtggcctgtggtgaaatgcttctcatggttgatttgtcaacagaccgcgaccaattgcctcgcacctttcaagtctttcgtcttgagttttctgctgaaacagttgagtgtgtgaagatggaaaggttggaaaatcaggctctctttgtcaaccttgatgggagggaccctacattctcttgcacgagccctgaaagatggggcggaaagagtaactggatttatgttgcgaaaccatctggagattctggtgaaccttggactgcggtcgagctcggtcagccagttcctagtagaatagaccgcgtcccagactttcaagtagacaacatgtgggtggtacccagtttgatttatgatgtcaaccaatgaatccactcctgcgaactgaaggccattgcagtcaactagagtacctctgggtgctccccagttttattaatggtgttgaccagtgatctatcatctttgttttgtcatcatgttttagccatcattgcaaagccctttccttactgcttgttagatttaataggttatgtacctgtaatggcttcttgacctggcatatatggattcttgtacatcgaagttgtattgtcgtgcagtttccatgcttagttcttgcttcgcttgtacgcatagttggcttgtgttctgtgaccttgtgaatgcaggcttacgattttctcttc

SEQ ID NO: 44879 - DNA, 348 bp, Oryza sativa
  Clone ID: PAT_MRT4530_47899C.1
atggtggtggctatcgactacggcctccccgtcccacggaccccgacaaacgacagcggcaaggcaaacaagaaggaaggcgaggcccggggcagcaaggagaggggaaggcaacgccgtgctcccagggcctccctgctctcttcccctccgccgttgccgccacggcgattggccggagcggccttgctggcccaaacgctcgtcaccgtcgacaacctcgtgcggctaacctccaacttgccgcgagcaacactcgcatcggtccggtccccgcttcgcaagccccaaagctcggcggccaccgatttttctccccccaccgtctccatgcacgctcacacatga

SEQ ID NO: 44880 - DNA, 1781 bp, Oryza sativa
  Clone ID: PAT_MRT4530_4789C.1
atggaggatgaaccgctgccggctgccctcgtcgccttctcgccggccccggtcgtcgtcgtcgtcgtcgtcctctcgtcgtcctcatcgtcgtggcgttcgtccctccgtcaagccgttctcgttcgtcgtcctcgcttcgtcaagtgctgcagccccgtcgtcgtcttcgtcctcggctccgcgtcgtcaagcctcgtgccggccgcgtctcgccttcgtccaaggatcgccgccgaagccgtcccctcgccgttcgtctccgttgtgcccgtctgtctccaccgcgcccgttcgtcgttgtcgttcccacgcctcgtcgcgtggtgggcaaatgaaggctacacgagctgcggcccggtagtcgagatgtcatggcacaggggctggtgtcctgctgctagggggctcaatcctgcctgcctgtcccgggggttccggccgtaggtggggttgggtcggtactcttgtttatggctaggatgggttgggaactatgtcacgtcttccgtccgtataccgtggtgatgtttaacagagaaaaaggaaagaatgtcagagggtatgcctccagtaactcaagttttcaactcaatccaccactggcctcaagagagttaaccagggcacacccttggtccattccaagcatgctgcttagttcccagctaccattggttggaagtcaagaccaaaatcagtatgtgtttgatcgagcatttgccacccagatcaatgagcttccaatgccagaagagcatgtccccttttgtcatgattgtagagaataaggacactatgccttgaattgtccatgggtatatgccaaagaagccccttcctttggtttaacagggcagacatcgctaaaccagcctcctcgcaccaagtcaagcttgcagcctagtgtgcaaagtagagagcccaatggagagaatccattgaatcccgggaattgctttcctcctagcctttcgtaccacgtggggtcacgtactaagcaagccaaaggcaagaagagtaagaatcagaagagaaaagcaccgatgcgaactgaagaagaagtacgtaagatgactattaccagcaccgaatggcctccagcagggataactattcctagacgtcaaagaggaaataccttccgaggtgcacgacagttgacccagcacctcctaagccatggtggcagagtatctgatagtgaagggtcagatcaagtctcctcggatgttgaagatgagtctccccgacatctcggcgaggaagagatggaatcaaaggcatgcacccgttgtggagaaattggacacattgctagcaggtgtctcacactctgccctcattgtgaagaagaccatccaccaggtgaatgtcccacccgcaaggtcacatgttttctgtgcgaaggtaccaaccatgtgcccaaggattgccaactcagtgtgttgttgaccaagaccgcagaaatccaacgaacaaccctacgattgtctcatcagctagtcagctccaacagcaacctcgacgatatcatccacagcaccaatgctcctcctgctgcacctgactctgcagtaaatcatagcaataataccttcaacaccaaccattctctgcaccgacggcctcagcaaagaattgtcgtcgatggaagaagttgtgtctctccccgacctactccaggccgagcgaagggcaatcaatctcaggagtgcgataccaagcagaagaccgttatctgcttcaaatagcaatcagaaggaagcttctcctgtgaa

SEQ ID NO: 44881 - DNA, 407 bp, Oryza sativa
  Clone ID: PAT_MRT4530_478C.1
tcacctgtgccgtttcctctcctttagctctctgtcttcttttcgtctctccccagcttttcctctccaccggagcctctccctggcggctcgccttgccacggccgacgcccagtagctagcggccagcggattcatcggcgacggcaagggcggtggtacggatgccagatccggcaggcttgagcttgagggcctctggatctgccccccccctccccgtgcggcgccctctagtagatccgtggtggcgatggcggtgggctgtagcattccctcaacgtcgtcaagtgcacgggcgacgatttttgaccaatggctcggagtcatttgtcgttgattttgtgtatgttcaccgattttgtgatgtcaatcgatcagtgtggcgatctaaaaaaaaaaaaaaa

SEQ ID NO: 44882 - DNA, 496 bp, Oryza sativa
  Clone ID: PAT_MRT4530_47900C.1
atggccgtcgttggtgaaactagcagtcaccgccgccatgccgagaaggatggttgccgtagccgagccacattcaccctcccctttgtcgcctctactggcctcctcccctcggaggatctgggaaagggaggggagagaaagggaagaggggagagtggagccgccacgtcatcccctcctcattctaccacgtgccgctgccaccgccaccctccttttacgacgcctgtcgccacaaacgttgatctcctccactctaaccaaatctaggagaccgatgggaggggactggagcctctgctatcgcccctccttctccctaccgttgaacgatgcaagacaccaccaatctggggcgctgccaaccacgcctccagccagttgcgaggaaaaggagggatgggaggggatagaacaggaggggacggcagtggagcatccgccaccgcctctcctctctatcgtcaggtgctgcagacctacctccagctag

SEQ ID NO: 44883 - DNA, 1373 bp, Oryza sativa
  Clone ID: PAT_MRT4530_47901C.1
ctactcacatttcttaaggtagaagtagaattccaaactctgctgaattcccttgatgtggagttgaatgagaactccaatagcaatgccttcaagaatgtgaacgacacccgagggtgttgccgttgctagcaccggcaagccgagcaaggctttcacctcggagtccccttcaaccatagcaaccacagcggaagccaccaaatgccaccatctgcacaatgaccggactccaccgagcggcggagcaagactgacggcgccatccgacgaccacacaggctgcccaagcttcattgagtaacctcgacgtcgggcccagccacactcaacaccgactgatgatgtgaccatggctactatagatacaaccgtcgtccacatcaagatcaagccgtccaagttctgcaatctagttcggccacctgctacagtgtcgacttcaaacggccaccaaatatgcatgcgagctccattttaggtccatgagtacttgatggaaagctctcagagtcatctttccaatggatccagcttcatcgccaaattccatcccagtcggccgaaatcacaaaaagaagcgcgcgtgtcggctagaccgtccatctgcttgttcttcggaaccccaacttatcttgtgtattcattcctatttgcaattcagattgcttctatcttgttcttgcttgtttcttcgatttgcttgcaggaataaggttgatctgcaccggcaagatcaacaacccacggagaggtgtatcgatcgctaaggcgcaacacaacgtcttgtacggttgtagtcggatcaccaacgtttctctcaaatcgtagttacctacaactcaccgaaagatcgggccaacaacagccttgagtgtcgagaggaacttagggttcatcaactggttccaggttataagactttccagcattgtccacattcatatagatgttaatgaatctaggcatacatatacgtctagattcattaaaatctatatgaatgtggacaatgttagaaagtcttacactgttaaacggaggaagtaaatactatggaggcatgctcatcagtacataatggatgaaaactttacttcataattaatgcctttcacctttcatatgtccaagaaaatatgccatggcaaacagaagcaaaaaacatataaacacaaatgaatcaaaccgaaggttggaatacctgtcgctgcagttgttcaagcctaagtttctctgcattagccatctcatattcaccattttcaagatgcctttgatcaggcctcagacgagaatcagtaggaggcaacttcttcgccaggttagctgtctattcattagtgcctcgtgccgaattcctgcagcccggg

SEQ ID NO: 44884 - DNA, 876 bp, Oryza sativa
  Clone ID: PAT_MRT4530_47902C.1
cgggtgcaattcccgcacgaagtctgccgtgtgggcgggtgctgtgtcgggccatcgatcaggcactgcagccaagccgccgtcaggcgttagggactcggggccaaacgaccatcgcgtcgaagggctgtggctatttggtcgatcaaaaatagatcgacgagaacgaaacaactttagcctagggggcctcatcttgctgaacgcttccgctcctattttagacctcctccttcgtcttcttctatctattgggcctgctagccagctaattgagtagagtcctaaagtggaggccccttggaatttggggccctgaacaggacggccctgttcactgaaattccgctggacgtgatgtcgggtagctgctggatcaccggtcacgcaaatggcacgacacggtccgactaggacgtccaggcgccgccatcgtttgtacgtgcgtacatggaccacgtactccttcctccaaattccccctttgtcaaggggtgggcaaggcgggagccggcccacggagaggactacccaagcctcggtcactaggggtagtttttccttcactccgaaggtgatgaactccaaaccactcacaaaccggcgccgggcctcctccacaatctcctcggagaggtcaccggacaacacctccacaagccgtctaggaggcggcaaccaacctcggctctggcggctctggattggccaccccagagcaaaccacccagggcacatggccagccagtcagaccagggttcacccgtcggtcggaccgaccgacttatgccagtcagaccgcctctaggggctcggtcataccgaccggcccggatagcgagttgtgtcttagtcacaacagtttttcgatgcat

SEQ ID NO: 44885 - DNA, 597 bp, Oryza sativa
  Clone ID: PAT_MRT4530_47903C.1
atgggggaagagctcgccgggaggccgcggccggccggaggccggacgctggggaggagctcgtcgggaggccagatgcgggggaggtgctcgctgggaggccacggatggccgggcgcaggggaagagctcgcgggaggtcgcgggtcgccggacgcgggggaggggctcgtgcgggcggccggacacgggggaggagctcgctcggacgactacctgttggacccgatcgccatcagcgcgttctacaccgtccagaagggcgtcaccgtcgtctgctccgccagcaactccagcccgcagccgggctcggtcaccaaagtgctccatggatccttacggttgcctcaagggcaacggtacgcgatgatcaacgcgaagaacgccaacgcctcaaacgtaccgagcgataattcgacgttgtgcttccctggctccctggacagcgacaaggtgcacggcaagatagttgtctataccagaggggtgaacgccagagttgagaaggggctggtggtgaagcaagccggcagctgcgacctcagtgcatgcggctgcgagcctgcgaggaagagagcggttgcgagaaagagatag

SEQ ID NO: 44886 - DNA, 1005 bp, Oryza sativa
  Clone ID: PAT_MRT4530_47904C.1
atgccgataccaaacgatgtcgatatgattttgagcaatcggctatatgtccaatgtagtgatgtgaccatggctactatagatacaaccgttgttcacatcaagatcaagccgtccaagttctgcaatccagttcggccacctgctacagtatcgacttcaaacagccgccaaatatgcatgcgagctccattttgggtccatgagtacttgatggaaagctctcggagtcatctttccaatggatccagcttcatcaccaaattccatcccagtcggccgaaatcacaaaaagaagcgcacgtgtcggctagaccgtccatctgcttgttcggaaccccactttatcgtgtatcaattcatctttgtgcgtcttgtctatctagcaattcagattgcttttatcttgtgcttgcttgtttcttcgatttgcttgtaggaataaggttgatttgcaccggcaagatcaacaacccacggagaggtgtatcgatcgctaagacgcaacgcaacgtcttgtacggttgtagtcgggtcgtcaacgtttctcccaaatcgtatttatcatcaactcaccgaaagatcgggccaacaacagccgtgagtgtcgagaggaactcagggttcatcaggtggtatcagagctttcgttgctcgcgtctagttcgtttagagtttcgagttctggtcacgttttgtaccacagtcgtcgctaccaccgtgtctctgttgttgtcgggtcctacgaaaacggaatcggcttgctgccatggttctatttttgtagttttcaaaagtttttatcggtcggttttggtgttgcatgaagggtttgttgtttacccgggtttagtgcttgtgccgtggttctgttttgcccgtgaggaagaagaaggggaaaggaatatagaagatctgcttggattcggttgggtggaaggaaagaaaaaaaaagaaaagaaaagaataggaaagaaaaagaagattagatcaggtggaaatccg

SEQ ID NO: 44887 - DNA, 556 bp, Oryza sativa
  Clone ID: PAT_MRT4530_47905C.1
ggataaaacatgcaatctagagagaaatgttattgctaacaaaattatctcgagtttgtcttgttgtgattggaagaaacaggtagttttaaatggactacacgaagagcaccatatggaaaaaccgaggacggttttccgtgaagaaggggaggatgatgtgaccatggctactatagatacaaccgtcgttcacatcaagatcaagctgtccaagttctgcaatccagttcggccacctgctacagtgtcgacttcaaacggccgccaaatatgcatgcgagctccattttgggtccatgagtacttgatggaaagctctcggagtcatctttccaatggatccagcttcatcgccaaattccatcccagtcgggcgaaatcaaaaaagaaggtgctgcgtcacctataatgggcctatgggcttgtaacttcgtctgggaccccggcccaacgcgcgtgtcggctagaccgtccgtctgcttgttcttcggaaccccaacttatcattcgtatttaactcctatttacaattcagattgcttttatcttgttc

SEQ ID NO: 44888 - DNA, 658 bp, Oryza sativa
  Clone ID: PAT_MRT4530_47906C.1
aggccaaaatatgccaataatgacattatatgacaaaagttcgccgcgcgtgatgtgaccatgactactatagatacaaccgtcgttcacatcaagatcaagccgtccaagttctacaatccagttcggccacctgcaacagaatcgacttcagacggccgccaaatatgcatgcgagctccgttttgggtccatgagtacttgatggaaagctctcggagtcatctttcaaatggatccagcttcatcaccaaattccatcccagtcggccgaaatcacaaaaagaagcgcgcgtgtcggctagaccgtccgtctgcttgttcttcggaaccccaacttatcatttgtattaaattcctatttgcaatatcagattgctttttatcttgttcttgcttgtttcttcgatttgcttgcaggaataaggttgatctgcaccggcaagatcaacaacccacagagaggtgtatcgatcgctaaggcgcaacacaacatctcgtacggttgtagtcggatcgtcaacgtttgtcccaaatcgtagttatcacaactcaccgaaagatcaggccaacaaaagccttgagtgttgagaggaactcagggtccatcagcgcgaatcacgaaatgtgtttttgccacgaacaatcccgatacact

SEQ ID NO: 44889 - DNA, 1016 bp, Oryza sativa
  Clone ID: PAT_MRT4530_47907C.1
atgtaagtctctcatgaccttatctctctcatcctatgtaatcaacttcatgtaatctgaatacctgatgtgacattggctactatagatacaaccgtcgttcacatcaagatcaagccgtacaagttctgcaatccagttcggccacctgctacagtctcgacttcaaacggccgccaaatatgcatgcgagctccattttgggtctatgagtacttgatggaaagctctcggagtcatctttccaatggatccagcttcatcgccaaattccatcccagtcggccgaaatcacaaaaaaaaacgcgcgtgtcggctagaccgtccgtctgcttgttcggaccccactttatcgtgtatcaatttatctttgtgcgtcttgtctatctagcaattcagttgctttatatcttgttcttgcttgttctcgattgcttgcaggaataaggttaatatacaccggcaagatcaataacccacggagaggtgtatcgatcgctaaggcgcaacgcaacgtcttgtacggttgtagtcggatcgtcaacgtttctcccaaatcgtagttatcatcaactcaccgaaagatcgggccaaacaactgccttgagtgtcgagtggaactcagggtctatcaggtggtatcagagctttcgttgctcgcgtctagttcgtttagagtttcgagttctggtcacgttttgtaccacagtcgtcgctggccccgtgtctcagttgtcgtcaggacctacgaaaacggaatcggctcgctgccacggttctattttcgtagttttcagaagtttctgtcggttagtttttgagttcttgagttgcatagcttctgttcggtgctgtgtcgtgatggtgtgtcgtgatggtgcacctgtgatgttgcgtgtgaggaagaaggaaggaggatattagattagatcagtttttggtggcagaaaggtgctaaaaaagagaaaagagaaaagccgcaccgaaaaaaaaagtgtgaaaaaaaagaaaaaaaa

SEQ ID NO: 44890 - DNA, 251 bp, Oryza sativa
  Clone ID: PAT_MRT4530_47908C.1
cctttcccggcggcttctcgggcgtgcccgaaggttggcctaacccgacggtggcaacttcttcgaggcggcagtgaaccaagctcgacggggggtggggactttttcaacaacggcggcgtcttctttgacagtaggctttggaggtatgggcttggcgttggacgggttcttcttgtgtgggcccggcggggagctgtggctggtttccggacttccaaattaagacttcagggttaaggacaagggag

SEQ ID NO: 44891 - DNA, 824 bp, Oryza sativa
  Clone ID: PAT_MRT4530_47909C.1
ttcagacttcttgggactgatggatctgttgaggatgaacggaatatttgccgcactgtgaaagaacagctcgcaactagaggatctaagtcccccaggatttctacttttggactaggctcttattgcaaccactatttcctgaggatgttggcatccattggcaaggggcattatgatgctgcatttgatacaggatcaattgagggtcggatggttcagtggtttcagaaagcttcaagcacaatagtgataaatatttccattgatgccactaagtacattcgagaatttgaagtggattctgaatatattcaagatatttctgcaaaatgcccactatgtgtgtctgggagataccaaggcaagcttccagagacacttactgccaagggttacttggctgacatgagcgaaatatcgattgaattgagggtccaacatgtaaaggatatttctcttgacaaagtgttagcaaagcagcagatggatcttctcacagcaaaagcatggttttatgaaaacaatcaactagagatgaagggggtaaaattaagtatacaaaacagcattccttcggagtacacacgcactatcctacttcaaaacttcgtggaaaaaatgaacatgtgttattttgttgattggtctcgtctgcctgttaagaatgatctgtctttgtttgtcaagcccaatgctatgtacgagttttgttcatgttattattctttggcaaaaaaaaaaaaaaaaaaaaaaaaaaaaaaaaaaaaaaaaaaaaaaaaaagcgacgtcgctcaacggactgacgctcgggttcgtgacac

SEQ ID NO: 44892 - DNA, 848 bp, Oryza sativa
  Clone ID: PAT_MRT4530_4790C.1
aaagtcctcttttggctttgggctgaaagtcggcccaaaatctctcttctctctcctcggcccagccggcccagtccgccgcagccgcgcgcgccctcgctgtcgctgacaggtggggcccacctgtcagtcgtcgtctaccttcggccgccgccgcccgaaaccctagtttcgcgccgccgccgtttcccttccaaatccggccgttcctttccttctccggccgaatcaatagaggggaaacattctccgggatctcctctaccttttctcctttggaatctttggctaaatcgctttggaaagagttggattcgagttcgtctcggatttgttcttcccgagctttccttcgccgttgccgtcgccgtgggccttcgccgccgcctccgagcccctttaaaaggacccccggtgtctcctctacccgtcgccactttcgccttcgcctctcgtcgtcggaaaagccctagcgccgtgtgccctagctttgccgtcgccgccgctgctccagccgtgcgccgccgtcgctccagccgtcgccgtcgctcgggaagaccgtcgtcgtggtcgccaagtcgtcgccgtcctcgtccgccccttcgccgtcgccggagatcgccggagcttcgtcgccgtcgtcaacccgaaggtttccgccgtttcctcctcgtcgccgtcgtcgtccgttgttcttccgccgccgttttggtcaccggtgtgttcgccgcgtcgtcctctacgtgctggtgccctccgtttgcgtcctcgcgccgccgttcgccggcgagcgtgcgccgcccgagccgtccgttccgccgagccgccaccgctgtcggtgatgtcac

SEQ ID NO: 44893 - DNA, 818 bp, Oryza sativa
  Clone ID: PAT_MRT4530_47910C.1
tttatacccgagatacaagatatgtccttgccggacacgacactcatctctaacaaactctaagataccataagtctttgcggcaaacttttgcccaaacatatcaaatttagtcgtcaacaggtagatgagggttcgggctgctcggagcatgggcttgatgagctggcttctttttcttctatcaacgatcgtatacaccgagtcgtcgatagaccgacccaccacccataccacatccgcgtctcgttgcctcctcggtgtaggagcgcacactcgcgtaacgcgcgcgcggagggggattctcttattatgtggacgtgcaacagcgcctccgcgtctcgatcgagagagcagttgattgtcacgagggggcttgtcgatgcgcgctcgttggtcttcgctgattcggtccgcgcgcgcccttcctcctcgcgcggtcgttttccggcgagcgacccccgtttcgcccggaccgacgtgatgccgcacgggttctcgtgtcgactctggcggcgcaatcaggggcctgcagccatgttggcgctgccgatgtctggacggtttgcgactgcctcgagacaacgcgctgacgcggtgtgacggcgaaggattcgccctcacttcaggacgtttcagctgggcctgggccaccaaccgaggtttgcttttagtcctccatttccacgatggcgtgcgtccacgagaacgcgagatgtggacttctccagggcctcggcctacgagagacaaggttgatgtggagaactgaacggcccagaaaagccacatacgtggtgcctacgtggctcacttga

SEQ ID NO: 44894 - DNA, 3108 bp, Oryza sativa
  Clone ID: PAT_MRT4530_47911C.1
atgccggtgtacaggatccgcggcgtcgacgtcgacttcccctacgacgcctacgactgccagatcacatacatggaccgcgtcctcgaatccctccagcaggtaaccccccaatcccctccgattcccccccgtcggcgcggaatcggaaacccttcgattccattcgatttgagtgatgggggcgagctcgccggatcgatccgacaggggaaaaacgcgctgctggagagccccacggggacggggaagacgctgtgcctcctctgctcggcgctcgcgtggcgccgcacctttggggagtttctgcgtggaggcggaggcggcgggggcgggggcgggggcgggggcgggggcgggagccagcagccgccgtatgggagccagccttctgggagccagcactcggggggttcggcgtcgcagtcgtctcggtaccccgtgatcatctacgcctcacggactcacagccagctccggcaggtcatcaaggagctcaaggccaccagttacaggccaaaaatggcagtactgggctcccgcgagcagatgtgcatccacgaggaagtgagcaaactccggggaaggcaacaaaacaacgcctgccactacctctgcaagaaacggtggtgccgccatcacaactctgtcgctgaattcatgaggaacaacagtgagcttgggagtgaggcttgcgacattgaagacttggttaatattgggagaactaagggcccgtgtccatattacatctcccgggaactttccaagtcggttgatattctttttgctccatacaactatcttattgatccaggaaatcgacgttctttaaatggaataccatgggataatgcagtacttatatttgatgaagcacacaacttggagagtatatgtgcagatgctgcatcttttgacttgcttcccaataacctctcttcttgcattgcggaagctcaggaatgcatccaattgtgttcagcaaagaggacctttgaaaattctgctgataaacaatttgaccctgaaaattatgctattctcaaagcccttttaatggcacttgaaaagaaaattagtgaggtggtgattgattccaaggagctgggccatacaaaacctggcaattacatatatgagttcctctctgaactgaatattacttctgaaacatccaaaaagctaattgacacaattgatggtgcttctctattacttgaggaagctctaagtgttaccttagttgaacatattgaatttctgataactattgataattgtttgccggttcatgcaaagcagttgagtgtctgtatttttcctgcacacttaggaaattctgctgaaactggacctgggatgaaggcgaaggctactgtctgtagattggaaacaatcagggacattcttgacataatttttagaggtggtggtcaaagccatgcaaagtattatcgttttcatgtgaatgaatgccaacaaaattctggagatgctcttaaagttttgggtaaggtatcaaggactcttagttggtggtgttttaacccagggcttgctatggaagagtttctcaagttgggtgtgcgctcgattatattaacatctggcactttatctcccttggattcacttgccctggaactaaacctggaatttccagttaggctagagaacccacatgtcattgcttcagatcaaatctgggttggagttgtgcctgtaggcccatcaggacatccacttaattcttcttaccggacgcgtgagactctgaaatacaaacaagaattgggtataactattggtaggcagttgagaacacctaacattaatttcgcccgcattgtaccagatggtctgcttgttttctttccgtcatattctatgatggataagtgtatcaactgctggaaagatagggttagtgagggtcttgattttgctgaccgtgctggaagagctgtaatagttactggaatgcccttcgctaccccaactgatcctaaggttcggctcaagcgtgattatttggataagctgggttcagcatctaacaagaactcaaaggctttgacaggggaggaatggtatgtacaacaagcggcaagagctgtcaatcaggctgttggacgtgtcattagacatcgccatgactatggagcaattatttattgtgatgaaaggtttgtttggcaaaattatcaatctcagatgtcatattggctgcgaccttacataaaatgctataaaaagtatggggaagtagtccaagggttaacaagatttttccgagataaagtgtctattgattcttcaaagccaaatgagacagattttaatgataatattgtactgcttgcagacaaacataaacctcaggagactatatctgctttggctgtcaccacagcaaatgagaaccagagaactgcattatctgtgaatccaaccaccaaaagaagtaactatatcaagtttgcccagatcactcctgccaatcgctctaccctttctatgaaacatggctgttcatctacttcgcagctcttatactcaggagacaaactgtctacggatgctcaggttattgatttggctgctgatgtggcaacaagtcatcttgcaggatatagatttaagtccttaggacctaaaaaggctaaagtaatggttggatccaaagatgtttgttttgatgatggatctccaaaattgcaacataatgttgagtcaagagctttggctgggtgcttgggtgagcaatctacagcttcatcaaagaagagtaatattacacatgcacctggaaacagtggggctattcatgagaaatctggaggccaggaatctaatgcagggccagccttcttgaagctggctcgagaaaagctcagtactgcagagtacagagattttgttgaatatatgaaggccttaaaattgaaaaccatgcacataaaggactcacttgatgcaatagcaaaactgttttcgtctccagagcgactcccacttcttgaagggtttagggtttttgttcctaagaatcatctttcattatatgagcagcttgttcaaagctatactgtgccaaatacatga

SEQ ID NO: 44895 - DNA, 501 bp, Oryza sativa
  Clone ID: PAT_MRT4530_47912C.1
ttttttttttttttttttttttttttttttttttttttttttttttttaataaaaaaaaaaatttttttttgatttaaaaaaaaaaaaaaaaaaaaaaaaaaaaaagaaaaaaaaaaaaaaaaaaaaaaaaaaaaaaaaaaaaaaaaaaaaaaagaagaaagaaaaaaaaaggcgaaaagggaagaaaaaaaaaggagaaaaagggagaaaaaacgagaaaaaaaaaaaattggtaaaaaacgacccccgttgtttggaaaaagaacagacggcttgtctactcgggggaaccaacaaccagggagtgggaagaaaaattttaggaacattaaaaaaaggttgaaaaggaactcaaaaaagacatttggaagaaaggtggggaaaacccttttaaaaaaaatttaaaaaaaaatcaaaaaaaacagtccaaaaaaaggtaaaaaggatgaaaaaaaaaagggacaaattataaaagccaaaaacaactgggggaatcccgg

SEQ ID NO: 44896 - DNA, 207 bp, Oryza sativa
  unsure (1)..(207): unsure at all n locations
  Clone ID: PAT_MRT4530_47913C.1
cggnattcccgcgtcgacccacgcgtccgaaaanttttggctcaggaggcttagattgtctcagtgttactggattttcagagttcaatgagggacatccttctggccatgtcagacatcccaacatcttacctgttttaggcattgtagaaacatatgattgttgctacatgttgcatccaaagtctctttataccttgnaaaata

SEQ ID NO: 44897 - DNA, 7491 bp, Oryza sativa
  Clone ID: PAT_MRT4530_47914C.1
atgttggaggaccaggtcgccttcctgctgcagaagtacctcggcaactatgtccgggggctcagcaaggaggccctcaagatcagcgtgtggagagtgacaatgtcgataatgcggagcagtgactgggaagtgctttgcagatcgaaagtatcttgtcaagctgtgctggtatcagcacctcagcagttcatacaagtgctttttggcgactgtgagagtacacatcttgatgctgttactcgacactacaagagcatagcgctcagagttgcaactgtaattcagaatttagggaatttatcggtttggacaatttacttctgcttatcactgacagttatggcctggaagcctggaatgtggtgtatggctaaaaatatgcaaggtgatgtagaactcacgaacatgcagttgaagcctgaggctctcaattcattaaagttacctgtgagggtgaaagctggttttcttggttcagtgaagctcaaggtcccgtggagcaggcttggtcaagagccagttttggtttatcttgatcgaatatttatattagctgaaccagcaacacaagttgaaggttgcagtgaggatgccgttcaagaggcaaaaagaagtagagtcagggaaatggaaatgaagttattggagagccaacaacagctgaaatctgaactgaattcgtcatggcttgggtctttcattagcactgtaattggaaatattaagttgtcaattagcaatattcatatcagatatgaggacacagagagcaatccaggccacccttttgcagcaggtttggcactctcaaagctttcagcatttactgtggatgatcgtggaaaggagacttttgccacaggcggggatttggaccgagttaagaagtcagtcgaacttgagagcctggcattgtattttgattctgatagcagtccttggagtgtggataagtcctgggaagatctattaccttcagaatggagtcagatttttgagttcagaaagcaggacagttctaatcctccttcaaaaacacacacttacattttacgacctatctctggcaaagccaaatatacgaagatacaacttgatgaagcaaagaaaaccggacaggctttgcaaaatgcagctgttgatttggatgacgttactttgtctttgtctaaggatggctacagggacgtcttgaagatggctgataatttttcttcttttaatcaacgtctcaaatatgctcactaccggccatctttgccagtcaaatctgacccaaggtcttggtggaagtatgcatacaaggtggtggttcatgaaacaaagaaagcaagtggaaatctatcatgggagcaactactgaaaaatgcaagacttagaaagacatatgtatctgtatatgcatccttattgaaatctgacatgagccgattggttgttgatgataacgaggatataaagaaacttgatcgtgaactagatatagaagtcattttacaatggaggatgttggcccacaagtttgtagagcagtcagcagaaacacatcaatatgctcaacaaaataagcagcagtcctggtggtcatttggatggactggctcttcaaaggatgagggagactcaaagagttttagtgatgaagattgggaaagattgaataggattattggctacaaagaaaatgatgactatattcctgttcaacaggatatgaaattgatgcagttctattttgaaatacgcatgaagcataatgcatcgaagcttatcatcgataactcagagtatcttgctgatctgtcatgtgaagatttctgttgtaacttgaaaatgtatccagaggcaaaaatttttgacctgaagcttggttcctacaagcttttatctccgtatggtctgcttgctgagagtgcaagtgttaccgattctcttattggcattttctcctacaaacctttcgatgagcaactggactggagtttcacggctaaagcttctccttgttacataacttatttgaaggattctattgatcaaatcgttgcattcttcaagagtagccctaccattagccagactctggcgatagagactgctgctgctgtgcagatgacattagatgaagtgaagcgcactgctcaacagcaaatgtcacgggttctaaaagatcagtccagattttcactgaatctggatattgctgcccccaaaattactgttccgacaaagttccgcccagatgacatacatgaaaccaagcttttgcttgacctagggaatttaattcttcggacggaggagatatgggattcccgtgcttcagaagagcaggatatgtatctgaatttcaatctagtgctaagtgatgtatctgcatttttagtggatggtgattaccattggaatgaaagatccaatgaagtaaatttattgatccagttagaaagtgcactatacccttctacaagaatggcagtacgggttccatccctgggttttcatttctctccagcacgttatcataggttaatggaaattttcaagatttttcaagataatgatagcgacaaaaacagttcagatcttgcacatttgtgggatcaggctgactttgagggatgcttacgtaataaacaagtccatcaggttcctatggagcttacaagtggtgtgcagaatatcctggcacttcatgattctggccaaattcttgaagacactggcgctttgattatgttgtttgacaatgaggaagcacgaaggatatggcagaaccgcttgcagggtgctatataccgtgcatcgggttctgccgcactttccagctttcctgaagttgcattcccatcagagacccattccttcaagggcagctttcaagatgttagcattgaaaaattgttcgttgctggcattcttgatgagctaaagatctgcttctcatgtggctatgagagcaaccacaaactcaaaaaagttctgctagctaaggagagcagcttgtttgaatttcgggcagttggtggccaggttgaactctcaatgaagggtggcaatctactaatcggtactatcttgcgatctctggaaattgaagatcagtataactaccctggtagtcctgtaccaaggtatttggcgagatcctttatcaatagcgtgcaaaccaacgaagtcccaactcctagtcgaaagaatagtgcaggacctagaggtactgcactgaagaaaagtgacagtgaagaaaggttttttgaagcatcagatgattttgatgaatttgaaacacctatgctgcatgagaggagtatatcagattatttcagcacacagaactttttgcctactagcctcccttctttgcagccacctgcattcagtcgaattcctggtttgctgccagatattgagcttcaatctgccggattcacttcaggggacattacttttgaaagttttgtgaaagctcagattgtgatttatgatcagcagtcccctcaatacaacaacttggataacagggttgtgataagtgttgctactctgacctttttctgtcatcgaccaactgttattgcaatcatggaatttatgaatgccatcaaccttgcaaatgtccctgatgctgataaaaataaagatacaacatcggatcctgtagaacataatatggttgaggaacctaagtctgatctggaagcaggaccagtcataaaaagattactggctaaaggtaaaagcagaacagtttttcatctaacatcaagcatggcagaggcacaaatattattaatgaatgaaaatggtgaccggcttgctactttatcacaaaataacctctcaactgatataaaggtgttcacatcgtcgttcagtatagaggctgcacttggaaaccttaaaataagcgatgacagtctttcttgcaatcatccctacttttgggtttgtgatatgcgtaatccaggaggaagttcttttgtggagattgactttagttcatacaatgttgatgacgaagactatagtgggtatgactatagtctatcagcgcagctttcagaagttagaattgtttatctcaaccgttttgttcaagagattatcaattatttcatgggccttgttcctaagagctctgatagtgttgtaaagctaaaagacaatgtaactaactcagagaagtgggttagcaaaactgatatggaaggatcacctgctctcaaattggatgtctctttcagtaggcctataattgttatgcctcgtgaaactaatagttctgatttcttggagcttgatgttctatacataaagatccaaaataaattccaatggatcggtggtgacaagaatgagatgagcgctattcatctagaaattttaacggttacgagcagaaaaataagtgggattctgggaattgtacttccttatgatgattacgctgtattccttatatctgttgagaacatatattttttggacaagaaagtaaaggacataaatctaactattggtatgaatatggtgtgtggtgaaactataattcaagatgtggaaggtctctccttcgagatccatagatcattacgtgacctgatgcatcagttaccagcggtggaggcttcaattaaggtggatgttctgaaagcagcgttatccaatcgagaatatgaaattatatctgaatgtgcattgtcaaacttctccgagacaccacatgttgtgcctgctcttgatgatcctcgatatggaactactacagctgaatctcatgtatcttcatcttcttcatctgaaagtattcaagatttgtctcaagatgcggagacatggataactaataaaatatctgtttcgataaatctggttgagctttctcttcattcaggatcgacaagggactcacctatggctagcatgcaggcaagtggcgcatggcttctgtataaatcaaatacgagggaggagagctttctttttgctactctcaaaggcttttctgtttttgatgaccgtgaaggaacaaaagatgagttaaggcttgccattgggaaatcagcaacagttagagacacatcatctgctgatggctatgataatcctaatgaacttgattcaggtgaacgaagaatacaaaaagatctaggccttgagccaatcccctcaatgctcatttttgatgctatcctgcgaaaatcttcgtcaactgtgtctgtgtgtgttcagcgtcccaagtttcttgtggcacttgatttcttgctagcaattgtcgagttctttgtgccatctgctcgtagtctgttatctaatgatgaagataaggaccttctgcacatgacttctccactggtattcagtgatcaagtttactatcaggagcgttccactatgagtatttcacctcagaaacctctgattgttgataatgagaagttcgactactatatatatgacggaaaaggtggcaaaatatatttgcgggatagggagggaaaaattctgtcaggccctagtgctgaaagattcattcatgtgctctgtggtaaggggttgcaatttcggaatgtcacgatagtgaatggtgagtatttggactcgtgtatatctctcggcagtaattgctggtattcagcatcagaaaatgatcatgtctacttagtaagcgaaaatgaaggccttctatctactcacagtgaggaaattactgaagatgttgtaaaaaatattagtgccaatagatcaacagaattcataattgaaatacaggctattggaccagagcttactttctacagcacatcaagaaattctggtgaaaatttagcactatcaactaaggttattcatgcccgtacagatgcattttgcaggcttataatgaagggtgacagtatggagatgagtggaaacatactcggtttaaagatggagagtaatggcatcagagttatagaaccgtttgacatgtctgtgaaatattcaaacgcatctgggaagacaaatttgcatctgctggtttctgagatttatatgaatttctccttcagtattctgaggctgtttttagctgttgaggaagaaatttcagcatttctcaggatgtcatctaagaaaatgtcactgatgcctcaagttttaaggagattgattcttttttctaggtggaatgactctcctactaaaggagttcttgctttgaacacaaacattgtaagggtcaaaaggcctttgtcatacaaactagtttggcgatctggacctccacaaacaaatgaacttcaacacagtgagaaagatttgaagaacaagccttctaatgttgaccggttctgctcagtttggttacctgtagcacctgtgggctatgttgcattgggttgtgtttcttcaactggaactgctgaaccacctttatcgtcagttttttgtttgtctgcttccttggtttcttcatgtggcctaagggattgcattccactgagcggtaatgccaatatgtcattctggcgggttgataatgcttttggttcctttttacccggagatccagcacatatgcgtgtagatggaaatgcatatgatcttcgccatatgctgttcaatgatgcggactcttccaagactagctctatagggcaagatagtcacaatgatgcttcgcagatagagagatcagcattgacctcaggtcggctatttgaagcagtagcaagctttaaactaatttggtctaataatggcatgtcttcaccaaagaaactatctatatggcgtccaatgttgtctgaaggaatgttttactttggtgacattgctgttaacgggtatgagccaccaaattcagctgttgtacttcgaaattctggcgatgatacctttctcagagctcctgaaggttatcagcttgttggtagaattaagaagcacaggggtactgagggtgtatcgttttggtttcctcaagctccaccaggttttgttgctttaggatgtgttgcatctaaaagttcaccagcgaaagaggacttgcatttcttaagatgtattagaagtgacatggtgaagggaggccaattttcggaggaaagcgtgtgggactcatctggtgctagaacatctgaaagttttagcttatggaccgttgataatgatgttggtacatttcttgttagaagtggatttagaaaacctccaagaagacttgccctgaagcttgctggtccacctacatccagcagttcagatagcataattattgatgctgaaatcaaatcattttctgcagtttcatttgatgattatggaggaatgatggtaccattatttggaatatcatttaatagtgtggggtttagttatcatggtggtcctcaacatctaaatgctactgtgggtttgtcatttgcggcaagatcttataatgacaagtataattcatgggagcccttcattgaaccaactgatggctttcttaggtaa

SEQ ID NO: 44898 - DNA, 7338 bp, Oryza sativa
  Clone ID: PAT_MRT4530_47915C.1
atgttggaggaccaggtcgccttcctgctgcagaagtacctcggcaactatgtccgggggctcagcaaggaggccctcaagatcagcgtgtggagagtgacaatgtcgataatgcggagcagtgactgggaagtgctttgcagatcgaaagtatcttgtcaagctgtgctggtatcagcacctcagcagttcatacaagtgctttttggcgactgtgagagtacacatcttgatgctgttactcgacactacaagagcatagcgctcagagttgcaactgtaattcagaatttagggaatttatcggtttggacaatttacttctgcttatcactgacagttatggcctggaagcctggaatgtggtgtatggctaaaaatatgcaaggtgatgtagaactcacgaacatgcagttgaagcctgaggctctcaattcattaaagttacctgtgagggtgaaagctggttttcttggttcagtgaagctcaaggtcccgtggagcaggcttggtcaagagccagttttggtttatcttgatcgaatatttatattagctgaaccagcaacacaagttgaaggttgcagtgaggatgccgttcaagaggcaaaaagaagtagagtcagggaaatggaaatgaagttattggagagccaacaacagctgaaatctgaactgaattcgtcatggcttgggtctttcattagcactgtaattggaaatattaagttgtcaattagcaatattcatatcagatatgaggacacagagagcaatccaggccacccttttgcagcaggtttggcactctcaaagctttcagcatttactgtggatgatcgtggaaaggagacttttgccacaggcggggatttggaccgagttaagaagtcagtcgaacttgagagcctggcattgtattttgattctgatagcagtccttggagtgtggataagtcctgggaagatctattaccttcagaatggagtcagatttttgagttcagaaagcaggacagttctaatcctccttcaaaaacacacacttacattttacgacctatctctggcaaagccaaatatacgaagatacaacttgatgaagcaaagaaaaccggacaggctttgcaaaatgcagctgttgatttggatgacgttactttgtctttgtctaaggatggctacagggacgtcttgaagatggctgataatttttcttcttttaatcaacgtctcaaatatgctcactaccggccatctttgccagtcaaatctgacccaaggtcttggtggaagtatgcatacaaggtggtggttcatgaaacaaagaaagcaagtggaaatctatcatgggagcaactactgaaaaatgcaagacttagaaagacatatgtatctgtatatgcatccttattgaaatctgacatgagccgattggttgttgatgataacgaggatataaagaaacttgatcgtgaactagatatagaagtcattttacaatggaggatgttggcccacaagtttgtagagcagtcagcagaaacacatcaatatgctcaacaaaataagcagcagtcctggtggtcatttggatggactggctcttcaaaggatgagggagactcaaagagttttagtgatgaagattgggaaagattgaataggattattggctacaaagaaaatgatgactatattcctgttcaacaggatatgaaattgatgcagttctattttgaaatacgcatgaagcataatgcatcgaagcttatcatcgataactcagagtatcttgctgatctgtcatgtgaagatttctgttgtaacttgaaaatgtatccagaggcaaaaatttttgacctgaagcttggttcctacaagcttttatctccgtatggtctgcttgctgagagtgcaagtgttaccgattctcttattggcattttctcctacaaacctttcgatgagcaactggactggagtttcacggctaaagcttctccttgttacataacttatttgaaggattctattgatcaaatcgttgcattcttcaagagtagccctaccattagccagactctggcgatagagactgctgctgctgtgcagatgacattagatgaagtgaagcgcactgctcaacagcaaatgtcacgggttctaaaagatcagtccagattttcactgaatctggatattgctgcccccaaaattactgttccgacaaagttccgcccagatgacatacatgaaaccaagcttttgcttgacctagggaatttaattcttcggacggaggagatatgggattcccgtgcttcagaagagcaggatatgtatctgaatttcaatctagtgctaagtgatgtatctgcatttttagtggatggtgattaccattggaatgaaagatccaatgaagtaaatttattgtcagttatcgacaagtgtggaattgctttaaagcttcagcagatccagttagaaagtgcactatacccttctacaagaatggcagtacgggttccatccctgggttttcatttctctccagcacgttatcataggttaatggaaattttcaagatttttcaagataatgatagcgacaaaaacagttcagatcttgcacatttgtgggatcaggctgactttgagggatgcttacgtaataaacaagtccatcaggttcctatggagcttacaagtggtgtgcagaatatcctggcacttcatgattctggccaaattcttgaagacactggcgctttgattatgttgtttgacaatgaggaagcacgaaggatatggcagaaccgcttgcagggtgctatataccgtgcatcgggttctgccgcactttccagctttcctgaagttgcattcccatcagagacccattccttcaagggcagctttcaagatgttagcattgaaaaattgttcgttgctggcattcttgatgagctaaagatctgcttctcatgtggctatgagagcaaccacaaactcaaaaaagttctgctagctaaggagagcagcttgtttgaatttcgggcagttggtggccaggttgaactctcaatgaagggtggcaatctactaatcggtactatcttgcgatctctggaaattgaagatcagtataactaccctggtagtcctgtaccaaggtatttggcgagatcctttatcaatagcgtgcaaaccaacgaagtcccaactcctagtcgaaagaatagtgcaggacctagaggtactgcactgaagaaaagtgacagtgaagaaaggttttttgaagcatcagatgattttgatgaatttgaaacacctatgctgcatgagaggagtatatcagattatttcagcacacagaactttttgcctactagcctcccttctttgcagccacctgcattcagtcgaattcctggtttgctgccagatattgagcttcaatctgccggattcacttcaggggacattacttttgaaagttttgtgaaagctcagattgtgatttatgatcagcagtcccctcaatacaacaacttggataacagggttgtgataagtgttgctactctgacctttttctgtcatcgaccaactgttattgcaatcatggaatttatgaatgccatcaaccttgcaaatgtccctgatgctgataaaaataaagatacaacatcggatcctgtagaacataatatggttgaggaacctaagtctgatctggaagcaggaccagtcataaaaagattactggctaaaggtaaaagcagaacagtttttcatctaacatcaagcatggcagaggcacaaatattattaatgaatgaaaatggtgaccggcttgctactttatcacaaaataacctctcaactgatataaaggtgttcacatcgtcgttcagtatagaggctgcacttggaaaccttaaaataagcgatgacagtctttcttgcaatcatccctacttttgggtttgtgatatgcgtaatccaggaggaagttcttttgtggagattgactttagttcatacaatgttgatgacgaagactatagtgggtatgactatagtctatcagcgcagctttcagaagttagaattgtttatctcaaccgttttgttcaagagattatcaattatttcatgggccttgttcctaagagctctgatagtgttgtaaagctaaaagacaatgtaactaactcagagaagtgggttagcaaaactgatatggaaggatcacctgctctcaaattggatgtctctttcagtaggcctataattgttatgcctcgtgaaactaatagttctgatttcttggagcttgatgttctatacataaagatccaaaataaattccaatggatcggtggtgacaagaatgagatgagcgctattcatctagaaattttaacggttacgagcagaaaaataagtgggattctgggaattgtacttccttatgatgattacgctgtattccttatatctgttgagaacatatattttttggacaagaaagtaaaggacataaatctaactattggtatgaatatggtgtgtggtgaaactataattcaagatgtggaaggtctctccttcgagatccatagatcattacgtgacctgatgcatcagttaccagcggtggaggcttcaattaaggtggatgttctgaaagcagcgttatccaatcgagaatatgaaattatatctgaatgtgcattgtcaaacttctccgagacaccacatgttgtgcctgctcttgatgatcctcgatatggaactactacagctgaatctcatgtatcttcatcttcttcatctgaaagtattcaagatttgtctcaagatgcggagacatggataactaataaaatatctgtttcgataaatctggttgagctttctcttcattcaggatcgacaagggactcacctatggctagcatgcaggcaagtggcgcatggcttctgtataaatcaaatacgagggaggagagctttctttttgctactctcaaaggcttttctgtttttgatgaccgtgaaggaacaaaagatgagttaaggcttgccattgggaaatcagcaacagttagagacacatcatctgctgatggctatgataatcctaatgaacttgattcaggtgaacgaagaatacaaaaagatctaggccttgagccaatcccctcaatgctcatttttgatgctatcctgcgaaaatcttcgtcaactgtgtctgtgtgtgttcagcgtcccaagtttcttgtggcacttgatttcttgctagcaattgtcgagttctttgtgccatctgctcgtagtctgttatctaatgatgaagataaggaccttctgcacatgacttctccactggtattcagtgatcaagtttactatcaggagcgttccactatgagtatttcacctcagaaacctctgattgttgataatgagaagttcgactactatatatatgacggaaaaggtggcaaaatatatttgcgggatagggagggaaaaattctgtcaggccctagtgctgaaagattcattcatgtgctctgtggtaaggggttgcaatttcggaatgtcacgatagtgaatggtgagtatttggactcgtgtatatctctcggcagtaattgctggtattcagcatcagaaaatgatcatgtctacttagtaagcgaaaatgaaggccttctatctactcacagtgaggaaattactgaagatgttgtaaaaaatattagtgccaatagatcaacagaattcataattgaaatacaggctattggaccagagcttactttctacagcacatcaagaaattctggtgaaaatttagcactatcaactaaggttattcatgcccgtacagatgcattttgcaggcttataatgaagggtgacagtatggagatgagtggaaacatactcggtttaaagatggagagtaatggcatcagagttatagaaccgtttgacatgtctgtgaaatattcaaacgcatctgggaagacaaatttgcatctgctggtttctgagatttatatgaatttctccttcagtattctgaggctgtttttagctgttgaggaagaaatttcagcatttctcaggatgtcatctaagaaaatgtcactgatgcctcaagttttaaggagattgattcttttttctaggtggaatgactctcctactaaaggagttcttgctttgaacacaaacattgtaagggtcaaaaggcctttgtcatacaaactagtttggcgatctggacctccacaaacaaatggaggatcaacacacggtaatgccaatatgtcattctggcgggttgataatgcttttggttcctttttacccggagatccagcacatatgcgtgtagatggaaatgcatatgatcttcgccatatgctgttcaatgatgcggactcttccaagactagctctatagggcaagatagtcacaatgatgcttcgcagatagagagatcagcattgacctcaggtcggctatttgaagcagtagcaagctttaaactaatttggtctaataatggcatgtcttcaccaaagaaactatctatatggcgtccaatgttgtctgaaggaatgttttactttggtgacattgctgttaacgggtatgagccaccaaattcagctgttgtacttcgaaattctggcgatgatacctttctcagagctcctgaaggttatcagcttgttggtagaattaagaagcacaggggtactgagggtgtatcgttttggtttcctcaagctccaccaggttttgttgctttaggatgtgttgcatctaaaagttcaccagcgaaagaggacttgcatttcttaagatgtattagaagtgacatggtgaagggaggccaattttcggaggaaagcgtgtgggactcatctggtgctagaacatctgaaagttttagcttatggaccgttgataatgatgttggtacatttcttgttagaagtggatttagaaaacctccaagaagacttgccctgaagcttgctggtccacctacatccagcagttcagatagcataattattgatgctgaaatcaaatcattttctgcagtttcatttgatgattatggaggaatgatggtaccattatttggaatatcatttaatagtgtggggtttagttatcatggtggtcctcaacatctaaatgctactgtgggtttgtcatttgcggcaagatcttataatgacaagtataattcatgggagcccttcattgaaccaactgatggctttcttaggtaa

SEQ ID NO: 44899 - DNA, 904 bp, Oryza sativa
  Clone ID: PAT_MRT4530_47916C.1
ttatttttgaaaaggaaaaggggtttattgcgtcagcggctagggtttgcggtggaccgggcgcacggcagcggttcacgggaacgaacggccgagatcgatccatccaaaacggacggccgagatcgatcgggtctacggcggctcacggcagacggccacgatgacgtcagcggcgacgtcacctccggcggcggctcggcggctcagcggctcgggcgcgcttgctcgccggcgaacgacggcgcgacgacgcggacggagggcaccaggacgtagagcgcggggcggcgaactcaccgatgaccaaaacgtcggcggcggagaccttcggcttgacgacgacggcggtgctccggcggtctacagcgacggcgaaggggcggacgaggacggcggcgacttggcgaccacgatggcgacctccccgagcgatgacgacgaccggaacgacggcgaagcacggctggagcgacggcgacgactgcggctcgagttacacggcgctagggcgcttccgacggcgagagacgaagacaatggtggtggcgggggcaaggaggcagcggcgaaggcccacggcgaccggcgacgcgaaagaaacattggggttcggaggaaagagatcgatccgattcgacctcgaatccacgaacttccaaagcgatttagacgatgattccaaaagagaaaaggtagaggagatcccgaagattgtttcccctctattgatttcaccggatcgggaaagacgcggtgggccccacctgtcagtgggcggacgcgcgcgcgcgagcggcggctgctgctggactgggccgactgggccggggagagagagagagattttgggccggctttcggcccaaagccaaaagagacttttaaaaaacctttttcaatt

SEQ ID NO: 44900 - DNA, 579 bp, Oryza sativa
  Clone ID: PAT_MRT4530_47917C.1
atgacgtcagcagtgacgtcatctccggcgacggctcagcggctcgggcgcgcaagctcgccggcgaacgacggcgcgacgacgcgaacggagggcaccagcacgtagagcgcgacgcggcgaactcaccgcgacggcgaagaggcgaacgaggacggcgatgacttggcgaccacgatggcgacctccccgagcgacgacgacgaccggaacggcggcgacgcacggctggagcggcggcgacgacggcggctcgaggttacacggcgctagggcgcttccgacggcgagagacgaaggcgagggtggcggcgggggcaaggaggcggcggcgaaggcccacggcgaccggcgacgcgaaggaaacatcggaagaaaaggtagaggagatcccgaagattgtttcccctcaaaagatttcaccggatcgggaaagacgcgaccgaatttggaaggagacgacggcggcgcagcgctagggtttcgggcggcggccgacacgaggaagacgacgactccgacaggtgggccccacctgtcagcggcagcgagctcgcgcgggcggctgcagctgcgaac

SEQ ID NO: 44901 - DNA, 777 bp, Oryza sativa
  Clone ID: PAT_MRT4530_47918C.1
aacggagggcaccaggacgtagagcgcgacgcggcgaactcaccgatgaccaaaacgtcggcggaagatgaacggacggcgacgacgatgaggaagaagcggcgacggtcttcgagtcgacgacgacggcggtgctccggcggtctacagcgatggcgaaggggcggacaaggacggcggcaacttggcgaccacgatggcgacctccccgagcgacgatgacgaccggaacggtggcggcgcacggctggagcggcggcgacgacaacggcacgaggttacacggcgctagggcgcttccgacggcgagagacgaaggcgagggtggcgacgggtagcggagacaccggggatccttttaaaggggttggagggcggtggcgaaggcccacggcgaccggcgacgcgaaggaaagatcggggttcggaggaaagagaccgatccgattcgacctcgaatccacggatttccaaacgattttagccgatgattccaaaagagaaaaggtagaggagatcccgaagattgtttcccctcaatcaatttcaccggatcgggaaagacgcggccgaatttagaaggagacaacggcggcgcggcgctagggtttcgggcggcggcggccggaggtagatgacgggtccgacaggtgggccccacctgtcagcgggcggacgcgcgcgcgcgagcggctgcggctgcgggctgggccgacttgggctggggggagagagagagggttttgggccgatggcccaaagccaaaagaagacttt

SEQ ID NO: 44902 - DNA, 1089 bp, Oryza sativa
  Clone ID: PAT_MRT4530_47919C.1
atggactccccagcgacccctgtgggcttatctccgccacttctcagtctggtgctctgcaatgaaccatgctatacaaaagcggttcacgggaacgaacggccgagatcgatcctatccaaaacgaacggccgagatcgatcgggtctacggcggctcacggcagacggccacgatgacgtcagcgacgacgtcaccaccggcggcggctcggcggctcggtcgcgcaagctcgccggcgaacgacggcgcgaggacgcgaacggagggcaccaggacgtagagcgcgacgtggcgaactcaccgatgaccaaaacgtcggcggaagatgaacggacggcggcggcgtcgaggaagaagcggcgacggtcttcggcttgaggacggcgacggtgctccggcgatcttcagtgacggcgaagggacggaggaggacggcaacgatttggcgaccacgatggcgacctccccgagcgacggcgacggctggaacggcggcggcgcacggctggagctgcggtgacgacggcagctcgaggttgcacggcgctagggcgcttccgacggcgagagacgaaggcgagggtggcagcgaagagaggagacaccgggggtccttataaaggggctagggcgcggcggcaaaggcccacggcgaccggcgacgcgaaggaaacctcgaggttcggaggaaagagaccgatccgattcgacctcgaatccacgaacttccaaagcgagatagacgatgattccaaaagagaaaaggtagaggagatccggaagattgtttccccccatacttttaccaaatctgaagactgtggagggcaactgccagtcggcagcagacgtagacagcttgtgttgaagatgataacgcctattagtcgtggcggcgacgtggccagccgtgaagacgatagcaccagttggcgtcatatgaggcggccggtcggtgaagatgtaggcgtccaacaacggcggcataatagtccagccgtgcaagcggagacaccagtcggcggcggcgaaggcaagctggcggtgaagacgtagacgcccaacaacggcggcataataagccat

SEQ ID NO: 44903 - DNA, 393 bp, Oryza sativa
  Clone ID: PAT_MRT4530_4791C.1
tcagctatttttctcattgcaaaatgctattttcactgatcgctgtcatcctccaccaacctactaaggtcgttagtggggaagcttcacgctcgacatctttcaatttgagggagaatgagctgtctgtccttgcctccaagcttcttttcttatattattctagtggttgacacatttcactgagagtcaacttggagtaaacaaagctactccttcaattgcctgtcattaagttcaccgtacacagagcctcctcctggtgtgcttttcctcttctattagaatatgtgatgcgcgtgcttaatgctgccaatccttgttttgtctctctccctttcctaaaggtggagggtccgtgtgtagtcattcctttagatattatatataacc

SEQ ID NO: 44904 - DNA, 2686 bp, Oryza sativa
  Clone ID: PAT_MRT4530_47920C.1
atgggtgacgatgtgctgggcagagggagccgacgagatcaggagatcgtcctcgtcgacatcgtcgacgatgacgatcacgacgacgtgccggcggtgcggcggcaggactccctgtacgtcgacgcgacgagagccggcggagcaaaccaccgtggaggccaggaggagagctgggcgaggacgttgaagctagcgttccagtgcgtgggaatactgtacggggacatcgggacatcgccgctgttcgtgtactcgagcacgttcaaggacggcgtccgccacccggatgacctgctcggcgccctctccctcatcatctacagcttcgccctcttcaccatcgtcaagtacgtcttcatcgccctccgcgccaacgacgacggcgacggtggaacgtttgcactgtacacgctgatttctcggcatgcgaaggtgagcttgatcccgaaccagcaggcggaagacgagctcatttccaagtacaacaccgggaagccgcaggcaacgctgaggagagctcggtggatgaaggagcttctcgagaccaacagagccgtcaagatttggctcttccttctcaccatcctagccaccgccatggtcatcagcgatgccgtccttacaccggccatttcagttctgtctgcggttggtgggctgaaagagaaagcaccgaacctgacaacagatgaaatcgtgtggatcacagtggcgactttggtagtcctgtttgcaatccaacggttcggcacagataaaattggctacctgtttgcgccgatcatactcctgtggttgctcctcattgggtgtgttgggatctacaacaccattaagtttgacaccggcgtgttgagggcgttcaacctgaaatacattatcgactacttccgaaggaacaagaaggatggatggatctctcttagtggcatactcctctgcttcacaggtacagaagctctgttttcagatctaggatatttcagcattagatcaatacagctaagcttcagctttggtctagtcccttcagtgttgcttgcttacattgggcaagcagcatacttgagagaacatccagagcatatagccaacactttctacagatcaactccaaacgtgatgttctggcccacgttcatcctggcagttgctgcatccattattggaagccaagccatgatatcctgcgcatttgcaaccatttcgcatttgcagacactcaactgcttccccagagttaagatactccacacatcaaggcaatattcaggacaactgtacattccagaagtgaacttcttgctttgtgtgggtgcttgccttgtaacaattggtttcaagacaaccgtgattattggagaagctcacgcaatatgtgtggtctttgtgatgatcatcacaaccctcctattgacaatagtgatgctcctagtatggaaggtcagcatctggtacgttgcactattcttcatcgtcttcatgtcatcggagtcgatctacttatcggcggtcctataccaatttgtgcatggcgagtatgtacctgtggccatgtcagttttcctgatgattgtgatgactgtctggcactatgttcatgtcaagagatatgaatttgagcttgagcacactgtgccccgtgacaaggtgaaggagctcttggagcgccgtgacatacagagggttcccggggtagggctcttctacaccgatcttgtgcaaggcatacccccggtgttccctcacctcattgagaagatcccttccatccactctgtgctcatctttgtctctatcaagcacttgccgattccgtcggtcgataggtccgagcgattcatctttcgacatgtcgacaaagaagagtacaaggtgttccaatgcgtggcgcggtacggttatcgagaccccatggaggaggccaaggactttgttgatgcacttactgagaacctccagtactacataagggatgttaacttctacactacaggcggtgatcaacatatattcaggagtaccagctatgccagttccattgctgaaagttttgccagctatgagaaacactctgggcatgcagtctatgcagaggagatgcttacaccagccgaatccttctctgagcatacaaagcaacttagtggcagaagcaagcattttaaacaatttcaggtagagaatatgaacatgcaaaagatggagaaggtacaacaggagcagcaggctatcctcagagagatggagaatggtgttgtgtacatacttggagagagtgacatagtggcaagccctcactcctcgcttcttaacaagatcattgtcaattacatctattctttccttagaaaaaactgtagaaatggcgagaagatgttgtctattcctcgcagccaagtactaaaggttggaatcgcatatgagatataagcatatgggtaattttatcattcttgtgaaagtatttagagttaccatattttttagtgtaaaatggtgtacgccaggtactgggtccctcgaggtgccgttgtgtgggtaaatttggtgcctcaggtactttctggagaactgtaaaatttctgtaagcacatgtataagacacagatggtacttgatatttctcacataataattttctaatggatgttttaatgttcacgtgaaaaaaaaaaaaaaa

SEQ ID NO: 44905 - DNA, 346 bp, Oryza sativa
  Clone ID: PAT_MRT4530_47921C.1
gactagttctagatcgagatctagaactagttctagatcgcgagcagacgcccttatttaatctggacagtggtgtactttgaaacgatgcatacaagacccattgtttgattactgctaatgtgctgcgtgcgatactactaccataatatggccagacattctaattccaattttttttctatctatgtagagcctgtgcttactgatccatcactaaatcgttcaaatcgtctagagaattagctccatggctgctggtagagataacttggagactgcgtcgctggtaatacactgcatgagctgtggaacgagctcctttccgaagttattatattcgcgc

SEQ ID NO: 44906 - DNA, 222 bp, Oryza sativa
  Clone ID: PAT_MRT4530_47922C.1
atgcactgtccctcaggcatcgccggcgtgggagcttcagcctcatgtcgctaccctagctaccgcagggccaccggcgtcggggctttcaccgccaccactattgttcctcaggcatcaccggcgtcgggccgtcagcactccatcgaggagtcatatctctcatcgtgctcgtccatctccccgcagctgcgccatgcccgtcgtcttctcgtgtgctaa

SEQ ID NO: 44907 - DNA, 1941 bp, Oryza sativa
  Clone ID: PAT_MRT4530_47923C.1
atggcgatcgccgcgccgcttttccggctcgccgccgccgccgccgtggtgatgggcgtggtgtcgccggcggtgaaggcggcggggggcgggaacagctcgacggcgtgcccgctcgacctcgggtacgtgcggtcgttcccgtgggacaccgcgccgtgcatgccgccggtggccaaccagaccgcctgctgcacgacgctgctctccgtgctcggcgtcggcctcgccgcgcgcctccgcgccacgggccacttccggctaccgtcggcgaacgcctcggccgcctgcctcggcgccttctccgacgagctcgcctcgccgccgctctcgctccaggacacgctcgttcccgcctgctggcccgtctcgtcccagctcgccatctcgccgtcctactgcgccggggtcaccaccgccaagcagtacgtcgccaccgttggcaacgccgcggttcttggcagcctcaactcctcctgtggctccgacctcgccgacctgtcgctctgctccagctgcctcgccgccgccatcgacgcctcaggtcgactcgtcgccgccgccgcaaagggaaccaatccgcagaactgcttctacctcaccgtcctttacgccgccggcgtctccagctctgccggcccgacctcccccggcaccgccaactgcgccctcggcctcgctctctccaccccttcgtcttcttcgtcgccggcgtccagttccaaccacaccaacatggcggtagccaccgccatcccggtcgcttccgcgctactcgtctccgtcatagcagcgctgcttgtatggaggaggaggcaggacagcatcaggagcaagagccgccgactctccggcgagcggcggttgtcgcgcccgcggccgaacgtcggctcggttctgttcagcctcggcgagctggcgaaggcgacctgcgggttcgccgagcggaacctcatcggccgcggcgggttcggcgtcgtgtaccgcggcgtgctcgacgacgggtccgtggtcgcggtcaagaagatgctcgacccggacatggagggcggggacgaggagttcaccaacgaggtggagatcatcagccacctccggcaccggaacctcgtgccgctgcgcgggtgctgcatttccgacgacgacgccgacgagggcaagcagatgttcctcgtctacgactacatgccgaacggctcgctcgaccactacatcttcaaggacggcggcgatggcggacgccggccgccgccgctgtcgtgggcgcagcggcgcggcgtggtcctcgacgtggcgagggggctggagtacctgcaccacggggtcaagccggggatctaccaccgcgacatcaaggcgaccaacatcctcctgggcaccgacatgcgcgcgcgcgtggcggacttcggcctggctcgccggagccgggaggggcagtcccatgtcacgacgcgcgtcgccggcacgcacggctacctctcgccggagtacgcgctgtacgggcagctcaccgagaagagcgacgtgtacagcttcggcgtgctggtgctggaggtgatgagcggccggcgcgcgctcgacctgtccgacccctccggcgtcgtgctgatcaccgactgggcgtgggcgctcgtcagggccgggcgcgcggcggaggtggtcgccgcggcgctgcgcgagcgggagggccccgccggggtgcacgccatggagaggttcgtgctcgtcgggatcctgtgcgcgcacgtcaccgtggcgtgccgccccaccatgccggaggcgctgaggatgctggagggcgacatggacgtgcccgacctgccggaacggccgcagccgtacggccagaggatcgcgttcgacgaaggcgaagccaatttcagcgcctcgtccgtgctgagcggccccccgttcatggacttcggcgacatgctccggtga

SEQ ID NO: 44908 - DNA, 2244 bp, Oryza sativa
  Clone ID: PAT_MRT4530_47924C.1
atgcaccataatcctctccttgaaaggctagattgggtgtttacttcagccccttggactttggattttccaaacactactgtggttccccttactagaaatatttctgaccatgtgccatgtgtagtcaagattgacacaaaaattccgaagtccacgattttcagatttgaaaactattgggtggagatggagggattttttgatattgtccaacacgtttggcagattgatccagggtttgaagaccctgctaaatgcatctccttcaagatgaaagtgttaaggaaaatacttcttgcatggagcaaaaatctgtcaaagctgctattacttctgtccaattgtaacaaagtgatagattttttggatctggttgaggaaacaagactcctgtcggtctttgaatggaatctcagggaaattgtaaaaatgcaaatcctcaagttactggaattcaggaaaatctattggaaaaagaggtgtactaatagatggatgctgcttggagaggaaaatactaaatttttccagtctattgcaactgagagatatagaatcaacacagtgtctcaggttattgatcaaaatgggcagactgtgcattcacatgagcaaaaggcctctctttttcttcagtgctttaagaacagaatgggagttacaagggaccctgaaatggtttttgatttgagtacactttttccaagacatacagacctggaatgtttggtggacatgttttctacacaggaaattgacagtcttgtttctattatcccggcagataaggcccctggtccagatgggtttaatggctttttcatgaaaaaatgttggcctataatagctcaggattattacagattggcagcacatttccatgcagagtgcactgacttggaaaccttgaatagctcttacataaccttggttccaaagaaaaattcaccagagactgtcaatgactataggcctatatctctaatggggctttctttgaagttcttaactaaactaatggcagatagacttcaaggggtgatccttaagctagtaagtgagaatcagtatgggtttatcaaaggaaggacaatacaggactgtcttgcttggtcttttgaatacatccatcaatatcagcaatctaagagggaaattattctattgaaactggattttgagaaagcttttgataccattgaacactcagctattcttgcagttcttcaacacatgggctttcatgaaaaatggatacattgggtgaaaatggtgttctcttctgcttcttctgcggtcttgctaaatagtgttccaggaaaatcttttaaatgcaagaggggggggggtgacagtagtgggttcccaataattcaatatgcagatgacactcccattctgcttaaagcctctcaaaaggagattttctgtttaaaagccatcttgaatatgtttgctcagtccacaggcctaaagcttccagtcactgtcatcaaagcaattgatacatcaagaaagaattgcctctggagagggaacaatccatcctcaactaggaaatctctagcttcatgggaaagagtttgtatgcctaaggataagggagttatgggtgtgatcagtttgagagttcagaacactgctatgctcttaaagcatttggttaagttttatgatggtgctgacttgccatgggtcaggctcatctctcaaacttactatgaatctagagtaccacatctggtcctgaacaaaggttctttttggtggagagacattgtctccctctctgatatcttcagagctgtagcaaagtgctcagttcagtcaggaaaatctgttctcttttggaatgacttatggaatgatgatctcaagtgtgcgtcctaccctaatctcttcagcatcaccttattcagaaatgattcagtctgggacatgtgctcacggccactggaggattcttttatcctgcccctctcagatacagcttatggagagttcttgcaactgaatgaagaattaaatcatctgcagcttcagccaggaagagactcaacacaagggacatgcttgacagaagacattgtgcaaaagaggatgatgatctcacgtgtgccttgtgtaacacacatcaaagagaaactaggcttcatctcttctttacatgtccctttagtgtggcttgttggcagcaaatgggcatttcttggaattgtaatctggagtttttccaaatga

SEQ ID NO: 44909 - DNA, 327 bp, Oryza sativa
  Clone ID: PAT_MRT4530_47925C.1
atggtgagggggtgtgatgcggtggcgtcccccaccacgcctgcaactgccgtgcaccattgccaccaccaccgcagtagtgcgcgttcaagaaaccctaactttggaagaaaagggagagtggaaggggaggaactcaccggggagaaggtggccaccggagaagacagctacccacggagagcgtgtgttgttgccgctgcgtccgggttgcgccgcgccgcgccgcgccacgccatccccgccgcagcagcgccccctctcgttgtgccgccgctgcgttgcacgccctcgagagggttttttcctcgccaccagagaagctga

SEQ ID NO: 44910 - DNA, 223 bp, Oryza sativa
  Clone ID: PAT_MRT4530_47926C.1
cacggataggaagttcaagtgtacctgtatctgtatgggcatgtttggcacagctccagctccagctccacccctcctggagctggagcttagccaaacagtttcagggcctgtttggcacagctccagctccaactccacccctcctggagctagagctcagccaaacagtttcagttccaccaaaactgggaatggagttgggtggagctctctcacaaaa

SEQ ID NO: 44911 - DNA, 221 bp, Oryza sativa
  Clone ID: PAT_MRT4530_47927C.1
tctggcacacctctcgccgacgtcgtcgtctgctgatctgtcctctgccgtgttgccctgtcgcagctgctgacgtctgtgataagcggagctgagctgcctcgctgcctctgagagaggccggtataagggcgggctgcgtctggctctctgcttggctgtgagcaccgcgagcacgtacagctccgcctcagacaagagcagaacacgtacgtttcccc

SEQ ID NO: 44912 - DNA, 394 bp, Oryza sativa
  unsure (1)..(394): unsure at all n locations
  Clone ID: PAT_MRT4530_47928C.1
tgatggctgccaatgccactgtgtgtatttggcgcccatacagatattgaggatgaaaaggggtgccacattgatggaagggagggagggagagacgagacccatgaggtaacgtgggtgccccgggcatgtctaggcacttgctaccccccacatggttgggccactgaccatgcgcgattgcatgaatgggaaacggaaccatgatgacctgatgtgtggcatgacccaatgcctgatgggtgaggtgcnnccaattggggggaattgcgtgaccccactgcggcctttcaccgagttatgaaagtgccagaaaggatactaaatctcgtcgntaactgaattccagaatagaaagattccaaaaaaaaaataaaaaaaaaaaaaaaaaaaa

SEQ ID NO: 44913 - DNA, 321 bp, Oryza sativa
  Clone ID: PAT_MRT4530_47929C.1
atgcccccatccaccacaccggcggttggatctgccacgccaccgtctgagaccccatccccgaccactctcccagaggccctcctttccgcatcacccgccggcctcaccagcaaggcccaccttccccacgctgactccaccaatcaggctcttccttgcgttgccacacacctccactccctcccccggtccaccccaaccactgtccagcgcatctcccttcacgcgctactgccaatgcaccgcaccatcaccgcttattctccctccacgcaacgccgccgctgccgctctctcctggtgctactgtcccgctga

SEQ ID NO: 44914 - DNA, 5145 bp, Oryza sativa
  Clone ID: PAT_MRT4530_4792C.1
atgacatccagcctcgtcgacaacagcgtcaacaccaacctcagccaagtactccctgcttcaacgatgctggtgtggactcaagtcggcgaaatcgtcttcccggtttacaccactacgccgatctcaactggtcctccaatgaccggaaacgagaacgcagtggctacaaaccaaggcgactccatgtcgaaaaatcctcccgctgagacggagaacggagcatcgacgacatccgagctcaagaaggattctgatgcggccaaaccttgtccttccgacatgaaccgcgagccgacaaagatgacttccgaagccacaaggttctggtgtcctatccacaaaaccaggaaacacactttgcaagcctgttgggttttcctcaacgtctgcgccaaaattcgcgcctgcaaagagcgtggaattcagcgtatttctccaactcgtgatgtctattgtcctattcagaagacaaagaatcacgacctctcaagctgcaaggtctttctcagcgccatgaaagctctgtctcctaagtcatacgtccccatcagggataacgacaaggaacatggagcgactccaacttcagatcgattcgttgggcacattagggccgttcaagctatactgagggaaactccctacgatcccgttctgaacgatgacctcgagcgttggacagaacgactacgggaatcagtgaccaacctcagcaacgcgttcgaagaagtcgctaccgcagcgcacccggagcagccaccaactggcgatgccaatggtgaagacccggaaaggagggaatcacctcaacgagctacccctccacctcgcggcactggcgatctccgagatcacatcaacggccaccgagaggcacgacgcacacgagacaatgtgaatcgttctcggcatcatgtctcttcacggcgccatgataacggaaatcgaggaaaccgctcaaacgaggaccgagaccaggacaaccaccacgatcacaacgatcgcgaacgatgggtgccagacaatactggtagaggccgtcaccataacaacgacgatgacggagatcggcgccgagacaacagcgggagacgacgacaggattcccgagatccaggccgacatcctcgtaatcgtatgccggaaccaagcaacccatcgtcatcgtcatcatcatcgtcctcctcatcgtcagacagacatccacgaaggacacacgaccgccgacaacccaccgcccccaacgctgggtgtagggctttcggtcgttccctgcgtgatgtccgatggcctaagagattccgacctggagtaatagaaaagtatgatgggagcaccgacccagaggagttccttcaagtctactccacagtactctacactgccggagcagacgacaacgcgttggcaaattatttaccaactgcgttgaaaggttctgcacgttcatggctgatgcatcttcctccctactcaatctcttcgtgggcagacctgtggcaacagttcgtcgccaatttccaagaaacatacaagcaccacgcgatcgaagacgacctacatgcgttgacacagaactctggtgaatcattgagggaatatgttcggcgcttcaacgagtgcagaaatacaatccccgaaatcatcgacgcttctgtaattcgcgccttcaaatccgatgatgcgctaagacgcaagaacgataagccgaagaccgggggagagaagaaaccagccacggacgcatctgagtcaagcaagaagaaaaatcgcaaaaatgggaaaaggaaagctcaagcagaagtcctcgcagcagaatacgcgaaccctcccaagcgcccatacccacaaagtagcgacacaaagaaagtatggtgccccatacacaagacggacagacattctctggaagattgccttgttttcaaaaaatcgctcgagaagcacatcgcatttgaaaaaggcaagcgagtacgcgtggtcgagaagaacgaggaggcggttcctcacgaatcggattcagcgtatccagacttcgacctccacgtttcacacatcttcggcggttccacaccatactcctcaaagcgagaatacaagaaagtggaatgtgaagtctgttcgacatggcagggggctgcacccaagatgaagtggtctgagcagaagatagagttctcggaagaagaccaccccaagaccgccgtcatcccaggacgatatccgatcgtggtcgaacccactattcggaacatcaaggtagcgcgagtcctcatcgacggtggcagctcaatcaatcttcttttcgccagcactttggacgcgatgggaattccgcaaagcgagttgacaccaaccaatcaacccttccacggaattattccccaatcatcgtccagaccattgggcaagattacgttgcccgtgactttcggccaagccaacaacttccgaacagagcagatcacctttgatgtcgctgaattcgatacagcttacaacgccattatcgggagaactgcacttgcgaagttcatggccgcatctcactacgcgtatcaagtgctcaagatgtcgggactgaagggaacaatcactattcaagggaacgcaaagctggcggtgcagtgcgacaagcggagcctcgacatggtcgagcaaacgcccagcccacccgccacgactgagccacccaagaaaccgtccgacatgccgggggtccctagggaggtgattgagcataaactcatggtgcgacccgatgccaagccagtaaagcaaagactgcggagatttgcaccagaccgaaaacaagctatacgagaagagctcgacaaacttctcaaagccggcttcatcagagaagtacttcatccagagtggctagccaatccagtcatggtgcggaaggccaacggaaaatggagaatgtgcgtcgacttcaccgacctcaataaggcgtgccctaaggatcacttccctctccctcgaatagatcaactggtggattcaacagccggttgcaagctgttgagcttcctcgacgcttactctggctaccaccaaatcagcatggcaaaagaggacgaagagaagatagcattcatcacgccgttcaggggcgcacttagtgaccagctcggcaacaatgtcgaggcatacgtcgacgatatcgttgtcaaaaccaagacatgcgactcattgattgacgatctgtgggaaacgctcgacagcctccgacgatatcgcctcatgctcaatccagagaagtgcacgttcggagtaccgtcgggcaagctgctcggattccttgtctttggcagaggaatagaagcaaatcccgagaagatcaaggcaatcgagaacatgaagtcgcccataagacttaaggaggaagccgaagaggcattcgttgcactcaagcgctacctatcaaacccccctgtactcgttgctccccaacctaatgaagaattattcctctatattgccgccacactatattccgttagcaccgtcattgttgtcgagagagagaaagtacaacgaccagtctactacgttagcgaagctctccacgacgcaaagacaagatacccacagatccaaaagctgctttacgcggtcatcatgacatcaaggaagctacgcgactattgtcaagcccagagagtcacagttgtctcctctttccctcttggcaaagttgtgagaaacaaagacgttgtcggccgcattgcgaaatgggtagtcgagctaagccagtttgatgtccactttgtgctacaaacagccatcaagtcccaggtactcgccgatttcgttgccgattggactatgccagataacaaatcagacaaccaagtcgacaacgaaacatggacaatggcgtttgatggcgcactcaacagccaaggagcaggggcaggatttatcttgacgtctccctccggagatcaattcaagcacgcaatccacctcaacttcagggcaaccaataacacagcagaatacgaaggactactcgttgggataagagctgcagctgcatttggggtcaagcgactaatcgtcaaaggggactccgagctagtcgcgaaccaggtgcacaaagattataaatgctctaaccccgagttatccaagtatctcgcagaagtcaggaagctggagaaaaggtttgatgggatcgaggtccgacacgtctaccgcaaggacagcattgagccagacgacctagcacgacgtgcgtccagacgagaaccgctcgagcccggcacttttctcgacatcctgacgaagccatcagtgaaagaggtcagcggcgaagttagcccggacacccccgacattagctcggaggtcaccaaggcagaacgcgccgttgccgatatcgagaccacagacgactggcgcatcccactaatcaaattcatcaacagcgaggagttgcccgaggacgatacagaagccgagaaaataacccgtaaagcaaagatctactgtatggtcggcaacgatctatacaagaaagcgccaaacggggtacttctcaaatgcgtctcgtcccacgacggcagacacctcgtcctcgatatacatgaaggcatatgtgggtcacacgccgccggtcggacattggtcgggaaagtttttcgacaagatatacttgggctgttcccacgaggacagggcggctacaggttcctattcgtggcaattgacaagttcaccaaatggatcgaagcagtacccacgggggaaatcaaggccgacaacgccatcaaattcatcaaagggatattttgcagatacggactaccgcaccgcatcataaccgacaacggctcccagttcatctgcgccgatttctacgactactgcatcgggctgggggtcaaaatatgcttcgcctcggtctctcaccctcaaagcaacgaacaagttgagagggcaaacggcatagtactacaaggaataaaaacccgcgtctacgacagactcatgtcacacgacaaaaaatgggttgaagaactcccatcagtactatgggtcgtacgcaccacaccgacaacgtctaacaaggaaacacccttcttcctcgtgtacggctctgaggctatgctccccggtgagctatga

SEQ ID NO: 44915 - DNA, 1119 bp, Oryza sativa
  Clone ID: PAT_MRT4530_47930C.1
ctatctttgcctaacaaaactctacttgcaaatatttctaagctaggagtttccctgggtagaaatgacatagaagtagatgagtctatttatggtacaaaaatttctgaagttgatagatttgtagctctacatgctagttcttctgtttacaatggttcttctagtaatgtagataatgacaaggatgagcttttaaaattatcttctatccagcacttatgtagtgattggcaagaagaagaacatcacttggattttattgctatctttgagaccagaaaaccgtcattcacttcagcaaatcttagaaacctatgtggtggaaaagattttttatggcatgagaaacctcctgttgggaggtcgggggcattcttttaggggttaatttagccgtttttgatatcggttcaatttcagagggagatttctatgtgaaatttcaacttagaaataaagaagatggttttaaatgggttctaatggcagtatatggtgctgcgcaacccgatttaaaagaacagttcttaacagaattagcgcatacttgcagtaatgagtctcaaccccttttggtaggaggagactttaatatcatcaggtcgcaagaagaaaagaataataattcatttgatccccgttggccttttctttttaatgaagtgatcaatagtctcaatttgagagaaattgatctatcggggaggcagttcacctgggcaaataaccttgaaaatccaacttatgagaagttggatagagtgttaatgaacactgaatgggaacaaaaattccctttggtaacatgccaagcactaccacacgccatttcagatcattcacctattattcttagatctggttcacatgcccattttggaaacctctcttccgctttgaactaggttggcttcaacgggacggtttctatgaaatggtccctaaagaatggcacaacataaataaggggaacacccccatggagcgttggagtcataggattgcccacttgagacaacatttaagtggttgggcacgaagtacaagtggcgcatacaagaaagaaaaattaaagcttttacccaacttaatcgccttgcagcacatccccctttc

SEQ ID NO: 44916 - DNA, 1165 bp, Oryza sativa
  Clone ID: PAT_MRT4530_47931C.1
tttttttttttttttttttggacctttaaggcccctggtccggttttattttcctttttttttttttttttttttttgaactataaagtcgcttgcaccttatatatatctccctagtacacctaatttacacttgcacaccgtatacacttggaggccgggagcagctactacacatatactactgcacatataacgttcagacttcagagtttcagacaacaggtacgtacctgtctgttgttcagtaatcacacggaatcaaatcggcctcatcatcacacagaaaattcaaggtatatctacgtactttgggccagttatcgattgggacaatcagctactagattcggtcgcaatatgtcctccgatcatccgatcatcgtgacgatcgagacgacgacggccggcatgctcgcgcgcgagcagaagcagcatcgatcgtacactagctggtgcagctacatgatggcgcagctgtccgggtcgttgttggcgtactggtggtgcacgacggtgtgcgtgttcgtcgtcgccgccgccgccggcgggtagtacgacgacgactgcccgtactgcgggtacgacgacgactgcccgtactgcgggtacccgccgccgccgccgccgtagtagccacccgtggccatcgtcatcggcgtgtagtagccaccgccgctgccgccgccgccgccgccgcgctggtgaggaggagggtacccgccgttgccgtagtacggggccgggggcggcgcgccggggtagtagcggtacgggtactggttggcggcggcgacgcgcatgagctcgtcggcgtcgacggtgcgcagctccaccacctcggcgtggccgaccttcctccgcagcttctcggtgaggtcgttggagtccaccccgaagccgatcaccagcagcaggttcttgtcctcgccggcgagcgtcacggattccacaccggagactgcagcagcaaccttgatagctttcttgtggcccttctcagagctctgcagcctgatgacaatttccttcctcatatctttctcctggtaagcaagcaaactaaagcaagcgaagcaacagctcaatatactactcttttccaagctcacaagcttaagcaagagagcgagccttgtgactagtgtactctaccttgcctaac

SEQ ID NO: 44917 - DNA, 879 bp, Oryza sativa
  Clone ID: PAT_MRT4530_47932C.1
atggagcctctgcaggaggcggcggcggcggcagccggcggccgcaagcggcgccgccgaggaggcggccggaaccgccgaaagcaccaggcttcgtcctcttcgggggcggcggcgtcggcgtccccgccctcccctcctgcgaagcggcagcgcggggacgacgccgcgcccaagggacggggcagcaagccgaagcccgcgagcctcctcgacaagatgcgtgcaaggttatctggtggtcatttcagaatgttaaatgagaaactatacacttgcagtggacaagatgcatttgactacttcacaaatgagcctgatctttttgatgtgtatcatgcaggatatcgagagcaaatgtcgcattggccagagcaaccagtaaatgttataatcaattggttgaagagtcatagtgcatcttggacagttgcagattttggctgtggcaatgcagcagtttctaaaaatgtgaagaacaaggttttctccatcgatcttgtttcagaggacccttcagtcattgcctgtgatatggctcatactccattggagtcatcctctgtagatgtggcaattttttgtctgtctttaatgggaacaaactatccgagttatatagaggaagcaaaccgagttctcaaaccaagtggttggcttcttattgctgaagtgaggagtaggctagacccaaacactgcaggtgctgatcctgataaattttgtgaggccatcagcaagcttgggttttcccttgtttcgaaggatgcgaaaaacaaaatgttcattctgttccatttccggaaaaaggaaaagagtaaggtggtcaaaaacatcgattggcctcagttgaaaccttgcttgtacaaacggcgatga

SEQ ID NO: 44918 - DNA, 670 bp, Oryza sativa
  Clone ID: PAT_MRT4530_47933C.1
ctactcatcagtgtcgagtgtccaccaaggcaccaacccatataaccacatttcaccgagctgcctccgtaatttcatgggacaccaaccaagcagaggccttggcttgttgcagagcatgtcgggtgggatctcgtagaggtcccggtccacggccttgaccaccgccggcctgcaccccttgtagcccatcgccgcatgggccccgccgtcagccactctgctctgcttcccctgcttcctcgccgccccgtgctctcctcctgccaccgccagccccaccaccaccttgtgctgcctctgcctctgcttctcgtccaccacctcctcctccccaagtgcgccgctgtcaatccacttcaccgccgtaagaaaaactgtcaggttgcaacatgcaaacgccatgtatcgtgctttttgaaaaacttctttacccttcttgggtggttttggtgagggcggcagggagatgaccaggccgcgggcctgcatggcggagtcgaagtactgtgtgaccggccagtcgccgtcgcggtagccgtagccatagcagccgccgccaccgccaaggtcgccgtcgccgtcgtagttccactccccgaacgccgggatgcgccgccgcctcaccctctccttcatgactgccgctacagggttcactcaccctcac

SEQ ID NO: 44919 - DNA, 270 bp, Oryza sativa
  Clone ID: PAT_MRT4530_47934C.1
gcacgaggcctctcctctcctctcccctcgacacagccacacgcggcgcacggcagcgcgagccagatggctgtcaccacggcggccgcagcccgcttcacctgcctcgcgccggccacgcgccccgcctccgcctccgcgggccgcttcctcctcccggcgcagcactggggggcggcgacggcgcacgggagcagcgcggcggtgcctgtggccgtcgtcgccgcggcgccgtcgcggaggtgggcgccaggggtcacctacgccacc

SEQ ID NO: 44920 - DNA, 1102 bp, Oryza sativa
  unsure (1)..(1102): unsure at all n locations
  Clone ID: PAT_MRT4530_47935C.1
gggaaaacaaaaagctttcttcctttctttcttttcaccacgggcgggacaaggcccctgagctgaaactaccggggtccattacatcaacctttttccactggtactcatcaggggcgaggggccaccaaggcaccaacccatataaccacatttcaccgagctgcctccggaatttcatgggacaccaaccaagcagaggctacaaaaaaaaaacacatcggaaaaagatcaaaaggggagagagagagagagagagaggcaccactcgagggggctttggcacgaggaaatgacgctgccggacacatcatggccatggccatctcattttactactactcctaaaacgcccagagagacaccaaccaaacactagtgctggtgagacaggggagggagatagatgaatgggaaagtttgggccgtgcgaccgtggtgacagcatgcatcgatcacgatggggtccgtcncatgggtttctgcttcactttacaacgacacgcaaaacaaggcaggtttggtatgtgtgatcgatcgatctatctggtgagatccctaggcaacgcagctgagtcccaggcaccccatccacaggctcctggtcaccctcttccttggcttgttgcagagcatgtcgggtgggatctcgtagaggtcccggtccacggccttgaccaccgccggcctgcaccccttgtagcccatcgccgcatgggccccgccgtcagccactctgctctgcttcccctgcttcctcgccgccccgtgctctcctcctgccaccgccagccccaccaccaccttgtgctgcctctgcctctgcttctcgtccaccacctcctcctccccaagtgcgccgctgtcaatccacttcaccgccttcttgggtggttttggtgagggcggcagggagatgaccaggccgcgggcctgcatggcggagtcgaagtactgtgtgaccggccagtcgccgtcgcggtagccgtagccatagcagccgccgccaccgccaaggtcgccgtcgccgtcgtagttccactccccgaacgccgggatgcgccgccgcctcaccctctcctgcacgtacgcacgcgtgcac

SEQ ID NO: 44921 - DNA, 1330 bp, Oryza sativa
  Clone ID: PAT_MRT4530_47936C.1
aactagtggatccccgggctgcaggcgccacttcagtccgcggcgttgttccagaagcttctggaaagtcggggaaacccccatggcgtccggcgatccggtggacgcgccggcggcggcggcggagtcgatggaggtggaggcggaccagtgcctcgacctgacgagctgccagctgcacgatctgagcgaggtggagatcccgcccaccctggaggagctcgaactcacggcgaaccgcctcgccgccgtcgacccccgcatcggccgcctcccgggcctccgcaagctctccttccgccagaacctcctcgacgacgccgccgtcgcgcccctctccacctgggccgacatcgctgggctgcaggagttggtctttagagataacaaacttacaacgattcctgatgccagcatcttcaaaggccttctggtctttgatgtatctttcaatgagatatcttccttaaaggggctgtccaaggtttccagcacactgaaggaactctatgtttcaaagaatgaagttgcaaagatggaggaactcgaacactttcatgcattacaaattcttgaacttggtagcaacagattgaggaaccttcgtgttttagatgtttcatccaacaagctaactgctatcgaagatgttgaaaccttaagcagtggcctcgtgtctccaccatcgatcgaggtgggggatgtagccgaggttggatgcgtcagcggcactgcggagcttgagaggataggtggagttgatgccaactctaggggatctgaaccaagctccaacttattcatccacgttgaatgacacatatccttccaaatcttgagcaactcgattcagatatgctagcatgaaactgatgtccttctgtgaagatagggaagacactcctggagtagctctactagcgttgttttttctaacaatcaaagcgtgagaagccttccagttcaagaacaagtaataataaaccatggatgaagcaatgcaacattattgtgctcaatatctaaattgcttcacctttttttcctgctccatgttctgatgctgttactggatggatcatcgtgggcttgtctttgtcaaactatactcccatatacagagatcaaggaaggtgagttagagaggtagagcgtgtgggactgaatgataaaccaataaaacctagcgaactgatgtttttcacagatgatgttgcatttgactattctgtcacaggatgttgcatttgatattacctgtactatgttgacatgtatgctattgcatttgctgtagatgctggggatttgattcaaaaaaaaaaaaaaa

SEQ ID NO: 44922 - DNA, 179 bp, Oryza sativa
  Clone ID: PAT_MRT4530_47937C.1
agttcagaagcactacatttttgaaaaggaggaacaatagcaagactgagtacaaccaccgtactcaacaagccacaccaacgatgcagacgtgcaagagaatataaggatggtttgtggctatttgcataaaggcagttgtaaaacattttattgagcaaaaaagtaaaactgttgat

SEQ ID NO: 44923 - DNA, 315 bp, Oryza sativa
  Clone ID: PAT_MRT4530_47938C.1
ttccaatttggttggaagggaacctttaggaccatccttggggttaatgccaccctgttgccaccagccttaattccggttgcctttagaagccctggtgtaccagcttcgtaaccgaaggggcccgattctggcttcgtgaaggtaatggaaagttatcccgatgcagcttgccaaatggattccttgaattacccccagcttttaaatatggaaaccgatcaaattcgagttcgacccgttagataaactagatagctagacttaagtggataaaatttagatagaaaaaaggtctaaataaaaaaaaaaaaa

SEQ ID NO: 44924 - DNA, 507 bp, Oryza sativa
  Clone ID: PAT_MRT4530_47939C.1
atggcaatggatatggacccgacgggtttccactgcacgatacatacagcctgtcacattgcaaaatcaacaacaagccatctctactcatggtcatggccccagccggatccagcgacctacctcactgcacctgcggcggcgctcctgccgacagctgaccggcgcgcggcgtccctgcccctaagcggcgaccgacgcggtggctatcccgcccccaggaggcggcgtccctggctccctggaccctgccccaggcggcgaccgacgcggtggatgtccgcctccacgctggcggctgcccgcacggcggcgcccctactccatcggcgcgaccgagaccggctggcggctggtgctgcggctgtgcgcgcctacgcggtggtgtgccggcgtgtggcatgtgccgtgcggtgcgaccgtggcttggccgcttgggggatggggggcggcggagaaacggagacaggagggagaggagaggaggagaagaggaatagggtttag

SEQ ID NO: 44925 - DNA, 645 bp, Oryza sativa
  Clone ID: PAT_MRT4530_4793C.1
cctgcagcccaccaccgttttcgccactcgccgccctctctccccgccggaatcgagctcgcgctgtcgctctctctctccgccgtcgccgccgagctccggtccgcagccgtcgtcaccccggaccacctcccacctcggcgccgcctccttcggcttcgccgcatcctcgccgacctcgtccacctctccgtttcggtcgccgaccaccggagcaccgtcgaccccgtccacccgagccgcgccgccgccttcctccgctccggtcgccatttccgtcgtcgccgtcgacccggggtgagccgtggaccgccgcttcgtttccctctttccctcccctctctcagccgccgctccgccgtgcctatggccgccgccggcgaccataggggcgcgggcgcaccgcctcccgccgctgcgctggcgtggcctccttcgggcgcaccgagcggctgccgcgtggggcccggccgtcatccgcccgctccctcgggtgcggctgacgtgtgggacccacggcgccggccggtgtgagcccgggtgcacccggtccaccgtggaccgtgaggctgccgcgtgggccccactcccgtggacccggtccgcgcgcccctcccctcggctgacgcaataaaccctttttaa

SEQ ID NO: 44926 - DNA, 258 bp, Oryza sativa
  Clone ID: PAT_MRT4530_47940C.1
atgggtcttggaggcattgatgttggtaatcgatcagatggttgggtatgccgaggtgttccatgccttgtggacatgctgatgccaggaaatacagcaatcttgcggaatgcgagaatcgatatgttcaagggctcaatgaggcttgctgtcgacaagtggggacgtgtggaggttacagagcctgccagtttcgccgtgaaagaagacaataacctatcgcttgttgagtatgaattggttaacgtgccagagtga

SEQ ID NO: 44927 - DNA, 1569 bp, Oryza sativa
  Clone ID: PAT_MRT4530_47941C.1
atgtctccgtttctccgccgccccccatcccccaagtgcccaagccacggccgcaccgcacgggcgcacgccacacgccggcacgccaccgcgcaggcgcgcacggccgcagcaccagccgccagccggtctcggtcgcgccgatggagtagggcgccgccgtgcgggcagccaccagcgtgggggcggacatccaccgtgtcagttgctgcctggggcaaggtccagggagccagggacgccgcttcctgggggcgggatagccaccgcgtcggtcgctgcttgggggcagggacgcagcgcgccggtcagagcgctgccacagcctataaccttattgagttattgttgtgcataattgaaattgttgcaacgggtgtgggtatcaaatgggtacccatcacccgtgcgggtgcgggtgcggggaatcctatgctaacgaaatatgacaccgatgggttgtatgttgatggtgacaagaaacacaacttaggggtcggggaggaggcgcagcagcacatgatgggcgcgaggtgggcggcggcggtggccaggccgccgcccttcacggcggcgcagtacgaggagctggagcagcaggcgctcatatacaagtacctcgtcgccggcgtgcccgtcccggcggatctcctcctccccatccgccgtggcctcgactcactcgcctcgcgcttctaccaccaccctgtccttggatacggttcctacttcggcaagaagctggacccggagcccggacggtgccggcgtacggacggcaagaagtggcggtgctccaaggaggccgcgccggactccaagtactgtgagcgacacatgcaccgcggccgcaaccgttcaagaaagcctgtggaagcgcagctcgtcgccccccactcgcagccccccgccacggcgccggccgccgccgtcacctccaccgccttccagaaccactcgctgtacccggcgattgctaatggcggcggcgccaacggaggcggtggtggtggtggcggtggcggcagcgcgcctggctcgttcgccttggggtctaatactcagctgcacatggacaatgctgcgtcttactcgactgttgctgctggtgccggaaacaaagatttcaggtattctgcttatggagtgagaccattggcagatgagcacagcccactcatcactggagctatggatacctctattgacaattcgtggtgcttgctgccttctcagacctccacattttcagtttcgagctaccctatgcttggaaatctgagtgagctggaccagaacaccatctgctcgctgccgaaggtggagagggagccattgtcattcttcgggagcgactatgtgaccgtcgactccgggaagcaggagaaccagacgctgcgcccctttttcgacgagtggccaaaggcaagggactcctggcctgatctagctgatgacaacagccttgccaccttctctgccactcagctctcgatctccattccaatggcaacctctgacttctcgaccaccagctcacgatcacacaacggtatatactcccgatga

SEQ ID NO: 44928 - DNA, 552 bp, Oryza sativa
  Clone ID: PAT_MRT4530_47942C.1
atggcgtacggcggcgctaccgcggggcggcggcggcagacggcggcgagtggcggcggcgcgacgagcggcggcggcgcgatgcgacgactaggcggcggcgctaccggaggaaaagagagggggaagaaggagggggtgtcctcaccgaagaggtccgaccggcgtggagggagacgacgcggcgccggctggaggtgggagacgggcccgacaggcttgggaaaagaacttcagggtgtgacactgcccccaagcagcgatcgatgcggtggctatcccgcccctaggaagcagcgtccctggctccctggaccctgccccaggcggcgaccgacgcggtggatgtctgcccccacgctggcggctgcccgcacggcggcgccctactccatcggcgagaccgagaccggctggcggctggtgctgcggccgtgcgcgcctgcgcggtggcgtgccggcgtgtggcgtgcgcccgtgcggtgcggccgtggcttgggcgcttgggggatgagggacggcggagaaacggagacaggagggagaggatag

SEQ ID NO: 44929 - DNA, 2406 bp, Oryza sativa
  Clone ID: PAT_MRT4530_47943C.1
atggaggattggaacggggaatgggggcgatttggcccccctgttgtgtgcgtttcaaaaatcgaaactggcagcgggagccgggaggttggcgaaatggcgaggggtaacgggggggtttctagagatggcaacggccggatccagcgacctacctcactgcacccctgcccccaagcggcgaccgacgcggtggctatcccgcccccaggaggcagcgtccctgactccctggaccctgcctcaggcagcgaccgacgcggtggatgtccgcccccacgctggcggctgctcgcacagcggcgcccctactccatcagcacgaccgagaccggctggcggctggtgttgcggccgtgcgcgcctgtgcagtggcgtgccggcgtgtggcgtgcgcccgtgcggtgcggccgtggcttggccgcttgggggatgggggcggtggagaaacggagacaggagggagatgagaggaggagaaggggaatagagtttagaggagagaacgtacccacactcgtgtacccgatgggtgaagcgattgcgagagatttttcatcggcgaggggacacggccacatggcggggcagacgggccatcgcatggccgtccaaggtcccaatcaggaccccctcgataatatacaaatctccttcccctctgctagagctgagaagccccacatcactggcgcccttttcgaccgaaccagccattacctcggccacacagccggcgcactctactactttggtctccaagcacccaatggcgggatccatggcagcctcaccggcatcagcatcggcgtcggtgtcagctcaacgcagaaggcgccgccaccgtcggaggtgaaggtgatgaagagcgcgacgaggctgagcgtggtgacgacgacggtgttctacatgttgtgtgggtgcatgggctacgcgttgccggacaacctcctcacggggttagggttctacgaatccttctggctactcgacgtcgccaacgtcgtgcacctcgtcggcgcctaccaggtgttcgtccaaccaatcatcgtcttcatcgagcgctgggcgtcctgccggtggccagacagcgcgttcatcgccaaggagctccgcgtggggcccttcgcgctcggaaagcagcagcgcgtgcgggaccacgccttcgacggcatcatggaggtgcagaagcgggtgcgccgcttcctcgccctccactccctcctcctctacgcggccgcccccaccgcgctcgccggcggcgggggaggggccgtgtccgtgcccttctcccgcctcggcgcgctcgcccggcgccagctccgcctcgcgcccctcgacgccggccgcttcctcctgcgccacccgcacgcgttccacctcttcctccaccccgtccaccgcgtcctccacgcccgcctcaccccgcgcgccgccgcggcgctccgcctcgaggccgacgccgtcgcctcctcgctgcccgcctccatcgtccgcatccgcaagctcctcctcctcgcgcccccgcaccaccgcctccgcctcgaacacatccgcctcctccgccgggatctcggcctccccgacgacttcgcggagtcgatcatccaagcccaccccgccctcttccgcctcacccccgaccagttcgtcgagttcgtgccctccccctccgacccgcccggcctctccgtcgccgccgtcgagcgcgcgcgggagcagcactaccgcgagcaccgcaaccctggcgccggggaggaggacgtgcgcttcgcgttccccacccgattcccgccaggcttcaagatcggcaagtacttccgcatcgcggtctggaaatggcagcggcttccctacgcgtcgccgtatgctgacgtctccggccacgacctgcgctcgcttgaggcgcggcggcgcatggagaagcgcgccgtcgctgcggtccatgagctgctatctctcacagttgagaagcgaaccacgctagagcgcctcgcactgttccgtgatgctctcggcgtgcccaagaagatcaaagagttcttgctcaagtaccagggcatattttacatatccacgaggggaaaccaggggaagttgcacaccgtgttccttcgggaggcgtattacaaaggtgaactcgttgagcccaatgagatttatgcggcgaggcggaaactggaagagctgctcatgttgaacccacagaaggcgaatttggaccgaatgttcactagcatgggtcgtggatgggatgagcttggtggcggtcgtcgtgggggagcagaattgagggaggagttccttggtgaagcgagtgaccggagaacgaatactaaggttgatggtgaatatggtggagatagtggtgatgactcgggagttgagtcactctacattgagtga

SEQ ID NO: 44930 - DNA, 402 bp, Oryza sativa
  unsure (1)..(402): unsure at all n locations
  Clone ID: PAT_MRT4530_47944C.1
cggacgcgtgggcggacgcgtgggcggacgcgtgggttcgcacgcagagaagagaaaaaaaaagggaaaaagaaaatgtaccaggcgatcccgtacaacgcgaaccgggcttggccggcggcgagccggccgcggacggcntntntgtttttgatgtacctcatgttcactaggagcctgtatagtaacggaatgattacctgtacgacgtaaacggaagactgaattatgaggtacctaggcgtgattcgcattggggctgagcgtacggatcattcattgcagcgttacttgtaataacgttgagcttactatgtgtgctgtttttataactgatgactgttttctggtacattcattattgtgtgtcttttatagttttaaaaaaaaaaatgaaggggg

SEQ ID NO: 44931 - DNA, 450 bp, Oryza sativa
  Clone ID: PAT_MRT4530_47945C.1
atggcaattaaggaccggttcacgggaaaccctggaagacttacagcgcttgccacaagcgggaagttccaggcctcgggtgaggattattctctcacccgtgggtcggcatggatcgagccgcaatacacagcaatacacgaacatccaaattcacatttgggccagatgtgggaattgatccaggcgtgggctgcattccacggaaggatggttgactccaacaaaactggaggatcccctgcagggacttcgaagcaaacattatctgctgaagagatggatgatcagcttgaacaatttaccagcttgatgcaacagaagttcctgtccggtgaagactttgggcatatggactactctcggatcgataatgacgagatgctggacgaccattggtcaaaagaagccaactacgatgctggggagaagtatttcgaagaggattag

SEQ ID NO: 44932 - DNA, 470 bp, Oryza sativa
  Clone ID: PAT_MRT4530_47946C.1
ctcccccgcggccaggccgttcccgccgccgcccgcttcgccgtcgccggcggctccaccgccgagctccaccgaccgcgcccctctgccgccgctccaccgctctggcgccgctccaccgctccgccgctgccgccgacctctccaccgcgcgcaagctcgcgcgctagcgctccaccgccgccaccgccgctccacagccgctgccgccatctctctctctctctctcgcagtcgtccacatgcggcttcgtcatcggcctttcgtcgtccacgagcgaagacgtcctcggccgaacggcttcgtcggccggttcatcgtccacggccgaaccttgtcgtcggcccttccttcgtcgtccatgaccgaagctcatcgtcggccgttcgtcgtccacggacagacttgaggcagacacgatcacccacgtggcctaaccccctcggggggggggggtcgggcccgaggg

SEQ ID NO: 44933 - DNA, 335 bp, Oryza sativa
  Clone ID: PAT_MRT4530_47947C.1
aaataaaaaaaaaaacggaactggttgagcaaaaaccacaaaatgttcaggccctaaaaaacgggaataccgatacatccagcataacaaaaatggggaaaagcacaaagtcagataaagctatagaaaactagggctccaggaaaagggggccaaaagacaaccatggggcttaatcaacctcctccattttgctttcgccggggtggtcctccaagggggggatgtcggggtaagcctaaaaaaactcgtccttgtcgatgctcaggccgagcttgaacatccgggggatcctggggccaaaggggttggggtcccaaaggctgaaaccggag

SEQ ID NO: 44934 - DNA, 222 bp, Oryza sativa
  Clone ID: PAT_MRT4530_47948C.1
atgggcaacggcgatgtctatgatgccatgaccttcttgaaggcattgtctaggaggtctccattccttgccatcgtcatcttctctctgcttggacgccggaattatggagaggaccatggagcacttggagagaggctaggagatggatcaagtcaagatggagaaccaactcatatcaagttcgagtccacttcgggctccaggagcagtccacattaa

SEQ ID NO: 44935 - DNA, 327 bp, Oryza sativa
  Clone ID: PAT_MRT4530_47949C.1
atgaacaagtttatcacagaatcaaacatcctacaacaagcacaacaagcacactataacacaagaacagatgttgccgaccgttgtctatgtaaagggacagagaagccggagattgctcgaggacaggcacggaggccatatccagcggcccccgagctcgggcctatcgaatgtagcgtcggtgctgccgctgccgctcgtgagtggggagggcaccgctgctcgcgggtgggaggttatcaccgccgtgagcgttgctcactggtgaggaatgcaccgtcgggtctcaagagtggggaggacttcaccaccgcttgcgggtag

SEQ ID NO: 44936 - DNA, 240 bp, Oryza sativa
  Clone ID: PAT_MRT4530_4794C.1
atgtcatggcacagggccggtgtcctgctgctaggggttcagtcctgcctgcctgtcccgggggttccggccgtagatgggattgggtcggtactcttgtctatggctaggatgggtggaatggttggcctaggttggcttgggacgagctgggacccagggtcgggttgccagttcggtctgaatcatcgtaggccttgggttaaggcagtaagagaagctttggagaagaagtcttag

SEQ ID NO: 44937 - DNA, 1717 bp, Oryza sativa
  Clone ID: PAT_MRT4530_47950C.1
gtagtaaggaacatcaaattaatatatgttcggtaagaaatgcataaaacaagtcaatacataatcgcctgctaaaattcattactagtagtagatagcacactacaccatgttcttttcatcaaccgcacacataaatgtgaaatatattaattcatcagctatatgcaaaaacaataacataagacaagataacttacaatacagaactggctacatactaaaccaatgcttttccaagccacaagagtcgacctttacgcattgcaaggtttagttgacttcaatgaaattccagtgacaaactcatgaaaaaaatgaactcttttatcaccactgcagaaaatcttacaagatgtaatgcaatcagaatcattttgacaggagcagtacatcaggcttccgctgcttgcctggtgtgtttggcttggagctgggtctagagctcgacgcggtgctaccagctgtgcctactgacacgattgccccagaagctgctgcagctgcctccttggcagccttgcgtgcgcttttgtcgagctcgatcaagctacgggacgccaagatagcctgtggcacaagctcatgacacgcgcgggcatagacaacccgcacagcttctgcggcggtatcccgcacctccgtcggattcagcggagctaacaggcagtgaccaagaactctcatcactggctgtagaagctcccatggaagtggcaccctcccctctctctcgccacaattccgaccattggtgtctccgttgacgcgcatctttgccatttcctcctccaaggccttcccgttctcggcctccgatgacaatggcgaaacggaccccaatgaatcagcctcctcctcttccaactccttctcatcaagctcaaatcggcacttgcagtactgccccgcccacgccgccacggcgttgcaagcatccaccttcgatgcaggcggcatctgcgaaatcttggcatagtacgcctcgaaggcaactccgataatccccgcgcgcttggtcgacttcaccgccgcctgtggctcaagcggcggcgatagcaccccgaccacaacattccccgcgggtggggggatcggcggcggctgtggccggcgaggggacttcgagctggggctggacagcggcgtgtggtagagggaagggacggagaggtcgggtacctggacaaggacgggcttgccctggcgattcttggcctcggaggagtagacggcgaggaggacggcctcgaagccggagagcgaggaggggagcgcgggcggcaggcggaggaggtagagcgacgagaggagcgggaggaacgcgagcgcggcgaggcggaggtcggggtccggggacagcagcgtatcgtagagccagtggcaggccgggtcgtcggcgccgccccccgaccggagcgccgcggacagcgcgacgtacgcggcggacgaccggagcagcgcgcgcgccgggcggtcggagtcggcgagcgccgcgacgtcggaatcggccggcgccgggaggatggacgacagcgccaggatgcgggacctcgcctgcgagaccgactcccaccacgacggggtggggtcggatgcggacgccgccgacgagttcgacggcgaggccgccccggcggcggacggggacggaggcatcgccggcggcgagagagagaggaaagcgagatgagatttgggcgatctctcctcgtgc

SEQ ID NO: 44938 - DNA, 205 bp, Oryza sativa
  Clone ID: PAT_MRT4530_47951C.1
acagcatcaaaaaatggatattcaaattctttggtaggacaattagacgggtgctacaacaaaaactgctccagtcgcgcatgctcggcagaacgagtaaatataacttgtgatataacatacaaaaactgtctcatttattaaagaagctcatatgaaccaacattataaagtgtcaaggcaactattgcttcaagcctgaatt

SEQ ID NO: 44939 - DNA, 212 bp, Oryza sativa
  Clone ID: PAT_MRT4530_47952C.1
ggaaagggaaaattcatccgaattatcaacaatgggagaccagctttaagtaatacagttcccaaaaaggtttccataggacatactaaaaaacaaattgaagacataggaagggggcgggggcattacgaggcggaaatgcggggataatgtatgacgggaacaccaagcacacaaaaccctgccctataaccaccaagcaaaagccacct

SEQ ID NO: 44940 - DNA, 975 bp, Oryza sativa
  Clone ID: PAT_MRT4530_47953C.1
atgcccatgccagtgccaacccagctaaacagatccaatccccttctcttctcccccatcctctccacgagtgggttgttcattggtgtcggatggaccttaactacatatctattggaaatcaaactagccagggatcgaaaaaatgctagggtgaaatatgattggtttattttcaataagatgatagactcaaatgctatgagctacaaagactttgttgctgatattgcaaattcatatccatgggggccaaatgaaaccgtcacaattggctatgtgaatatggttcataaaatttctcatcatgtcacaactgaccaggatatgctagaaatgtttgaaaagtttgttgatatcaaggtgattccaatgattattcgtatacatggtatgaatgaaaatattgatgagttagaccacactcttgttaaagcaaacatatgtgttcctgatacttcttctctggcaaccccatctcaagtggatttcagccaacctagcagcagcactctgccttctcatatcctcgtgccatcagacaaagatgatggtgtcaatgaatctgaggatgagtcaatggcatcagatgggatgccagaacatattcctagcacaatttatgataaggatgacacaccaatgattttaggaagcatatattctaacattgacgaatttagattggcaatagcacaacatgcaattaaatttagattggcaaagtgtgctgctcaaggttgcaagtggaggatccatgcatccgtggttgctgatggtgtcactataatggtgaaaaccaatccttttccacatgaatgctcaagtacgagaagaagtgagactatcaaggctgcaagcaagttttggatttgtgagaaggaacaacaaccaggcaaagactttaaccttcatgtatactttgctggaccagatccatggaagggttactgctggctgtatggaccaaaatga

SEQ ID NO: 44941 - DNA, 2685 bp, Oryza sativa
  Clone ID: PAT_MRT4530_47954C.1
atggcagattcaatgcttagcacggttccttcatggctccccgtagggatggaccccttaactacatatttgttggaaatcaaactagccggggatcgaaaaaatgctagggtggaatatgattggtttattttcagtaaagtgatagactcaaatgcgatgtgctacaaagactttattgatgatattgcgaagtcatatccatgggggccaaatgaaactgtcacagttggctacgtggatatggttcataaaattactcatcatgtcacaactgaccaggatatgcttgcaatgtttgaaaagtttgttgatatcaaggtgattccaatgattattcgcatacatggtattaatgaaagtattgatgagttagaccacactcttgttaaagcaagcgcatgtgatcccgatactccttctttggcaaccccatctcaagtggatttcagccaacctagcagcagcactcttccttctcatgtcattgtgccatcagacacatacttagtaaacccattttctatggctgaacatgttggtgttgatgaggaaggcatatacttagatgaggaggaggctgttgttggtcatgctgatgaaactagaggtgaaggggctgtcaatgaagtatccgaggatgaatcttgggctacatctgaggatgaatctgaggatgcatctgaggatgatggtgtcaatgaatccgaggatgagtcaatggcatcagatgggatgcctgaacatattcctattgcaacttatgacaaaaatgacccaccaatgatcgtaggcagcgtatatccaaacattaatgaatttagattggcaatagcacaacatgcaataaaaaaggagtttgaatataacatcatccgaagtgaaccagggcaatatactgcaagttgtgctgctaaaggctgcaaatggaggattcatgcatccgtggttgctgatggtgtcactatgatggtgaaaactaatcttgtgccacatgaatgctcaagtactagaagaagtgagactatcaaggctgcaagcaagttttggatttgtgagaaggtaaaagattggttgttggaggatgctagtgtgggagcaaaggaattgcaaagaagaatccatgaaacacataaggttaagatcaactacaaaagggtgcatgctggtagggagcttgctatcacaaagttgtatggtagttggagagagagttttgacatgttatatagatacaaggcacaaattgagaaatcaagtcccggcagttttttcatcattgatcatcacactgttcttgaagagataaaattcagaaggttgttctttgccttgaaaccatgtattcatggtttccttactggttgtaggccatatttggccatagacagtactttcttaacgggcaagtttaaggggcagctagcaattgcttgtgctgtagatggacataactggatgtacccagttgctttgggtatatttgactcagagactgctgagaactggatgtggttcatggaacaactaaaagatgcaattggcactccaagtggcttggctatttgtactgatgcagggaaggggatagatagtgcagtgcatgaggtctttcgtaatgcagaacaccgggagtgcatgaagcacatggtcaccaacttcaaaaagaagttcaccggcaagatttttgatgataacctttggcctgcggcatatgcatggagcccatacttctatgagaaacatatggcagccatacaagaagttaaaccagaagcagtagcataccttaagaagtatcacaaaaggctatggagtaggagtcagttctctacaattagcaaggttgattatgtgacaaataaccttgcagaaagcttcaacaatttggtgaaagattggaaagcactacatttatatgacttcttggagaggattcggtggtggttgttggtgaaatgggataagaggcaaagaataggtaagaaatttgaaggctgcattctacctcatattgtcaaggaattgaatgaaaaaagtagagatttaaacatggtggtcacaaggaatggagactttgaggcagaaattgaggtcaagggagcatatgagaaattgatcccttcattacctgacaaggcacaatggccaaaagctgatcatgggtttttcttggcaccacccattctgaagaaatcagctgggagaccaagaactatgaggtacaaaggatgcactgagaaaggaagcaaaaggagtaggaggcacaaatgccccatttgcaagagttatggccatcattggcacaattgcaaagagggtgatccagaggaagtagcagcaatgattgctgaaagagggccaccaaagaagagaacgaagaaaactaatgaagcaacctcggagactagtatcatggctgctccaatagttacaccaataatggcataccctcctagatcaacatcacttactggctccaaccaacttgagcaatctaacatgattgtagccttgccatgtctgggggaggaaacacctacagttgcaccaaaaatgaccaagagcaagacaaagggaaagccatcatgttctagtactcctggtagcccagctatgagcacaaggagcaaaaataagagtcctgcaatgggcactaggagcaaaagaaaacttatggattga

SEQ ID NO: 44942 - DNA, 2346 bp, Oryza sativa
  Clone ID: PAT_MRT4530_47955C.1
ctacttaaaaaaaactgtagtggtggtggtgagagattcatcggaggatcctcccaccaaatcgacgctccaaacgctcctatccgtccacaccatcgcgctccaatcgcgctgcatccgcttctctccgccctggctttccggcttccgcgcgcccgctcgcttttcgccgtccttcctctcgcccgctcgccctcgccgtcctcctcgactagctgttcctccccgccgtcccaccgtcctcccccaccgtcccgcgctgccgccgccatcgatcctccccgccgcccacgccgtcctccaccagatcgctcccccactgccgccgccatcgatcgcccccgccgtcctcgtcgccgccatcgccgtcttccaccacggctgaacaggagttgccagggtcgtcgtcctccgatctccttcgcccgagccgatctctccaccgatttgctccgaccgtgccgatctcctccgtgccaccgtcggtactccctcaccaatctgctccgcccacgccgatctctcccatccgcgtcgccagcgagggccaccccaccaatctcctccgtgccacctctggaacacccgcgcccgcgtcgccgacgacgatccacccgtcgcaccccttctcatctccccgatccgcatcgcgctccctctctctccgatctgtaattccgcatcgcactccccagccccccatccttcctcctcggcgcgccgcctcctcaccccaccgacgcgctgccttcccatcccgcccaacccgcgccttcttctccggttgtcctccctccgtattgtgctgtccctcgcttcgcccccttcctctccatcgcgccaccgcccccctccataaaccataacctccctcaaatcccgatcatctgcgcagccgtcgttatcgtcggaccgagctcttcgatcatcaccctccgttgccgccgctgcatcggacccatcggaatggtggatgggaatgcggacctcagtatggttgaggggttggacgagatgatggcggtggttgcaggcgcgcccaccagcacgctcgctggagtgtggagaggcgcgcgcccgctgctgcgagtcaccggcggtgtcgtcggcatcatcgtcagctagctctaactgatctacttgaacttgagctattgttccttgtcctactatcctcaatgaaatgaatgctttgactattctttgcctcttatcccatttcaccaacaaccaccgtcgaatcctctccaagaagtcatacaaatgtagtgctttccaatctttcaccaaattgttgaagctttctgcaaggttatttgtcacataatcaaccttgcaaactgtagagaactgactcctactccatagccttttgtgatacttcctaaggtatgctactgcttctggtttagcttcttccatggctgccatatgtttctcatagaagtaagggctccatgcatatgctgcaggccaaaggttatcgtcaaatatcttgccagtgaacttctttttgaagttggtgaccatgtgcttcatgcactcccggtgttctgcattacgaaaaacctcatgcactgcactatctatccccttccctgcatcagtacaaagagccaagcctcttggagtgccaattgcatcttttagttgttgcatgaaccacatccaattctcaacagaatcatcagcaaccacagatgcatggatcctccaattgcagccttgagcagcacactttgcagtatattgccctggttcactccggataatgttaaattcaaactccttttttattgcatgttgtgctattgccaatctaaattcatcaatgttaggatatatgcttcctacgatcattggtgggtcattcttgtcataagttgcgctaggaatattttctggcatcccatccaatgccattgactcatcctcagattcatcaacaccatcaccctcagatgcatcctcagatgtatcctcagatgtagcccaagattcatcctcggattcttcattggcagccccttcacctctagtttcatcagcttgaccagcaacagcctcctcattatcggtcagatcaagggttaggtggcgactggcggtctgacgcacgcctcgccccatcccgtcaggacgagggcttctaggcgctcgtccccagctggagctagcgtgttacctcccagagatggcacaatgaccgacgtgactggtctgacaccggtcatgtcgtcagcagacagccacgattccacgtcgcatctgctcccggcgaaagtggaggggggcctgtgcggtctcccagtgaggagccccacgctccgtcatctggcgcgccag

SEQ ID NO: 44943 - DNA, 1085 bp, Oryza sativa
  Clone ID: PAT_MRT4530_47956C.1
ccggtcgtcgtcgtcgtccgcccgcgcgtgctggctctgcagcccccgccgcagtagtgggaccgcgcgtgctgggtcggggaagcccgcgcaggcctgtcacgccgccacgatcccacgagccacccacaaccccttctccaacggcccagatctctcctcccacgcagattccacctccccctcctccccctctctctccccttcacctccgcacccaacaatggcgcagccagagaaggtctcgtaatccaaagcggcccgcctcgaatcccctcgcgcagccgccgccgccgctcgatccccgcggcgtcgcgcggggtcaccggaggagagccgcctaacaagcccctcgcgagccccccgccaccgccgccgccgcagcaagctggggtaacgggtggcttccctcagcaaccactaccaccgccgccgccgcgaatggcacagtatccgcagccgccagcaatggcggcgccgccgcctggaccgtaccagcacaggatgccactggttcagaaccaggcctacccttttgcccagatgcatcagatgccaatgctacctcagcagaggggttacgcccagatgccaatgccagggccgccatcgcagccgccgcctccacaagctatgtatcaggcccatcctcagtatcccatgccagggtctctccctccaccgccgccacggccaccaagctttgctccagagaatgcgctgccaccatctagccccccgcctccatctcccccaccaccaccaccgtcttctccacctcctgtgcccccttcaccaaccgctgcccccccacccaggtacccaccaccactaggtccacaaccctctccactttccctacccactcggcgagttcaccggcgacaccgccgcctcccgcctcttcccacctcggcgacgaactctgctgctgccagcctttccccactccccataccttggcaacgaactccgccatcggcggcctcttccactggagcagcgtgggagctcggcctccaccggagctcgagcggatcccacctggagctcgatggtgctacccgaatctcgcccggcgcggg

SEQ ID NO: 44944 - DNA, 248 bp, Oryza sativa
  Clone ID: PAT_MRT4530_47957C.1
aaacaaaactttcatttttgcaaaattgaatttagataaatagccgttaaacttatgaatgtggtgtttcgctcaatggtgagacttatgcctgccagcaataccaaaatatacatgatcctcaaatttgccgcacatgactcacctttgtcgcactcagtgtatcagctgtgagtccttggaaatatggctgtcattcaacggcaccggcctcatttaggcacccaaactggcaatggcagagactg

SEQ ID NO: 44945 - DNA, 1649 bp, Oryza sativa
  Clone ID: PAT_MRT4530_47958C.1
ttaaaaaaaggggtttccaccaacttggggcaaatgactttggttgatggggaaactggcattctgcatctgatgtgtaaccttaacatcatgttgttggactatgaaattggcagctcctacaggatattgcatgttgtattgtacatttcccatatttaactgaggattttgtctccaaccccagtttgcagcatatgggtggcaactcatggtaaaaatatcttctagaagtgcctttcctctactagatgtggtgtccacagcaggtctctgtgatactagtgttcctgcaaatatatttgagccatgatttgaaggaggagcatggctccctttgattgatgcttgcgatgtggctcccgacaactggctattaaccggagcactattagctctgtttagtggagaactgtaagactggatattatctgtggggcggaaaaagaactggttctgctgactgccgttatttgcttgggaaaaagacaaggacttggtactttgcctggttggtaaactaattttaggtgaagagtcagaatttagaatctgaacaagcggaccaggcaagaggttgtccttggaagtcccaatgtttcaaatatatttccttaccacgctatcaacgttacccccttcttgaagagcagaaacttcttgagaagtaaatttagccattgatattgattttacacgatgagtgaactcccgatgtattccgctgcaactaacacagacgaaagttgagaagcttgtgcatacgtattgtggtcccaggctgttgcagttgatgcagcggcggttgccgggcagcttgagcagggcccggatggccctctcgttcctctcctcctccttcaccctgctccccatccaccccctgctctgctccgcgattcgatccgcagcaacaacgaaccggcggtggtgctccgacttccaagagcgagatgcttcgaagatttctcgatggagtttggcaacttttcttgctgttcttggcggctttgagtagtggttctattcttttgatccactttagcaggtactggatgcttattgagattgttttggtcttctgaggtgcttgctgtgctatgctgtggaccgtgattatcttcagaagttccaccatatgggcctctttgaactcccctggatgaatctatattgttgtttctgtaagtgtcatcccgactacccttcgcttgtggttgatggttaccaattctttctgctgtgaaccttcggtcaacatatacaatcttgatgaagtttctgagcctatctacatcaattaagagtctatgataatcatctggtttagtggcagacctaatgtcaggaagaggctgtccttggaagtcccaatgtttcaaatatatttccttaccacgctcgtttcccccttcttgaagagcagaaacttcttgagaagtaaatttagccattgatattgattttacacgatgagtgaactcccgatgtattccgctgcaactaacacagacgaaagttgagaagcttgtgcatacgtattgtggtcccaggctgttgcagttgatgcagcggcggttgccgggcagcttgagcagggcccggatggccctctcgttcctctcctcctccttcaccctgctccccat

SEQ ID NO: 44946 - DNA, 2154 bp, Oryza sativa
  Clone ID: PAT_MRT4530_47959C.1
atggcagattcaatgcttagcacggttccttcatggctccccgtagggatggaccccttaactacatatttgttggaaatcaaactagccagggatcgaaaaaatgctagggtggaatatgattggtttattttcagtaaagtgatagactcaaatgcgatgtgctacaaagactttattgatgatattgcgaagtcatatccatgggggccaaatgaaactgtcacaattggctacgtggatatggttcataaaattactcatcatgtcacaactgaccaggatatgcttacaatgtttgaaaagtttgttgatatcaaggtgattccaatgattattcgcatacatggtattaatgaaagtattgatgagttagaccacactcttgttaaagcaagcgcatgtgttcccgatactccttctttggcaaccccatctcaagtggatttcagccaacctagcagcagcactcttccttctcatgtcattgtgccatcagacacatacttagtaaactcatttcctatggctgagcatgttggtgttgatgaggaaggcatatacttagatgaggaggaggctgttgttggtcatgctgatgaaactagagatgaaggggctgtcaatgaagtatccgaggatgaatcttgggctacatctgaggatgaatctgaggatgcatctgaggatgatggtgtcaatgaatccgaggatgagtcaatggcatcagatgggatgcctgaacatattcctattgcaacttatgacaaaaatgacccaccaatgatcgtaggcagcgtatatccaaacattaatgaatttagattggcaatagcacaacatgcaataaaaaaggagtttgaatataacatcatccgaagtgaaccagggcaatttactgcaagttgtgctgctaaaggctgcaaatggaggattcatgcatccgtggttgctgatggtgtcactatgatgaaacatatggcagccatacaagaagttaaaccagaagcagtagcataccttaagaagtatcacaaaaggctatggagtaggagtcagttctgtacaatttgcaaggttgattatgtgacaaataaccttgcagaaagcttcaacaacttggtgaaagattggaaagcactacatttatatgacttcttggagaggattcggcggtggttgttggtgaaatgggataagaggcaaagaataggaaagaaattcgaaggctgcattctacctcatattgtcaaggaattgaatgaaaaaagtagagatttagacatggtggtcacaaggaatggagactttgaggcagaaattgaggtcaagggaggtagtgggtttagacatgttgtgaatttggagcacaaaacatgtacatgtagggaattccagatctcagggaagccttgtatccatgctatagcattcatcacatcaattagaggaaggcttgcagattatgtggatgattgctttagtgtgcatcgattcagggcagcatatgagaaattgatcccttcattacctgacaaggcacaatggccaaaagctgatcatgggtttttcttggcaccacccattctgaagaaatcagctgggagaccaagaactatgaggtacaaaggatggactgagaaaggaagcaaaaggagtaggaggcacaaatgcccaatttgcaagagttatggccatcattggcacaattgcaaagagggtgatccagaggaagtagcagcaatgcttgctgaaagagggccaccaaagaagagaacgaagaaaactaatgaagcaacctcagagactagtatcatggctgctccaatagttacaccaataatggcataccctcctagtcaaaactttaatttcaccgaggacaataggacattgaacaatagctcaggttcaagtatatcaattagatcaagatcacttactggctccaaccaacctgagccatctaacatgattgtagccttgccatgtctgggggaggaaacacctacagttgcaccaaaaatgaccaagagcaagacaaagggaaagtcatcatgttctagtactcctggtagcccagctatgagcacaaggagcaaaaataagagtcctgcaatgggcactaggagcaaaagaaaacttatggactga

SEQ ID NO: 44947 - DNA, 316 bp, Oryza sativa
  Clone ID: PAT_MRT4530_4795C.1
atggacattctccagggcaaatgaaggctacacgagctgcggcccggtagtcgagatgtcgtatggcagagggttggtgccctgctgctaggggctcagttctgcctgcctgtcccgggtatcccggccgtaggtgggattgggtcggtacttttgttcacggctaggatgggtgaagggttatgtcacatctttacgacgggttccaaggccatggaatgcggaatggttggcctgggttggcttgggacgagctgggacccagggtcgggttgccagttcggtctgaatcatcgtaggccttgggttaaggcag

SEQ ID NO: 44948 - DNA, 928 bp, Oryza sativa
  Clone ID: PAT_MRT4530_47960C.1
tctgttgtagtttttgaactgggatcagcagccctcggtggcactactttctgtatttcagcaggagtggtagatgttgtggctttatgagatctaggagggtcaggaagccttataggcagaacttttctattagtttctttggaaggttcaaccacagaagatactgatttggtcgtatccttaagattattttctgagcttccacctgtcttttgaagtccatccaggtattgatgtttcccagtgttggcattttccctttctgtagtggttctattcttttgatccactttagcaggtactggatgcttattgagattgttttggtcttctgaggtgcttgctgtgctatgctgtggaccgtgattatcttcagaagttccaccatatgggcctctttgaactcccctggatgaatctatattgttgtttctgtaagtgtcatcccgactacccttcgcttgtggttgatggttaccaattctttctgctgtgaaccttcggtcaacatatacaatcttgatgaagtttctgagcctatctacatcactaatgtcaggaagaggctgtccttggaagtcccaatgtttcaaatatatttccttaccacgctcgtttcccccttcttgaagagcagaaacttcttgagaagtaaatttagccattgatattgattttacacgatgagtgaactcccgatgtattccgctgcaactaacacagacgaaagttgagaagcttgtgcatacgtattgtggtcccaggctgttgcagttgatgcagcggcggttgccgggcagcttgagcagggcccggatggccctctcgttcctctcctcctccttcaccctgctccccatccaccccctgctctgctccgcgattcgatccgcagcaacaaagaaccggcggtggtgctccgact

SEQ ID NO: 44949 - DNA, 494 bp, Oryza sativa
  Clone ID: PAT_MRT4530_47961C.1
ataatgaggaggctgttgctggtcaagctgatgaaactagaggtgaaggggctgccaatgaagaatccgaggatgaatcttgggctacatctgaggatacatctgaggatgcatctgagggtgatggtgttgatgaatctgaggatgagtcaatggcattggatgggatgccagaaaatattcctagcgcaacttatgacaagaatgacccaccaatgatcgtaggaagcatatatcctaacattgatgaatttagattggcaatagcacaacatgcaataaaaaaggagtttgaatttaacattatccggagtgaaccagggcaatatactgcaaagtgtgctgctcaaggctgcaattggaggatccatgcatctgtggttgctgatggtgtcactatgatagtgaaaaccaatccttttccacatgaatgctcaagtacgagaagaagtgagactatcaaggctacaagcaagttttggatttgtgagaaa

SEQ ID NO: 44950 - DNA, 876 bp, Oryza sativa
  Clone ID: PAT_MRT4530_47962C.1
gtttgttttttttttttttgtttttttttttttttttttgaaaatgaccaaaacttgttttactgaacatttggagtgctgatacaatatacaaccacatcccctagggagagactaaaactgaattcaatttacagtactatctgggttttacattttggatgtcacacaagaactcgattggctatttcttgccatttcggtattagaaatgcagggcaatatgcttcactcttccattgtttactatttccataacacttacacttgacataagattgcttaaaatacgcagctaaacacaggaggcatcagaaaagtgttaaaaaaaggggtttccaccaacttggggcaaatgactttggttgatggggaaactggcattctgcatctgatgtgtaaccttaacatcatgttgttggactatgaactgatggttgttcgtcgtcattggtggcagaatttgtggagttatcagatcagaattaacaaatcctgtgaatggagcacgcggcagcattgaagtactacccgtatgcggtaatgctcctcgcatggaagacaaagaagggaaattggcagctcctacaggatattgcatgttgtattgtccatatcccatatttaactgaggatttgctctccaatcccagtttgcagcatatgggtggtaactcatggtaaaaatatcctctggaagtgcctttcctctactagatgtggtgtccacagcaggtctctgtgatgctagtgttcctgccaatatatttgagccatgatttgaaggaagagcatggctcccttgtattgatgcttgcgacgcggctccccacaactggctattaaccggagcactattagctctgtttagtggag

SEQ ID NO: 44951 - DNA, 570 bp, Oryza sativa
  Clone ID: PAT_MRT4530_47963C.1
gttttctattaggtaaatgaagatcttttttttttccatctatgtacagttcccttctttgtcttccatgcgaggagcattaccgcatacgggtagtacttcaatgctgccgcgtgctccattcacaggatttgttaattctgatctgataactccacaaattctgccaccaatgacgacgaacaaccgtaatttttttttactttgtttcgccatcttctgaattcaatttaactccatcgtgatttccctctaaaccttattatatcatgtcatgctacaataactattttgcagatcagttcatagtccaacaacatgatgttaaggttacacatcagatgcagaatgccagtttccccatcaaccaaagtcatttgccccaagttggtggaaacccctttttttaacacttttctgatgcctcctgtgtttagctgcgtattttaagcaatcttatgtcaagtgtaagtgttatggaaatagtaaacaatggaagagtgaagcatattgccctgcatttcttataccgaaatggcaagaaatagccaatcgagttcttgtgtgaca

SEQ ID NO: 44952 - DNA, 1088 bp, Oryza sativa
  Clone ID: PAT_MRT4530_47964C.1
aatcacgaatcaagtgctttacaattcaaatcatgtttgtgctaaaaacaaatggtgtgacatacaagcaaataactcaaatcaaatgctctaatatagcaaatcacgaaagaacatgttacgcggaaaagagtagatgccttttaaacatcaccgtctctgcttaatctccaaattcttctactcgtttcaaactgcatcagcgcactgcttggtgacgcacgccgctcggcttggctggacctggcaagcggccggcgtgatctccggcgcgcttggcgctgtcgccgccgctgccggcggcggcggctggtgtgggtgcgggtgcgggccgtacggcatcggcggcggcggcatgcccgggtgtggggcgccgtggccgacgtagtagccgccgacggggtgctgcgcccgcagcttgttcgtctgcagggccgtgacgtagacgacgaagccgacgacgacggtgatgagtcccaggattcccgccgccgcgaacacccccgggcgcacccggtggcacaccgcccgcggcttcctccagtcgctgacgtggccggactccaccgcgatgccgaccatgagcatcacctccgcgagcccgaagcagatccaggtgacgaagaagaggcagcaggtctgccaggtgagcctggcggggtcggaggggacgcgcgggtgtccctcggcgacggcgagccccgccgcggacgagtccggcgcggcgacggcgagcagcatgtaggcgtgctcggcgaacatggcgacggcgagcatcaggaacgccccgatggcgaacgccagcggcgcccggccgctggagttgtagaagcagacgtccacctgcccgttgttcgccgccgcgttggcgccgccgccgccgacggtcatgaggtagtgcgacgcctcggagcgcgacccctcggcggcgaggcagaggatgaagccgacgatgccgcagagcaccgagagcgacaccagcgccaccgccgcccgcccgctcgaccgcgccgcccgcctctcctgcgccttccgcagcgacaggtcgtcgtgcgtcaccgccgccggcatcgccgcctgcatcgaag

SEQ ID NO: 44953 - DNA, 612 bp, Oryza sativa
  Clone ID: PAT_MRT4530_47965C.1
ggcgctggggatgatatgctagagagggatatggtgcatgagaaagaattcaaccatttgttgggagaatctgttgagctgctttgctggggattcagttttgtgattgatcttccaggaggggcacaatgtccaggtgtttcccattcccgccgcctgggtatgaggcgaagcctaggagtgagcataatgatctgctaaagaagggaaaacacaaggagaagaagcacaaaaaggaaagtaaggaaaggagaggacgagaaagaaaagaaaagaatagcgatcgtaggaaagataagcacagcaagaaacacaaaagagagaagcacaaagataagagaaagaacaaggatgatgatagatacacaaatcaaactttggaaaaagcaactctgaggaatgcagatctcgacaatggaaggtttaaagaaaaaatacaacacgaagctgtcaaagatattaaacctgcaaatgagttggttacccaaatcctagatcaagaaggtcatgcaaaccacacaagcagtagtactggcaagttgctccctagtaccaaaagctttggttctgcaggttctaaagggaagagaagatctttgagcagtgtgattg

SEQ ID NO: 44954 - DNA, 847 bp, Oryza sativa
  unsure (1)..(847): unsure at all n locations
  Clone ID: PAT_MRT4530_47966C.1
ctctttcccacccaatttcgacggcgagctcgagcacaacgcgaggaggcacggggaggagcactgctacgatgcggcgacgacgacgcctgcnacgatgacggcgctcgcncgacaatggcgcccgtagccctaaaggatggtggacaacgacgagactaccatccgtgcgcgcatcctctcctatgcgagtggcggcggcgtactgcagccagcggaggcggtgctgcagccgccgtcctacacctgccgcttccgccggcctacacctgccgcttccgccaccgcctccgctcacggcagcccgcagcctcaactcgccatagccgccgcctccgcttgcctcagtcgccggcctccgctcgccaccacccaccgcctccgctcgccgcagcccgccagctttgcgttgcctcatctcactacagtccgccgccgctcactgcagctcgttgcttcgcacgcccgcggcctgccgtccgccgtcgccgcatcgaaggagagggtgtggggaggaggctgtagtccaggaggaggaagggagatatccaatgtgacctgggtggcccacggttggtggaccgggttgcgcactctaacaagtggtatcagagctcaaggtttggaattcagaacaatttccatgggtcacatggtggggaggccaggcccaggacctaaagttttggctccggttgggcctgtggtgaagcaggcccaatgtgacctgggtggcccacgattgttgggccgagctgcgcactctaacacagagagggtagatagagaagctgttggagcaagcaacgactttgacttgctaaatcaaatggatagcttgctataa

SEQ ID NO: 44955 - DNA, 369 bp, Oryza sativa
  unsure (1)..(369): unsure at all n locations
  Clone ID: PAT_MRT4530_47967C.1
ccaattcctaacctgacctccaccatgagagattancatcccaaccagctgctgctcgcaacgtacgtagcatcttgcccgccctcgtcgaagtccgacccgcagctagctcagccggcggccggcgagcacaacgtacgtggtggggtcgcactcgcgcaccaccggcggactagctagctagcgttgcccctgtctctgccaccgctcgtcgccgcggccggcctgcctgtagatcgtacgccgacttcgacgacgtacggccacctcctcccccaacgaattagccatacggaaggacaagttttttaattaaggggtaaagtccatcttactctccaaatatggcaaaggcaaaaagaaaaaaaa

SEQ ID NO: 44956 - DNA, 384 bp, Oryza sativa
  Clone ID: PAT_MRT4530_47968C.1
atggctgggaagaccctacacaagtttgctattccctctgctgacaacgtgcctattggacccccaagtcaacatgggagatgcatgtataccatcaaaggagttagccctgatgttatcagactccaactgttcccgttccccctcttcgggagagcaaaacaatggttttacaccaatcgtgcaattgtgaatacccggaagaagcgctcaacggcattcctctcaagattcttcacgatgggcaagatcaacgctcttcgtggaagaatatccagcttccagcagacgagggatgaaaccattcctgaagcttgggaaagactacaagaatatgtcgccatctgtcctcatcatgggatagacgagtggctcatcctgtag

SEQ ID NO: 44957 - DNA, 282 bp, Oryza sativa
  Clone ID: PAT_MRT4530_47969C.1
atgcgttggaacttctccgaagcgacgcccccaaggaggacacgacgcgtaacgccgccgccgttcgtccgaaaatcggaacaaggttttcacctagagatttgtgggggttatgaaagaacgccattacaacgcctccaagaagggaaacggcgcccacagacgccgttgttgtcgaaccggcccaaggcatggcaaggctttcgccagcattttcacatcacccacacatgcacccccacatcgatggccacaaaaaagtccatgtcgtctcacaagtag

SEQ ID NO: 44958 - DNA, 485 bp, Oryza sativa
  Clone ID: PAT_MRT4530_4796C.1
agttatttttcatacaaccagctcactggaagctttccctcctgggctacccagaacaacttgcaattgaatttggtggcaaacaactttgatcttggcagcaccaacaacggtcaattatgtccacagtattctacctccagggctaaactgcctccagaaagacactccatgtttacgaggttctccagaatattattcctttgcggtagactgtggtagtaacagatctatcagaggctcagataatactatgtatgaattggatttcacagaccttggcagctcatcatattacgttaccagtgaaacaagatggggtgttagcaatgtaggaaaatatttccagtctccaaatgacagtaagatcatatatagcaatgagaagattcagaatgcagtggtttcagaactactccaaacttgcaggatgtcaccatcgtctctgagatactttggccttggacttgagaatggaattacac

SEQ ID NO: 44959 - DNA, 427 bp, Oryza sativa
  Clone ID: PAT_MRT4530_47970C.1
caaaatgctgagacaggctgctaacatgtacacaccagtggtctttgaaatttttcgcagggagtttgagatgtttgtcgattccgtgatttatagctgtggagaggatggaaatgcattcgaatatagagtagcagtaacagataggcctggggaacactatgttaggtttgactctggcgacttatctgttgtatgcagttgtaaaaaatttgaagcaatgggtatccagtgttgccatgtgttgaaagttctagatttcagaaatataaaggagttaccacaaaaatatttcatgaaaagatggaagaaggatgtcaagtctgcaagtacaggcaatcaatcgccacattccatggttgtatacgatttgagaccactggtgacaaaagaatacgctcacatctttttgtgcatttctggcttt

SEQ ID NO: 44960 - DNA, 434 bp, Oryza sativa
  Clone ID: PAT_MRT4530_47971C.1
gttgtgttgttttttttttttttttttttttttttttttttttttttttttttttttttttttttttttttttttttttttttttttttttttttttttttttttttttttttttttttttttggggaatttggggtttatttttaacgtgggggggggggggggttaaaaacccaaaacaaaacccccccaggggggggaatgcttctaggggccctttattccccgggggggatcccatttttagaggggaagttaaaaaccaaaaaaactgggccttgggcttgccccatattccgacaaaagggaaaaaaaaaaaactggtgggatttaatccgttgccctttggcctaaaaaaagttaaattttttatagagaaacctgttccccccccccctgggttttgccaataattggttttttttctcccaaaa

SEQ ID NO: 44961 - DNA, 286 bp, Oryza sativa
  Clone ID: PAT_MRT4530_47972C.1
ctttaccgagttgtgcttggcatagagaagctcctcaattaactgcagattattgagaggtaagccgcctgctaaacgtattcagaatggtaatgctttttattatggacgtattatagctgttttatcactccaccaacagtttttagaacgcttttcagtaattactccttcttgagtgctcacgattccgcagattgaagtctcaacagacacacactgttgttctttgtgatccaatctaacatatcaagagtggaagacatagatatgtgccatattctat

SEQ ID NO: 44962 - DNA, 1642 bp, Oryza sativa
  Clone ID: PAT_MRT4530_47973C.1
gccaagctcgaaattaaccctcactaaagggaacaaaagctggagctccaccgcggtggcggccgctctagaactagtggatcccccgggctgcaggaattcggcacgagccgcgtcgcttcccttccttcgcgcggcgctgctccggtagggttttagccggcgatctctcccctctcgccgcgctcggcgactgagaatggtcgaggtggaggaagtcagcaacaagatgcaggtgcagatgcgcctccaccccgcggcggcggcggaggaggaggacgccgacctcccgctcccggccctcttcgacaaggcgtcccacctccactccctcgcctccagctcctccctcgagcaggaagggatccgcaagggggtcgacctgctgcggcggtgcgacgagatggtcagtaaggtcggcctcttctcctccaacgagaccaaggatgacatctccaccgccaacctcaaatacctactcgtgccgtactaccttggggaaatgactgaaagggtagcgcaggaagatcggatcccagtccttaaggcgtcgcaggatcatttgaaggaattcatttctatctgtgaagcactggagcttatatcagaggatgagcttgaaatatctaggcagaaggaacctgataccatggcaaatctaacagcacagaaggttgcacggttcaaggtacgccactaggctgcagaaaaagactcaaggagtagcgaggaaagaacggatgccagtcctgtaggcgtcataagatgatttgtaggctttcatttctatctgtgaagcactggagtttatgtctgatgatgaggttgaaatatatacatggatagctactatctcattggctctatcgaaggctttgaccttcttgacatgttaaagaaggaagaagaaatcgttccggcagtaaaagaaggaaagcgaaggatggtaatgcatttgctcgtgaaatgcttgatgaacgtacaaaaagggctgaagcatggcaccataatgctgccaaccgtgcaccatactccaaaccagctgatccaatcacttgtgcaaccaaacaccagccgctatttgcctgcaagtcttgttgtgaaggactaaccagtgaaagagagagaatggcagcacaagtttttcagccaagttataggttgccaacgatgagcatagaagaagctggcttacgtgagatgaaaatgatggagaaatggcaagaaagaactgccaagatgattcaagaatcaaactccgcatggcacaaggatggcagtcggtcagcccaagaggacgaggacgccgaagaggagaaagcgagaggatgggatgactggaaggacgataaccctcgtggtgcaggcaacaagaagctcactccctgtggctaaattatatgctatggcaattctattgaacttacatctgaaactgaagctcgtgtaaaaatatgtggtttttactaactttccttactgcggcatttgttgattgctgagtaataatgtgttccatatgtatattataattgtgcatggtttccttctgccaatatatgggcaaccaagtaatgccagaaaagctgatttgagaagcaaaaaaaaaaaaaaaaaaaaaaaaaaaaaaaaaaaaaaaaaa

SEQ ID NO: 44963 - DNA, 1385 bp, Oryza sativa
  Clone ID: PAT_MRT4530_47974C.1
atggtcgaggtggaggaagtcagcaacaagatgcaggcgcagatgcgcctccaccccgcggcggcggcggaggaggaggacgccgacctcccgctccctgccctcttcgacaaggcgtcccacctccactccctcgcctccagctcctccctcgatcaggaagggatccgcaagggggtcgacctgctgcggcggtgcgacgagatggtcagtaagctcggcctcttctcctccaacgagaccaaggatgacgtctccactgccaacctcaaatacctactcgtgccgtactaccttggggaaatgactgaaagggtagcgcaggaagatcggatcccagtccttaaggcgtcgcaggatcatttgaaggaattcatttctatctgtgaagcactggagcttatatcagaggatgagcttgaattgtctaggcagaagcaacctgataccatggcaaatcgaagagcacagaaggttgcacggttcaagcgccaaaaggctgcagaaacaaagctcctagaaatcaaggagaggaaagaaaggcgtaggcggtcattgagagcagctgctttatcagctcctattgaagctggggaggaagatgcttttgaggatgatggagaggaagaaagagaggcatggttagctactatctcattggctctatgcaaggcttttgaccttcttgacatgttaaagaaggaagaagaaatgcttctggcagtaaaagaaaggcaagcgaaggatggtaatgcatttgctcgtgaaatgcttgatgaacgtacaaaaaaggctgaagcatggcaccataatgctgccaaccgtgcaccatattccaaaccagctgatccaatcacttgtgcaacatttgctcaagatgtcattgaaggtagagcaagtgtttcacaagcacatgagcacaaacaccagccgctgatatttggccctgcaagtcttgttggtggaggactaaccagtgaaagagagagaatggcagcacaagtttttcagccaagttataggttgccaacgatgagcatagaagaagctggcttacgtgagatgaaaatgatggagaaatggcaagaaagaactgccaagatgattcaagaatcaaactccgcatggcacaaggatggcagtcggtcagcccaagaggacgaggacgccgaagaggagaaagcgagaggatgggatgactggaaggacgataaccctcgtggtgcaggcaacaagaagctcactccctgtggctaaattatatgctatggcaattctattgaacttacatctgaaactgaagctcgtgtaaaaatatgtggtttttactaactttccttactgcggcatttgttgattgctgagtaataatgtgttccatatgt

SEQ ID NO: 44964 - DNA, 447 bp, Oryza sativa
  Clone ID: PAT_MRT4530_47975C.1
atgcggacggcggcgctcgtcagggccgcggcggccggctggaggcggcgcgaggcggacggcggcactcgtcggggtcgcggcagccggctggaggaggcgcaaggcggacggcggcgcttgtcgaggtcgcggcggccggctggaggaggcgcgaggcggacggcggcgattgtcggggccgcggcggagacgggatggctggaggcggcgctcgtcgggccgcggcggaggcggacggcgccaagggtgtatccaccaccaccggtttcagagggctatggctaccagacctactttggtgaagataaccaagaagcttcttgtggctggtcacaacaacaaccatctgcaccatcagatgggccttacaactatggctacaatgaagatccagactgcctcactttcttaagaggatggtacacttatacttgctacacctga

SEQ ID NO: 44965 - DNA, 327 bp, Oryza sativa
  Clone ID: PAT_MRT4530_47976C.1
acacgaataacctagtagacctatgcgttctacgagaccagaaacttatctgaaatctggtgttttggagctctgttcttaatgtgaaacctgcagcactcgaacttggatcggaattgcaaaccaatagcacacgaccacagaaaggtgtgtacccaggatgtggaacgacaacacaactgcgaataccattgatgagttatcatagcacaactggaatgccatgtgttgaattatcttgaggaccatggaatacgaggtgatgaaatgctttgtggaccatgcaaggggggaagataccattttatggataactggcacagaccc

SEQ ID NO: 44966 - DNA, 394 bp, Oryza sativa
  Clone ID: PAT_MRT4530_47977C.1
ggccgccccttttttttttttttttttgctcatcaaaaggtctgaaactccgaacatctggagaacaagctgtaaggcctaacgcctacgggatagatcacggaaacgacacctctcctgtcacccccattttgtacaaaacgccggactcgagagaacgactaaaagcattacacacgtgcacagacacaagaccatctgcactgatcattgcacaagactttgattctagcagcaaaggcagagggtagcaggccgcgggcgcaaactatcccaactccacagatcacagtggacgaccaaggacagctgcagcacaccgcatttaccaggggacgatcttccagcgctggttgttgcccttgcaccacgttcagagcgcgacggaggcgcc

SEQ ID NO: 44967 - DNA, 262 bp, Oryza sativa
  Clone ID: PAT_MRT4530_47978C.1
cctaatactttttattcattcctcccagagagacggatccatggaagtgttcttgcccttatcataccagccttgcacacacacacaattgcagtcgaacgcctcaaataagaatactacttacatcctgagctaaaacactcatggggatcaatgcacatcccgaataaaaaacacaaggaaaagtccacatatttttgaactaaccaactttcttcttttcaccaccacgttctagcggtaccattcttacacctaaaaa

SEQ ID NO: 44968 - DNA, 1009 bp, Oryza sativa
  Clone ID: PAT_MRT4530_47979C.1
aaacctcgccttcctcctcgaatcgaaccgagcggcggcggcggcggcgaccaagggagcagtgagaggcggcggcagcggcggcggcggaggaggagatgccggggaaagggcagaggcggagggagaagaactaccgggcggcgcacggcggcgaatcgcggctgcccccaccaccgaagcagcgggagctcgacgcgctcccgtccaagctccgccgcctcatcgccatccaggagaagcacaagggcggcgagaagggcgccgttgccggagactcctcagggaaacaaggagagagcgatgcggcgaagaacaaggctcgcaaagacaagaaaactaagaagcagaacttggagcctactgctgatagcaaagccgcagagattagtggcaaggatggaccggttggcgatgagaacgcgagtgtagatgaaaaccgaaggaagcggaagagggggaaagctgtggatcttcgttttaaagaattagatgaggcagttgcagtttcaaagaagcagaaaaggaagaagtacctggatgaaaagaaaaagaagcgcaagggcgacaagatggaaactcttccagaattccctggacgtgaaaaggttaaattcggtgaagttgttgaggctccaccaaagttgtcattccctaaggtgaagaatgctttagacgctactcgtgagatgctaagaaaagaggcgattgagaactacagaaatatcaagggttggacatcaaggcctgggctccagcttccaactctagctgaaaataaatcattgtgaccatttatttcatatcttctcattgtatccttagcgaacttactctgctgaaatcagagtagcttatagtacaggtcttgtaccctcttgtaggcaattttgtaacaaacgttgatttttgtgttctgggtcatctactctgtttattttcttgaagtaatctttttaatactggtaataggttttatgtgattgataaaatgtttggtttcattctc

SEQ ID NO: 44969 - DNA, 1991 bp, Oryza sativa
  Clone ID: PAT_MRT4530_4797C.1
ctcctggtttggaatggtgtattcctggtttggagatagaactgtgcagccgggatggttgttcagaacgattgggcctatgcaacaggatgccgcgctacaagcctgagtacttgttcggtactgaaggatttgtccaggagttgcgtacgatgtccttcctcatagggtttggaattgcccctttgtatgcccagatcccgcatgatcgtgatgaagaaaaatgcggagtcaaagtcaccttgaatagcaaccgtgaagatattccatcagtgatgttcgaggctggaggaggaagctacattcatgcttgtcaggaggtggcaaggatcgccataggagaactccgggaaagctataatgatcggttggccgacaccgagtaccgctaccatcctcgtcaaccccagggaagtgattgtggcagctactttgaaccggctgggatcgagaacgacgctaccacaaggcatttggttgagatgctatgggctatggatgaaacccgcgctgagattgtaatagccgctcaagatcgtgaagaccggaatagggggaagatctgcaagctagaagacaaggtggatcatttggagaaggagctagccgcgttgaagggagaagcaccaccgcagaaggccagagtccgtctaccgcaaggaagagagctctattcgtccctcgctatcagttggcaccaaaggttcgtctggtggaaaaagaagctaccccagcggatcctccggttgtcaatcactactaatcccgtcgaagctggtgattggttgcacgccatagagaagaagttggatctgctccagtgcacagaccaggagaaggtctccttcgcatcacaccagctgcatggccctgcttcggaatggtgggatcacttccgcctcaacaggactacccctgaacctatctcttggcttgaattcaacgctgctttccggaagacgcatataccctcgggagtggtgtctctcaagaagaaggaattcaggtcactcacacaaggttcccgcactgtcaccgagtatctgcacgagttcaatcgtctggctcgttatgctccggaagaggtgcgcactgatgaagagcgtcaggagaggttcttaaaaggacttaatgatgaactttcctacccacttatgactggagattatcatgatttccagaagttagtggataaagctattcgccaggaggacaaatacaaccgcatggagcagaagaaacgccggattgctcatttcaaggcacagcaggggaatagtcaaaggccacgccttactttgggaccccagtccatgccacagggagctccacgccctgttgcatctccaacacagcaacagcctgccaagagggagcaaggcagtaagcccggggtgtgcttcaactgtggagacccaggacattacgctgacaagtgtccgaagccccgccgcgtgaaggtcgtccctgcccagaacaacccctccgcacccgcagccaaggctcgtgtcaaccatgttgctgctgcagaagctcaaggtgctccagatgtgattttgggtacattccctgttaactcagttcctgcaaccgtgctttttgattctggtgctatgcattcatttttatccatgagttttgcgggaaatcaagggatggaggtaaaggaacttagacgtcctttgatggttagtactccgagtaaccaagcactctcctcacaacgtagcccctctgtcagaatagagatccaaggtgtacctttcctggccaaccttattctgttagaatccaaagaccttgatgtcatcctagggatggactggttagccagatataaaggtgtgatagattgtgctaatagaaaagtaactctcaccagtaatgatggtcgagttgtaactgttcatgcattatcttctgagtctataaggtcacgtctgaaccaattgactttggaagagattcctatagtccgggagtatcccgat

SEQ ID NO: 44970 - DNA, 1849 bp, Oryza sativa
  Clone ID: PAT_MRT4530_47980C.1
atgggtgccgcgagcgagcgaaagtgcacggcgtgcggcggcaccggtggcgacgaagtgcagatcgacatcgatcggcgaagaacgtctcactggtgctcctcctggagtacatcatccgcccgcccgccccgaccccgttcctcgtcctcgcccgcgccgacgggctcgacgacaccaccggcgcccccggcgttccgcctcgagatgggcgtggtcggcctcgccgagaactaccacgcgtgcgtcggagggggcggctccgtgcttgaggtgtcgtaccacggcatggccgtcgccatgggccgcgtgccgcggttctgcgtccacgggaagcgggcgggcggcgagcgggccgacggcgtggccagcgcggaggcgacgtcggtgcgcgaggagctgcgcggcctgatccggagcgagcggcagatcgtgggggcggccgagttcagcgtggaaggggagatcaagggcttcggctatctccgctgcaaggcgctctgtgttgttggtcgccgtggcctcggccggcgcgagcggcaagtcggcgcggttcgagctgctccggccgacctgacgcgcatgcaccgggagcggatggcattcatctcgtcgcgcgggaggcgccgcgtggcggagaccgcgtccgccttcgtgatgctgctctcctccggcgtgtacaccgggacgggccagtcgcatcccgccacctccagccctactatgcctcgcccaaagcgccgccggtcgcccttgccgccgccggcgccgcctggcttccccacggagcggaaacaccatctgccggagctgcagcctccagcggtggccgcggcgtctcctggcgtcgctggagttcccgccgatcttggcgacgcgctcctgcgctgcggcaagctcctggacaagctcctggagcacgaggacgggtgggtcttcgccgagccggtggacgcgcgcgccctccgcctcgtcgactactacctgcgcatctccgaccccatggacctcggcaccgtccgccgccgcctcgagcgccgccgctacgcggacccgtgggcgttcgccgccgacgtccggctcaccttcaacaacgccatgtcctacaacagcgcgggcgaccccgtgtacgagagcgccgccgagctctccgaaatcttcgaggccgggtggccctccgttctcgcggcgccaccgcgcccgcccgacgccgagcgcaagcggaggctcagtggtttgctcccgcggctgccggtgggtgcacaggtgacggtggccgagatcatgaagaagcgggacgggtgcctgcgggaggtgaacgggatgatggaggtggacctggacagggcggactccgcgacgctggacgagctcgaccggatggtcgcggagcacggggccgccctcgccggcgtggttaaggtgaagcagggtgcgttggtgatcactgatcaggagcacaatgcaaatttcagtggatggactatcagtctattcacagttgggctcctaggatgagaactgctgatatatctttgtttcagaatgctgttggcttcaacaggacttcgtgagaccactgagtccataacaccgtagttatcatatcctagatatgtcaactttgcattttgtcagatgtcataccgttgtgtttgtaagttggaaccagcgggggttgtatgttgggatcacgggttttctgatactgaaacgtttggtgaactagaaggggaaatatgcaaaatatgcgtgcaactcttatgtagtgtaaaactgaaaactattatatgatacataatatatgtctgaaatgtctatgttattatgaaaaaaaaaaaaaaaaaaa

SEQ ID NO: 44971 - DNA, 1306 bp, Oryza sativa
  Clone ID: PAT_MRT4530_47981C.1
atgtcgccggcgagaggtggcacgccggaggaggagggcggtggcgccgacgtcgagaaggcggcggcggagacgggaggtgtttgtagcttggtcacaggaacactagttacatggtgttctagcctggttgttgcctcactgtggcagtggaatggagacaagcacaccagctacaagcttcttgcaaagagcatctttggtccctggggttactggtatgtgtcgttcttccagcaagtggcatcaattggaaacaacattgcaatccagattgcagctgggagcagcctcaaggctgtgtacaagcactaccacaccactgatgatggcgccatgaccctgcaacagttcatcattctcttcggcgcattcgagctgttactctcccagcttcctgacatccactcactccggtgggtcaatgctgcctgcaccgctagcaccattggatttgcagggacagccattggtgtcaccatttatgatgggcatcggattgatcggaaggaagttgattacagtctgcaaggaagcgctgcatcaaagatcttcagagccttcaatgcactgggcacaatagcattctcatttggggatgcaatgctgccagaaattcagagctctgtgcgagaaccggtgaggatgaacatgtacaaaggcgtgtcgacggcgtactcgatcatcgtcatgtcctactggaccctggcattcagtgggtactgggcatttggctcaggagtacagccctacatcctgtcctccctgacttttccaagatggacaattgtgatggcaaatctatttgcagtcattcagatcactggttgctttcagatatactgcaggccgacattcgcgcaatttgaacagcggattcaggcgaaagacgcaggctacagagcaaggatgtggaggctggtgtatacctctgcatacatggtggtgatcaccctcatctctgcagcaatgccattctttggggactttgtgtcagtctgtggagctgttggctttacccctctggactttgtgctacctgcactggcatttctgaaggccgggaagttacctgaaaacccaggattacgccatgctgtgaaggtgatcacctctgctgtcgctgtcttgttctccattgtcggagctctggcatgcatcggcgccgtcagagcgatcgcacttgatgtcaaaacctacaaattcttccatgacatgtgaatcagttagttagtatcatgttggtgatgaaatgaatttgtctgtccatctgtccagtggtttataaaaaaaaaaaaaaaaaaaa

SEQ ID NO: 44972 - DNA, 347 bp, Oryza sativa
  Clone ID: PAT_MRT4530_47982C.1
ttttgtttttttttttttttttttttttttttttttttttttttttttttttttttttttttttttttgggcccaaaaaaagctatatggatggggaaaaaaccctagctctttttgggccccccccccctggaaagggggcaaaacgtcccggacgaaccccccaaaagaagaaagcttgcttgggggaccgggccgaccaaccctgggtgcccccccatgcctgcatggggattgatccaaaccttagctagctcattttttattccagaaacccgaaatgaacctcctaggccggggaccagaattcggctccccccatcgacccagggggaatttactagggg

SEQ ID NO: 44973 - DNA, 3024 bp, Oryza sativa
  Clone ID: PAT_MRT4530_47983C.1
atgctgaccaagttcgagacgaagagcaaccgggtgaaggggctgagcttccacccgcggcggccatggatcctggccagcctccacagcggggtgatccagatgtgggactaccgcatgggcaccctcctcgaccgcttcgacgagcacgacggccccgtccgcggcgtccacttccacgccacccagccgctcttcgtctccggaggtgatgattacaagattaaggtgtggaattacaagacacaccgctgcctcttcacacttcatgggcaccttgactacattcgcaccgtgcaattccaccacgagtacccatggatagtaagtgctagtgatgaccagacaatccggatatggaactggcagtcacgcacatgtgtggctgtgctgactggacataaccactatgtcatgtgcgcatcattccatcccaaggaggatctggttgtgtccgcatcactggatcagactgtccgtgtatgggatattggtgctttgaggaagaagacggtgtcacctgcggatgacatcctgcgcctcacccagatgaacactgatctgtttggaggtgttgatgcagttgtaaaatatgtgttggaagggcatgaccgtggggtgaactgggcgtcatttcaccccacattgccgctcattgtttctggggcagatgaccggcaagtgaagctatggagaatgaatgacaccaaggcttgggaagttgatactttgcgggggcacatgaataatgtgtcctgcgtgatgttccatgcaaagcaagacatcattgtgtccaactcagaggacaaaagcattcgtgtctgggatgccaccaagcgaactggtattcaaacattcaggcgggaacatgatcgtttctggattcttgctgcccaccctgagatgaatcttcttgccgctggtcatgacaatggtatgattgtgtttaaattagagagggaacgtccagctttctctgtgagtggtgatactgtcttctatgtgaaggaccgttttcttcggttctttgaatactccacacagaaggaggttcagttggctccaataagaagacctggatcggaggcaaagaagggagctggtgggtcagctgtttttgttgcacgcaacaggtttgcagtgctcgagaagagtagcaatcaagttctggtgaagaatcttaagaatgaaattgtaaagaaaagccctcttcctattgcgatggatgcaatttattatgctgggactggtaacttgctgtgcaaagctgaagaccgagtgaccatctttgatctgcagcaaaggttaattcttggcgagctccaggcacctgctgttaaatatgttgtttggtcgagtgatatggaatctattgcattgctgagcaagcatgcggtggttatagcaaacaagaagcttgtccatcgttgtacgctccatgaaaccatccgtgtgaaaagtggtgcctgggatgagaatggtgtgtttatttacactactttgaaccatatcaagtattgtcttcccaatggagatagtgggatcattaaaacccttgacgttcctatttacataacaagggctattgggaataatattttctgcctagatcgtgatggaaagaacaagctgatcacagttgatgcttctgaatacattttcaagctggcccttctacggaaacgatacgatcatgtgatgagtatgattaagaattcccagctgtgtgggcaggctgtgatttcttatttgcaacagaaaggctttccagaagttgccctccactttgtgaaagatgagaagacaagatttaacctagctcttgagagtggtaacatccaaattgcagttgcttctgccaaagagattgatgacaaagatcactggtaccggttgggaatcgaggccctgaggcagggaaacgttggtattgtggaatatgcgtaccaacgtacaaagaattttgagaggcttgctttcctatatcttattactggttacatggacaaggtggggttcatgtgcaaaattgctggacagaacaataacctgatgggtcaattccacaatgctctgtatcttggtgatgctatgaagagagttgagatcctagagaatgctggacagctacctcttgcttatattactgctgccacccatggactcacagaaattgctgataggcttgctgctgaattgggtgaaaatattccttctctacctgaaggaaaaactcgctctcttttgatcccccctgcacctctcacagccagtggtgattggccattgcttagggtgatgcgtggtatctttgagggtggactggatgctactgggaaggctgaacttgaggaagacgatgaagctgctggtgctgactggggtgatgaggacctggatatggttgatgcaagcgaagcgatggcgaatggtggtgatggttttgatgctgaggagggtgaagcaaatgaggaggatggtgaggaaggtggctgggacctagaagacctggaacttccgcctgaagcagagacccctaaaaacgccggtaatgcactctcagtggtctttgttgctcctcctccaggcatgcctgtcagccagatttggactcagaaatcttctcttgctggggagcacgcagcagcaggaaactttgacactgcaatgagattgcttagccgtcaattgggcatcaaaaactttgctcctctcaagcccctatttctcgatctgcacatgggcagccactcatatcttcgtgcacttgcaactgcccccattattccggttgctgttgagaaaggttggagtgagtctgcaagtcctaatgtgagaggccctcctgcacttgttttcaccttctcacaaatggaagacagactcaaggctgcctacaaggccaccacagaaggtaagttcccagaagccctgaggcagttccttaacatcttgcataccatccctcttatcgtggtagactcgaggagggaagtggatgaagtgaaagagttgatcgagatt

SEQ ID NO: 44974 - DNA, 4255 bp, Oryza sativa
  Clone ID: PAT_MRT4530_47984C.1
ctctcctcttcgcgcctcagcggcgaggggtttcgccgccgccgccgccgtcgcgccggggggacggctagagaagatgctgaccaagttcgagacgaagagcaaccgggtgaaggggctgagcttccacccgcggcggccatggatcctggccagcctccacagcggggtgatccagatgtgggactaccgcatgggcaccctcctcgaccgcttcgacgagcacgacggccccgtccgcggcgtccacttccacgccacgcagccgctcttcgtctccggaggtgatgattacaagattaaggtatggaattacaagacacaccgttgcctcttcacgcttcatggccaccttgactacattcgcacggtgcaattccaccacgagtgcccgtggatcgtaagtgccagtgatgaccagacaatccggatctggaactggcagtcacgcacatgtgtggctgtgctcactgggcataaccattatgtcatgtgtgcatctttccaccctaaggaggatctggttgtttcagcatctcttgatcagactgtccgtgtctgggatattagtgctttgaggaagaagtcagtgtcacctgcggatgacatcctgcgtctcacccagatgaacacagatctgtttggaggtgttgacgcggttgtaaaatatgtgttggaagggcatgatcgtggggtcaactgggcttcatttcatcccacgttgccactaattgtttctggggcagatgatcggcaagtgaagatatggagaatgaatgacaccaaggcttgggaagttgatactttgcgggggcacatgaataacgtgtcctgtgtgatgttccatgcaaagcaagacatcatagtgtccaactcagaggacaaaagcattcgcatctgggatgccacaaagcgaaccggtattcaaacgttcaggcgggagcatgatcgtttctggattctttctgctcaccctgagatgaatcttcttgccgctggtcatgacagtggtatgattgtgtttaaattggagagggaacgtccagctttctctgtgagtggagatactgttttctatgtgaaggaccgttttcttcgtttttttgaattcaccacacagaaggaagttcagcttgctccaataagaagacctggatcagtgagcttgaaccagtcacccaagacactatcttacagtccaactgaaaatgctgtcctgatttgctctgatgtggatggaggctcatacgaactctacattgttcccaaggattctgctggcagggctgactatttgcaggatgcaaagaagggagctggtgggtcagctgttttcgtggcacgcaacaggtttgcagtccttgagaagagtagcaatcaagttttggtgaagaatcttaagaatgaaatcgtaaagaaaagccctcttcctattgccacggatgcaatttattatgctgggactggtaacttgctgtgcaaagccgaagaccgagtgaccatctttgatctgcagcaaaggttaattcttggtgagctccaggcaccttctgttaaatatgttgtttggtctagtgatatggaatctgtcgcactgctgagcaagcatgcagtggttatagcaaacaagaagctcgtccatcgctgtacactgcacgaaaccattcgtgtgaaaagtggtgcctgggatgagaatggtgtgtttatttacactaccctgaatcatatcaagtattgccttcccaatggagatagtgggattattaaaaccctcgatgttcctatatacataacaagggttattgggaacaatatattctgtctagatcgtgatggtaagaacaagctggtcacagttgatgcatctgagtacattttcaagctggcccttctacgcaaacggtatgatcatgtgatgagtatgatcaagaattcccagctgtgtgggcaagctgtgatttcttatttacaacagaaaggctttccagaagttgccctccactttgtgaaagatgagaagacaagatttaaccttgctcttgagagtggtaacatccaaatcgcagttgcttctgcaaaagagattgatgacaaggatcactggtacaggttgggaattgaggccctgaggcagggaaatgttggtattgtggaatatgcataccaacgtacgaagaattttgagaggcttgctttcctatatcttattactggttacatggacaaggtggggttcatgtgcaaaattgctggacagaacaataacctgatgggtcaattccacaatgctctgtatcttggtgatgcgttgaagagagttgagatcctagagaatgctggacagctacctcttgcttatattactgctaccacccatgggctcacagaaattgctgataggcttgccgctgagctgggtgaaaatattccttctcttcctgaaggaaaagctcgctctcttttgatcccccctgctcctcttacagccagtggtgattggccattgcttagggtgatgcatggtatctttgagggtggactggatgctactgggaaggctgaacttgaggaagacgatgaagctgctggtgctgactggggtgatgaggacctggatatggttgatgcaagcgaagcgatggcgaatggtggtgacggttttgatgctgaggagggtgaagcaaatgaggaggatggcgaggaaggtggttgggacctagaagatctggaacttctgcctgaagcagagaccccaaaaaatgctggcaatgcacgctcagcggtcttcgttgctcctccaccaggcatgcctgtcagcctgatttggactcagaaatcttctcttgctggggagcatgcagcagcagggaactttgacactgcaatgaggttgcttagccgccagttgggcataaaaaactttgctcccctcaagcccctgtttcttgatctgcacatgggcagccactcatatcttcgtgcacttgcaactgcccccataataccagttgctgttgagaaaggttggagcgagtctgcaagtcctaatgtgagaggccctcctgcacttgttttcaccttcccacaaatggaagacagactcaaggctgcctataaggccaccacagatggtaagttcccagaagccctgaggcagttccttagcatcttgcataccatccctcttatcgtggtagactcgaggagggaagtggatgaagtgaaagagttgatcgagattgtgagggagtatgttcttggcctgaggatggaacttaagaggaaggagttgagagatgatgtcaaccgccaacaagaattggctgcttatttcactaactgcaagcttcagcagagttcatatgaggcttgtgcttggaagcgctatgggtctgtgctacaagcaaaagaacttcgctactgcagagcactttgcaaggatgcttctggagaacaaccctaatgaggcccaagcaaggagggctcgacaggtgcagcagcagtgcagtggcaagaaggatagctctgagctgaactatgactacagaaatccatttgttgtctgtggcgccacatatgttccaatctaccgtggccagaaggatgtttcctgcccgtactgtggatcccggtttgttccttcgatcgaagggcagctttgtaccatatgtgagcttgccgtggttggtgcagatgcttcaggcctcctctgctcccctacgcagttgagataagtggtgctaaggtagagctcccccattttcttttagtctcttaaaattctagggattctctatctcacattttagctgcatgtttactgattgaggagtgtatacatggtcgtgtttttgtatcttctccccctcatttccctcgatttttgtttgccttgaggcagctgttacacttgtcatatatggacttttgatcatctcatggtggcctatgcgcctacccctggacaattgatgtaccaatattactttcactcttggaaattttttgtcgtggtgttacttacatagtaattgtgagttcttacttcaaagcacattgcaaattgaggtcgtgttcctggatggttcgtcatttgtcgctgttatcttaacaagcggatttcacagcataattttttgctgagctacataaaagtgaaattggatttgatatgtagctcttatcttttgtctccaaatacaattaagatttttatctggaactaaaaatagatttggatttcataaaaaaaaaa

SEQ ID NO: 44975 - DNA, 263 bp, Oryza sativa
  Clone ID: PAT_MRT4530_47985C.1
gaagccattactctgaggttttgttttttgactcaggggataatcctgggtcgtatggggggtataatgtaggaccaaggataccttctattgtgccatgttgaactcgaggcttaacccttgctgccttgagatgcgatgcgcattaacgaccggacacatgtgtctacccgttaattccgtgccgttacttgcaggcgtacgaggtttccctatggtgagttattttatagcttggcggggtcatggtcatggcttttttc

SEQ ID NO: 44976 - DNA, 581 bp, Oryza sativa
  Clone ID: PAT_MRT4530_47986C.1
aaattatattattccttctattacacctttttccaattgcactaaattgaataaattgttccccacaaaaaaaagaataaattgtttccaacataattcatttgcaccaaatggttccatacactactgcaggaaactaaatcagtgttaatttgcacaggcgtttagtgaaccacagataacatcatttcatgggaaaccaactgtccatggatatacatttccagagacgtgttgtcttagccgaccgcctttaagaaacatctttacaagcggtatattgggggtctagaggagtgagttcatgcggggattggtctttaattctagttccatttttacttctagtcccttgtttgatagtcataatgagaaatgatcatggagagtgtgagttagaaatggatttaaagtgttaaaagggtggaagtttgctctctccttgcaaatccctcctgaaactcacacaccagccacacaaacatcttacctaacaaccccaacccttaaactcccatttcctactaactgttcccaccaaccaaacatgcccacatatatacctccacttggtgcaagaa

SEQ ID NO: 44977 - DNA, 359 bp, Oryza sativa
  unsure (1)..(359): unsure at all n locations
  Clone ID: PAT_MRT4530_47987C.1
ggccgatcttcctctcccctctgccgatctgcgattccgggtttctcctcgcgtttctcggcaaccgctggcgactagctttttgggagttgggacgatcagttcttaatccctatgtgattgttgttgtggttgcgatttcttaattcaccgtgctgttattcgggaagatggagcctgatcagagtggtgctgagcagacttctccacgtgggaaatgattggaagttgtccaacttactgcatcaacatatgcatctgcacctggaccaagaatgtctgagccttctgatgaggctgaagtcaagggatatgacaccaaaaggggatgattcagctgcagcactggntgatgtctg

SEQ ID NO: 44978 - DNA, 168 bp, Oryza sativa
  Clone ID: PAT_MRT4530_47988C.1
atggaggacagcgggaaggtgggagaagcttctgcagggaactcgagcctgactgccagccgagctcatatcggaccattggtgtttgaacgggtgcacccacgaggagacacagtcgaggaagaagatctggcatggttgagcgttggaacaagaggcaagatctga

SEQ ID NO: 44979 - DNA, 3346 bp, Oryza sativa
  Clone ID: PAT_MRT4530_47989C.1
ttataacttgacttgtccccaagtcagcgccttaggaaaaagtatctgcaggtctgcttcatcctcccaagtggcttcacccttagtgaccactctagtatctaagatatgcttaggaatttggtggctccaacagtctgaaggaaggtgttgctgaacttggtgcttgaagtctttgcaggtgctcttcaactgagatacatcgaatgtggggtgaattaaactgtcacctggcaactgcaatgtgtaagccaccttaccaattcgagccagaatttggtaaggacgaaaatgcttgaaggatagcttatggttggctcttttggccactacgttggcaaatagttgctcccataacaaactggtgatgattttgtccctgtcagagataatgacttgaggtaatccatgcagtttgtacacattgaccatgaataatctagccacatctatagcggagaatgggtgagcttgttggaggcatgccacgagggccttcgatcgaggctgccgaaaccaccttcctttgtacttcatcaatccttgatgcagagaaaagtcaattctagcttgagggtgaacaaccaattctgtcaatagttgagcagggaatggattactggcataacctttgacaatgtctgatggtaccaaaatccttaacatattttcttcatagtgtccaatatgtgtttgaaatgctgtcttatattcttctccctttgccattctaatatgatgatacccagctctcaagttcagcttggaaaaaaatctctcccgtttctggagctctctctctctctgcatgagttcctcctttgcttctttcacaatgaaatcaagagtctttgtgccgtctctgttattacgagatataagcatgaagttctcaagatcagacatttcaactgcagcctcggacagcgattccatcaagctgtcagtctcttctttggtgtaaccgcttccatgtcgaaccattagcatgaatatctcggtgataagcttcaatgttttcaggcagctgatagagggataactgttccttatgactatgtgcttaagcctcctaggaaagctgaatccagcacttgtaatccccctccaaggaaaactgaatccggcacttgtaatctcatcatcgaacaggcgagcgaaatcttctgcattagtgaaattgcgtaacatcgtcgcacaaagagataaaactgttgccagtaaattgctgctcggatatccctcaccaagtgctatcgaaagcaccgttggcatcgcaatctttaaggctttcttgaggcactggagatattcatcatcatcagtgagatgaatacacagctgctccaggatctgtgctgctcttattttgaatttgttcctttcatttgggtttgcaagcattttagtgagatcatcaatcacctcctctttcacttgcaagattatcttggcattttctttgccatggccatgggaagacagcgctgcaagcttttcacctgccaatcctctgatgtcgtctttgacgtagaattgagtgaaggtgtgtacaagtatgttgatcaaacttctccagctttctttgttggaaagcgtgcgctcgtgcagccgcgtgtaaatctccagtgattgcagcagcaagtcgctgcactccttgcacttgaggattctctccatgctagccatcgcctccatgtcgcctgagatcctgcgacggacctcttcgccagtcttgccaggagcagtgacgagccggcgcatcacttccatggacgcgtacaccgtgtcagaccatgtatcattatggccgttgaggtggagcaggccggatcgcaggggctccatgatcttggtgagcaggccctccgtgtcgacgatggcttgacggcagttggcgtctgcagcgagcttcccaaggatgaggagaccctgccgcatcagctctttgttgtaatccagaaggacgcggtagtagatattgtcatcgtcgtcctcctcctcctcctccacagggccatcgagaagtgaggctatgaattggatccctccagggaactgctcgaggtggaggttgccggcgaggtgcgccacgatcctcgcggcgagctccctcgcctcggcgttctttggtctcgcattgcagtccatcgtctgcagcaacttgtcaagcacctggctggacgacgccgagatgacaagcagcttgatcatcctgtgctgctccgacagctcgggttggtccaggagggtggccaggatcctggccccggagaggaagtcgtttggggattcagacctagttagctccacggcgtaggtcactaggttccgtccttccacgaacgacgggtccttctcgcacccggtcctcgtctcgtgaaggtactccaccaacgctctcgagctcccaaaagagtcgaaattgtacttggtgagcacatcaaccacaagctctctccccacggagcgggaggcgaaccggtagcagaacagcacgccttgcagcacggcgatggagtagacgacgttcagcgcgggacgcaggttcgcacctccatcagcctcgccatagtcgcgctgtatcaggcgccacaccgagaggccggtggtgatgagcagcccaaatatgtagaacgccgccagagggcacaggatgatgccaaacaccagcacatgaaccacccatacgaatactaataccaactcgttcaggatgtagtcacagagcaagatcggcatacataatgaaaccgcaacgccaacatcctttctcttttggtgcctctaacccggtcttcatcaagtcagcgattggaaggtcaaacgtgcttggttcaataccaaacttggtgagtttatttctcacttggtgaacttcaatctggccagttttggtgggaattggttgagtagagcatcagatttgggtatggtttcttcagctcgagtaaccgcagtttcagcgtgtacagtctgtggtagaatgtcagtttgaggggtcaaacggtgtctgattgggctggtttttggatagcttggaagggacttatagaccatcatttctgccaagtttcgtgcaatttgtatgatttgggagatctcagctaagaaccgaagtggacagaatctgtcatttctctgcttgttgttgttatacctcttgttagttgctatggttgttgttgtgatgtgcctctagatgttctagagaagactccatttgtacccattgttgattatagtggaagtttggagtggaccgttggtcccgtggttttttactcctcacaccgaggaggtttttctacataaaaaaaaaaaaaaaaaaaaaaaaaaaaaaaaa

SEQ ID NO: 44980 - DNA, 423 bp, Oryza sativa
  Clone ID: PAT_MRT4530_4798C.1
atgacggcaccgtggcggttgacggtggtggcaggcgagcagtgcgcaccaaagaggtggacaacgacatctcagcggttgaggcaaaagcgatgcttcggtcctcactgcttaatgctgggcaacgccttcaccaacaaggaggagttgttcacctgggccaagaacaacaaccgcgactgctccacgtcgacggcattgacagaacaagcaattctgcaccttgccatgcaaatccacaccaccggcactgctcaggaggctagtggccttctattctctgttgtgcttcttgatgtcaatgaaccggatgtggcggcgacaacgaggatggtcattgacgctagatggcgggtggccctcgtcggtgttgagaatttacatgctcagattgtattgtacatggagattgtagatggataa

SEQ ID NO: 44981 - DNA, 138 bp, Oryza sativa
  Clone ID: PAT_MRT4530_47990C.1
atgaggacgaacaaaccagtcagcgatgaagtccatgtccatgaagatcgtgtcagtgatatcggaaacaacgtgcctgttatatggctgtcgcatagtcggacatgcagccatgcaatacatggtgatgatgagtag

SEQ ID NO: 44982 - DNA, 466 bp, Oryza sativa
  Clone ID: PAT_MRT4530_47991C.1
caccacatccagttttctcgatgatacacggtcgttcactctatcgagggtgtgtacttcacccccggcgatacggagaggaagaacccgtaacagcgatattcctgctcacttgacgacaggcgttcccctctcacagacgctgctgctggcttctctcgacatcgccctggccttccggactctctgtcagcccgagcgctaaggcggctacctttcctacacccatttacaacgcctagcgcggccagcaccatcaacctgctggagccttagtgtcaacgctccgaagccctatgccattgcaccaccacctgcagactacatgttgcatgatacagcatgacgatcatgaccgacgacgactcgccgtcgtcggccgccacccacagggacaaggcgttgacgggcaatccgatgttctactactcgccgatgctgtcgtcgaggaagctcatgcagcgcg

SEQ ID NO: 44983 - DNA, 238 bp, Oryza sativa
  unsure (1)..(238): unsure at all n locations
  Clone ID: PAT_MRT4530_47992C.1
tcccacgcgtcctcccactcgttctcccactcgtcctcccactcgtccggcagcaagctgtacctagcaagcgacaatggctacgggggctgtctccnctcttttttcactctctctatccgtccatttcaaccttctaccttatcgttttatatctcttatctcctaccttacctagacctttacctccatcggcccaaggtcattcttttttttttctactagttctatcttttca

SEQ ID NO: 44984 - DNA, 1096 bp, Oryza sativa
  Clone ID: PAT_MRT4530_47993C.1
atggtttacaattttcggaacaccattctttcacacggacgaaaacttcttttcgtcaaggggtgtctcaattcgcttgatctggttaggtagatctgtgaataatgggacgtcgtcgtattggttgtaaactgacgcgtctttagtgttatcaaatgccaaagatgtgttgctttcccggtacagtaatgtccatccgctcgtcagatgggtccttcacatagaaaacctgtgcaacacgattagcgagaacacatggatcatccttgtggcttagtttactacgttccagaaccgtaaagccgtagtaatcgatggataggcctgttgtgtctttgacccactggcatcatagctccgggacctggatgttaatgccatagtcaagctcccaaatgtcttgtattatccgtagtatgacttattctcccctattgcgtccaacgcctccacacgaactccactattctaacctgcgcttttcttgtccttgcctatcatataaaacgtatatccgccgatgtcgtaccattgccatgagttcatgaggctacttgggccagttgccaacctgtgcaagcgattcaccgaacggcaagtttttttccttcaaccattcaggaaatttgcatttatgttcctttgagatccaagtcgccgcccttctagggttccaggctcttatctcgttcatgtgtccctcaatgtatggctcgaggatggctagttgttgcggcacgctgctaaaagcttccgctacagctttgtagtcgttatcatagaaccttttcttgcctacggtccacttcccaagtaaccgaccctcatgtacaacgggggttataacaatgggtgtggcgtcttgcgcaagaacttccttctctatccggagtcctagtactagagcacttagtataaatactaaacaatgaaccctaagcctatccaatgggcctaggacgcccggcctaaagcccatgacattactcccctctttttgagcagctcgtcctcgaggaattaaatccccattcccgcttgtggtaagcgcggtaaatcttccactgcatcccgcgaaccagtcattaattgccat

SEQ ID NO: 44985 - DNA, 123 bp, Oryza sativa
  Clone ID: PAT_MRT4530_47994C.1
atgtctacaagaattggggacacagagatctattgcatcttcggtgagagggcaaagagaaaactaatgctggtccacggtgatgggtcgcccatggaaggctcatggatcggcgggccaacc

SEQ ID NO: 44986 - DNA, 252 bp, Oryza sativa
  Clone ID: PAT_MRT4530_47995C.1
gtcaagcaagcttttgtatattcttatgggatttaacagtatactcggactaaccacatgatacatattttcacaaccaccattttcatagtccatataagtctctaatcctcgatcatgaaggacttctacttatttcaacacaaatcctaatcttctactacattctttcttattgatatttataatttccacattccttccttaatgatttaaggttctaattatcttgtaatttacccacttgtaatc

SEQ ID NO: 44987 - DNA, 706 bp, Oryza sativa
  Clone ID: PAT_MRT4530_47996C.1
cggacgcgtgggcgccgccacacacccccaaccaagcttccaccagcgcgaagcggcggcgagagggcgagatggcgcgcggcgtggcggtggcggcgaagggcggcgcgggcggcaagaagaagggctccgtctcgttcgtgatcgactgctccaagcccgtggaggacaagatcatggagatcgcgtcgctggagaagttcctgcaggagcgcatcaaggtcgccggcggcaaggccgggaacctcggcgactccgtcaccgtcacgcgcgacaagaccaaggtcaccgtcacctccgacggggccttctccaagaggtatctgaagtacttgaccaagaagtacttgaagaagcacaatgtgcgggactggctacgtgttattgcggctaacaaggaccgcaatgtctatgagctcagatacttcaacattgctgagaacgagggcgaggaggaagactagagtgtattccacatatatcttagttttggagttgttgaattttgatacttcatcttagtacctctagttattcaatccatgttatgttatgctgtggtcaacttggatggttaatttgaagaatccttatatttggtcgcctcaacttcaagagtgcctactgctaatgatgacttgtgaacctagaaaagcagtatggtgacttcttatcgtgttttacatgaaacgggcggtttgctgtt

SEQ ID NO: 44988 - DNA, 449 bp, Oryza sativa
  Clone ID: PAT_MRT4530_47997C.1
ctcgtgctctctttgaggtgggttggcttctcctccccctctttaccttttcctcctcggttcggttccgtggttcgtctagggtttagtgggttgagatggcggcgccggatgtcgagtaccgctgcttcgtcggcgacctcgcctgggacacacgacgaccgctccctagaagccgacttatccacctacggcaagaacctcgacttcaagatcataaacgacagggagacaaggaagaccacgagaatcagcctaacgtaacctatcctccgagcagtggaaacgctacgccatacagggcaaaaaccatgactaactctaacaagcgcaacattagcgaccaagagtgacaagctcagcgctgaatacaccaaaaacagtgactactacaacaacagacagtcactacgcccgaataccctgaagcaacgtctcacaagaccaag

SEQ ID NO: 44989 - DNA, 328 bp, Oryza sativa
  Clone ID: PAT_MRT4530_47998C.1
tcgaaaccgaagccgcttagctcgaaacagccgccgctggtttctttcggcgtcgcccccgccgccgtcagccacaatcggcgccgccgccatcggaaatcgattcgatttccctcctcctttgctcctctcgtgtttgcagcgacgccgccgtgatttgggaaaggcagaagctgtgggaggacaggctagggctggaggcaaggcgatggggacgcgggagatgctgggcgcgtggaggttaggcttctccctgcgccagaggaaacgggatggatgcaccagggctagagcgaggtgcaccggggcaggagcgagatgcgcctag

SEQ ID NO: 44990 - DNA, 231 bp, Oryza sativa
  Clone ID: PAT_MRT4530_47999C.1
atgccgcccattgccatcgccatcgcccggattcatctgcgcagtaggatgatggcctatcctctgcccagagaggttaaggcgtggataaagaggaatgagaaaaagaaaaaaaaagaggattacggcgtacgggcgctcaccggcgacgacggatgcggcggaatcagcgggacgccggcaccggtgctcgcgggacggcgatcggcggaggcgactcgcgactcgtga

SEQ ID NO: 44991 - DNA, 589 bp, Oryza sativa
  unsure (1)..(589): unsure at all n locations
  Clone ID: PAT_MRT4530_4799C.1
cttcggccgaccaaacatagcagcagcagtcgacgtacttcgcccaaccctcacctgccaatccgcttacgacagcgccctctcaaccatcgactctctctaagctctagctctacctttcttcctcctcgatccatccatcatcgatcattcgttttcttgtacacctagctagcttgctcccgccagacgggtctaatataatgaaccatggctagctagttcatcccatcgtacagtgcactagtatagtatatggaggagtacgtgaccgcgggaagcactactcctccgccccatcttcaccagctgctctccggcaccggcgctgcaccaccaccgtcgtctcacgatgacgcccatcctcaccctcatcctcagagcagaagaacagtgcccgcgcggcggctgcggcagagacttgagcacgaggtgagtgagctgaagaagcagctgcggaacgaggaggcggtgcatgacatcctcccccccgccctcccgcactaggccaccgcccttccagcagcgccggtgccggcgccggccgtcctcccccgcctcccggccctcatcccgaanaaggccaagg

SEQ ID NO: 44992 - DNA, 3250 bp, Oryza sativa
  Clone ID: PAT_MRT4530_479C.1
gctttaatacgagacctttttctcaggaacacgctgtcaccttacctccacgctcccctcccgcggcagctgaacagagacgagctcaccccacagtcccccacttatcccactcaccaccacctccagtttttgtcctgacaccagctaacagttaaaccggttgctgttattagtacgcgccaccacgacgcccacgcacattatcccttcgtgcaaaagcctatcaacagctaagccaaacagggtcaggagccggagccgtccgggagagggaacactcgagcgatccgtccgtccgcccgcccgtcgtcgtcgcgcgccatggctgaggaggaggccaagaaggtggaggtggaggtcaccgaggccccacgcgtccgcttataggtgatccccaggcgtcggcacccgccgcacgctttcttgcataagaactcccccccctcctcgctccccgccgccgccgccgttttcttggagaggagaaatccgtaggctcagaggatttttggtagtcttgtttcgtgatattcgtgaagagggggggagctaaggggggattcgtaagatcagaattggatcacgcgggggcgcgctcgggatcgggggttccaaacacagcttcttcgttgaatttaagtggatgtactaatggagtcaaagggtggcaaaaagaagtctagcagtagtcgttccttgatgtatgaagctccccttggctacagcattgaggacgttcgacctgccggaggcgtgaagaagttccagtctgctgcttactccaactgcgcgaagaagccatcctgatagccctttcggcttctccatcctagtagtttaggatttcttgcaattccattttggcacttttcttctgacctatttctctggctgctgcttcctgataatcgaccagttctctagtcttgctccctgcactcctccctcctccatctccggcacagtgttctgaccaacctgctccaatgggtgtcttgtctgctgctgaccctcccccagtctcagcaattgggtttgagggctatgagaagcgccttgagatcactttctctgaggcacctgtctttgctgaccctgatggtcggggtttgcgcgccctctccagggcccagattgactctgttctggatcttgcacggtgcaccattgtgtccgagctgtccaacaaggactttgactcctatgtcctctctgagtccagcctgtttatctattctgataagattgtgattaagacctgtgggactacaaagctcctgctcacaattccaaggattcttgagcttgctgaagggctgtctatgccacttgctgctgtgaagtactcccgtgggatgttcatcttccccagtgcacagcctgctccccacaggagcttctctgaggaagttgctgtcctcaaccgctactttggccatctgaaatctggtggtaatgcttatgtgattggagatccagcaaagcctggccagaagtggcatatctactatgctactcagcacccggagcaacctatggttacccttgaaatgtgcatgaccggactggacaaggagaaagcttcagtctttttcaagacttctgctgatggtcacacatcatgtgctaaggaaatgacaaaactctcgggcatctctgacattatcccagagatggagatctgtgactttgacttcgaaccctgcggctactccatgaatgcaatccatggctcagcgttttctaccattcatgtgacccctgaggatggcttcagctacgccagttatgaggtcgtgggcttcgacgcctctactcttgcttatggcgacctggtgaagagggtcctcaggtgctttggcccttcggagttctctgttgctgttaccatctttggtgggcatggtcatgctggaacatgggcaaaggagctcaatgctgatgcttacaaatgcaacaacatggtagagcaggagctgccctgtggtggcctcctcatctaccagagcttcgacgctactgaagacgtacctgttgctgttgggtcgcccaaatctgttctgcactgcttcgaggctgagaatatggtgaaccctgctcctgttaaggaaggtaaactgggcaatcttctcccctggggagaggatgcgttggaggagaatgatggagtgtttgatgagtaagatgggacttctggtgacgattcgctgctttgttttcattccgtggcatttttatctgttgaggttgtcgtttggttattctgtgaagcagccagccaggctattagtattttcgcttgtaagcatgtgttctgatcttgggacgtatgcttggtctaaataataatggtgaactaaaagctctaggtggtcagctgcgtctgccacaatgagcatgcgtcgggagaaatgttgtcaaaacatatgaataagtatttgcgggaaatttcctttgccttctgctaaaaaaaaaaaaaaaaaaaaaaaataaaatttatacccgtcggggtctaaaaaagttctgcttgggactagatagtatgaaaacgattttcgacctcagcccccacgcgtccgcatgggaggaaaatgagaccgcaaaagctgagaacaaggcttcgaagaagctatctgctattctttcctgggagaacacaaagaaagcaaacatagaagctcaactgaagaagattgaggagcaactggaaaagaagaaggctgaatatgcagagaagatgaagaacaaagtcgcgatcgtccacaaggaagctgaggagaagagagcaatggtcgaggcaaagcgcggcgaggaagtcctaaaggccgaggagatggcagccaagtaccgtgccaccggccatgctcccaagaaactcatcgggtgctttggggcctaaagaaattttcgattcacaacgagcaaacgtgaaagtgttcatcagtggttgctttgcttctttcaccctcccaagtgcgtagtgtgtttgttggtgcaagaaaggtcgtgcctggtgtgtaaagtctggtgttgctgtatataacatattactcccaagacagatatgtttggtgctgtacatgtttgatgcttgacaggcaacattcttatgtgtagttaagaagccacattgttattgttattgacagtaagctgtttgttcttttactggtgtctgagtttgtcttgttttgattggccttcattggattcactagtagctgacgggatctttgtgcatgttagt

SEQ ID NO: 44993 - DNA, 2045 bp, Oryza sativa
  Clone ID: PAT_MRT4530_47C.1
gcagagttcgatcgattctcttctccttctcccccaactctccaccttccacacccttcggcgacacgcgacgcagacagccaccgcacgcggcggcgacgacagcaacaccggccaccatgggcgcgtccacctccaccagcaacccgtcactggaggcgcaggagcaggagaccctcgcgtcggcctccctcgccctcccgcttctccgcgccgccttctcccgctcgaacggttcgctggcggaggcgctgtccccgccgcccgccgccttccgatccgactcgccgccggtgcccccgcgcttccacgacctcgtcgcccgcctcggccccgccatcgcctctctcttcttctccgacgtcggccccgcgggggacgcggccggctggctcgggttcctcaggggattcaaccgctgctgcgcgcgcgttccggcgtcgcagtcgctggcgctgctcctccgcgtgtacgccgcggcctgcgccgacgcgggtgctccctgcggccttcagttccacccggacgaggacggcgccggtggcgaggggaaggtcgtgggggagctggcgccgggggagatcgccgtgttgctctggatgtgctgggtcatggcgtggagcggttcggctcccggggtttcgggtggtcaggagggaggcggcaagggggaacccgtgttgctcccggacgtgacgcacctggtgctgtcggcgctcgtgtcggcgggcgccgtcgcggatgacgctggtgtttggggatgggaggtttcccgtggtgggaagggggtgaaggtccaggagttcacgtcttgggtgctgtccacggctgctgggcttggcaactgcctctcgcggtatgtgcaggaaaggttccggtcgtgcgcagctgatccagtagaggaacgttctgtttcaactggtaacacgtcatcttgtaaccctgacgtatatttgttaacacgtgggagggcatgggcaatctctctcagcctcagaaacacattgagtgaaaagtttttatcagcatctgtcattggaatggatacagaagaccttctttataggtcgtcagttcatggaaaagggctgagccggttttggtcttgtgttgagggatataaaggaccagtgctaattttactctcagctttctctcgtagtggtggtgacaatgttgatactgatcaaagatggggcattggtatattaaccgaggagggtttacagaacaaagacaccttctatggtagctctgcttccctgtgctccacatatccaatattccgcatgctcccaccatctgctgatagtagcttacggccttactgtgcctctgacctagcaggtaaggagaagaatttcatatattgccacctacatcctcagataagggtgtacgaggcaaagccaaagcctgttggtttaggatttggtggaacgattggaaatgagagaatctttttagatgaggacttctctaaacttacagttcgccatcatgctgttgataagacttaccaacatggctccctcattcccaaccagggttatttacctgttgaggcttcagtacttgatgttgaagtatggggccttggtggagaagcaacgagacggcaacaggatatgtacaagaagagggaggatattttctcagagcagcgaagaaaagttgatctcaaaacatttggcaattgggaggactctccagagaaaatgatgatggacatgatttctgatccaaatgcagttcgacgggaggaccgttgaataccattttggactatatgtttattatagctcattatctaaaaaatgtttattatagctgccttagtgccagtacatatctggacatgggaaatggacgatcttgaggtttcatctttcttgtaccttggagatatatagaggagtaggtgcacatatttgctccactttgatgtttgggccatttgactgggcaacacgtcatgtaagtattgaattgaaaagagtcttgtatacagaatatcggtctaccaaaaaaaaaaaaaaaaaaaa

SEQ ID NO: 44994 - DNA, 696 bp, Oryza sativa
  Clone ID: PAT_MRT4530_48000C.1
atgggcattttcactgtcagaagtgcctacaagctagcctcgaaggcagaattgtgttctgaaaatagcggcgaatggagaaagaagtttatggaagaatatttggaatgcccaagtcccgcagaaagttcgtgtcttcgcgtggaggctagcacgggattgtctggccagtacaatcaaagaaacaacgcaggaacattgtcagctccccgaactatgccgaggtactgctcatcacccgacaaaaatctgatgacccgaaaggatggatgcggttccatcgggattgtggttagaaactccacagggcaggtcctcctcacatcctggagatttctgaggaaatgtgcggcagcagaagaggctgaacttctggcctgcagtgagggactgaaaattgttgctgaatggttgccaatgccagtaatcctagagtcagattgtgccacagtcatcgcgagacttcaagccaagggtgaagaaagatcacgatggaccttccttctgcgtgagacgaaagctatgatgacgttcatccaagaagtgaagctggcgcactgtaacagagactgtaatagggtagctcatgaacttgctcaatttgctaaacagtcggggcatagcgcggtttggcgtgatagtgccccgtcctgtattatgcaaactttgcagcaagattgtattcctattacataa

SEQ ID NO: 44995 - DNA, 189 bp, Oryza sativa
  Clone ID: PAT_MRT4530_48001C.1
gtacaaaacaggataagggacattgtaactgacactaccgtgggcagatgttttaagacatctcaggcacatgtcctttgataagagcgcgttactcttagctttgtttataagaataaacaaaaagaaatccataaaaatgcccctatacggtatgatttatacatactatatgtcggatatgatgca

SEQ ID NO: 44996 - DNA, 642 bp, Oryza sativa
  Clone ID: PAT_MRT4530_48002C.1
atgactgctgccacaccagccgccactattttaagcaagcggcggctcccgagcactcccaccgcggatggcatcgaggacggcggcggcggcagctcccgagacctcccgtcgatgatcgaggacagcggcggcgcgacggcggcggcggctcccaagccctcctgccatgcccgcgctctcacgccgcctctgctgcctcctcccctggctctggaccccaccttcctccttctccgcagagctgccgccttctcgtcggcgccctcccaaggctgcccgctccacgctgcgctggcctgccgctgtgcccccgcggctgccacccttgccctctactcccgcatctgtgaggcctcgccgcccaccccgtccaccctctccctcctccttgccgccctcgcgtcgttgtcttccccgcccccttccccgtccgcaggcttcgcgtgcctcgccgccgcgtgcctcacccacgcgcaggcattcaagtacgacgcgctcgcgcaccccgacgaagagggaaagggaaggcgcacgcgggagcgggaccccgtcgtcaccaactccctcatcaagttctactgctcacgcagagaggaggatgaagtcgggaacggagatgaggaaggagggaggggatga

SEQ ID NO: 44997 - DNA, 301 bp, Oryza sativa
  unsure (1)..(301): unsure at all n locations
  Clone ID: PAT_MRT4530_48003C.1
aaggaggccctgctgttgcaacacaatgacaaccatagggtacgagggaactcaacgcctgccaagctcgccaaacacccatctacccccttataccttatagaagcaagatagttacgcatataaggcttattcgttttttccattggcccaaatcatncactccaagatgcccaagttatccacctactgagttaataccttcatccaggaaaagcgacttgtatttttcatggtccaaattcaaaaacaaagcngtagtattggaattggaagtcaacaaattaaaaaaaaaaaaaaa

SEQ ID NO: 44998 - DNA, 1425 bp, Oryza sativa
  Clone ID: PAT_MRT4530_48004C.1
atggcgatagaaaaggcgactagcgtggtggcagcagcgacggcggcgtcacgaggcggcaccgcctcgccggagagcggactttcctcaacggcgaccccgtggatgggaggtgttctgaacgtctcaactagcgggaggcggggctgggatacccagggtgttcgagcccaaggtaagcccaacactgctcatgcggtttggcgggttcatggtggagggatccgacatgggtggtccatgcgggatttgcttctgaatccgattgaggaggttgctatccccgcaagaggaaaggagaaggttggagaagtggggagagcaggagcgatgcagaaggaagagatcaaatgtttcaattgtggggaaagtggtcatcatcagggttttttcagcttgaaagtcgatattcctgatatggaaaaagtggctcagtttagagggattcttactgttgaaaaaggcaatgggtctgttcagaaggtggctactgaaatgtcccatttgttcaaggaaaagaaatgggattggaatgtaaaacaaatcagtagcaatgatttcctgattgatttctctagtgaggatgaaaggaggcaagtgaccaaattcgggggttttgtgtttaagacttcatccattaaggctagtgtgatagattcaaaaatgacagacagtgcagtggatgagctgtttgtagtctgggttaaagtgattggtctaccaagctttgctaagaaacatgatattgttagggccatctctgacattgtgggggagtttaaagagattgatgaagaatctctaaaaggggaaggagctgtaagggaggcagaggttgaccatgatggtactggctcagtagaagggggtgatgaggatgatgataatgcagatgatctagatgatgactaccctcctgggatggggggtaaaaaggatggtaaagagaaaaaggatagtcccaagaaggagtcacctaaaggtacagatagtaaagggaaagggggtggcaaggttcaatctgctccccctgctctaaggagagccacagagaccatgcagaaagcctttaccttgccggtatcaattgagcctgctgaaaaggatgttggtaacactgtcattgaggtagggaaagagggggaagacaaagcagtagtgctatggaagtcagaagatttctctcaaccagatatttttgaccagatgtctcaggaggacgacaaaagtaatgatttgttgaaaagaatggatgtggacttaaaacttgggggtgtgaaactatttactgatgaagaggaggagaaatgtgcaataccaactgattcagacattgagatgatgagggctgaagaggatgaagacaatgagaagtttgtactagatagtgggatgggggaacagaacaagggagagattttctag

SEQ ID NO: 44999 - DNA, 501 bp, Oryza sativa
  Clone ID: PAT_MRT4530_48005C.1
atggcgaacaggttccctccctgtttgttcccccttcccatctcttccccccttcggtctcttctttctcctctgatcctctcccatcctggcaccgacgttcacttgctgaaggtggcacacgacggcatagggcagcggcgcatgagaaaggaggaggcagcgacgcatggtggtggttgtgtcgatcttctccattgtgcgatgcatgaggaaggaggaggcagcggtttcccgatcagagcacacacgtttcccaagttctcactgaggatgaaattaatcatgaaagatttgtcggtaattagtcatgccttctatgtaaaattaatattaaatgagtgttcatgtgtccacatgctgggacaaggcctccaaacaaaatgtttgattgcaggctgggacaaggcctccaaacaaaacttctacggttgttggcacatgcgccatcgtcggctacgatttgtcctccgccgatccaattggagcagcaacatctag

SEQ ID NO: 45000 - DNA, 300 bp, Oryza sativa
  Clone ID: PAT_MRT4530_48006C.1
atggggaggggcaagatagtgatccggcggatcgacaactcgacgagccggcaggtgacgttctcgaagcggcgcaacgggatcttcaagaaggccaaggagctggccatcctgtgcgacgccgaggtcggcctcgtcatcttctccagcaccggccgcctctacgagtatgccagcaccagcatgaagtcagtgattgatcgatatgggcgagctaaggaggagcagcagcacgtcgcaaaccccaactcggagctgaaggagttttgtagcgtcttcatatatataacagagaactaa

SEQ ID NO: 45001 - DNA, 279 bp, Oryza sativa
  Clone ID: PAT_MRT4530_48007C.1
atgggtagaggagaacaaataatgaacctgaagcgacgggctgcgaggagacaactccagcctggggactggggaatggaccaccctggcggcgccggcggcaaggtggagagtagacagtgggattgcatggtggagacgacggccttggggacggaggagattgcggcggcgattggatccggcggagctccggcgaggatgcggcaagtggagtgcacggcggtatcggtggcggcggaaggggccgaggtcggctccggcggcggctccgagtga

SEQ ID NO: 45002 - DNA, 429 bp, Oryza sativa
  unsure (1)..(429): unsure at all n locations
  Clone ID: PAT_MRT4530_48008C.1
accaagcccccgggccacccccacaaaaaaaaaaagttttacgggcccatattatcgggaggaacgggttatttttttctaccggggggggaaaaaagggggggccccaggtggggggcccccccccccctttctaataaacagccttaattaataaatccccctaggaaaaaaaaaagagggggctcctttgatcctttggaaacgaaaactaaaaagctcaccacttccgggggggttgttccggccccccccccccccgaaaccgggggggaaaggggngggggtcagggacccccccccatgctgaccgaccggaactggggcttggaaatcttgggcaaaaggaatattccggggacccccccgatgagcgcaaatcccggggggaggcccaaccccgggatgttccccttcccggacgcgggg

SEQ ID NO: 45003 - DNA, 513 bp, Oryza sativa
  Clone ID: PAT_MRT4530_48009C.1
tttaattttcttttgtgtttttcatttaaaaatatatttggttaaattgagagccgagccgccccttcctcctcccgtgggcgcttccaggcgccgccatgcgccgctactgccgccgtgcacgactcagctgccgccgccgccatattgccttcgacgcaaaggcatcgccgccgacgtcttcgtgtagtcgctgttgtgcagccttagcccgtgcgtagccgtgtgtgcctagccaccgcagccgacccatgcgccgtcgctgccctagttgcatcgccgctgctgtccaagccgccgccttgcgccatcgcttgcttgttagcttgtcgtttccgtcgttgtgaagggggtgactacaatccaggaacggtgcactgctttgagttgagttatgcgaggggtcttgtcacaactacacaaatggtgacatgttcagcatgggcacatgatgatatggtgacatattgtggagttgtgtcttgtgggtacagtggtacacctctggccaga

SEQ ID NO: 45004 - DNA, 558 bp, Oryza sativa
  Clone ID: PAT_MRT4530_4800C.1
atggccgacgtccgccccgtgttgtgccgtcgccctccgcggtaccgcagccatcgtccgtggctcagcaatccctccgtgttcgccggtcttcgccggactcatctccccgtgcctcccggtccctccgaccatcggccgccggttcctgctcacggaacgccgccgaaccgccgtcgccgctgcctcctcgaggagcgccgccgcctctttccgccgccggcgacctcccgctctgcctcgtcggcccgcacgctcggtgagcccctcctcccgctccccttccctttcgcgtgcatcgccactgcccgtgagcgccgccgtcttccggctgctcgccgccgttcggcacagccggctgctgcctccggaggccgcacgctgcccagcaccatggctcggccgagccggtttcatgccgtgcccatgccccagccgcgccgcctcgtggccgtccgatcggctttgagccgatccgggccgttggttcccatggaccggcggtggaccgcctcggtggtccctgtccacggtggatcgacgcccttgtgccgctga

SEQ ID NO: 45005 - DNA, 293 bp, Oryza sativa
  unsure (1)..(293): unsure at all n locations
  Clone ID: PAT_MRT4530_48010C.1
cggacgnggcnangtcacgcggcctcatcctgcttctgctcacgaaaagatnaaaatcggaggaggagagagagagaagaggggaggggcagaggagagggaggctctctactcctagcactgcccatgtcggcggcatcgtcgagcggcgccggcggcccttcatcaacgacgtgctcaccgacgacgtgctccgcgcggtgctggcgcggctggtgcccgaagcggacgggacctttcgggctcgtgtnccgccgcttggctccggatccanaactccgatnggcggcgct

SEQ ID NO: 45006 - DNA, 3168 bp, Oryza sativa
  Clone ID: PAT_MRT4530_48011C.1
atgacgatcgatttgtccatgcccgggagctccgggctcctggacgacgtaggggggaagaagcacatgaatttcttcagcaaccgctacgtgctcgcgctcacgggcgccgcaggaatcggcgggttcctctttggctacgacacaggagccatcattggagcagctggcggcggctggatcaatgatacatacggccgtaggaagtctactcttgtggctgacatgctgtttgcacttggctcacttgttatgtgtgctgctggtggtccttacattctgattcttggaaggcttcttgttggcttgggtgtgggtatagcatcagtcacagcgccagtttacattgctgaagctgctccttcggaaattaggggaggtttggtgtcaactaatgtactcatgattactggtggtcaattcttctcctacctcatcaatcttggctttactgaggatgagaaagcaaaagctatttctgtcctagagaagatttatgactctgaccgtctagaggaagaggtagagcttcttgcttcttcttcaatgcatgaatttcagtctgatggtactgggagctatttggacattttcaagtcaaaggaactaaggctagcattttttgctggagctggtcttcaggcgttccagcaatttactggcatcaacactgtcatgtactacagcccaacaattgtccagatggctgggtttacctccaacaagttggcattgctcctttccctcatagtcgctggtatgaatgccgctgggaccattgttggaatctacctgattgaccgctgtggccggcgtcgcctggcccttacaagcttggctggtgtggtggtctccctcgccatcctagcaatggccttcatactgcagtcatcatcagatatctgttcgaatgcactcaatggtgcctgccaaggtgcactgggatggttcgcggtggcgggactcgctctatacatcgccttcttctccccaggcatggggccagttccatgggcagtgaactccgagatctaccccgaggcataccgtggaatgtgtggtggcatgtcagccactgtcaactgggtatctaacctgattgtggcacaaacattcctctcgatcgtcgggttggttgggaccggcctgaccttcctgatcatcgccggaatagcggtgctggccttcatcttcgtggctctctacgtgccggagactaaaggcctcagctttgagcaggttgagctcctgtggaaggagagagcatggggaaaccagggcaatcgccagagccttttgggcgctgcaccgtacattgggtgggtgaagaatcaggttgtgttggtgtcgaatcttgtatacatgggaaggactgcgcagctcagcaagggtcggatcggatccccgtctccctcggagatgtccgccaccgcctccccagcctccgccctcccgttccgggccggcaagtccggtgtttttcggcccggcccaaccgtgcggagacgcgttcgtgtctgtccttttccggcccagcttgcgcaaccgaggcccatcgggcgagatcaccgccccccaccgtcccggagcgccggcgtgcggcgagcctcgagggcgacgccgcctctcctcacgagccacgaccgtgatgctctgaggccgaggccgaggccgacgccgacgaggaggacgagccgaacggcccgaaccatccgccgcccgctcgcgttcagggccaccgaacaagtagtttctgcttcatactggtttaagttccaaggtaacaatctacttgtgcaggctcttggattgctcgctctgcaagcctacctcccctcactccatccaccaccttgcaatattgaagcagagctaagcaactgcgaagaggttcatggcttcaacaccgtcatattgcacataggcttgtacacctgggcattcagtgaaggctgtatccgtgcttgcacgccatcacttggagcagatcagtttgaccatgaagatccctctgaatcccgccaacaatccagtttcttcaactggttcacctttggaatctccttaggaggatttataggattgattctaatagtgtggctcgagaactacaaggggtgggacattggatttggcgtgtgtgcactgctaattcttcttgggttgctcatagttgccactggcctccctttctaccgtaatcaagtaccagaaggaagccctctaactcggatactgcaggttcttgtggttgcattcaagaacaggaaatatgaacttcccgagaaacttgaggaagcacaagaaaaccgtaatggactggattctattgaagtaccacgtcctacaaattttctgaaatttcttgacaaagcctccatcaaccatggtgaagatggagcctggtcagtttgcagcacaatgaaagtggaggagacaaagattgttcttcgaatgcttcccctcttcatcagctccatgatcggttatatctcaaaccctctgctcctcactttcactgtgcaacaaggtagcatgacaaacacaaggctgggcaagatacatatctcccccgcgacgctctttgtgatccccatcacattccagatgctaatgctcgccgtctatgatcgcttccttgttccgttcatgcgcaagcgcacaggatatgcctgcggtatcactcacctgcaacgtgttggcttaggctttgcctccatgatagttgcatcggccgttgcagcagtcgtcgagagaaagaggaaggaggcagctgtgcagatgtccctcttctggcttgcacctcagttcttcttgcttggcgtgtcagacgttacatcgttcgtcgggctgcttgagttcttcaacagcgaagcaccaaaggatatgaagtccattggcacggcgctgttctggtgcgagctgggtctcgcttcatggatgggcacgttcctggtggagctggtgaacaaggctacgaggcatggacaccatagagggtggctcgagggtacaagcttgaacaacagccaccttgacttgttttactgggtggttgctgttatcgggctgcttggcttcttgaattacctgtactgggcgaagaagtatgcctaccggcacaatccacgcatggtcaccccatcagctgatcaggactcaccgtga

SEQ ID NO: 45007 - DNA, 459 bp, Oryza sativa
  Clone ID: PAT_MRT4530_48012C.1
atgcacgcggagccggcggcgccgcctcatcttcgtcgctcgaggccgccaccggagcttcgcgggggagggcgattgagtcgccgccttcaccgtcgaccgcgccacgaccgcccggccgtcgatgagccatcgccgtcgaccgcgccccccgtcgcccggccgtcgtcgtcgcgggagtcatcaacgtccgcgctcgccgagccgcgcggcgatggatcggcctcccccgagcttgccggcgatggatcggcctccccggagcttcgcgagggcggcgagggggagcagcctcctgagacagtggcgagggagagcaaccgccgctcctccaccagtagccaccgcgtcgcctcccgcgccgttggcggcagcggcagcgacaccccggcccgttgccgacaagaggcaaaggagagagagagaggagaggggaggcaaagagagaggagtgattga

SEQ ID NO: 45008 - DNA, 767 bp, Oryza sativa
  unsure (1)..(767): unsure at all n locations
  Clone ID: PAT_MRT4530_48013C.1
tctggatttgctttattaggagctttcctctcagactcgtacatcactcgctctagaaccatactactctatgacgatcgatttgtccatgcccgggagctccgggctcctggacgacgtaggggggaagaagcacatgaatttcttcagcaaccgctacgtgctcgcgctcacgggcgccgcaggaatcggcgggttcctctttggctacgacacaggtgtcatatctggagcccttttgtatattcgggatgactttccagcagtcagagacaattatttcttacaggagacaatcgttagcatggcattggtaggagccatcattggagcagctggcggcggctggatcaatgatacatacggccgtaggaagtctactcttgtggctgacatgctgtttgcacttggctcacttgttatgtgtgctgctggtggtccttacattctgattcttggaaggcttcttgttggcttgggtgtgggtatagcatcagtcacagcgccagtttacattgctgaagctgctccttcggaaattaggggaggtttggtgtcaactaatgtactcatgattactggtggtcaattcttctcctacctcatcaatcttggctttactgaggtagacattcaacctccatttaattagggttcatggcttcaacaccgtcatatngcacataggctngtacacctgngcattcagtgaaggctgtatccgtgcttgcacgccatcacttggagcagatcagtttgaccatgaa

SEQ ID NO: 45009 - DNA, 380 bp, Oryza sativa
  Clone ID: PAT_MRT4530_48014C.1
agaaagcaaaagctatttctgtcctagagaagatttatgactctgaccgtctagaggaagaggtagagcttcttgcttcttcttcaatgcatgaatttcagtctgatggtactgggagctatttggacattttcaagtcaaaggaactaaggctagcattttttgctggagctggtcttcaggcgttccagcaatttactggcatcaacactgtcatgtactacagcccaacaattgtccagatggctgggtttacctccaacaagttggcattgctcctttccctcatagtcgctggtatgaatgccgctgggaccattggtggaatctacctgattgaccgctgtggcccgcgtctcctggcccttacaagcttggct

SEQ ID NO: 45010 - DNA, 376 bp, Oryza sativa
  unsure (1)..(376): unsure at all n locations
  Clone ID: PAT_MRT4530_48015C.1
gtcctggttgaccggccgctccctgcgctgtgtggaatttgcacggcctcggcgaggacctgagcttggtggctctgctgagatggcgtctcccgtcncttgtcgcatttcttgcacagagccatcgattggggggtctgtcatggcgttggtggtgctggtccgcactgggcagacgttccatgagatttcttctgcttctgtggatggggtcgatgatgtggaagaggctgttgagcggggccncgatgtgcttgctgccctctcggcactctttggccggccgttgcgccngattgcccctttgccgcgcgtcccggtgcggctgcgtcctctcccgctggccctgcctcgctcgccgcggtctgcccattgc

SEQ ID NO: 45011 - DNA, 670 bp, Oryza sativa
  Clone ID: PAT_MRT4530_48016C.1
tctggaggagtgtggtttggattgcaactagaaggtcagcatgtgaacttcccccatcaagtgtgtgcttgaagaagtatttttccaggtgtttgtgcccatatttttttttcattttttcctctgtagatagaaacacgttaaaaaaaacttgcatttcttttgttccatggtggtagctcagcctcatatctgcaatattgagcaaacgggaggctgcgacaaccttgtgcagttcggccacgaaaaatacagtgaatgccagtgtttgattgttcagcattctttattagtttggtggaaatttgatcgggtgagccgaacagaaagttgcttgattctgcattgctctccaccatctacaaaaactcggtacttgtttctcaataaggcaggaatggatctgccgtctggaatagaggaagatgcacattatttatgtagcgagttaaaatatgcctgaagggcttgttcattccttgttcctctttctatttcatttttttgtccttgttagaacaaatagatctctagttttagtgatttagcccatccggtgttgtaatttgtaaaggtgcccctttgttcaatacttcaattgcgtaatgtccctgataaaaatgggtgtgcttcctttgttgttccccttcatatctaaaaaaaaaaaaaa

SEQ ID NO: 45012 - DNA, 298 bp, Oryza sativa
  Clone ID: PAT_MRT4530_48017C.1
ggagtagtaaatcaggtagtggtcagtggtcaccatgaccaaggaggagcaaaaatgtgatacaagaaacatacaatagggtttactcaaccatggtccacatcgatcatagacatggttgtacttatgatgtgcatatctgaaaattggtataaataattggtaagaggctaagagctagtgttgggcaacccaagtggacaaggcgtagagcacgcggcccttccacctgtgcagcaaccagcgttgatcctcgtccaccacgaagtccttgtggtacttgtccctcaccttgtcc

SEQ ID NO: 45013 - DNA, 329 bp, Oryza sativa
  unsure (1)..(329): unsure at all n locations
  Clone ID: PAT_MRT4530_48018C.1
aagtgctgcataatgatcttcatgcttttnccaaaaaaaatcttgctgctgcatgatgatgtcaagggtgatagcgtgacgcgacgagaaacgcgatctttttttggaaagctttgctggtggttagttcctctcggagtagtattatagtatgaggctatgagccaaaccaagccgccgcgagagctcagctttgacgtcacgtcacggcggggtcgcggttgatgagnngacgaagcggatatgcatgcnaaggccgcgtcggcatttaaccgcntcggcgcgcggttggatccgnggacaccgagtcgccgtcanaaaaaaaaaaa

SEQ ID NO: 45014 - DNA, 199 bp, Oryza sativa
  Clone ID: PAT_MRT4530_48019C.1
aggcaatcttcttgacattattcattactgtaagatcttttcacaccccctttattccttttaatctgtcccaaaattactagaattcgcccacaactcctcacaaatactgccaaataattgccacttcttgaactttcgatgcctatagtcctaccttgaaagcctatgagcaaaggacgaccacaattaacgagta

SEQ ID NO: 45015 - DNA, 292 bp, Oryza sativa
  Clone ID: PAT_MRT4530_4801C.1
atccgcttccaccccccagtcccctaatttcatctcagatcacatcaggtgaaaaaagaggagagaggaggggggaagatggggttggcgttccggaagctgttcaaccggctgttctcgaaaaaggagatgccgatcctgattttactgcctctcgccgacagaaagaccaccattctctacaagctcaagcttggcgagatcgtcaccaccattcctccccttgggttcaatgtttaaaccgttgagtaccaaaaccttagcttcactgtcttggatgttgggggtcaag

SEQ ID NO: 45016 - DNA, 431 bp, Oryza sativa
  Clone ID: PAT_MRT4530_48020C.1
gacgtacacatcaactggcacaccgacgtggagagatgcatatagcgctaagcttacagacggcgggccaccaggatgacgcttgcctacttaatcgctgacgagaacgaactatgatggccactgactggatgacatggccaaacaatgactgtgactggatgcctctgctgtcagatcactgagatggaaaggatgacttgtcttacatgatgctgagatgcgagatacgactgatagttacctgaaggtgacaagcacgatactgggcttgcacgcaagacgtgatgacatactatacttaagcatatgagctccgcgttgacattagatgtgcaagcatatgaaaactagatgtgctgtaacttgaacgctgaaacagaaaaatattttcatatggtgaccggtgaagcagaggtatatccttttct

SEQ ID NO: 45017 - DNA, 506 bp, Oryza sativa
  Clone ID: PAT_MRT4530_48021C.1
aattcgcgtggggtgttctagatgatggacgcgccaccaagtaccccaatcccatcggacttttctcttactgctgccgattcctatcacacctctggataggcactatctcgtcgataacaaaccatggaggaccctgctatgcggatcacacaaatcttactcctctagatcatctccgcgggggtggataaggaggagcacttcatctaaaacgaataaacggacctgcagctctccctgtcgaagagcaccgagatggggaccatgcgacggcgcgcgtactcttacacagagaatctcctccgcatgcgcgctcgagcacatgatctacacgccggctagactgcctactactaccatcggcggactcctcggcgacagcgcgctgatgcagcgtcattctgaaggcatcgccatacatagctaaatcgctcgactcgcgcgctcgccacgaggaccctgctgatctgcccgacaccatggacaacttcgagcgccaggtc

SEQ ID NO: 45018 - DNA, 402 bp, Oryza sativa
  Clone ID: PAT_MRT4530_48022C.1
atggagaacaaaggcagcgagaacgagaggagcctggcgaataatgccgccgctgctgccgccggcgacgtggaagaagagacgacgaagccgttcaggtttgctcccgaagtggagaagtggacggcggcggagaaagaggcgacgctggccttcttccgggcggcgaacgctgaagcggccaagtacatggagatgacggaggaggacgtggtggaggagtaccggcgggcggggaagcttcaccggtatgacccggataaggagtggcagaagcgttatgcccgcgccgccagggcgcacccgccgccgccttgtgccatatcccgcttgcctcatatccagcaatacctcaaatacctcgaggaagatgatcagaagcaattttcgttgataaactaa

SEQ ID NO: 45019 - DNA, 475 bp, Oryza sativa
  Clone ID: PAT_MRT4530_48023C.1
aaaaaaaataaccttgacccgaaaaatttgaagagacactaaaaactgatagagcaccaaatacagaacaaaaaatggggggccgttcaaaaacaccagcttgtcgtctcctgggacgctctaccttaccagtgttgtctccatgccccgattattttatgtgacgaaggttttacaggagatcgattgaaacaaccccgagttcactaatctacatgccaccaatggatatcccaatttccactactggcacacatggcaagaggcctgctcctgatattcgatttctaaattgataacatcatgattaggtattgccaccctacctgtatcggttcttaaatagcggttgttcacacctgttatccatatctactctaatcattttgcattgaattaaacccactacttttacatttctttcctatctttcattccacgttcttctaatttccccaccaaactttaaagccgg

SEQ ID NO: 45020 - DNA, 228 bp, Oryza sativa
  Clone ID: PAT_MRT4530_48024C.1
gccattcttgatctttcttgagacatagcttgtccaaaagggagggcaccagctgcacgaacgccaggaaacatcacactcccgcaaaagcaccccgatttgtagatcatggacccatataataacagcaacccattgcttgtccgccctcaaagggaggcaatcctactcccaggtcccacgaactagtcactgaaggaaagccaaaacagtccggcaccgcatact

SEQ ID NO: 45021 - DNA, 168 bp, Oryza sativa
  Clone ID: PAT_MRT4530_48025C.1
atggccgtggcgcccctaggtggcaccctcccacagcgccacgccctggcggcctggaagcatatgggccgccggaggattgccggccactgctcctggaacaagatgcgcatcaaccggctacaagagggatacatgaaacagccggcggagccatcaaccggataa

SEQ ID NO: 45022 - DNA, 486 bp, Oryza sativa
  Clone ID: PAT_MRT4530_48026C.1
atggctaagaaaagggcaacctgcaatgtggaaccacaagactctgggcagaacaaacacccattcacaagaatcctaaaggcgtcggcttggaggagaatattgacgacgagccgaccgctgccgccaacagaggaagaatctgcaccagggatagcaccggctagcgtactgcaggtgacgagagtacgggaagtgacaaccgccacaccgtcgagcgcaacacacacgccgacgcctgccgacgccaccaccagcgcaagcgcgacggagggagacgacaaccaaagtgacgccaaccacaacgttcccatcgacagcaccgccaacacaggcgcggcgaagggagacgacggctgccgtagcaccgagcacggcgaagagtccatcgccacctcgatgacggtcgccgaaacgccaagcacggcgccgacatcgtcgccacctccaacgcggatccgcttgccagcagggcattggtgttga

SEQ ID NO: 45023 - DNA, 1465 bp, Oryza sativa
  unsure (1)..(1465): unsure at all n locations
  Clone ID: PAT_MRT4530_48027C.1
gctgatcatttgatcaggctgaaaaggaatcaaacaaaagtcctgaaaaagctctgaccagctgctgcttgatcgctcgccatgcagttcgccacatttactcgtgtcaccanccaggctgcagcctgaagaaggcctctgcaaagtctggcttccattaactggctagctcgatccatggccttttctcctactagctgatgcatgtatatgtgaaagctagctagctgcagctggactacgtgtcctagtagtagctactatcaactcatcactctctgaattcgatcgagagaaaaaaggggacactccggccagtccactgaatgctacttcaccagctaagccaaaactccttaaatagttccacgccaaaattagaagtttgaagaaaaaaatttgggtcgaatttaggccctgtttagttcacaccaaacttcccccnaactcctaactttccatcacatcatatcacatccaaaactttcctacacacataaactctcaactttttttccaaactaccaacttttcccaaacttctccccaatttcaagaactaaacatagccttagtttcaaactttttcttcaaatttccaacttttctattacatcaaaactttcctacacacaaacttccatcttttccgtcacatcgttccaatttcaaccaaacttctaattttggcgtgaaacacacccattattgaaaactgaaaacacgaggggagaagagcatcagccatcagcaattcaggtttcaggacatgccagaatcaggaccagcctcctgaacatgggtatctgctacatcactcaaatgttaaagtgtcaacaaatagtgttggtccaaatatgggagccaagagagcagtgagtagttgacagctagtgttgtgaccacactacagaactgagaatcacacagcagagcatgttagtggagaactcctacaaaatgtggacattatgaataaaaactaagaaaaaaaacatatcctccggattagtcgttatctcacatatgaggctccccaactgttcatacttgcatttgtgttcatgagctcgtccatctacaaattgcaaaggctaaaggcagatagttgcaaaataagaaataatagatacattaggtgtggtatgaagtattactatttattttactgacatatacatatataaaaaggatgtagattatcaccttcagtacaaaacatatatgaccaaatattaccaggcatttgcacatttctaagaatgtacctttaccatgctagacaacaatttgggcaagctgctgcctatatatatgtatatgatacattacatatatgatatatccatcctgttatagcttataaggtaatgggcatgctaaacccaaatgttatggcttgtagccagcagtccgataaaagaactcatagcagtgtagcacagtaggactgaatgccctgata

SEQ ID NO: 45024 - DNA, 1187 bp, Oryza sativa
  Clone ID: PAT_MRT4530_48028C.1
ctacattcctttcaacttcagctgcacatcactcagcccagtcctcatcgctatcatcgtccacgttgttatcctgtcatatgctgttaggattagctgggaggacggcacaacctgggaggaacttgagagcacttcaattttgtcatcttctacctgtgtttttctccttttctgacttctgccagcactcttcttccctgttggatgtttttcctctggacttgctcgctgcttcttagcagcaggtccttttttttcttctgcttttttaaacatgctagacagagtggcctgaacgagtggctccttcttagctgagataggctgcgcagaccaatctgcaggtttaatgtcttcactttgggattcattcttaactgctggactcttcatcttctcatccatgtcctcagggacatcaatctcatcgtcattatcagatgaatcgtctccagatgatatctcagtatacttcaaggctttcccagcagttctagcagactgcctaactgaaggtgcttgactagtgctttgtgtgttatcctcgtccttaaggtctgaatcctcggaagaatcaatgtcagattcaatcttaggggaaagggatcctgtggtggtttcctttggcggtttattgatggaaacagcttcatcacaggaagcacctgctccacctttaaaatcagaatctgcaaccgcctcatcattctggaactcttttggaaaatccagtttcagttcttgtgggttttcttcttcttttgttccaatccaccaggcttcagaaaaaacaatcaggctctcgaagacgtcatctgcagtgtcagatacttgttcttggggtacacatgcgtccccaacagcttcatcctcccctgtgggaagtcgaggtagagcagaggatttttggtgccaagatcagcgagctcgccgacgcggccgcccgaggcagcagccgcgggcgcgaggaggccggggaaggagaagaggaagcggctcttgcgctgcccgccgcggcgcacgatgtcgcggccctgcagccgcgacacggcagtggagggcgcgagagccgagcgcggcgccgccggctccccgcgctggagtaagccattagagaaggcgagggagcggaggcggcgccgctcgtcggcctccgcatcgccggccggcttcttcttcaccat

SEQ ID NO: 45025 - DNA, 1702 bp, Oryza sativa
  Clone ID: PAT_MRT4530_48029C.1
ctacattcctttcaacttcagctgcacatcactcagcccagtcttcatcgctatcatcgtccacattgttatcctgtcatatgctgttaggattagctgggaggaaggcacaacctgggaggaacttgagagcacttcaatttcgtcatcttctacctgtgtttttctctttttctgacttctgccagcactcttcttccctgttggatgtttttcctctggacttgctcgctgcttcttagcagcaggtccttttgttgctggagatcctttcgggcttctagtacatctctttttttcttctgcttttttaaacatgctagacagagtagcctgaacgagtggctccttcttagctgagataggctgcgcagatgaatctgcaggtttaatgtcttcactttgggattcattcttaactgccggactcttcaccttctcatccatgtcctcagggacatcaatctcatcgtcattatcagatgaatcgtctccagaggatatctcagtatacttcaaggctttcccagcagttctagcagactgcctaactgaaggtgcttgactagtgctttgtgtgttatcctcgtccttaaggtctgaatcctcggaagaatcaatgtcagattcaatctttggggaaagggatcctgtggtggtttcctttggcggtttattgatggtaacagcttcatcacaggaagcacctgctccacctttaaaatcagaatctgcaacagccccatcattctggaactcttttggaaaatccagtttcagttcttgtgggttttcttcttttgttccaatccaccaggcttcagaaaaaacaatcaggctctcgaagacgtcctcgcagacaacgcccttggtggacctgctcatctgcagtgtcagatacttgttcttggggtacacatgcgtccccaacagcttcatcctcccctgtgggaagtcgaggtagagcagaggatttttggtgccaagatcagcgagctcgccgacgcggccgcccgaggcagcagccgcgggcgcgaggaggccggggaatgagaagaggaagcggctcttgcgctgcccgccgcggcgcacgatgtcgcggccctggactaccctttgggcccgcccctgcatcgcattgacgtgacgcttacatgatagctctatctcctccctccgctggcaagccgaagttagtgaggacgccgatgagcggggtgggaagggaggaggcagggagagtgtccatgactccatgtcaatgaggagggtgatgaaggggagtaggctaaagccaaagtcgatgatgatgccgatgtcagtgtccatgcgggttgtgaggccgagccgctcaagctcattgcggacaaggggtgctggtgtggtgttcccagaacgtgacctccagatgggcgtggatgtggtgccgcacgcgcaccatccagtcccgtgcgccacaacagcgcctcctcgtaactcctttctcctccacgagctccacctggcctcctcttcatcagctgctccctcatcaatgtgtccactagcccctgaggagattgtttgcaccaacagcccaaagcccgtcatgtggaacaacggcaagatgagcaatgtcactatgaccggcaacgacagcttgccacttcgacttcaatggtttggcggctggaggaggagcagcgctgtcaagccgtcctga

SEQ ID NO: 45026 - DNA, 2705 bp, Oryza sativa
  Clone ID: PAT_MRT4530_4802C.1
atgtcgtcttccgccagcccgtctaccacgccatcgcccgagtatgctaaacacctctccaacctagtcgcgattcccagcctgtcgcacgaaaacaactattttcttggcccaatcggcaatcttgaccccactgattttatcatcggcgaaaccaatagaatcccctttagattagacaaccctaatttgagtcactagaagaatactttcaagtcttggccatctcttgagaaaaccacccctgagaagagctggaccacgtggtacaagtgcgtatcggctagcaagaaagttcactgggatgagattggtatcggccaagcacttgccctcaccatagccaattctgctaaggatgaacctttgatggccgccgccacctatttttggtccaacaccatcaatgcctttttgttcaaccaagggccgatgactccaactttgatcgacattaccatgatcaccggtttagatgtaactttcaatggctaatcctatgagcatgaacaccaagaatcaattcgacttcaggacaaaaagcataggtggttggtctggctatgtggcagcatatatgggccaaggatcttttactcctcgagagcatgtagctttcttgctaatgtggctcaaaaaattcctcttttgtggatcgagctgtggccctacaaccaattggcaatttgtagccaaagccctagaatcaaagaaacaatttcccttgggcaaaatcctcctcggctatctataccaaatgttgaacaatgcatcagccaaaatagccgtcggcttagtggttggagcaggtggaccatggtggctgctacaatcctggctcaacttgatggtcatgaaggttgtcaatcggccgtcagtaacagaagccgaattcccaaggctggagccgattgtagaagatgatggagaagaacgcacccatcgtaggtgcatgtcttatggagaatatgcatccacaccaaccaatgccggagcaaaactatcggctgagctgctcaaggattggttttgcagtttttatgaaggctttcagaaagatgcccgagtttggtttccttatgaggactcagcaaacctcgatctcccatcagactttaggtttgaagacattaatcatgaaagataccaaaaggccaaggaagttctctcaactgcaatcagcccatgcatcttacctgtcggcattcaccaaggaagaaacataaaagtctcctatgagttctatcacccaatgagttcagcaagacaacttggattgggccaactcccaatcggcttattctttgccgacaagatccagtgccgaggagaaatcacatcaactctgatgatggatcggctgcataacctcctaggaccccctctgggcaacattgacaatattgagttggcaggattcaagagcagaaactttgatagatggtggggtgaatggaagctacacctatttcatcaatcggcctcgatgtatatgacagatctattccctgatgtcataccccagacaatcgattcttcccctccacgtcaaagcaacagtggcagggacattgaatatgctccaggcctgattcctaatggaggtggaccatctccccctgtcatcggctatcatgcccccaagacttcaactctcctccaaggcctaatcagggaaccaaccgatgcaggcaagaaaagaagaactaggtcatcggctatggacgcattagctcttgctccaaagaaaagggccaagtccaagaaaaccaagccgaccgatgacctgcctgccttgtatccatccattgaacaagctctggatgaagaacaaattggcgaggacgttgaccaggctgcagctaatgtaagtgacatcgaagaaacaccattagcttcacccaagcagacacctccaactccttctgcccccactcatttctcaagaaagaagaaaactgctatgaagaaaaagccagcatcaacaattctcaagttggctccatcacctcctcctcctccatctccttccgtacaacaatcatcaagtgaccaaactccatcggctgtggggagccatcatattgaggaggaagaacaatcagttgctcctactatcccagttttagccgatctcttctcttttgacatcagagattatcttgatgaggcagaagaagatacttcgagcaaagctctagctcccttatccaatgatgtgaagaaaacacttgaagataaactagctgacgtccttactccagccgcttatcttgagcaacatcaattcaacctggaaaaggccaagctaagactagccgaacgctgggagcgcaaggagattgaagccacaatccaggtcaatcggcaacttctgcataaagaaaaggtcaaacttgatcagctatctgagggtccgattaagtccaatattgattggctcgaagctcgcaagatcgatctcttggcacagcttgaagaatgcaatgctaaactagacatgaaacacaaaaagctagccgatctcccaaagtctatcgaagagtagaaagcaagactcaaatcggctaccaagaatgttgctgatctgaccaagtcccgaaaggttatttctgggactgatgctcaagacgcccaagccattgaagaagtagaacaaattaggcaaagggcttatttcggctatccagcaatacttgtctcaa

SEQ ID NO: 45027 - DNA, 357 bp, Oryza sativa
  Clone ID: PAT_MRT4530_48030C.1
atggagggagagagaggcagccgttttgttcgtggatgcagttgcgcaaacgaggaagacccgcgtgtgcgttacaagaggatggcaccacatacccttgctctctgcctgggagttcgcgggaacgacctgttgctttggcggatgccggccgcgtggcagcgcagggcgtgcatgcacggattgcactggactcgtcacggttttccgttggctactatcatggtgggggccatatgtcattcgcaggggcagggacgtgataggatagctgctctggtttttggagcgtcggaccggccggagtggcgtcctctgcagtctactgagctgagttgttttgatctctgcgtctga

SEQ ID NO: 45028 - DNA, 771 bp, Oryza sativa
  Clone ID: PAT_MRT4530_48031C.1
atgcgggccccacatggcagtgactcgggtagggcggtccacggtggaccgggtccacagaccgggaaggagcggcgcaccacgtggtgcacacgtggcgccgacgcggcgcacacgcagcggccacgtggcagccacgcgggcagccgaaccgacggcaccgatctaccctcggccggcgcgcgcaggcggctcaagccgacccggggctatggcacggcggcggcgcggcaccggcggcgaccggcggacagcggcggcgattcggcagacggcggcggcgcgacgacgtctaagcggcggtgctaccagggaaaagagaggaggaagaaggaaggggaaggaggggcgtcctcaccgaagggggatggggctccggcggcgaacctcgacggaggaggggtggacgaggtggacctcggccgcgcgaacccaacggcggcggcggccctagcggcggctagaggcggccggagtagtgaaagaggcggcggcgggtgggtgtacggtgcaggagcgatggagagctcgggagaggctggcggaaaaaggaaaaatgaggaggaggatgcggggatggattatataggggcggagaggtcgggaacgaccgggagtggcccgatttcgccggccgacgtggggaggcttgagagaagaacttcagggtgtgacatcctcccaccgctggcctcatcctccacactgacgccaaagggcagcaggtggctgaagttctccatggtgaacaacagcaacgagtggtcttag

SEQ ID NO: 45029 - DNA, 205 bp, Oryza sativa
  unsure (1)..(205): unsure at all n locations
  Clone ID: PAT_MRT4530_48032C.1
tcggcaacantcggtggtggtgncntcaatgatgnccgtaggtgganccggcggcggtggcngcggccnagggtgganccggtcccctttttttttcgcccgaatttgtttctttttcgtgaattggacattgggatcaagttcatgagctttnctcggattnaaattgctctttnaaaaaaaaaaaaaaaaaaaaaaaaaaaaa

SEQ ID NO: 45030 - DNA, 1023 bp, Oryza sativa
  Clone ID: PAT_MRT4530_48033C.1
atggcagtgactcgggtagggcggtccacggtggaccgggtccacagaccgggaaggagcggcgcaccacgtggtgcacacgtggcgccgacgcggcgcacacgcagcggccacgtggcagccacgcgggcagccgaaccgacggcaccgatctaccctcggccggcgcggggcagggggctcaagccgacccggggctatggcacggcggcggcgcggcaccggcggcgaccggcggacagcggcggcgattcggcagacggcggcggcgcgacgacgtttaagcggcggtgctcccagggaaaagagaggaggaagaaggaaggggaaggaggggcgtcctcaccgaaggggtccgaccggcgtggagggaaacgacggcgaccggcgacgaggaacaacggagggagggatggggctccggcggcgaacctcgacggaggaggggtggacgaggtggacctcggccgcgcgaacccaacggcggcggcggccctagcggcggctagaggcggccggagtagtgaaagaggcggcggcgggtgggtgtacggtgcaggagcgatggagagctcgggagaggctggcggaaaaaggaaaaatgaggaggaggatgcggggatggattatataggggcggagaggtcgggaacgaccgggagtggcccgatttcgccggccgacgtggggaggtggaggtggagagagaggcgggattcaaaattcgaatcccggccgtctcgggggcgcgggcgagcgggagaggggtttgaggggtgcgggaggggcggacgcacgtgcggtcttggccgacgtggcgcggggaaggcgggcgcgggcggttgtgaggcggcggctgcggacggcgggcggccggaggttagggatgggcctgacaggcttgagagaagaacttcagggtgtgacatcctcccaccgctggcctcatcctccacactgacgccaaagggcagcaggtggctgaagttctccatggtgaacaacagcaacgagtggtcttag

SEQ ID NO: 45031 - DNA, 811 bp, Oryza sativa
  Clone ID: PAT_MRT4530_48034C.1
gcggccgacgcgcgcgggcggctcaagccgacccggggccatggtgcggcggcggcgcggcaccggcagcgaccggcggatggcgacggtgattcggcagacggcggcggcgctaccagggaaaagagaggaggaagaaggaaggggaaggagggacgtcctcaccgaaggggtccgaccggcgtggagggagacgacggcgaccggcgacgaggaacgacggagggaggtcgacaagcggcggacggggtccgggacgacctaaggaacgaaatggagaggattagagggagagagagagagagagagagcatagaaagcgggaacgccggccgaaggcggcggccgtggcgtttcttaccggcgcacgacggggatggggctccggcggcgaacctcgacggaggaggggtagacgaggtggacctcggccacacgaacccaacggcggcggcggtgcggtgcagcggcggccctagcagtggctggaggcggccggagtagtgaaagaggcggtggcgggtgggtgcacggtgcgggagcgatggagagctcgggagaggccggcggaaaaaggaaaaatgagtggaattcgaatcccggccgtctcgggggcgcgggcgagcgggagaggggtttgaggggtgcgggaggggcggacgcacgcgcggccgtggccgacgtgaggcggggaagacgggcgcgggcggttgcgaggcggtggctgcggatggcgggcggccggcggttagggatgggcctgacaggcttgggagaagaacttcagggtgtgactttgattattggcaat

SEQ ID NO: 45032 - DNA, 648 bp, Oryza sativa
  Clone ID: PAT_MRT4530_48035C.1
atggagagctcgggagaggccggcggaaaaaggaaaaatgaggaggaggatgcggggatggattatataggggcggagaggtcaggaacgaccgggagtggcccgatttcaccggccgacgtggggaggtggaggtggagagagaggcgggattcaaaattcgaatcccggctgtctcggggacgcgggcgagcgggagaggggtttgaggggtgcgggaggggtggacgcacgcgcgggcgtggccgacgtggcgcggggaaggcgggcgcgggcggttgtgaggcggcggctgcggacggcgggcggccggaggttagggatgggcctgacagccatccacccgatatctatcccgattttgtttctataagtcggttgaggagagaagggaagggtgcgcttatatctgtactccgcatagcagtctccgttctcaacgtcaaggcgttggttcccgtcaccctcgacctcactgccggcaactacacccgctggcgcggcctcttcttcgtcaccctcggcaagtacgcgctcaccgattatgtcgtcctcgacaccccgccgaccaatcaaccagattggatgcagatggattgcgtcgtcctcggctggctctacggcacgatctccgccgacctcctgtag

SEQ ID NO: 45033 - DNA, 345 bp, Oryza sativa
  Clone ID: PAT_MRT4530_48036C.1
atggcagtgggcggtggacttcggcgggcggcgaggtggtggcggcaccgccgaagccgtagggatggagaagggcgggaagatgatggggcgggggcatctcgccatcaccaccttgagaagaaagagagggaggaagggggagcggggagggggagggggctcatcgaggggcccttatcggcgccgttgactcctttcggccagtcggcgaggcgggtgatagcgcggtggggcggtggcggcggtggattgggcggtaacgcgatggcaatgtactggttccaaaatttaactgtcaaggcaagtacaagggaggtcggggaggatgattgggttgggtag

SEQ ID NO: 45034 - DNA, 267 bp, Oryza sativa
  Clone ID: PAT_MRT4530_48037C.1
atggagaccccggcagccggcgggagcggcgctgctccagggcggccgactggacaacggggcacggtggctgcggccgcgaggcatagagcaggctgctccgcggcagccgatccgacaggagtctggacaacggcttgggcgaagccagccatggagcgacctggctggatttctcggcagagctggagacctggggggcagcggttaagactttatctcaccgatacgaaattcttgaatttttacctgaccaatgtctcttga

SEQ ID NO: 45035 - DNA, 426 bp, Oryza sativa
  Clone ID: PAT_MRT4530_48038C.1
aaaaaaactcttgcattttcaggggatatagacaaccatcattgatacatattttggtatcacaacatgctgaagggtgacgtacaatccgggtactctaaaagttgaccaacattatttacctatatcagccgtgcaactgctaggggccttgcttttggcagccaacttcaccaagtcaatcaggtccttggtttagaccttggatcccagactgacaccgacaccctgggcccccactggaaagtcgcaatccagaggagcccggcgtgttattggccagtttcttacccaggtgaacagggtggcccaatcaagtgaagcctgctaacctccgacagttcccggggatggcgaagccacaatgtttggtgacatagaaccccttatccatgttgaaggtgtccctgacccctgggctgcccc

SEQ ID NO: 45036 - DNA, 645 bp, Oryza sativa
  Clone ID: PAT_MRT4530_48039C.1
atggagctcgccgcgatcgcttccgcctcggcctcgatctgctcggcgtaccgccacctctcggccacgccggccgatgacaacggcgacgacaacggcgcacggccgctgtcctcatcggaggagctctcgaagtcgtcgtcgtcgtcgcggcggatggcaaagccggcggagctccggcggcggtgctacgccgtgctgaagcagcagaggacgaggctgtacatcctccggcgctgcgtctccatgctcctctgctggcacgagcacgacctaccagtcaacaagtacaatgggcatcgtattgcccgaacagataaagctagcatgccaacggtatacagcgagtcgctctttgtggagggacgctatgcactctcctccggtggtgatggtgaaaaggagggctctgactttagctcctcgaccttcctcaccatcagcatgcatggtatccattctgctgccaagaacacagtgagaagaaaggtgcacacctcgagcaagaccattgtggcaacactaacagggctgaggtcactcggagactcgtatcgccaccctctttgtggagatggtagccctggcaatgatggagagaaggcgcggcccaagctggtagctgccatcttctcgccctcttga

SEQ ID NO: 45037 - DNA, 583 bp, Oryza sativa
  unsure (1)..(583): unsure at all n locations
  Clone ID: PAT_MRT4530_4803C.1
tagtggatccccgggctgaggcgtgcagaacccggcaggaaggagccagctccgaagccggcaagaaggtcgtaccccgtccggagaacgccgcaaggncagcaccggcgccggcgtcaacgagaacaagaagccgtcggagtcggagggcgccggcagcagcagcggcggttcagccctcaagtactccaggaagaaggtcgtgaacacgcttacatctgtgcttacagctcgttgcaagcacgcgtgtggcattactgagaagccaaaagaagtcgtcgaggacatcgataagctcgacggcgacaaccagctcgccgtggtggagtacatcgaggacatctacaacttctacaggacagcccagctggagcgccggccgacagactacatgagcagccaggtcgaggtgaaccccaagatgagggccatcctggcagactggatcatcgatgtgcactacaaattcgagctgatgccggaagacctctaactcaccatgtacgtcatcgaccggtacctctcgctgcagcccgtgctgcgcagggagctgcagctcgtcggcgtcgcggccatgctcatc

SEQ ID NO: 45038 - DNA, 1029 bp, Oryza sativa
  Clone ID: PAT_MRT4530_48040C.1
ccggtccggaattcccgcctcgacccacgcgtccgggaagagaccgtaaattggctgctcgtcgaatttgcaatcttggagggcgccgcggtgctgtgctcccggcggaattgggaatttgagatggagcagcagttcatcctccgtgtgccccctccgtggcggagcggatcgaacgcctcatgaaccaagccgccggcgcgtcatcctccaaccccgacgacgcctccctcgatctctccttctcagaggatggaagaagtggcacatttatgattggaaatgaaagctttccagcatctctcttagatctcccaactgttatggagtcatacaagacatacaatgattcagtgctaattaaaacagctgatattggtcagatgattatggtaagagaagaagatgatcctgctccagaaggaattgaatacacacatggtcttactcctccaatgagggatgcacgaaggcggcgtttccggagagagcctgacttaaatgcagaactggttcaccgagttgaaaagcatctcatgaatattatgcatggagtatctgtcaaccagaatgctagcgtaattggagcgggagaaggtggcaagaaagctgcacctgctccagcaaccaagcgtaatgttcaacgacccgctgcaaacggtgaagaagctgaggcagagaggagtgactctgatgagtctgttgacccatgaattcaagtggagtagagtaaataatcctgctccaattgcccgagcacacccaattgacttagcagttcagaagtctatatcagaaaatgaatatccggaccaactagggcatgctcactgttaaggttttgcaatattcgtgtaaaatttaatgcgatacatgagatttaagatgaaacgatatcaatgctcgtggatgaaagaatagctagggcagtcagacattttctttactctttgtagccatgaatggtgatggccatagcacaatagtgacgcagattctgtatcagattgtttctaagtttttggaacg

SEQ ID NO: 45039 - DNA, 219 bp, Oryza sativa
  Clone ID: PAT_MRT4530_48041C.1
atggaggccgacatctcggtggagatcgggatcatcggcaccttggtggacaatggccccagcgaggatgaggggcgacgggtggacgatggccccgaggacacgatgatgggggcgaagaatatgttgcgccggttgatgggagaagttggggagaaggcgaggggtgtgaagtggggagaagacgagtggaaagggggcaggcatctaaaatactaa

SEQ ID NO: 45040 - DNA, 712 bp, Oryza sativa
  unsure (1)..(712): unsure at all n locations
  Clone ID: PAT_MRT4530_48042C.1
agcacgggaaggaaacaggcaaaggtagacaaccaaacaagtaaaatgtcaggctgcatgaccaggccatcttcatcagcttcttctatgcctgatagtcatgcaattttctcaggcacggtactcagggtatcaaccaaacaggccattaattagtgtgctagcttgcttacgaaacgcactacaaggatcgcagctcatgcgcgctcggatgagctcgcttcttttttccttggcgtgcctgttgcatgacgtgatgggagaaggggagtcaaggaggagggcgtacaagttgtcgagcacatgttcttatacgtgtgtcgcgcgtgcgccgcgttatccagagctactctacgcaacggatcaggagagaagcgaacagatagatagcgagctgctcgtagcactgtgcgttccttttccacctcagctgttgtttggctgttccacgttcctgatcggcctgccgtgtcagcgttagcatgtcaatcctgcttgtgtggcactggcagtggcaagtcgcccaagcaggacaacatacgtattcatatcttctcaaatttgggaatgtcgtcgtcattgcaaaagatcccaagtgggtcgatgtatatgcaaggcagagcaaccgagcttncgaagaaagntcgtgccctatcttgtctttatagggtgctctcttccttttcgctatgtcaagctcgattganntana

SEQ ID NO: 45041 - DNA, 354 bp, Oryza sativa
  Clone ID: PAT_MRT4530_48043C.1
cccacgcgtccgcccacgcgtccgttttttttttaaaaaaaaaagcaagagacgatgcatatgaaattcaattcattttttagttctgtatacaaatcgtaatcataccgacatttacagaaatagaagttaagtatctggctctgcaggagatcccctggttaattgatgttttaaaaaacattatagaatggggaatgcggcggcggcgaggtcgcaggcgcaacaggggtaacctgcatcacgattcctggagaggccgaaccagagcttgtgttctgcgaggccggagaaggaattctctgtgacttggccccaaggcgcgccgcgcgagacatcgatcggacgcgacgc

SEQ ID NO: 45042 - DNA, 798 bp, Oryza sativa
  Clone ID: PAT_MRT4530_48044C.1
atgacgcagacgaaggaggaggcaaaaggtggaggaggaagcaagaaaccgggtcagatcaaggtaggagatgtggttgtctcggtaaattcagaagtcaagaaaggaaagaattatgtttctgagtttgatgatgatgaagatgatttgttggaattcgataaggagccgcgggtgattagcgacaagaaaggggatgatcaaaagggtggtgcacgggtgaaagtttgctctaggtgcactcaaaagggacatggtgttgctgattgtaaggtggatgtttattgcgatatctgcgactgtagcgagcatgtcaaccacaaatgtccagtcctaaagcttccaaagccggtggtgcaggcggttgggggtgaagggagtaaagaggcacaggaaggtgctgatttagcgaaagaaatggatttttctatgatggctgaaaatatcttggatgtggctgtccaagatgtgttggaagaggtgtatgaaagggtagagagggaggaattggaggaaaatgaggcaggggtgcagcaggaaaagattgttcagctggctaatgttggagaggtgtcgatgacaccaaaaagggctagcgagaggttgatgggcagcagcgggagacattcacttgaaaaggctaagtccaggaaggcgtggatgaatctcgaccctctctcagatacaaaagaacaagaaacgcttactgtctcacatgagaattcaatgttccaaaaaagtatcaaatcggtaatcagttttgtgcggtcacccacctataatgtttatgcgatataa

SEQ ID NO: 45043 - DNA, 1092 bp, Oryza sativa
  Clone ID: PAT_MRT4530_48045C.1
atggctcatcacggtggagggacttgggggagagcggaagaggcgaggtggtgtgaggaagagggttttctccatgagaggggatgtgagggaggggagcaacttcgtttccagcctagagttggcttcgggcagcggaaccgtggaagattccggccgctgttcggccacaagccgccattcggccacaagctgagagaggctggcggtagagcaaggagagatggcctcaccagtagaactgggcgctacttcggcgctcctgttccccgcggtagcaaccagcaagtgggtgggaacatgttcaagcgtcgctgggatgagccggcactgatgaaggagggtggcagcagcagggggatcggtgagatgacgcagacgaaggaggaggcaaaaggtggaggagaaagcaagaaaccgggtcagatcaaggtaggagatgtggttttcccggtaaattcagaagtgaagaaaggaaagaattgtgtctctgagtttgatgatgacgacgatgatttgttggagtttgatgaggagccgcgagtgattagggacaagaaaggggatgatcaaaagggtggtgcacgggtgaaagtttgctctagggcggttggctatgcggttgaaggcctaggttttcagcacatcccacatcaaccgcttcaaaggaacaagaagactacgaagaaggctcttgtgcatgtggttggtggtgctctttcggtggaaaggttggtcactcttctccacaagttgtgtccaactaaatggaagtgggagccagtgccacacgggaaggacacttttgttgttcttttcccttcaaagggcgaattgcaatgggccatcaactttgggggtgcagatgtgaaggaaggaggggtagccacgggagtgagggcggagtttgaagagtggtttgaggaagaagagggttttcttctacctaaggtgcttgatgtggtaattgaggatcgttgttttgagttaaaatttgaggtggagaaaaaaggagtcgatgagaatggggaagaagtagagtttaatttggaggattgggatggagatgaggaggatggtaatgtagagtga

SEQ ID NO: 45044 - DNA, 1365 bp, Oryza sativa
  Clone ID: PAT_MRT4530_48046C.1
atgacgcagacgaaggaggaggcaaaaggtggaggaggaagcaagaaaccgggtcagatcaaggtaggagatgtggttgtctcggtaaattcagaagtcaagaaaggaaagaattatgtttctgagtttgatgatgatgaagatgatttgttggaattcgataaggagccgcgggtgattagcgacaagaaaggggatgatcaaaagggtggtgcacgggtgaaagtttgctctaggtgcactcaaaagggacatggtgttgctgattgtaaggtggatgtttattgcgatatctgcgactgtagcgagcatgtcaaccacaaatgtccagtcctaaagcttccaaagccggtggtgcaggcggttgggtatgcggttgaaggcctagggtttcagcacatcccacatcaaccgcttcaaaggaacaagaaaaacacgaagaaggctcttgtgcgtgtggttggtggtgctctttcggtggaaaggttggtcactcttctccacaagttgtgtccaactaaatggaagtgggagccggtgccgcacgggaaggacgcttttgttgttcttttcccttcaaagggcgaattgcaatgggccatcaactttgggggtgcagatgtgaaggaaggaggggtagccatgggagtgagggtggagtttgaagagtggtttgtggaagaagagggttttcttctacctaaggtgcttgatgtggtaattggggatcattattttgagttaaaatttgaggtggagaagaaaggagtcgatgagaatggggaagaagtggagtttaatttggaggattgggatggagatgaggaggatggtaatgtagagggagaggaaagtggagaagacaatgaaggaagggagaagggaccaaaaatgtcaaaggttgatgatatggtaaccgatgacaatcatgataggggtgaagggagtaaagaggcacaggaaggtgctgatttagcgaaagaaatggatttttctatgatggctgaaaatatcttggatgtggctgtccaagatgtgttggaagaggtgtatgaaagggtagagagggaggaattggaggaaaatgaggcaggggtgcagcaggaaaagattgttcagctggctaatgttggagaggtgtcgatgacaccaaaaagggctagcgagaggttgatgggcagcagcgggagacattcacttgaaaaggctaagtccaggaaggcgtggatgaatctcgaccctctctcagatacaaaagaacaagaaacgcttactgtctcacatgagaattcaatgttccaaaaaagtatcaaatcggtaatcagttttgtgcggtcacccacctataatgtttatgcgatataa

SEQ ID NO: 45045 - DNA, 1224 bp, Oryza sativa
  Clone ID: PAT_MRT4530_48047C.1
gcacgaggcacacgactcctcctccccaaccgcaactactgcacgaaaaaaaaagtttcgctcccctcatggcgagtgttgactgtgtggctgccggcacaactccgccgcctgggccggcgggaggcgcgacgaagcgcgcggcgccggtttccaggattttatgcatggcagaaaacatgaaatttgctgaagggtcgtacgtggccaacgaattggatatgctctctctggcttcatcagtatatactgctccattatttcaaacagaatttgattcagtttatgtgcctgaatatggggacgtgggtaacagtcaggatggcctatttcctggtttattcatttcagatggctttgttttccctccaagcgagcatgagaatttgccaatagaatctgatcttgatggatcgaacaacaataacaatggtcaagaaagcagctgtgctgggaatatctatgagggttgtaatgaaccagccaaagaagttgatggcagaagtctgtctgttagtggtgacctgcactctgccaacgaaactactatcccgaatttagagccacctgaaatacgtgctgaacaagagaaagataatgcaaccatcaagtgtgatcttccatgtgaaggatggttgaaaaggaaatcaaattgtctttctcaccgtatgaaaggagtgacgacagtctgcactattgtggcagctggtgctttgatgggctttgttataataggtcagaggtggcagcaggacaaattgcaccttcatcattttcagttcaatatcggcactgagggcgtcaacagaatcgttggaatattcagccgttgtaaggatgcgcttcccagtagtcagcagctcaagtctctgcttccgactcgcgtgctccctcaagagccagtgagtgcgtgagtgggactcgcgtggcaaattttgatggcaggcatcgctataattgagtttttgttttctgatatggttggaggtagcagattattttttgtactagcgcaaccgtttgatctttgtccttgtgtaaatttgtgggggtattgatcttgctcgtggaaccaaaacatcattatttgtactctgtactccgtacgtactaattgtaaaaatacaggagaacaacacacgcgaacatctatctgtacctgcttttttgccgctgataattgctactctctctttttcacgttaaaaaaaaaaaaaaaaaaaa

SEQ ID NO: 45046 - DNA, 365 bp, Oryza sativa
  Clone ID: PAT_MRT4530_48048C.1
agttaaagaatatgttttaattaataatccagatgctacagggttttggggttcattcagtgtaaacacgatatgatcggatagtgtgatactgaatgaagtattcctgttactacgaactgaagggacagggccagctatgaggttttacaaacctacaccgggtacttattctgttaattggccagacattaataataaggatcggaaccatgtttgctgtgaaagaacaacaccctgtgttgaactccaataaggctaggcaaccgcaaggttgcgttttgaaaaacataggattggattggcctgtaccatggctgtgaaggcgacaaccaggtacgacacccttactgatacaaaacttg

SEQ ID NO: 45047 - DNA, 548 bp, Oryza sativa
  Clone ID: PAT_MRT4530_48049C.1
cccgggctgcaggaatcggcacgaggaaacatttgagaaactacgactattcaagtctggaatgttgactcaaatcgagagaatcctataatcctcaaattatttaagagggggcactgtacttcctttcattagtgaatagaccaaacattggaacaacctagagctaaccaacaaacattgtacgggaaaatcatatagtaatgtattaaaataaattattcacctgattattattataaattatttacttaataattactacctccgtctcataatagatgccgctttgatttttttacttgcaacgtttgatcattcgttttatttgaaaaattagtgcaaatataaaaaatgataagtcatatttaaagtacttttaataataaaacaagtcataaacaaaataaataataattccaaaattttttgaataagatgaatgatcgaacattacaaacaaaaaactcaaagcgataagtaatatgggacggaggtagtataagagtaacttaaatatttaagaagtaaacttaatcagtagcaaa

SEQ ID NO: 45048 - DNA, 258 bp, Oryza sativa
  Clone ID: PAT_MRT4530_4804C.1
atggtgacgcaggtgtttatcctggttcaggccctcgagatgaggccgccggcgccaatcaagaccccgtatcctcacaatttggatacttgccttctattacatgattggggatctgttactataatctccctgtcttgcccaactatgttagacttactatatcggtcatgggcccttggcccacccccgaagcctaacttgggccgctaccgtgaggtacccgggtgccgtatcccccacagccggtcccactaa

SEQ ID NO: 45049 - DNA, 358 bp, Oryza sativa
  Clone ID: PAT_MRT4530_48050C.1
ccccagggccaacgggtacagatccccctccggaagtaaaactgtaaaggcgggccaagactacctactgttggaacgccttttttgcctatccaggggggagcaaaagaaaggctaccgacggtttggccttgttgccctcctccataaagagacatcccccccaggaaccgcaaaaaaaactatttcatgcttctgaagaacttggtgaagctgtcctcactgttaaaaacaacaccaggctaaacataaaggaaacttttttttttgaagacaacgaaaggggccttaaatttgaatggccacaagaaaaaaaagggccccccaggggggggagcggggggccccaacccctaga

SEQ ID NO: 45050 - DNA, 1386 bp, Oryza sativa
  Clone ID: PAT_MRT4530_48051C.1
atgccgccgcccgccgccgccgccgcgttgctgcgccgcgtcggacttggcctcggcgccggcgccggcgtcggcgtacgcggcctggccacgctgcccgatgccgcgcagccgcagcacccgacctccaaggacgcctacttcgcggcggtgcaccacctctccaccgtcgtgcgccgcgacttctacctggagcgcaccctcaaccgcctccgcctcccgtccccgttcccgccggacctcgcgctccgcgtcatccgcgccgccgcccccgcggagccgctccacgccgcgcgcttcctcgcctggctccgcgccaagccctccttcgccgcctccgccgaccacttcgacgcgctgctcctcccgctcgcccgcgcccgcctcttcacccacctctggtccctcgccgccgacatgcgcgccctcggcctcccgctctccccctccaccttctccgccgtcatctcctcctacggccaatcccgcctcaccgaccaggccgtcgaggtgttcaaccgcctcccgcgattcggctgcccgcagaccacccaggtctacaacgccctcctcgacgcgctctgcgccaacggcagcttcgccggcgcgtacaagctgctccgccgcatggcgcgcaagggcgtggcccccgaccgcgccaccttcagcaccctcgtcgacgcctggtgcgccgcggggaagctccgggaggcgcaggcgttcctcgacgacatggcggagcgcgggttccacccgccggtgcgcgggagggatctcctcgtcgacggcctcgtccgcgccggtcgcctcgaggaggccaaggccttcgcgctccggatgaccaaggagggcgtcctccccgatgtggccacattcaactcgctcgccgaggcgctttgcagctctggagatgtggaattcgccgtggcgcttctcgccgatgcatccagccgcggcctgtgcccggacatctccacctacaaggtgatgataccagctgtggccaaggctggccgaattgatgaggcatttcggttgttctatgcagctcttgaggatggccaccggccattccccagcctgtatgcagcgattatcaaggcgctctgtaaggcggggcgattcgccgatgctttcgcatttttcggtgatatgaagtcgaaggggcacccgccaaatcgtcctgtgtatgtgatgcttgttaaaatgtgtgtgagaggcggtcggttcgtggaggctgcaaactaccttgttgagatgagtgaagctggattcgctcctcgtgctccgacctttaattctgtagttgacgggttgcggcattgtgggaagcatgatctagctcagaggatggagcagcttgagatgtcgatgaatgggaattga

SEQ ID NO: 45051 - DNA, 573 bp, Oryza sativa
  Clone ID: PAT_MRT4530_48052C.1
atgaggatcaacgagatcgscggcggcggcggcatgcgcttggtgtcgctggcgtacgccgtgctctccctctacctcctcctatggcgcgtacctggcgaccagccgctaacctgggtcaccgacttctcgctcctcgcctgcacctacatgtacttctggatcatctccctgtcagagaccatcaccaaggtcgccaccttcaccggcatcacatgcggcatcctactgtccttcgccgccgcgcaactcctcggcccggtcaccggcatggccgtcatggtcctcggcatgctctgcgccgccggggtcctcggccacgccgtcgccgagcaccgccaccgcatcggcagcgaggaggccgcatccgccctggccacatggacgctaaccgaggagcagacggagctcgaggaagggccctacgccttccacgccggcgtcctcgtcgccgcctactcgctcttcctcctggctgtcatggcgtggctcgccgtcgaccagcgcggcggcgtcgacacggtcaccgtggccaccatggtgtttgaggtcttgctcgtgagaaacgcttag

SEQ ID NO: 45052 - DNA, 3311 bp, Oryza sativa
  Clone ID: PAT_MRT4530_48053C.1
ccgggctgcaggaattcggcacgagggaagaagattccaacgagaaggcgagcgagagagaggagaagaaaccaagagagcgagggcggaggaagcagtcgagctctcccagcctcggcggctaaactccccccccctcgctttcttcccctccttcctcaatctccaagcctcgatatccgtgttcttctctgaccgaatccgaatcccgcgtttctttgttgcgcgcgcgaccgcccgcgggaatcttggtggttcttgggcgatcgtgatggcattggatggcggcggcgaggttggcaggaggaggaggaggaggggatggggaggcgggttcccgagcctgatgcggcggaagcaggtggactccgaccgggtccgcgccgccgagggggaagggcaaccccagctcgccaaggagcttaacatcccggcgctggtcgcgatcggtgtcggttcaacaattggagctggggtatatgttcttgtcggaacagttgctagggagcatgctggtccagcattgacaatttcatttctgatagctggaatagcttccgcgctctcagccttctgttatgccgagcttgctagtcggtgcccatctgctggaagcgcctaccattattcatacatctgcgttggtgaaggtgttgcctggttgattggttgggctttagtgctggaatatactattggtggatctgctgttgcccgtggcatatcccccaatcttagttcagctgtacaagagcttataacagttctgaatgcttgtgtgatgatatttgttattgtagctggtagttatatcggcttccagataggatgggttggctataaagttactgatggatattttccacatgggataaatggaatgcttgctggatcagcaactgttttctttgcatatattggctttgatacagttgctagtactgctgaggaggtgaagaatccacagagagatctaccactgggaataggagcggcattgtctatctgctgttgcttgtacatgatggtttctgttgttattgttgggctggtaccatatttcgctatggacccagatacgcccatttcatctgtctttgcgaaacatggaatgcagtgggccatgtatattgtgacaagtggtgctgttcttgcactttgttcaactttgttggggtcacttcttccgcagcctagaatactaaatggcgatggcacgagacgggctgctgccatctttcttcgccgatgttaacaagaggacacaagttcctgtaaagagcacagtcgtgactggtctctgtgcagcagctctggcttttttcatggatgtttcccagctggcaggaatggtcagtgtaggtacactccttgcattcaccatagttgctgtctcgatcttaatactcagatatattcctccggatgaggttcctctgccttcatctctgcaagaaacattctgtttgagccaagaatatgatgaggaaaggttatccaacaagaaatcttctgataaactctgcaggaaagatggacgagatgaagcgtcggaaggtggccgctttcagcataggatctgtttgtgttggagttatggttctcacatccgcagcttctgccacatggctgcctttccggtcttggcctcctctgctggatcgaccaagatgatggcaggcattctttcggccaatctggagtggagaggcatggatgagagtaggcatatggctgctgataggcgtcttggtgtacattttctagtcgatcattgtaatgtaataaaaaaggagttgctgtccgtcgacccgttccaccaatacgtacgtggagatgatggaggaggatcaaccggccgacgaggtggtgctgctgctaccggaggaaatcctcgccgagatcctcgccgcctgcccccgcgcagcctcgcggcgtcgcggtgcgtttgcacggactggcgttctaccattgactcccgccggctgctacgtgcggacctcctcccgctgtcgctcgctgtcatatttatcgacttctggggccttaggtttccggacttcttctcccgcccaacctcatcgacctcaccgtcgacgatcagcggcaagctcgacttcttgcccatcaaaatagatctccacagcatctacgccataacaggccactgcaacggcctcctcatgctccccggcgtcgtggtgaacccggccactcggagatgggcgcgcttgccaccattgccacgccacttcaccgtgcctcaaggattgttttataacgaattcatcatcttcgaccccaccatatcgctgcactacgaggtgttcaagatcccatacggtgggacgacggactacgtcgaccggatggatcccgtcttgaaggaatcggaatggccaccatcgtccctcgtcctacgtgtcttctcctcggccacaggccaatgggacgagagatctttcaccagagaaggggatgccacaggaacacatgccgatgcacagaggcagccatggccgtggattcaacacggacatgcttattggaggggagtactttatgtgaacacatgccatgtaatgaggatatctctgtctgatggaaaatatcaagtaattaaacatcccacagtttactacaagaagtttaaaccaaattttttaattggaaaatcagagaaaggggtgtacctcgcgtcacttgaatttgaccataatctttcaatttgggtccttaatgaatcatgtggtcattttgagtggttaccgaagcaccagaacaaccttatgcctttgttgctacgtttgaactgtggaaaacaagctcgccggccatggattttacagaatgttaactatcatctttactgtcaaaagtttcctggtgaatggaatttatatgattgggagtatgatccctctcatcctgattatcaaagcgatagtgatgacgacgatagtgatgaagcattggatgaaaataattttaaatggaattttgacgatgatagtgttgtagacactcaagaatgttttgagaactataaaagtggcagtcttgatttcctcggctttcatccatataaagagatggtttttttagttcctcgaaaggattggcatatcattggaatagcacaaagctccaatatttgggaaatttatgcccgaaacatctggattggctccattctcttaggaactaggaaaattagagctcaaatatttagggtattaagacagagcataaacccgtggacgatggctcgactctggcaaccccaccgcaataccttcgccgctgagtag

SEQ ID NO: 45053 - DNA, 557 bp, Oryza sativa
  Clone ID: PAT_MRT4530_48054C.1
gcacgaggctcatatttgtcaattccagaagccggggcggtggagagcctcctgctggttgcgagaggattgttgatagaatgattaaggcaaacaaaattcctctactggatcatatccatagtgtgaaggggcatgatccctgggctgaatggtttgagcgtgtgaacttaccaagatcccttttaacatcttcacaagaatggggtggtgtacttttgcaagatgcagcagctaaagttggacagatgttggctctctgtctggaaagggcccattgttctgggaaatgttttggtggctttgacatacgtgatgtctattatatagagtattaccagttgattgacattaatgcccccatgaaggatttcacaagtagaagatatataaatgattggttatcgttcaataagattattgatgaccactttagatacactgatccaacctcaggttatctatcatatacactgtacatggaagattttatgttcagaatatctttacttgaagatgtgccatctactggacgttcttggagggaaagggctgtc

SEQ ID NO: 45054 - DNA, 117 bp, Oryza sativa
  Clone ID: PAT_MRT4530_48055C.1
atggtgctcacctttctgctaggtggcaacgcgctgggaacacgatcgatctcaacttctctgaagcagaccggctcggaccgtgtcttcgctaatcgattcctgcaggcgacgtaa

SEQ ID NO: 45055 - DNA, 271 bp, Oryza sativa
  Clone ID: PAT_MRT4530_48056C.1
ggcgggaccgtctggttcctatttaaaaaaaaaaaaaaaaaaaaaaaaaaaaaaaaaaaaaatttcatttccgccttgggtcgccttgtatatggggaatgcagcgcctttgcccagttggatgtttaaggcaaaagttataggcaaaataagttgaagccgcttgtcttgttacagaaacaggtgctaacccaatataatgagttcgaaaggaagaagaatggcatagcggaaagccctttcttgcaatcagttgcgtttaaactgaaaa

SEQ ID NO: 45056 - DNA, 4463 bp, Oryza sativa
  Clone ID: PAT_MRT4530_48057C.1
atggcgaccccgaccggaaaccctaatcctaaccccaaccctagcactcccttcgaggtcagcatgctgttcaagccgccctccaacgcccccgcggccgcccccatcttccccggcggccccgccgcgggcccgccgccgccgtccgccgcgtactcctacccgcctgcgactccccccttccaccgcgccccgttcctccactatccgcaggaccccatggcggcgccgcacatgccccgccccgtcatctccttcccgatgccgaccccgaacccggccgctatccccagcgccgccgccgccgccgccgcagccgcggggcccagccagaaccacggcgcgcgcctcatgcagctcctggggagctccgcgccggcccacctcgattcctccgcctccatgcccccgccggcgtcagagttcaccgccgcgcagccgccgcagccgatccccgcgatgccgtcggcgccgccggcgaggatgctcagcagcacgagcagcaagatgccgcgggggcgccttctcggcggcggggacagagcggtgcacgacgttgactcgaggctgccgggggaggcgcagccgccgcagctggaggtgacgccgatcaccaagtacacatcggatcccgggctcgtgttgggcaggcagatcgccgtgaacaggacgtacatcgtgtatgggcttaagctcgggaacatccgcgtgctaaacatcaacaccgcgctccgttcgctccttcgtggccacacacagagggtgacagatatggctttctttgctgaggatgttcatcgtttagcaagtgcaagtgtagatggtcggatatatgtttggaagattgatgagggtcctgatgaggacagcaaaccacaaattacaggaaagattgaaattgccatccagattgttggcgatgctgaatcttaccatccaaggatctgttggcactctcataagcaggagattctgtttgttggcattggaaactgtgtcttaagaatagacacaactaaagtgcgacggggaagggacgtaaaaatttgggatgatcgcaagccagtgcctctatcgattctgaagccacatgatggtcaagctgtttattctgttgcttttctcacggcacctgagcatccagaccatataaacctcgttacagcaggtcctctaaaccgagaagttaaaatttgggcttctgccaatgaaggaggtgtgttgttgccaagtgattccgagacttggaattgcacacagacattggaacttgtcagctcactggaacccagggtagaggaggcatttttcaaccaagttaccgtgctgcctcaagcaagtattattttacttgcaaatgctaagaaaaatgctatttatgctgtgcatgttgagtatggcacagatcctgcttcaactcgcttggattatatagcagattttacagttgcaatgcctattttaagtctcactggcacacatgaaagccaacctggcaatgaccaagttgtacaagtttattgtgttcaaacaatggctatccagcagtatgggctggatttatcactctgttcacctcctacaagtgaaactactggacttggaagggatccatctatttctcgtgttcacgagacacctctggaagtggtaggagcagagtcatccatgccaactagcttcaccgattcttattccgtcggttctccaagtaaatcatcaaccgttgatcaacagtctgaacttgatcctaaaccatcagctccaccacttacatacacagaaggtgatggttctgttcatcttccatcagcctctcttgcatcaaacatggacccttctggatcaggatcgtcactaggtaaccttgaaatggaccaaccagcttttgattatgcgatgaacagaaatgtggagcctaaaattttgactaggcaagatacacccatgcctaaggacaactttggaaaggatgatccaagagatggtcgcaatgatgttacaatgcttccaaatcctcatttgatgtttaaggtaggagggaacactacacacttggtaactccatctgaaatcatatctggcgctctatcttcagctgagagcaaccatgtccctaagtctgatggagtgaaaatccaggacggcacaagtagtggtcatcagatggcagaagtagaaccaaaacataccaatgagcacacatttgatcaaaatttggaccttgaagtagcacaggttgtttgtgagaatacaaagcaagctggttcatcggagcaaactgttaaaatgattagtgagcgctcggtaacaactgataagtacagtgtggaagaatcacagacatcatgtgatcgatccatttctgagcatactggtgctgctgacgaaagtgttacaaaaaaacctgttgaagtgcctgagaaaagtgattattcctctgcttctgtggagcaatcatcttcatataccaagaaggagaaaattatgcatcctcaagcatctgggcagtcatctccttctacaagcgcattcaactcaactgagtcttcacatgaacctccgagtagtgcataccctcctatcaattcatttccagaagttactacgcaagggatgcttcaacagctcatagcaatgcataaggacttgcaaaagcagctgggtactattgttgttgcacctcttgcaaaggaaggcaaaagaattgaggcatcattagggcgcaccatggagaaatctatcaaggctaaccttgatgccttgtgggttcgtatccaggaggagaatgcaaaacgagaaaaggctgaaagagagcgaatgcagcaaatgattactcttatcactaattcaataagcaaggaccttcctgctactttggagaagtcactgaagaaagaaatttcttcacttggacctgttattgcacgggcaataacacctattatcgagaagtgttcagcctctgcagttgctgattcaattcagaaagtggttggtgacagagtggtgaatcagctggacaagtctgttagtgcaaaacttgaagctactgttgctagacaaatccaaatgcagttccacacatctgtaaaacagacccttcaggatgctttacgtgctagcctggaagctttccttgttccagcgtttgaacaatcttgcaagacaatgtttgagcaagtcgatagcgcattccagaaaggaatgtctgaacacactgttgctattcagcagcaagttgaggcaacacataccccattggcgcaaactttaaaggataccatctcttctgcgtcttcgatcacccagaatcttacagcagagttgcttgatggccatcgcaaactattggcgctgcttgcatcgggcaatgcaaaagcacatagtacaaacgttttgcagcccaacaatgtccctgtgactggtccaccggaggttgaggctccattagatccaatgaaggagttgggcagactgatatctgaacgcaaatttgacgaggcatttacaatggctcttcaaagaagtgacgtgtcgatagtgtcttggttgtgctctcaggttgatttgcgcgcattgtgctcaatggtccccgtcccccttaaccagggggtcctcctagccctattgcagcagctagcagttgacattgctactgatacgccgcggaagattcagtggatgacagatgtcgctatggcgataaatccaaccgatccggtgatcgccatgcacgtgaagcctattttcgagcaagtctacaatgcattgctccacctacgctcgctccccaccaccagcccatcagacagcaccagcatccgctccttcacgcttaaactcacgggagccgtcatccattctagaccaactagcatgtgacatcgtcaatgacacgcccagaaagcttgagtggatgacggctgttgctgttccaatcagtccaacagatcctatgatcgctgtgcatgtgaggccgatattcgagcaggtctatggcgttttgaaccaccaacggtcactgccagcaagcagttcctcggaagcgaccaacatccgtttgatcatgcacgtaatcaactcggtgctgctgacctacaagtgataaccatcttcagtagcgtgctctctcagtagctgctgtaagtttgggcaacattcttgcaatccctgtacagataaaattttgaaaagcgaagtaaaccgataaaagttgtggtgatggtggtgatacattgtggctgacaagccaaggaccactagtcattagcatggtgggcatctggtgtaaattggtccgttgtgttccagcccgtactgagctgacatttttcatgtgggtctgtcatcttgaacatgttattcagcgcatgcagaatatagctctgtactgttaacaaaaaaaaaaaaaaaaaaaaaaaccgtaattttagttcctagtttaaaccctcgtgccgaaa

SEQ ID NO: 45057 - DNA, 630 bp, Oryza sativa
  Clone ID: PAT_MRT4530_48058C.1
atgcaccggaacaccagcaagcacacacatcagatccacccccctcaaatagcagagggcgggggattcggcgcgctccgtagaacgagtgagaaggatacagtggcgctgctgctcgcccttgggctccatgaggccgcaccacaggtcgccgcagaagaacccggggctacgcgtcgtgtcctccagctcgaccgggggcggggcggggctctcgccggaaccctagcctgctcagctccggctttgcggctgccggagggaaggggaggaggaggcggcggcggcggcggcggcggccctgctcttttggcggtcgcggcggccggccgcacggaagggacggacggcggggcgagtggccacgcgtacgagcgaaaagcgcgcgcgcagcgcggcgcggcgaggcgaggcgaagcgatgagccctggccgtgagccgcgcggggcggaggaggaggggaccctcatcataggcctcaccaccagcggagggaagagagtggccgcgatgcgctctgacggcgaggggtcttgtggtgagcccccatatgctgttgcattcacttccactgcggtgcacagaggccagggagaatctggaccagtcggaccaatcatttgttgctaa

SEQ ID NO: 45058 - DNA, 477 bp, Oryza sativa
  Clone ID: PAT_MRT4530_48059C.1
agggcagattttaccgctcccttatcttctgatgatcacttggtgtgttatgctattccatgtagtatggaactttctgacacgagtgtcgtgaataagtgccctcaccagtctactggcttcccagattatgctaaagcttgtacagaatgtgactctgggttgacctcctgtgagagggttgatcaggcaacacaggatcatgacattctttctggttccagtatttactctaagaataaggacctctactcttacagtgacatctcagttttttctgtgactcacaaagattttgcagaaccgctagagttgcctccatgtgggaaagatgatgaggcgccaccagatcttgcagctcaattgcactgtaattcatgcaaggatgttatgatgccaccgcaagttataagcgatgaagtagagccagttgacagaggagcaactattttcgtggaacatactccctgtggtcca

SEQ ID NO: 45059 - DNA, 1538 bp, Oryza sativa
  Clone ID: PAT_MRT4530_4805C.1
atgccggcggagcggcggctgcggcaggccgtgggcgaagggatccacgaggagcggaggggcgggcggagaggcggcggcggcagggcgcgggcggcggaggtggccggaggaggaggaggtgctgctgtcgcaacggggaagcagaaggccgctaccgccgccgccggccgacctggttcgagaaacaggcaagccctcggtgatatcggcaacgtcctgaacgcccatgtggtcgacggcaagatccagctgccggaggggatcaatcgccccatcaccaggagcttcggcgcccagcttctaaagaaagctcaggagaacgccgttggggcgaacaagatcccggtcaggaaggaaccagctccgaagccggccaagaaggtcgtaccccgtctggagaatgccgccaaggccagcaccggcgccggcgtcaacgagaacaagaagccttcggagtcggagggcgccggcagcagcggcagcggcggcggttcagcccacaagtactccaggaagaagcataatcgcattgtagctgaatctgaatttgatgttattaatggcagcacgcgtgtggcattactgaagccaaaagaagtcgtcgaggacatcgacaagctcgacagcgacaaccagatgacatatctaagatccgtggaccgaccgagctcgagctccaccacctcgtctccaatggcggtcaaggtctacgtcgtgtattactctatgtatggtcatgtcgccaaactagctgaggagatcaagaaaggtgcttcatctgtcgaaggcgtggaagttaaaatatggcaggtccctgaaaccctctcagaggaggtgctgggcaagatgggcgcgccgccgaggagcgacgcgccggtgatcgcgccgcaggagctcgcggaggccgacggcgtcctgttcgggttcccgacgaggttcggcatgatggcggcgcagatgaaggcgttcttcgacgccaccggcggcctgtggcgcgagcagagcctcgccggcaagcccgcgggcgtcttcttcagcaccggcacccagggcggcggccaggagacgacgccgctcacggcggtgacgcagctggcgcaccacggcatggtgttcgtcccggtcggctacacgttcggcgccaagatgttcgacatggcggcggtgcacggcggcagcccgtacggcgccggcacgttcgccggcgacgggtcgaggtggccgtcggaggcggagctggagcacgccttccaccagggcaagtacttcgctggcatcgccaagaagctcaagggcgcctcctccgcctgaatcatatacagaattgttacagagatcattcgcattggctgcctgtgctgatttgatccgtgttcatatgccggaattaatctttaccgattcgttacacaaagatttggttggatttggttgtgggtttgattctacgtactgtgcttgtataaacttgttaagttgattgtgcactcccatcgatattataccatcatataatctatattcacgggactgtc

SEQ ID NO: 45060 - DNA, 987 bp, Oryza sativa
  Clone ID: PAT_MRT4530_48060C.1
ccggtttacaaccctgtagggtcgtaaccaggaaaaaggaaaaatataccaccacccacacaccgacaacgtcaacacacaacccgggataaggctagcaccggaccgcccgctgctaagcgtgaccgaccgccagacctgtgaatccatggctaacgcaccgatgctccaccaccactctagctctgccgacaagtgagactcctacaccagcgtccctcgccggctagccttcgtgcgccgaagactgcgccacacccatcgacagttcctcctcacaccaaggtcacttccaccaccggaaaccaagcgttgagaataagtccttcccttttgtgtgaattcccgccggccgcgcctctcgcgctaagccagcctccatctccgctccacgcagtctccttgctgtgattgtgtttggcgtttgcttctgcagttctgctgccacattgttgatttgctcccaaatcccaatccgccgccgccgccgtcgtcctcgacggtagccagctccgacaggaggttccccgtgctatccctccctctgcaatactgtggttttgctctgacttccatcggctagcctaggcgcaaagcaacccaccatggcctcgcagccgttgctcttccggtggatgcaaccccactgcaagtttctggatgcagattgatttttcagtttgcttcttccgttgggaccccacacaattgttcagtccagaaaatgtgagtttcctgccttgcagttgatcaggtcaatgccgatgcatctcccacgctccctccaatacccaccctcgactccacaccctctacattctaccgccttctcccgcagcctccgcccctgccgtcccaatggtcctcccccagccttcgcctctgccgagttcccaggttcagttccagacatcgcccagatgccaccacgccgccgccaccggagtgtggccggcattgaccaggatgacctcctagacccggatg

SEQ ID NO: 45061 - DNA, 550 bp, Oryza sativa
  Clone ID: PAT_MRT4530_48061C.1
attatgaaaggttaataattatccatgctttgtatgttagagttcggctggagctctctctcctatcgtcttctacctccagcagaacgggaggcagcacgcagggcacggctggcttggccgagcgcagcccgtacggctcgagggcagcacggcggcggacggggagggtgcggcgagcctgcgacgactacccgaaggcagccacagcgcatagcggcgcgcgtctacggcgtatggggattccattttgctagttagatggagaggaggagctccgggatggcttgtccacgccgagctcaccggcggcgaaacggtggccggaccggcacggctatggttgctaattggcgaaattaaagggggatctagtttccacggaactaggagaggccagaggaacgaggaattaccgagagacggcgccgaattgaatgaaaagaatccggactgcggtggtggagcggagaagaaggtgcagcacgcacgccaggtgttcgacgaaatgtttttgagggagtagaagaggcagagaggggaggacgag

SEQ ID NO: 45062 - DNA, 1406 bp, Oryza sativa
  unsure (1)..(1406): unsure at all n locations
  Clone ID: PAT_MRT4530_48063C.1
tcccccggccacgcgtccgatcggaattggttcgggagcaggtcaagcaggaggcatggcggcggcggcggcggcgaagatagcgccgtcgatgctctcgtcggacttcgccaacctcgccgcggaggccgaccgcatggtccgcctcggcgccgactggctccacatggacatcatggacgggcactttgttcctaatcttactattggagctccagtgattcagagcttgaggaagcacaccaaggcatatttggactgccatcttatggtgaccaatccttcggattatgtagaaccattagcaaaagctggtgcctcaggtttcacattccatatagaagtatccagagacaattggcaagaactcatccaaagtatcaaagcaaagggtatgcgaccgggtgtatcattgaggccaggcactcctgtggaggaagtttttcccctggtggaggcagaaaatcctgttgaattggttcttgttatgacagttgaacctggctttggtggtcagaagtttatgccagaaatgatggaaaaggtgcgtgccctgagaaagaagtacccatcccttgacatcgaggttgatggtggtctgggtccttccaccattgatgtggctgcatctgctggggctaactgcattgtcgctggaagctcaatatttggagcagctgaaccaggagaggtcatatcggcactaaggaagagcgttgaaggatctcagaacaaaagctgatctgtggttttgtactcggtttctattgtaaactagggccactctgcacgtcttctttacagagatccccagattgcactacgtgagctgttgagagataataaaatgtgcccttggcagttggcactgattccagtgttactaaatgttaaaactcttgggtccgtttttgatggacaagtcacaagtaaagcttaatgatactttgcatgatttgcatccaaaaaagaatttaaaaaaaaaaaaaaaaaaaaaaaaaaaaaaaaaataaccggttggagactagaataacacgtcgctggccggcgttttacaacgtcntgactgggaaaaccctgncgttacccaacttantcgccttgcagcacatctcctttnnccagcttggcgtantatcnaanangncccaccgatngcccttnccaacatttgcntcanccnnaatggngaatggcaaattgtaacgttcaatatnttgttnaaattcccctttnaatttngttnanttnagctcatttttaacccataagccgaaatcggnaaaatccttttttatatcanacnaatacaaccanatanggttgatgttgttccntttcggaacaanaanccctacttaaaaaantggactccnacttctatagggggaaataacctttttcng

SEQ ID NO: 45063 - DNA, 406 bp, Oryza sativa
  unsure (1)..(406): unsure at all n locations
  Clone ID: PAT_MRT4530_48064C.1
ntgaatcttttgantaacgctggtnagatccaccctganacccccncatnatganagtatanngacnctttncntnggtggccnagatantcnagtcacngaagcngggatttgagggatcaattttacccccatggtgagattgacaccattcagaatggttctgcaccgtgctcgtgcatttgtgacttnctctacnacacaaggtgctgagaaagctgctcangatctcgctaacnagttantcntcaagggtgtgcgtctgaagctcatgtggggctagccncnntcaccaaaaccggatgaacatntcctcggaggccanggcatgtngcacatggangaatgcccccctncggctgtnatatcccctgcagccagantggtgaccacgcctcaaccccct

SEQ ID NO: 45064 - DNA, 602 bp, Oryza sativa
  Clone ID: PAT_MRT4530_48065C.1
atgtcccagtgccaggcgcaccattagtggtccctccagatactcccctatgctgttggagtttcttagtgaatattcatttccccccggactaccccttcaacgcctccaaaggtatcttttaagacaaaggtcttccatccaaacatcaatagcaaatggaagcatatcccttgacattcttaaggacaatggacgccctgctttgaccatttctaaggtgttgctttcgatcttgctccttgcttcacgtgaccccaaacccggacgacccttctggtcccttgagatggcccacatgtacaagacggatcgtccaaagtatgagacgacagcccgcagctggacccaagaagtatccatgggatgatgaaacccacaacccgaattcaaaacctctgcttaaatcagacatcgtggtaatgtcccaagaactgttttatggccatttatttccccgattgtctccattcgttgttcagatccatgtagcatcgtgtctcgtagccccaacatcaacatatgatctgcccctcgataatgagataacatgctccgtgatattatggtatggtggtgatgctaaaaaaaaaaaaaaaaaa

SEQ ID NO: 45065 - DNA, 1342 bp, Oryza sativa
  Clone ID: PAT_MRT4530_48066C.1
aattcatctccgtgaataactatactgaataatcggcctaactagacacccaccgcgacacacgatctgcacacctacacacaagccgctccctgcgtaaccaccatcccaaaccataatgccgccaccttataaggacgagcatacggaaaaagggggtgcctttcaggccatccccccgcaatacagaccaaaccacagaacaccacacaccacactaccacaccgcaccgcgaaaccgccgactaacatctccacttactcccagccaaccgaccctacaccccctcctccacgctcgccccccttattcgcctgaatccaacgcaaatgctggcgcgcacattcagtcactgctccccaccccgtaggcaacaagtcgtcaccacccccccccctagtaccgtctagtacatccgagaatccgtacgctacggttaccttcctcccctcccatcacgttcccccatccttgttcagaatcacacccagttctatgagtttgtctctggctccatcattttcagtgtaagatgcctggagccctggactggaggggcattacgttcccagctttattattgctgctggagttcacacaggcatgatcatcatcatcactcctcaacaggggagtgcagtagtggcacctacaggaaacatgctctctcatgagatcggcattgctgaggacagcttgtccgccagccctccggccatcctctccgctcgctcccctcgttcgccggtgcgtattctgatcacgtccgacacgggtatcaaaaatatttttccctcaccaatttctcctgttcttgccttttcaattatcttgtcaacaacagcttcaacctgatccttggacaccactatttccatcttaactttatcaataaatgtatcttctgcaaattctgacccttcatgcctctcagttgacccgccctgtgcgccgaaaccccgcacgtcggacaccgtcacgcctctgatccccatttgcagcaaacccgatgacacataaggcaccctccatggcctcaggattgcctccaccttgtagaactccgactccggctggtaccctgctgcggcggcactctgggcgcgcgcggccgtgggcgggaggcgacgagggggcgcgtggttgactcggagtggccgctggaggccccgcgagcgcgaggcgaggaggaggcgggaggtggtggtggtggtggtgggaggaggccgcggggaagccggaggatggtggtggcggaggacgccacaggacgcggcggcggcggcggcggtcgccggcgacgacatgattgaaccgtcggcgatggaggaggatgtggag

SEQ ID NO: 45066 - DNA, 1897 bp, Oryza sativa
  Clone ID: PAT_MRT4530_48067C.1
aaacgggatcccgttgcaacgggatagacatattacgccgccgcgaccgccgacaagtttcttcaccaccggtttgccttcaccgtcgtcgattggtgtcctcgcctacatggttggttggtcacaccaccattgttggacatccacgtctttatcaccggcctatcttcatcaccgtcgatggcattttatcttcacatggttggatgatcacaccaccgttgatgggcatctatgtcttcaccgaccggctcgcctttgtctctgacgactgatgtcctcgccttctcggttggttgatcacaccaacgttgttgggcgcctacgtcttcaccgaccggcttgccttcatcatcgccgactggtgtcctcgccttcacggttgcatggtcacaccatcgttgttgggcgtctaagtcttcattgaccagccgcctactcgccgtcgactggtgtcttcaacttcacgactggcctgctatgcctctgctgatgggcaccttcgtcttcaccaccggctagccttcatcgccgctgactagtgtcttcgccttcatgactggcctgatacaccgcttctgatgcgcatcatcgtcttcacttccggctgcttcttctgttgccgactaattatctcaccgccatgggtgcacaactccgtcgtcattgcttgacactttcgacttcatggcttgccgccttgtctaacaccgatttgtttcttcacctccacggctgcgttgatgggcgttatcttcttccccaccagttgtctcgtccgctgccgactcatctcctcgcttccactacgcgtcttcatcaccggtttacctctcttgctgccggctcatgttcacgttaccacggctgtgcaactctgttataattttgggacgacttcatcttcattgtcttcggcatccgaaaactctattgcctctacattgcgagctttactacttcaccaaccaggatgtcttcaacaggatcgatatcttggcccgcctaggcgcctgcactaccccagtggcccagcctgtcgggcttcaatgaggagtagcttggtctcgctttcattagcatcgtgtcccacctatgaggttgacggattctgccaccgttaatgggcctcatcatctataccataggcttgcttccgctaccgctgactggagttttcgtcaccattgatggactacttctcaagtactgtatttgcatcaaatactacttagcctatatgtttgttctgcaagatccaaatccagatatgcataatagggattcatggctttaagcttatctcctacgcgtcggaaatggatcagtcagaacatcactgccggcctactttcgtcaccgccgtctggtgtctcgcctacacggttggatggtcacatgactgttgatgggcgtctacgtcttcaccaccggcttgcctttgccgctgccgactagtgtcctcgcctatacggtttggttgtcatatcaccgttgttgggcatcaacgtcttcaccgtcggcctgcctacttccgctgccgactggtgtccttgattacacggttggatggttacaccaccgttgttgggcgtctacatctttactgaccggttgccttcactgtcgccatctgctgtctccgcctctacaagttgttggtcacacaactgttgtttggcatctacatattcaccgaccggctgcctgcgccaccgctgattggtgtctccgtctatacggttggctggtcacaccgccattgatgggcatctacgtcttcaccaccggcttgcctccgctgccgtcgactggtgttttcacctacatggctggttgatcgcactgccgtcgatgggcgtcattgtattcaccgcaagcttgccttcgccaccgc

SEQ ID NO: 45067 - DNA, 678 bp, Oryza sativa
  Clone ID: PAT_MRT4530_48068C.1
tcatgagatcggcattgctgaggacagcttgtccgccagccctccggccatcctctccgctcgctcccctcgttcgccggtgcgtattctgatcccggccgacacgggctccctttgatacaaaggtgaacagtgggaaactgggaaatgataaaatatttttccatcaccaatttctcctgttcttgccttttcaattatcttgtcaacaacagcttcaacctgatccttggacaccactatttccatcttaactttatcaataaatgtatcttctgcaaattctgacccttcatgcctctcagttgacccgccctgtgcgccgaaaccccgcacgtcggacaccgtcacgcctctgatccccatttgcagcaaacccgatgacacataaggcaccctccatggcctcaggattgcctccaccttgtagaactccgactcccgctggtaccctgctgcggcggcactctgggcgcgcgcggccgtgggcgggaggcgacgagggggcgcgtggttgactcggagtggccgctggaggccccgcgagcgcgaggcgaggaggaggcgggaggtggtggtggtggtggtgggaggaggccgcggggaagccggaggatggtggtggcggaggacgccacaggacgcggcggcggcggcggcggtcgccggcgacgacat

SEQ ID NO: 45068 - DNA, 909 bp, Oryza sativa
  Clone ID: PAT_MRT4530_48069C.1
atggcgaacagcggcaagtcatcgccggcggcgacctccaccaccgcgccgccaccgggtcggccgaaggcgaaggcgccgcccctcaccgtcgagggctaccccgtggagggcatctccatcggcgggcaggagacctgcgtcatcttcccgacgctgagcgccgccttcgacatcggccggtgcccgcagcgcgccgtctcgcaggagttcctcttcatctcccacgcccacctcgaccacatcggcggcctccccatgtacgtcgccacccggggcctctaccggcagcgcccgcccaccatcttcatccccgcctgcctcagggaccccgtggagcgcctcttcgagctccaccgctccatggaccagtccgagctcagccacaacctcgtccccctcgagattggtcaggagcacgagctcaggagggacctcaaggtgaaggccttcaagacctaccacgccattcccagccaggggtatgtgatatacacggtgaagcaaaagctcaagccagagtatcttggcctccctgggagcgagatcaagcagctgaagctgtcaggtgtggagattacgaatacattgacggtgcctgagattgcttttaccggagatacgatggcagatttcattcttgatcctgataatgcggatgttttgaaggcgaaaattcttgtagtggagagtacttttgttgatgactctgttacaattgagcatgcaagagaatatgggcacacccatctgtttgagatactgaatcagtgtgacaaacttgaaaacaaagctattctgctaatccacttttctgctcgttataccgcagaggaaattgatatagcaatcaataagttgccaccctctttcagaagtagagttcatgcattgaaggaaggtttctga

SEQ ID NO: 45069 - DNA, 1839 bp, Oryza sativa
  Clone ID: PAT_MRT4530_4806C.1
gcacgaggctccgcgtctctcctctccgatccaagcaaatcaagcaagaacaagaaattttagagagagagttggaagagcgaagagagaagaggaggaggagaggacggccgcctgcttcggtccgggagggagttcgccggagttcttggcgttcttggagcccggaggaggaggaggaggagcaacaggaggccgtacgcatggcgacgaggcaccagcgcgcggctgccgctccgcagccggcgaacagaggtgctgcagtcgcagcggggaagcagaaggccgccgccaccgccgccgccggccgacctggtgcgagaaaccggcaagccctcggcgatatcggcaacgtcctgaacgcccatgtggtcgacggcaagatccagctgccggaggggatcaatcgcccaatcaccaggagcttcggcgcccagcttctaaagaaagctcaggagaacgccgttgcggcgaacaagattgtcgtgcagaatccggccaggaaggagccagctccgaagccggcaaagaaggtcgtaccccgtccggagaacgccgccaaggccagcaccggcgccggcgtcaacgagaacaagaagccgtcggagtcggagggcgccggcagcagcagcggcggttcagccctcaagtactccaggaagaaggtcgtgaacacgcttacatctgtgcttactggctcgttccaagcacgcgtgtggcattactgagaagccaaaagaagtcgtcgaggacatcgacaagctcgacagcgacaaccagctcgccgtggtggagtacatcgaggacatctacaacttctacaggacagcccagatttgttcagaaactgacagtgttgttcttgcacagctggagcgccggccgacagactacatgagcagccaggtcgaggtgaaccccaagatgagggccatcctggcagactggatcatcgatgtgcactacaaattcgagctgatgccggagaccctctacctcaccatgtacgtcatcgaccggtacctctcgctgcagcccgtgctgcgcagggagctgcagctcgtcggcgtcgcggccatgctcatcgcctccaagtacgaggagatgtgggcgccggaggttcaggacctcatccacgtctgtgacaacgcctactcgcggcagcatatcctcgccatggagaagaacatcttgaacaggctgcagtggaacatcaccgttcccacaccttacgtcttcttgctccggttcatcaaggccgccggaggcgacaaggagctggagaacatggtgttcttcttctctgagatggcgctgaaggagtacggcatggcgtcgctgtgcccgtcgctggtggccgcgtcggcggtgtacgcggctcaatgtacgctgaagaggagtcccctctggacgagcacgctcaagcaccacaccggtttcaccgaatcacagctcagggagtgtgcgaaggtccttgtcaacgctcatgctgccgctcctgagagcaagctgaagacggcatacaggaagtacgcatccgagcagcttgggcgtgtctctctgcgccctccggcagtttgcctagcctaggattagtactgttctggattcggtttagactgtgatggaatgtcgttcttgacagtatttaagattctttcgtgggtttagctaattggatcaagacaacttgagagcgattgttgttgggtttttttgcggggttactctgaactctcgagtatactcatgtattcagtactgtgatacaccttggtgtaactactcttcataaattcttttcataagtatgaattgaatgaaaagtattctttttcc

SEQ ID NO: 45070 - DNA, 235 bp, Oryza sativa
  Clone ID: PAT_MRT4530_48070C.1
gcgatctacacccgggtgagcagcaaggagcgaagagcgaagcaggagactcgcaacacgctacgagagacagacacgcaaggagcaaagcagcaaacacaaaaggagtgcaagacggaccagagacagaagagcagggcccaggggggactcttgactaagccggcagaggaaacaggcgacgacacagaccagacaagcctgaccaaaggcaagcagaagaaagacgacaaca

SEQ ID NO: 45071 - DNA, 201 bp, Oryza sativa
  Clone ID: PAT_MRT4530_48071C.1
atgattcgcacgcacgcgcggctgctgatgctgcagcagcgtctgcgcgtcaaggcggaggatgggggaggcggggcgcagggaggaggatcctgggccgtcggatggagggagtggacgcattgctatcgcatccttgatttctcggtggcaatgatggtcagccttggaggcggtggatcaagcgctcaaacaacttag

SEQ ID NO: 45072 - DNA, 693 bp, Oryza sativa
  Clone ID: PAT_MRT4530_48072C.1
atggatcaagccgaccgccgccgccgccgccgccaccaggagcttgaacatgcggcggctgatgatgattacggtggtgcctcctcttatcacctcccgctgccctccggattcaagattccccgtttgcctactactgcctgcgccttgatgaggaggaagaagacgcacagaacgaagctctcgttggagaagctcagactaccgtccttgctatataggagtatattcattggtaaagacctgctatgcaaagtggtatcacaactcacattaaaagaagcagggaagacaagcatactttcttctcggtggaaagatcgatggacatatcattctaatctctgttttgatcactccgagtttccaagatacaccgcagacagatttatcaactatgttaaccatgtgttgcagcagcacagcttcttggcggtggacaggttcgagatcaggtttccactccagaaacagcagacaaaacatgtggatagctgggttgcttttgcctctgcatcaagagcaaaacattttgtgcttgatttgagcccagctgtgcacaccaatcaccaaagtgaagagcacatgtatgtatttccagttgatcttctcgatggtcaaaatggctctcctatcatatctctccggctcggccttgtgtgcttaaagcttccttctgattttcttgcatag

SEQ ID NO: 45073 - DNA, 213 bp, Oryza sativa
  Clone ID: PAT_MRT4530_48073C.1
atggggttcggagaattgagctccggcccccgcgggactagtgtgctcgacaaagcgaatgatagtctgatacagcacacacatggcttgcttgatgacgcagtaatgacgtgctccgtcgctcttgacacgaatgacaaatctacagcttggatggaggccggtaccatccatgaccggtccaaagacttcctctcgccaaatttgcattga

SEQ ID NO: 45074 - DNA, 381 bp, Oryza sativa
  Clone ID: PAT_MRT4530_48074C.1
aaactctctttctcattttttatgtgggcatatgttatcttcaaatatgtattaaagtgattatatataattgtggatgttcttaattattatttttccagacaatatgataattttgcattgtcttaaatctatttttatatgacttgcactgaatttccgctcaattggactgattctaagaaaattaattttactttcatgaaatttaatgatttattaaccaaatattatgccaccgttgcgtagcacgggcatgttactagttaataaaaaattaacaaccaaatgtatcaattatcattaattaattactaatgattaagattattagtaatgaaggatattcttaatttcttatccggccaatttgaccaattt

SEQ ID NO: 45075 - DNA, 816 bp, Oryza sativa
  Clone ID: PAT_MRT4530_48075C.1
atggaggatggggagcaagggagtttaggactaacctgtggcggggaagagtggggttgcggatcgacggcggcaagcaccaccggtggcttgtgccgacgcctggcacacagtcaaggcagtttggacggaggcggcggcatcgggatcggcatcggaggagaggacagcgatggcggcggcggcggcgagcggaggaggccaaggcgaaggagccaccacttttgtcatgtggcatcgggagcaagggcggcggccgcagagggacacggcggcggccggagcagcacggtagaggagaagggagctgcggcggttacggcgatggcgcttgcgagcggaggaggtgggcgtctgggcgccggatccgccggcgaggagaccggggtcaccggatccggcggccccggcctcctcactgggagatccggcggctcattgggagggagcggcggcggcagcacggtagaggagagggagctgcggcggcgacggcgcacgcgaggggaggaagcggcgacggcgcacgcgaggggagaggcggacgaaccgacgcgcgtggggagaggagaggacgggcggctagggtttgtaccggttcgcgaaatccaggccgtccgtccacaatccgacgatcgcacgggcgtggaaggcccggcacagcgggacacgtggacggccagatcgaccctacggcgagatcggacggtggacagcagcggggaccagtccataattaaccgaaaggggaagggtttttttgcaaaaatcgctgacgtggcgcccctaatcttccggcgttcccacgatgtttaa

SEQ ID NO: 45076 - DNA, 490 bp, Oryza sativa
  Clone ID: PAT_MRT4530_48076C.1
gattgcgaacccggacaacaacgcagtgttgcaaacaactgtagtaggcagcgcagaagagcatgtagatgtacagacaactgctgtaggcacggaagggtacatagatccacagtgcaagaaaggtggcaaggtcaggttcaactgcccctcaaatgtgtacagctttggcattgttctgctggagatcgcgtgcagaggcaagcgcagggaggagacctgcggcctgtaccgaaacaaaggtgatgtcgtcgaggctgcagacacaaggctagagattggtgctgactttgaaaggagggagatggagcgtctcatcatcttggggctctggtgctctgcctttgagactcagcatcggccgaccatgcagaaagcaatggatgtcctagagtgtaatgcaccgttgcctgaccataacttcatcaccaactctgctttagcctcatcagaccatgatgcctccggtgcttctactgccaatatatag

SEQ ID NO: 45077 - DNA, 216 bp, Oryza sativa
  Clone ID: PAT_MRT4530_48077C.1
atgaaggtgacgatcatgcatgtggggtcggcggcaacacttgcgacatttctggcgcttcgccatgctggcgtggacgccgttggcactgcatcactcagccgtcaacaaccgaagatggcagtcggcacagaattgaacgagaggggcggcggtgagcgaggagatcaagatgggagtcgcgcgcgactgcgtcagcgcgtggacccgagctga

SEQ ID NO: 45078 - DNA, 161 bp, Oryza sativa
  Clone ID: PAT_MRT4530_48078C.1
tggagctcggcgcggcggaagatagcggcggcgttgagcggccttcgagtggcacgtcagaagacggaaacggcgtcgagcagtgcggtggatctcacggccgcggtactgcggacgacggcggtggcgtcggcgcccctactcatctccctctccggtga

SEQ ID NO: 45079 - DNA, 403 bp, Oryza sativa
  unsure (1)..(403): unsure at all n locations
  Clone ID: PAT_MRT4530_48079C.1
aagcgttcttgagaatcctcatctccaccctcaccatagaaacaggactagagtcctttcacgtgtcctagatttgggcacctttcttttgatcaccgaaatggaacgcaagaatccgctccctcagcaagagtctgagcctcacgtcgaaggcaacaagtcccctgctcccaccagcatcgacgacgacgccactaacactaccgaggacgactccgcgttgagggacctcctctacccgcaatctctcgaggtaaaaggcaaagaagacatatactccattttctaccaagggcagaacgggactgcacaagntgggactgcagatggtaaatcccagtggactcctcctaaaagtcgcaccgcgtacaccaaggataccaaacagtccaatcagtatgat

SEQ ID NO: 45080 - DNA, 550 bp, Oryza sativa
  unsure (1)..(550): unsure at all n locations
  Clone ID: PAT_MRT4530_4807C.1
aggagaaccccatttgtgatctctgggaactgtagcagtaaaagaaccaaagccccaattcagaacatttgctccctagctgagacacgaataacttttacatcatgatgatgatgctttcatgtagaagaaaaagttggcaactgatgtgtttggcagcatgcaactcgcatttcattatgacaattttactccctctattttttaatgatttgacttttaccaaacttttgttcacgaatgctttcatgtttgcgactcccaatatgtaatttccatcgtgcccatgtaaataattatcttaaccagcacattcagcagtacccataaaactaaggcattgctaatgtgccctgcacagctactgagaggactaggctgtcaagtgaaatttgatcacattctataaaaagcacaaataatcacctagtaaattatgcggtgatcaagagtgttaactattaaaacncagaatatgattttacaaatatcatagctgaaaacttgaaatgtcatggcttaagattctaaaaagcaataaactgcatgt

SEQ ID NO: 45081 - DNA, 1365 bp, Oryza sativa
  Clone ID: PAT_MRT4530_48080C.1
atggaacgcaagaatccgctccctcagcaagagtctgagcctcacgtcgaaggcaacaagtcccctgctcccaccagcatcgtcgacgacgccactaacactaccgaggacgactccgcgttgagggacctcctctacccgcaatctctcgagaatgtactggatgtacaaggggcaagtggtactaccgtctacagcgtcccgctgatgctccatcaaaccggtggacgtagacgatcggaggatctcgccgtgcatcgcgtgctttttcggccatgcacctctcgtcgtcttcctgatttcgccgccacttgtagcatctgcccctctccctttcgaccccaacaaatggagcccaagaggtcccctgcgccgccgcagcccaacgtggagaccaagaagtcccctccccgcgctgccgccggaggaggcggcggcggcacagctgccgtcggtggcgagtcgccgttgagcagcctgttccaccagccgtcgcatggggcaaaaggcaaagaagacatatactccattttctacaaagggcagaacgggactgcacaagctgggactgcagatggtaaatcccagtggactcctcctaaaagtcgcaccgtgtacaccaaggataacaaacagtcaaatcagtatgattcggttgatacgtcctgttttggttcttctgtgaactatggtggtcgagactattatggaatctctggacacaagcaatccacagaatccaatgattataaggcggacaaaaaggacccttccacagattctcatggtgactggtggcaaggttcgttttactactaagcgaacttggtggcctctcccttggtggaaaagggaatggaatgggaggggttggagctggttttgcttcactgttgctatgctggccgtatcagttacctaaatcatactagtgtgacatcgtccatcagtggtggcagtatttggatcatcacacctgggcagatgtagtgtgtctttaccttttcatttcgtagcttgtgctttagatgtgaaatgaatcgaacttacaagcacagtaagttttaggtcgcaggttgcataaatggtccctatccattctgccaaatctggtcagtaaccagattggatcagtttggtctggctctcttagatcgaagtatatgttccttgtactctcggatcttcgctccggagccaagaaggctggagaagtggagatcacttgcattgtaaacatgtactcgtttaatttcaaagaacttagcaaactgttcttataaatagtagtacttttattccaacagaatcatcaactgcattattcagaaagatccaggagaagtcacatcctgaatttcacag

SEQ ID NO: 45082 - DNA, 1184 bp, Oryza sativa
  Clone ID: PAT_MRT4530_48081C.1
atctagaaccccacccccatcccccagcccaacccccacacgaagcgaaacgcaatttctctccaaaccaaaacacccgaggcggagaggccgaggcggcgaggcggcggcggcgaccgatctgtgcggggagggggatcgccggagatgttcctggttgactggttctacggggtgctggcctcgctggggctgtggcagaaggaggccaagatcctcttcctcggcctcgacaacgccggcaagaccaccctcctccacatgctcaaggacgagcggctcgtgcagcaccagccgacgcagtacccgacgtcggaggagctgagcatcggcaagatcaagttcaaggccttcgacctcggcggccaccagatcgcccgccgcgtctggaaggactactacgccaaggtcgatgctgttgtttacttggtggatgccgctgacaaggaacggtttgcggagtcgaagaaggaactcgatgccctccttgcagacgattccctagcaaccgtgcctttcctgatactgggaaacaagatcgacatcccatacgccgcgtcggaggaggaactccgctactaccttggtctgagcaacttcaccaccggtaagggcaacgtgaacctagccgactccaacgtgcggcctctggagatcttcatgtgcagcgtcgtccgcaagatgggctacggcgaaggcttcaaatggatgtcccagtacatcaaatgagaggggcttctgctcctcaattgtcaatagcagctgctgctcctgctgtccacagtgggagtgggtaattcaggcctctggttctgtttatcaactctcctgatgctttggagaaacctactgcacctgtaaggaaaaaagtttgtcgtagtggtggatagtgaatgcctgtaagttggtgttaatactagaaatatgacggggtttatttgtttgattgtttatgggtggtgtgaccttattagctagaaaatgtgggttgctggaatcgtttcttgacaacaggaaatgtttcagccaatgtattcacgctatctatctagccagtgatatgtgtatgagcaacttcggtctcttggctgctagaaggaagttgcaccatcaagctgaccaccaattctgtggggaaaaagaaatcctaattcgatgactacatgttctcaatcgcgagatgc

SEQ ID NO: 45083 - DNA, 954 bp, Oryza sativa
  Clone ID: PAT_MRT4530_48082C.1
gacgtcaccacgccacaccccattcgctcgttaacgggtccgcatcaagatccgcgtaagacccttcttcttcctctcctccggcgacagagaggccaccggcggcggcggcgggcggagatgttcctggtggactggttctacggggtgctggcgtcgctggggctgtggcagaaggaggccaagatcctcttcctcggcctcgacaacgccggcaagaccacgctcctccacatgctcaaggacgagcggctcgtgcagcaccagccgacgcagtacccgacgtcggaggagctgagcatcggcaagatcaagttcaaggccttcgacctcggcggccaccagatcgcccgccgcgtctggaaggactactacgccaagggtgcagggaaattatgcacgtgtcacgatattgatggcaacagtatcttccagagttcagttcttgctttaagtcctgtttgggtctcctggcgcagtttacaaatgaggaaactgtggttatggggtgccaacattttaactgtggtgttacgagatgctcttaatatgatttctataccattggcatcttgctgtcagagaaacaaagatatggggaaaatcgaatgttggcagtgcagtcatggactagtcgatgctgttgtttacttggtggatgccgctgacaaggaacggtttgcggagtcgaagaaggaactcgatgccctccttgcagacgattccctagcaaccgtgcctttcctgatactgggaaacaagatcgacatcccatacgccgcgtcggaggaggaactccgctactaccttggtctgagcaacttcaccaccggtaagggcaacgtgaacctagccgactccaacgtgcggcctctggagatcttcatgtgcagcgtcgtccgcaagatgggctacggcgaaggcttcaaatggatgtcccagtacatcaaatga

SEQ ID NO: 45084 - DNA, 381 bp, Oryza sativa
  Clone ID: PAT_MRT4530_48083C.1
atggtggaggtcacagagggcgtgccatgtgagcatcggctcaacggcaaggcagtggaggcgatggctaggactcaaggtggtggtggaggtcacagccgaggctggaggtggcagtggaggccaccaccagcccgcaggtgggatattgtggctagtgtgtcgtcaactcgccagagttcaccaatgtgcgggccacctttccctaggcagtgcgatggaggatgctcaggggttgccaacggtgatgacccccaagtggaggcctacgacagtgacaggcaggcggatgctagctggtggggtcgtcggtacagtggtttccatgcgccgatgttgggttgttggtggtggagcattggagcggcaactgcaaattga

SEQ ID NO: 45085 - DNA, 1752 bp, Oryza sativa
  Clone ID: PAT_MRT4530_48084C.1
atggtgtcgtcgtcgtcgtcgtcgcctcgccggcgagctctcctcctgctgttcgtcttcgcgtcgtcgttctttgccagcgctgcagcggcggtgtcgcggacgaactcgtcgtcggcgttcgtgctggcggcggcgcagacgcggcggaaggatccactccgcgggctgaggtactacaccggcggctggaacatcagcgacaagcactacctcgccctcgcaatgcgatcaccttggtgttctactgttcttcctgcctggttcttgatgctgacgccgtcgagttttgctatgcttgtcgccgcgcgcgcgcagtcggtcgggttcagcgcggcgccggtgttcgttgtcgcggccgtctggttcgcctccctcgcgctcgccgcgttcgtcgcctgctgctgccgctgctgctgctctggcgccggcggcggcaacggcaacggcggttactcctactcccgcgccatcttcgccgtctccctcgcgctcctcctcgtcttcaccgccgtcgccataatcgggtgcatcgtgctgtacgacgggcaggggaagttccacgggagcacgacggcgacgctgcggttcgtcgtcaaccagtcggacggcgcggtggcgagcctgcgcggcttcagcggtttcatcgaggcggcgaaggcggccgccgtggagaaggccaccctccccgccgacctccaggggaaggtcgacgacgtcgtgcgccgggtggacgcctccgccgacgacctcgccgcgcgcaccaccactaactcccgcaagatccgcaccgcgctggagaccataaggacaatcctcatcgttgttgccgccgtgatgctggccttggcgtttcttgggcttgtgttctccctgtgcgggctgaaatcactagtatacaccttggtgatttttggatggattctagttactgcaacattcatactgtccggcacttttcttctcttgcacaacgcggtgggcgacacgtgcgtggccatggacgagtgggtgctccacccgcagggccacacggcgctcgacgacatcctcccctgcgtcgacgccgccgcgacgtcggacgcgctccgccggagcaaggaggtcaactaccagatcgtctccgtgctcaacaacctcctcgccaccgtcgccaacgccaacgtccccgcgtcgtcgccgccgtcgccgccggccagctaccgccagtccgggacccccgtgccgctcctctgcaacccctacaacggcgacctctccgaccgcgcctgcgccgccggcgaggtcgccgccgccgacgcgccgcgggcgtggcggggctacgtgtgccgcgccacgggggcggcgccgtcgtcggaggtgtgcgccaccaccggccgcctcacgccgacgatgtacgaccagatggtcgccgccgccaacgccagcgccgggctgacccagtacggccccgtcctcgccgacctcgccgactgctcgtacgtgcggcgcgcgttccaggcggtgacggcggcgcactgcccggggctgcggcggcacagcggcagggtgtaccaggcgctgctcgccgtgtccgtcgccgtggcggccgccgtggccgcgtgggtggcgcactcacaggagcggcggcggcggagcgagacgaggcggttccaggtgtcgccgtacaggttccccatcgaggagaagtcgctgctcaagagcccccggcggccgtaccggcgaggcgacagcggcaggatggcgaggtag

SEQ ID NO: 45086 - DNA, 278 bp, Oryza sativa
  unsure (1)..(278): unsure at all n locations
  Clone ID: PAT_MRT4530_48085C.1
cacaagcccaagtcgcgtcgcaccgaagcagagtagagaaggagaggagcggagggcagtcagccgtccgatcgagtgatccgatggctctcgctctctccacctctgctgctgctgccgctgacgccgcggcgcgtgcgctcgcggcgagggtgacgacgacgaggggttacgncgcgtcgagntactgttcgncgatgaggcgttcggcgtngnnggtggaagngaagttcgntgcgtggatgacgtagtngaaggacgggntcntcgtcgtcgtt

SEQ ID NO: 45087 - DNA, 211 bp, Oryza sativa
  Clone ID: PAT_MRT4530_48086C.1
taatgtagcaaaaatatgtggtagtactgccatatattctggtacttgtgttccaatctgtctttgctttcttttttgtcattggatttttgaggtgcctttacgtgcagccttcgctcttgactattgcaccccggtaccacgtaccattgatgttcagttgggagaagttcatgatttggtggtagttgacgaatgctactacaattct

SEQ ID NO: 45088 - DNA, 2861 bp, Oryza sativa
  Clone ID: PAT_MRT4530_48087C.1
tctgcatatcttattttcttctcttttcttctccctgctgctgctgctcccgaccctgccccggccgtggtacacgagatccgccgccgccaccggagtcctcgtcgtcgctgccggctggagagcgtgctgttgggggaggtcacgccgggctcctcgtcctcctcgctgcagctgcgccccccccccctcgccgtcgtcgtctccgccactagcgctggccggttcatgtcaatcccccgcaggaacggcatctcgacgtcgtggcacgccatcatcaccgtccttccccgaccggaggagaagaggccagcgccgccgttccatccacacagctgttgcggctgcggggcagcaccacggcgcgatggcggctcgtcggctgaagaacgaggagaggataaaaaggaaaagagacggggaagagagagagatcgcggtgatggccggagaagcggaggatggcgacggcgagaggttgcggctgttcgtcagccaggtgccctgcagcatggcggaggaggagatcctcgccgtggaccgtgccgctctcgtgccaacgacgccaccgtcatccgcgactaagctgccgtgttcacgtttcgaaggtgcctccggaagtccagatgacaacttggatcgccctgccaccgccgcggagcctcgaggcggccacggcgtcgtgcacggcgacggacagcgccgtcccgtcgggaggaaggcggctgggccccgcaggaccggacgctcctcctcctccgcctcttcctcttcctcccccttcgttctccacacccactctcgggctgcggcttctccggcttccgcgcctcttcctctgtcgggttaacaaagttactttcagcgtcagagggtatttcgtacaaaaaggaactgctgttggtacaggattatcagctgtgaacactttctgtttctagaggccattctctgtaacactttggagcatcaattttgtagcgtgctatcatggactactctgctggttcctacatgtggcctggcaattcaggttctgagaactataattttgttgacggttcgtcggaatcatatgcagaagaaggaagcctaccaccttcaggctatttcatgggagctggatcagatcgcagtttaaagatcacggagaatgaaaggaaccccactatgcttgcaaatggatgcttgccatacaacacccaggctcatccattatctggccagattctacctaagggtgagctccctaacaatcttctggatcttcaacagctacagaacagcagcaatctgcgaagcaattcaattcccccaggggttcttcagtgcaattcaacatctggaacatttgatgcgaaattggatacacctggtcttgcagaactgcctcatgctttgtccagttcaattgatagcaatggtagtgacatttctgcttttcttgctgatgtgcatgccgtttcttcagccccgacgttgtgttcagcattccaaaacgtttcctccttcatggaaccagtaaatctagatgctttcggtttccaaggggcacaaaatgttgctatgttgaacaaaacaagtcttccaaatgggaatccctcgctgtttgataatgctgccatagcatcactacatgatagcaaagagtttctcaatggtggttccatcccttcgtttggtactgtcctgcaggcactaggagcgggtggtttgaaggctgctcaacaggagcaaaatatccggaatatacctctccctacattcacatctggtagtcatttggcagttactgatgcacaagggccaccacttccttcaaagataccaccattgatccatgaccataatagtgagtaccctattaaccattcttctgatgtggaaccccaagcaaattcagctcctggaaatagtgccaatgcgaagccacgtacaagggctcgccgtggacaggcaactgatcctcacagtattgctgaacggcttcgccgagagaaaatttcagaaaggatgaaaaatctccaagtccttgtcccaaactccaataaggcagataaggcatcaatgcttgatgaaataattgattatgtgaaatttcttcagcttcaggtcaaggtattgagcatgagcaggctaggagctcctggagcagttcttccccttcttagggaatctcaaaccgagtgccatagtaatccatctctatcagcttcaaccatttcacaagggccaccagacatgccagactcagaagacagctctgcctttgagcaagaggtagtgaagctgatggaaacgagcatcatcagcgcgatgcagtatcttcagaacaagggtctctgcctgatgcccattgctctcgcttcggccatatccaaccagaaaggcatggctgctgctgctgcaatccctcctgaaaaatgaaaaaaaaaatgaaatcggaaaaatatggggggaacaactgcagaagacataataactcaacggctgcagaaatgtgctggacactgcaggttttgtgaatgaagtgaaatccaatccagggggtcataaaacataggaagttatctgactaattcaggcttatgacacaatctactctatagtctatagctattgtgtgcctgttgcacatcagttgatgtgtattcttttgttttttttgtattgcatccggatgctaattaggtagtagtgtttcctttgatgtacatgagtattatctatgcggttttatctaatgtgcatataaagtaaaatctggtatgttgctgctaaaaaaaagtattatctatgcggttttatctaatgtgcataaataatactcatgtacatcaaaggaaacactaccctcgtgc

SEQ ID NO: 45089 - DNA, 327 bp, Oryza sativa
  Clone ID: PAT_MRT4530_48088C.1
ccacgtggcgcctggggtagcctcctccctctagttcggctagggagtggccaccgccctacctcgggcccgacccctctcgggggagggccacgtggcattggggggcagcctcctccctctaaacatgatacccccgggcccatatcaccgacagtagcccccggcgttagtcctaaccaaaacctttcccagccagcaatcttcacccgcgatcaagccaagctgggcgccgtagccagccggcggggccagagccaattgctacggaagagccagcacaggggccccgggcgtcgaggcgtccagagctcaacgcaaggctag

SEQ ID NO: 45090 - DNA, 381 bp, Oryza sativa
  Clone ID: PAT_MRT4530_48089C.1
ggatatgaacccaggacaccctactggccacgggcgtggtttatgaaacatatctgcgcttcacaaactcatgcttacgacacaactgatatctgttagcagatgagccgcaccaaccaaactcctcacctgacgaggctccatcactaagcggtcgaaggatctggaggacaagagcccaaggatgggcacggcaccacatctggtctactgacatactgagataaacggaaaatggggggagtgaggccagcgccgagggtctcccgcaaagactactcctcctagcaagacagcagacgagatctacagggatgcataacacggactcagtccaaacgtttctgcgcaaagctctatgcgttgaatggtgaacccttc

SEQ ID NO: 45091 - DNA, 567 bp, Oryza sativa
  Clone ID: PAT_MRT4530_4808C.1
aaacaaactgatgatcagcttgtttgatttgaatggtctcaggaacccatgatcattgacaccacacgggtgcatacagcggaatacccatcgcgcagaatgaacactaccaggaactaccctatagggttaccattaccacttgtaaataattatgattcaatattgacggcgaaaagccctacactactggtcatacatgcttctaggcactgtatgaaggcatccatcactaggtggccacgaggatcctgattccagccgtatccttaacatctagacgcaattctactttttggcacagatctccatcctgaaagattcccgccgaattgacaccccccaaacccggaatacggtcctgattcttttataggagcccatggagtatacgttcatttatcttatgcgtcccacttgtttgtgtgagcaataacagaaatacaatacctggggataatggctgggcttgctgaaccgtagaatattgatatggtactaagcaatctcggtgaaaccctacaggaccctggatctcctgaaaaaaaggtgaggtaccaggtgggg

SEQ ID NO: 45092 - DNA, 458 bp, Oryza sativa
  Clone ID: PAT_MRT4530_48090C.1
aaaaaaacaatcttccgggccaaaagtttttttttttattcggctaaaaaaggcaggggactttagccattcttcagccatccgagggggatatattcccattttgacagaagcttcatcaagggtaaggaaggggacaaccctaagcttgatcaaagggcaaaaactgatacaatactgacgggggaacggggacacttttcaagctgacaggggtgaactcaaacttagcagagggggaacaaaggttcttcataacgggcttcataaaaagtctgatgatatggcaggcttgaaaacatttggttggaagggacagggctaggaacttttttgcaaaaaacaaacttcacaatgttttcttttcaggggaggggggattggggaaagaaaatatgccccttgccccaggttttcctgggacccattttacagacagtaacagagctccgaacctc

SEQ ID NO: 45093 - DNA, 2116 bp, Oryza sativa
  Clone ID: PAT_MRT4530_48091C.1
tttcttctccttccctgaatccaccatggcgccgtcggcgtcgtccaccggggcggtactactcttcgccatcgccgccgtgcttctcctcgccgtccgggatggccattgcgcgcaattgtgcatggattcaacgttcccgaggacggtgaacggatcgctcaccttctgcggctacaatggcacggcctgctgcaactcgacggacgacgccgccgtgcagaggcagttcgccgccatgaacatctccggcacgccgtgcggcgaactcgtcaagtccatcctctgcgcgagatgcaacccgtacgccggcgagctgttcaccgtcacgacgagcccccggacggtgccgcggctgtgcaactccaccggcgtcgcgagccggctcagcggcggcaaggcggcggcggcggcggcgacggactactgcacgacggtgtgggacacctgcaaggccgtgcgcatcccgggctcgccgttccagccgccccgcggcggcgcggcggcgccgacgctgaccgacgtgtggcagtcgtcgggcgacttctgcaccgcgctgggcggcgcgccgggcggcggcggcgcgccgtgcttcgacggcgagtccgcggcgttcgacgcgagccgcgtcgcgccgccggcgagcggcatgtgcctggagcgcctcggcaacgggtcgtacctgaacatggcgccgcacccggacggctcgaaccgcgtgttcctcaacaaccaggccggcaaggtgttcgtcgccaccgtgccggcgcagggctccggcaagccgctgcaggtggacgcggcgacgccgttcctggacatcaccgacgaggtccacttcgacaacgagttcggcctcctcggcctcgcgttccacccggagttcgccaagaacggccgcttcttcgtctcctacagctgcgacaagacgcagtccgcctcctgctccggccgctgcgcctgcaactccgacgtcggctgcgacccttccaagctcaccgccgacaatggcgcccagccgtgccagttccagaccgtcatcgccgagtacaccgccaacgcctcctccggctcgccggcgacggcgacggcggcgaacccggcggaggtgaggaggatcatgacgatggggctgccgttcacgacgcaccacggcgggcagatcctcttcagcaaggccgacggctacctctacttgatgatgggcgacggcggcagcgtcggcgacccgtggaacttcgcgcagaacaagaagtcgctgctcggcaagatcatccgcatcgacgtcaacgcattgccaactggcaatagcactgcaggctggggaaactatgtcatccccaaggacaaccccttctccactgactccaagtttgcgccggaggttttcgccctcggcttcaagaacccgtggcggtgcagcttcgactccggcaagccctctgacctctactgcgccgacgtcggacagtcgtcgtacgaggaggttgacctggtgataaagggcgggaactacgggtggcgggtgctggagggcacgacggcgtacctgccgctggcgagccccggcggcaacacctccgccgccgacatcgacgccatcccgccggtgatgggctacgcccacagcgccgtcaacaacaacgtcggctctgcctccatcaccggcggctacgtctaccgctccggcaccgacccctgcctcgccggccgctacctctacgccgacctctacgcccagtccgcctgggcgggcctcgagtcgccgccgggcagcggcgcgtacgacgtcacgccgctgccgttcgcctgctccgggaggtcgccgatcccctgcgacgccgccgcggcgaggagcacgctgccgtcgctgggctacatcttctccttcggcgaggacaacgccggcgacgtctacctgctcaccagcaagggcgtctaccgggtggtcgacccggcggagtgcggctacgcgtgcccgatcaagagctccgcgccggggacctcgccgccgccgggctcgtcgccgagcggcggcgccgccgccgccgtcgtcccggccgccgcggcgacgatggcggcgctgctgctgatgggagcgttgcttgcactctga

SEQ ID NO: 45094 - DNA, 288 bp, Oryza sativa
  Clone ID: PAT_MRT4530_48092C.1
atggcaacggatcaactgttcttcgtcttcctgcttcctttggcattggagcgtgtgcagaagaagaataacctcctccatgggatgtccggcagcgtgatgttcagaaaaggcctgtacgggacgctcgtctgcctccgcggcggcacggtgcactgctccaggctctccaagcttacctcatacacagttgcgattcgcatccaggtcaagacaaatgcctacgaagatactacgtatactggcacgatcgagagcttcagacgcattgtcattgatgcgatgtga

SEQ ID NO: 45095 - DNA, 261 bp, Oryza sativa
  Clone ID: PAT_MRT4530_48093C.1
tttcttgacatgatcggggaggtcctaaacagctggggattgtttaataatcataagggtgccaaggacctgaccagatctggtcaaggcccactccctggatgagaagcccacggtccaaaattgctcatccaccatgatggtcttactgacttggatgatgatgacaataacctgtgggctccctctaacccataccggcacctagtggagcatcctccttatagacccaaggcacacgtgaaaaatcaattgttgcac

SEQ ID NO: 45096 - DNA, 601 bp, Oryza sativa
  unsure (1)..(601): unsure at all n locations
  Clone ID: PAT_MRT4530_48094C.1
tctgaatcttagcaaccncggctgcaggaatgcggcacgagctctctcttctctctctctctctctctctctctctctctctgtgtgtgctctctctctctctctctcacacagaagaaaatgagacaaaatcgatttgtctcatcatcacgtcgaaaagctcgtaaacgttattttatgcaccatcgcatattcgtcgtcgtttaatgagcgcaccattgaataaagaactacgacgacgatacaatgttcgtagtttacctattcgaaaagatgatgaagttgcgatcactcgtggccatttcagagggcaaccatcaggcaaaattacacaagtttaccgtaagaaatatgtcattcatgttggacgtataacacgtgaaaaagccaatggaaataccgttcacattggtattcatccatcgaaggtgcaaattaccaaaatcaaattagatcgtaatcgtcgtcaaattctcgaacgtcgtgcaaaatcgaaactattccggcaaaggcaaacataccgaagaaagcattcaacaagcaccaatggaaactcagcttataagaaacaagaacagccccaatggtatatgggggtctn

SEQ ID NO: 45097 - DNA, 294 bp, Oryza sativa
  Clone ID: PAT_MRT4530_48095C.1
atggcgagttctcgccgcttcaatcccggcggtcgccgcctcgccggggcaggagaagagaagatcaaatctgcgggcaacgccgccgtcgtccccgtgccggagcctctccgtcctcatgctgcactgctgcagcacaacccagcgctcggcgacaaccccagtggcttccttctcggacggccggcgagcttcttctgcgcgcggacggccggcgagctcctcccctgcgcgcggccagccggcgagctcctcccccgcgcgctgccggtcgacgagatcctcctcgcgtga

SEQ ID NO: 45098 - DNA, 151 bp, Oryza sativa
  Clone ID: PAT_MRT4530_48096C.1
atggggctattattggtactgatagaccacaaaggatcacttcattttgctagacctaaagacagaatgctcatgcagctaacgaccccaaagagtgtggaggtattgaaagaagttgatgctcagggccagaaagagatggaggtggctg

SEQ ID NO: 45099 - DNA, 382 bp, Oryza sativa
  Clone ID: PAT_MRT4530_48098C.1
gcgcaacaaactgccccgctatctgttcattccatcacacaacacttgggtagtttcaatggaagttacaacacattgggactactcatgcgtaaaaacatttcaactgccgggtttgtacaaaaatgagcaccaatgttccctcaaaaaaatttatccggggaggaatcattcatcggggtacagggttttgcttcatgggaccatgaattcagccactcctaaaatatgggcaggtatatgtctatttttcggtgatcatgcagagggaaccacccccaacatttcgctccagagggtacctgggggcacctctcatgtactccaaatgcttcaaggcagcatgggggacaacaaaacttttttgggggggctttccttt

SEQ ID NO: 45100 - DNA, 438 bp, Oryza sativa
  Clone ID: PAT_MRT4530_48099C.1
tttttgttttttttttttttttggtttttttttttttttttttttttttttttttttttggggaaaaagttttttataacaaacaaatcaactccattcaatcacataccccaaaattgaaaaaaagggatgtcagttgacaacatataagcttcactgggcccgcttggaagacaattccaagataactcctattggtttcagggaacagaacccaacttggaaattaattaacaggagccaagtagcagctcattattttttactagaagggggccaacaaagtagagcaacaaaaaggggaaacgtcaaacccaccgagaatagaagggccctaagattttaaaccctgggggcaatggaatctcaaccggtgagcaatttgttctcttccaaaaatgagaagggcgggacctccagggttgatggggccaggcc

SEQ ID NO: 45101 - DNA, 397 bp, Oryza sativa
  Clone ID: PAT_MRT4530_4809C.1
tgtgttttttttttttttggggttttttttttttttgttttttttttttttttaggggcacaaaaaaggacacggacacaacaaagggggggacaacccaaggggggggaaaaaaaactctatcgagaatgggaacaattgggcttgggctaaagatctggtcaaactaaggactccaggaacaacctaaaccatacttagaccttggtgccattggtatgggcgccatcaccaccaccatttttaaaaggaacggcgatgttcctgacggggcccttgaaccacctcctgggggggagcccccaccaaagcccgatgaggccgaggcaggccccaagggcgacgggggggtaattgaagttgccggcgctgaacgggtcccgccctcggaggggga

SEQ ID NO: 45102 - DNA, 1080 bp, Oryza sativa
  Clone ID: PAT_MRT4530_480C.1
tctctcttcttcctaaaataaaggatgctgacaccatcaaaaagtttaggccaaaattggtctctgggggtctaacacatcttcaatacgctgatgatacaattctttttgttaagactactgatgagagttttggctctaaagttttctctactgttttgaggagatgtctgggatgaaggtgaactatcaaaagagtgaagtgtatgtgttgggggtgggtgaaactgaggaactaaggattgccaacatgctgaattgcaaagtgggttctatgccttttgtctatctcggctttgcctatgagtgtggaaaaaattgggatgagagagttctgtcagatcactcataaggtagaaaagaggctgcaatcatggaaaagtgggtatttaactgatgggggcagggagatcaaaataaactcttgcatgtctagtgccccaatgcatgcaatgggcttttatttccttcctgaaggatttcatcagaaactggacactctaagaagtgatttctattggcaaggggtgggagataagaaaaaaaatatcatttgataaaacgggatgctctgtgcagaccaaaagaatatggtggtatgggctttttaaacactaggatcatgaacatttgccttctcagcaaatggatttggaaattggacaatggggattctgacatgtgtcttgaggttcaaaggaagaaatatctaggggatgatagtttcttcaatagctctgaagcagggggttctcaattctggaaagggttgcataaatgtaagaaatggctgtttaatttggttataaatgaagtacactgtggacagaaggttaatttttggaaagatgtgtggttgggagagacctttttgagaataaggttccctgaactgtatgaaatcagctatgaccaaaataccagtgtaaaggatatgtgtgatttaggtgtttggcgtctcaacttcaggagaaatcttgatgagcagagaaaaagagatgtgagggagttaagagagttacttagcaccattcatttggataaggggagggatagactgttatggccttttaatgaaaa

SEQ ID NO: 45103 - DNA, 2067 bp, Oryza sativa
  Clone ID: PAT_MRT4530_48100C.1
atgaggccgaggggttttttactttacccattgccctcccacctgctccccctcctgccctcccaccctcttgtgcgcattccgtcgagcacgtcgcgggcgcacctcccgccgctgcctcggcttgccccaccgcggatcgcagagcgaagcatccccgctaggctactaaagatgcctcatcatggtggtaggaagaagaagaacaagggtgggaaggggaagcctcggaagaagaccgacgaccgcggagaggccaatgtcgggtcgggcgacagctcgcccgccgtccgcgtcgaggaggaggcggaggtggaggcggaggcggaggtggggacggcggtcgagccgcagcgctcgggaacgttggcctcgcccactgacgtcgtcgaggcagcccaacacggccagcggcagcagcaggcctcccagtcccaacagacaccaagccctcgaagttatgcagctgcagtggtgaacaaaagagaagatgaaacagttggctacaacttccttcagttccttcgaagcttcacagtagagcacagagaagggcctttctatgctggggaactaaagagtatggtctatcagaacagcaaaactttttgtgtctactatgggcacttccaaggacaatatgcaaacctgggtacaaaaatatccaactcatatgcgagggtcgtgggcttcttgcgaagtgctataggaagattcatcaccgaatatgaacttgatgatcaatggagagaaatatcaaatgaccccccaaagattcatattgatgccctgcccccagctggaagcattgtttcacttcaatatttcctgggacaagcacataacaaacttgtggagactgcacgcatctatgatcccaatggtagcttagtcgctgatagtactaagctgggaaggagagtgttcctagggttcctcatatatatcatcaatcagcataaagatggacgcagttggtgtggtgaattttctattgatgatctactagtcagaaatgaatcaacatttggaatcacgaaggcagcttcttcccatgcaagttgtaaagcaatggctaaggatctgaaacagttggcaaagatactagagaaacactttcgcacagctcaagggcaggtccctggctacttcattaagcttttttctgaactaaaagagagcgcaggagagctcgggcagtacaactcagagaaaaccaggaagttccataagtatctgagttcgcatcttgcactcaggtctgcgatgtcaaggaggcacctgtttatggatttgttccgagcgtaccagctacttgggaaaactgcaaagaaggatttgatatcccttctaggatccatgtttccagaagataaatggcttgaccaagtagacaagcaccaaatgtttataaaagtatctgagtatggcatcgtggaaggtgacgcagataaggcatccaacagtcaagatcagaagaagaaaagatcatacagtggcgatcttttagatttgctggtgtttatccgccacgttactgagcacggggcggatcacacgaaagtacgggcatatgaaatcttaattttctctttcatttcatatatgtgcaagttcaatttcctgacaagtgttcaaaactttgtctttaaggatgataacatggagcaaaaactcaagagtttggttgaaattgacttgataattgctaagtatctttcggctgctgttgtagaccttatcaaggctttggtgaagagtgacttgctaaaagacacgtactttttcttctcttgttttctgacccgtggaatgcgttttctaattcttcctaataggtcggccaaaagattcggtcgaccaatttcattaaggaaaaggattttggaaaacattacaaagaagcttacaacgacagtacgctgtcgagatggagaagggctaggccctcatcccatcagctcactggagacacagagctccctggccatgaagaacagctcatatgctgaagaaacagataacctcccgtcaggtgttggcccatggggtgtaatactccgttga

SEQ ID NO: 45104 - DNA, 1192 bp, Oryza sativa
  Clone ID: PAT_MRT4530_48101C.1
gcacgaggacttgacttgcccttgtctctgtataaagagatctcaagctgagctcagctcacacgacgcattagccttagcttgccagcttgtgtcatcggcggcggcggcgatggacgagtcgtggaggtgcacgatggggtcggtgctgccgcggcagaggtcgtcggaccaccacgccggcggcggcggtggcggcgggcggcagagcctcgcgcccgacgacttccgcgacgtgttcggcgggccgccgcgcacggtgctcctccgcagcttctacggcggcgaggccgccgccgagagctaccactccccggcgatggcgcagcagcagcaccaccacgtgtactacggcggcgccgccgacgcgttctgccgccggggcgccgcggcggcggcggccgtcgtgcccaccgaggagggcttctttgacgacatcttcggcgccggccgccacgcgaggtcgaggtcgaggtcgacgaagtcgtcgtcggtggtcagctccgacgagttcggcgccggccccgccttctaccggccggcggccgcctcctccggctgccgcggcggcgacgccacgctttcctccttcgcttccaaactcaggccgatcgcgatcccgtcgcggcggtacgactcgtcgccgccgtcgacggcgtcgacgagatgcgactaccagagcagcttcacgtgctcgacggcggcgtacccggcgtcgcgctgctactactacgccggcaggacggcggcgacgaaccacagcagcgcggcgagcagccacgcggcggcgcagcagcaccgtcaccaccaccgcggcggcggcggcttctgctgcttcacgtccaacccggagacgaccagcaacgggcacagcttccggcggacgcgcgccggcggcaggagggcgcggtcgccggcggtgaccgacaccgacacagcgaccgagtggtcccagtactctcacgccgactacgggtactactactcgccgccgtccgccgcgtcgtcgtcggcgttcggcaacccgctgccgaggacgccgcggcggctggaggaggtggtgatggaggtgagggagagggcgccgttgctgatggacgacgacggcggcggcgacatcgacagcgtcggcgccgccgccgtggacgaggccattgcatgggccaaggaaagattctggagccaatcctag

SEQ ID NO: 45105 - DNA, 370 bp, Oryza sativa
  Clone ID: PAT_MRT4530_48102C.1
atcatccatggagaaatgccactcagaagaaagattgctccatatggactgatgacagattttgaatgtctaagggttctagatttaagcaacactgacattgtggaggtaccaaagtctattggaagcctgatacatctgaggtaccttggtctggataacactagaattcagatgctgccggagtcagtaggtgctctcttccacttacagacaatcaagcttaaccattgttcctcccttactcagttgccccacggcagtaagctcctgcagaacttaagatgctttgagatagcacattccaatgtacagatgccatctgggatcagagcattgactagcctacagaagctacctgtttttgtcg

SEQ ID NO: 45106 - DNA, 305 bp, Oryza sativa
  Clone ID: PAT_MRT4530_48103C.1
ttgggttttttttttttatgggatttttttttatttggtatgaagttttattattctttaaatgtagggaaaacaaaaaagggggaaaactgggcaaggaaaccaagaaggacacaaggggatacaaaagacaacgagccaaaacaaaagggaggataaaaaaaaggcttaaggatgagaaagagaaaaaacaaacgatctcggagacacgcggtgccaataagatgcatgaaagaaaggggagataacgttcaagggggctggttgggcccccacaaggaagaaacacgagaccggtgagacaa

SEQ ID NO: 45107 - DNA, 541 bp, Oryza sativa
  unsure (1)..(541): unsure at all n locations
  Clone ID: PAT_MRT4530_48104C.1
tgtaaaagatgtgggggggaaatatgggatggatttgacccgcacaaaatgctgaggttttaactggccacagcgcccaangatgtacctcggtgatgtgtggcgcacgtggggtgcaatnatntgattgtgtgtgggagtggagaaatgggattacaacgcattgtgggtgcgcaaaaggcacacacccacaaatgcacacacaatgttgtgggggaaactgtaaggatgggaagatggtctgtagcgcaatgacccaatgtgtgctgggatagatgaattgtgctccaggggaaggttatgtagacgaccggaggatagacaatgaggaacacacatgaggaaccagggacactggatggctggtgagtgtgtggcgcaaaccctggacctgattgtggttgggtgaaaaaatgacacaatgcccaagcgcaaaacctgcaatgatgtgaccacaatgatgtggggactgcacacactggtgtggtgatggtgtctgagtgtgcaaacacacaatgacacaagttgagtctgatgtgag

SEQ ID NO: 45108 - DNA, 201 bp, Oryza sativa
  Clone ID: PAT_MRT4530_48105C.1
atgttggcggtggcgaaggagctatcaaaggtgagaaagatgattgggtgggggacctgccatctgcacggggatagggagggctcgccagcgccattgccaccttctggtcagccggcaaggccaggaggtggcgcatggggtggtggaggtgttggcaacttttttgacaagttgacaagcacgatcgcagcaccttaa

SEQ ID NO: 45109 - DNA, 245 bp, Oryza sativa
  Clone ID: PAT_MRT4530_48106C.1
ccacgcgtccgggccaccggccggtagggagttctcgcggttttgtcgttcgatcgatcgatcgtgtccatgctgctgcggctgaaggccgtcgccgaccatccggcggcgctccttgggcgaccgcgcagccatgacgcaccccagctcgtaggccgcacgggcgcgtcgacgacgactgcgaggcggagggcggctaggcgcgccgtgacggtgacgatagcgctcaaggcggagccgcaagg

SEQ ID NO: 45110 - DNA, 648 bp, Oryza sativa
  Clone ID: PAT_MRT4530_48107C.1
tcgaggtcgacccacgcttccgggcgaggccacacgattctcctctcccttgccgcttccaacaccaagtctcgccgtggccaggactgagctagggtttgcgtgatcttcgggaggagggagcaggagagagttcgaggaggaggaggaggaggagaagatgatcgaggtggtgctgaacgaccggctggggaagaaggtgcgggtgaagtgcaacgaggacgacaccatcggcgacctcaagaagctggtggcggcgcagaccgggacgaggcccgagaagatccgcatccagaagtggtacaacatctacaaggaccacatcaccctcagggactacgagatccacgacgggatgggcctcgagctctactacaactagacaccgtgcctctggctggtctgaattctagtctcatggatggcgatctgttgattatatatgcccatttgagcggccagcgtccgtagctcatatataaaactctagtgagctgtgtagttcgttgtgcctatgactgttaacttcgaatatgtcgttgtagtatgatcaaccagcagatgtgttgtatttgaggttctgctactctcataacataaataacatgttatgaaactttgatcaaaaaaaaaaaaaaaaaaaaaaaa

SEQ ID NO: 45111 - DNA, 144 bp, Oryza sativa
  Clone ID: PAT_MRT4530_48108C.1
acgtccaggctatctagctgtaatggtacaatgcttgcacagcctatctggctccatcggttagctgatcacccactacgtctgcatacatggcattggagatggcgccacgataattcactgaccaactttgatggtgctggt

SEQ ID NO: 45112 - DNA, 1759 bp, Oryza sativa
  unsure (1)..(1759): unsure at all n locations
  Clone ID: PAT_MRT4530_48109C.1
caacatggagagcatatcgtcatcgtcggcttccgaaaaactatttgtgcaggggagcagaccccatctttgagaagattgatcaccctatcttgctcatccttgctcttagggaatacacattctgttgaagaacgaggtggaaaaatgcctaatgcttcgcagtattcacaaggatcgtcgtatttcagaatgatcgtccccaggttgggagcttgctgcatcacaaccctgatgaactctaactgttgttttagtggtctaaaagcaacaatttggagctctttcagaagagagttcctgaagcttgtaacatcaggcgctttccatgcaggattcggtctctccccaaaaacttttggttcccggtcaacatcgcatgtgtgctcccatatctccccacgcgtccgcccaagcgtaagcccacgcgtccgcccacgcgtccgcccacgcgtgcgaggacgcgtgggcttgccgcttccaactccaagtctcgctgtgatcaggagctagggtttgtgcgatcttcgggaggaggggaagatgatcgaggtggtgctgaacgaccggctggggaagaaggtgcgggtgaagtgcaacgaggacgacaccatcggcgacctcaagaagctggtggcggcgcagaccgggacgaggcccgagaagatccgcatccagaagtggtacaacatctacaaggaccacatcaccctcaaggactacgagatccacgacgggatgggcctcgagctctactacaactagacgccgcgcctctggctggtatgaatttagtcatggatggcgaacagattatgcccatttgagcggccagcgtccatagctcatatataaaactctagtgagctgtgtagttcgttgtgccaatgactgttgtcaactttgaatatgtcgttgtagtatgatcaacctgcagatgtgttgtatttgtgttgctgctactcataacataaataacatgttatgaaactttgatcaagtctcaaaaaaaattaaaaaaaaaaaaaaaggggggtctatatctccagagaaagagaagaactctgtgatctccctttttgaagcattcaatgaaatgttcagattcactttgcatctcaacatattctatatctccagagaaagagaatatgttcagattcactttgcatctcaacatattctatatctccagagaaagagaagaactctgtgatctccctttttgaagcattcaatgaaatgttgctaacttttactgtcctgacctgcaaaaggaaatcaaataagagtagaggggatgatatcaatagtgtgattcggactccagcacagggcagtacaatatgagattatgggctagcatgattgtaccactcaacaatagagtcaactcattgtagcaaactaaattaagtaaattgtttcccagctcatctttaacagcaaaagactttagccccaagcaagttggtgtaggctagatataaaacccaagttgagccacaagaaacaaaagactttactactgataaaaataggtgcatggtactagttaaagaaaacacaattttctaggtcatggttccgcatgtggatcataaattttcacatgcccctctccaaagccaaatctttggagtttggatgcattccatgccttcaaatctcttctaactgcttcctcccatttcagttttggctaaagcatgtctcttctagtaccattgacatggctntaggatcataaccatgcacc

SEQ ID NO: 45113 - DNA, 116 bp, Oryza sativa
  unsure (1)..(116): unsure at all n locations
  Clone ID: PAT_MRT4530_4810C.1
cgggatctgttgcagcaatcaaacccctcaagctgcaggntatcattgaattcttcaagcgntntcccaanngtcgatattgattacgaagnccgcgngggntctngatatcaann

SEQ ID NO: 45114 - DNA, 1040 bp, Oryza sativa
  unsure (1)..(1040): unsure at all n locations
  Clone ID: PAT_MRT4530_48110C.1
gcacgaggcgaaaccgcgctgtacgtgtctgccgagaaggggcacactgaggttgtgagtgagatactgaagttttgtgatctgcagtcagcagggctcaaggctactaacagtttcgatgcgttccatattgcggcgaagcagggccatctggatgttttgaaggagctcttacaagcatttccagcattagctatgacaacaaattccgtaaatgccactgctgcgcgtgctgctgccactcagggccatattgatattgtcaatcttctgctggaaacagatgcaagcctagccagaatagctagaaataatggcaaaacagttttgcattcagcagcaagaatgggtcatgtggaggtggtaacagcattgttaaataaagatccagggattggttttagaacagataagaaaggacaaacagcactgcacatggcttcgaaaggccaaaatgctgaaattctgcttgaattgttgaagcctgatctctcagttatccatgtggaagataacaaagggaacagagcattgcatgttgcaactcggaagggcaacaccgttatagtccagactctaatatcagtcaaagagatcgtaatcaatgcagttaatagagcaggagagactgcttttgctattgcagagaaactaggtaatgaagaactttctaacatcctgagagaggttggtggtgaaactgcaaaagagcaagtaaaccctccgaattcagcaaagcagcttaagaagacagttagcgacattaggcatgacgtccaatctgggatcaagcaaacacgtcagaccaagatgcaattccaaaaaatcaagaagaggattcaaaagcttcacattggtgggctaaacaatgccatcaactccaatacttgttgttgcggtgcttattgccacagttgcctttgcagccatatttactatccctggtaattnntctggaagatatggaaagatccacatgatcccaacatgaccttagggcaagcatttgtagcaagcaatcccgcatttataatcttctg

SEQ ID NO: 45115 - DNA, 1692 bp, Oryza sativa
  Clone ID: PAT_MRT4530_48111C.1
cggcgggccccgggctgcaggaatcggcacgggtggaagacgaagaggaatatatctgagtagtggagtccaaggaaaggaaccaactgaccttagcttagcttaccttagctcaaccccaagcttgaagcttccactataagaactcacccagccacacggctacttggacgacgaagcagcagcagcagcagtaaacagcatcgctcgctcgtcttcgtcgtcgtcgatcggctccggtgagggtgatcggtcgccggcagaggcttctgatgctggagaggccgccgatcctgaagagataccgcgcaccggggtgggcagtggtggctcgctggaaatgtcgtcgcagcagcagcacgccggtgaggcccccgcctccgccgccgccgctgcccgggcgcggctcaggtggaccgggcagctgcacgagcggttcgtcctcgccgtggcggagctcggcggcgcggacagggcgacgcccaagtccgtgctgagggccatggccgtgccggggctcaccttgtaccacctcaagagccacctccagaagtaccggcaggcggtgagccgcggcggcaatggaggcggcggaggcagcggcagcctgaacgaccggtcatcctcgtcggagcgccaaccagccgaccacgacggcgatagcgccgccgatgagccgcgcaccattgcttacgacggcgacagcgatggcgatgctaaagaaggtctccgtgattcatccaggagcatggtgcagatgcagagggaagtccagaggaagctccaggagcagattgaggtcaagaggcatctgcaactgaggatggaggcacaggggaggtacctgcagtcagtgctacgcagggcgcagcaagtcctggccgaccatagcctggcaagctcgccggaggccgccacggcggagctctcggagctcgcctccgccgtggacatcgagtgcatgtcctcctcctccccgccgcggcaccaccgccaatccgccgcaaccgacagctgcgtgactacgacgtcgtcgtcggaggccgagagcaaggccgccgggtccaagcggctccacaccagcgattgcaccgtcgagcagccggtgcagggcaagagggccttcaacttcctgcaaaggcacaaccaggcagatcaagaagaagaacaagaagaagaatatgcaggagcagaggatggaagctcatcagagattgatctgaacagttagaggcagaggaggaagagaagcagcagaagcatctgtgatgatgtgctgctgtgcattgctgcagtggatgattggtggggtggccttcaaggctggggccaagcaaccaggcttttgagcaatgtctgcctgctactgcaacagctactgctgctgctactcctcattctatgatgatatatgttttgctttaacttatatatatatatatatatatatatatatatagctatgcaagcatctggttcttgtgtttcacgtacctgtaaaaaaaaatggaattcgaattggtggctggcccagctgcagatgcatgtggcatgcttgaggtgcaagaatatatagaactgtagtagtgtggattatgcagctagtgaatgatgctttagggaccaatgggatttccatgaaagatggaattggtttgcagtgtaatttaaagagcaaggttgatttttccc

SEQ ID NO: 45116 - DNA, 375 bp, Oryza sativa
  Clone ID: PAT_MRT4530_48112C.1
ggatcaccaacatttgacctaattgagtttcaacaaaaaatgccaaaatgcgaatttctacatgcaccactgtacactgaatcttaactgataacaattctggaaccagcagttactcgaaacgtcaatcgaaaaccatctgaatttttttaacatgaacaaaacaaggccaagatggttaacatatacagagtaggagaccttgcctacgccaatatgatacatgtgtagaatttggatgaactacacataacaaaggacaaccttattgccttagaacgagaacaaggggtgacagaaccaatattggctcttcaaagtttgatgaggtaattggaacggctgtattgctcttaacctaaaactaaactaatc

SEQ ID NO: 45117 - DNA, 540 bp, Oryza sativa
  Clone ID: PAT_MRT4530_48113C.1
atggtggtgctccacgtcaggtgggctgcagcctcctcctcctcctcgccgccgccaccgtcatcgccggaggaggaagagatggagttcctccacgagtgcgccgcctccacccccgtcgaggacgtggcggccgcgctcgccggcgtcgcggcactccaggcccgcctgctctccctctgccgctcccttcgagagaggggcgcggcggcggcagcagcggcgggtgaggtcgagagggcggtggcggaggctgaatcctacgcctccaaggagcaagtgcggtacaacagattcttatcccctcgtgctctaagggagcatatcaagaacatcgaaaagacagctgttaccgctctacaggagtctcctgaagcgttgtgcctgcaacagaaatcatcaggcgacaagcttgagaatgttcaactttggtgggctggaaaagagctggccatgggcaagaagttatgtgactatattggtgttaatgacaaaacaaagattatcatcaggttaaagcatgttcctcaatcctcatga

SEQ ID NO: 45118 - DNA, 285 bp, Oryza sativa
  Clone ID: PAT_MRT4530_48114C.1
atggcagtcgggcacaaggggcacggcgcagtggaggcaggagaccgtggcgacggaggccacagatggatgggggccaagctggaggaactcaacgaccggccgaaggggagctcggtgcagacagcggccgcagcttcctcccggaggtggagcgagcccctcccgtcccctcacggcggcgagccggcaactggttggtgggcgacggctgtggaggatgctgactgccgagggcccaaggccgaggaggctgggactgggaggagaggcggctggaactag

SEQ ID NO: 45119 - DNA, 1266 bp, Oryza sativa
  Clone ID: PAT_MRT4530_48115C.1
atgggaaggctagtgacaacactgctcgtgctgtgcttgatctacgtgacgacatgttcgctctcgacgcgcacggcggcgttccgcgcgcacgacctccggcgaggtctagagcaagccatgcgcggccgcctcctcgccgacgcgacgccggcaggaggctcggccgtgcccatccactggtccagacacctctacaacgtggcgaacttcaccatcggcacgccgccgcagcccgcgtcggcgatcatcgacgtcgccggtgagctcgtctggacgcagtgctcgcggtgcagccgctgcttcaagcaggacctgcccctgttcgtcccgaacgcgtcgtccaccttccggccggagccgtgcggcaccgacgcctgcaagtccaccccgacgagcaactgctccggcgacgtgtgcacctacgagggcaccaccaacagcaggctgggtcggcacaccaccttgggcatcgtcgccaccgaaacgttcgccatcgggacggccacggcgagcctcgccttcgggtgcgtcgtggcgagcgacatcgacaccatggacgggacttcgggtttcatcgggctagggaggacgccacggtcgctcgtcgcgcagatgaagctcaccaagttctcgtactgcctctcgccacgcggcaccgggaagagcagccggctgttcctcggctcctccgccaaactggccggcggcgagagcacctcgacggcgccgttcatcaagacctcgcccgacgatgacagccaccactactacctgctcagcctggacgccattagagccggcaacacgacgatcgccacggctcagagcggcggcatcctcgtgatgcacaccgtctcgccgttcagcctcctggtcgacagcgcgtacagggccttcaagaaggcggtgacggaggccgtcggcggcgcggccgcgccgccgatggcgacgccgccgcagccgttcgacctctgcttcaagaaggcggcggggttcagccgcgccaccgccccggacctggtgttcacgttccagggcgccggcgccgcgttgacggtgccgccggcgaagtacctgatcgacgtcggcgaggagaaggacacggcgtgtgcggcgatcctgagcatggcgcggctgaacaggacggggttggagggggtgagcgtcctgggaagcttgcagcaggagaacgtccacttcctctacgatctcaagaaggagacgctctccttcgaacctgcggattgcagctcactcccctga

SEQ ID NO: 45120 - DNA, 207 bp, Oryza sativa
  Clone ID: PAT_MRT4530_48116C.1
atgcggggcagagtgtttggcccggtgcaaaacgcgggacaacagcccacaaaatcccgcacggggtacgcgcggtaccgtgttggtcctgtgggctggccgggcggcaccacgcggtaccgcgggctagccgtgcgacaacggccaagatgcatgcgtgagtgcagcacggtcggcctgcgggcccgcgtggtgccgcatggctaa

SEQ ID NO: 45121 - DNA, 180 bp, Oryza sativa
  Clone ID: PAT_MRT4530_48117C.1
atgcgtcactccattgctgcacaagcgccgattccccgctgtccggcggctgcatgtctgcatgtgcgtagggatgaaaatggtttagaaagttttaacattccggacatattttcgaaaatggaagttccatttagcaaatcagagatccacgttttcgaggggaaactggtagtagcc

SEQ ID NO: 45122 - DNA, 928 bp, Oryza sativa
  Clone ID: PAT_MRT4530_48118C.1
gcacgaggttttttattgatggaaacaattgtatgaatctatttgatcttccatagacaaacaatttcggtagcaaaatggtactttcatgacagaagaaacacaacgggatataccgataacagaactgataaagacatacttaggtatcctacatactaggttctgttaagtccccaattcacaatttctatggagtatcaagaggaaaattgagacatgtactttgtaaagtatgcaaacataaggagcacaaatagcttcccctactacagtggctggtttcagtttgtcttggtcttcccggccctcctcttggaatgtcttctaggaatagagttcttcattcccaagaagaaaagcagggcaccaaaaagtgccaaattctgtgagaacttgacgaaaagctgaacaaattgtgaagactccatttcatagttgtagaagtcgtacacaacaggtgttataactgctaagtacaggagcagtaggaatgctccaaatgagctgctgatgatgaacagaagaccaccaaagcctttaagaaacatggtagcagcaatgacagtctttatatcaatatgtggcactgccattcctaagctcttggacacttgctgcgtaaatagattgaattttggcttcaaggcctttgctgctggtccaccatcagtcccaaattcactaaactcttggtaggcggagaggaggaagatggaggcgaagagcaccctcccgacgaacgagatgaaccccatcctcctcctgctgctgctgctgctgctcctcctcgagccgccctcctcgccctctctgacggcggcggcggcgacaagcaccggcggcggggtaggaaggaggagggaaggggagagggagaggtgggtttgtcccggccggccgggagggtcccaatcgcccataggag

SEQ ID NO: 45123 - DNA, 557 bp, Oryza sativa
  Clone ID: PAT_MRT4530_48119C.1
tttttttttttttttttttttttttttttttttttttttttttttttttttttttttttttttttttatttttttttttttttttttttttttatattttttttttttttggggacccgggggccaccccgaaaattcggaaccggacccggaaggacacaaaattttcccaaaagggagaaaaaaaaaagccgggggaaaaaaaggaaaaagctgactccggggaaaaaaggtaaacccacaaaaatccaaaaaaaaaaagaacccgaaagaaaaaagggaaaacccggggggcccaaaggggggggaaaaccaaaataaatagggggcgccaaaatgccccttttcaaaacgaaaaacccgggcgccaacttaaaaaaaaaaaacgccaaacccccggggagaggagcttacaaaataggcccccaggggggtttttttttaaacaaagaagaagggcaaaaaagggtggcctataacctgcggccccaaaaaaaaataaaaaaagcggtacacccgggttcgcacaaacaagaaaaaattcctttggaaggggg

SEQ ID NO: 45124 - DNA, 3180 bp, Oryza sativa
  Clone ID: PAT_MRT4530_4811C.1
atgcagatcctgtcaaaattagcatcaggaatgaaatttactgaaccagtcaaggttggatccatggagaaaaaagtttatatgacaagtcgtgaagcaatacaagaaggagaaacaattagacaacaatcagaggagagcaaaaatgatgcaatgcagattgaaggaagcaaaagaaacatcaacatggctccagggaggctggcatatgcaagaagtcctaatatctacaatttgcaagagggtgaaggaagcagcagcaaaatgccccatttaggatgcaggaaaatacaacacgtaggaaaaaacttcaattcaccagaattaagcaataccataggaacaattgcatcagaagttgtcaattatggaggacaaatgctatatgatcaattcacattgctaaacttagacccaagacaggaaggacagttgagctacactaacctcatacaccaaataattcatagtccaactgtcaccatacagcaacaaacaggaggacaagaaagctttacaagtctacttcggacaccagcatttgataattcaatgatcttaacaaccagtagattttctccagaactagaagagcagcaggatatgacatatgagcaacacatatcaactacacactggagctatgaagaatttgatcagatttacaacaacaaatacatcacaccttttgctgagaatacaacagcaagaatagaagagctgtatcaatcaaaaaatagccatttcactacaaaggaagggacttcaaacatgcttcagcaagattcccaaatcaatacaatcacagcaattgaacaagtagagcaacatgttgggcaagcagaaacaacaagtgagacaaaagctacctcagcagaggacaatgacactatcaatgaagaagacattaacaactacttggctaatgaagaagatagccaagataacactcctgtagtaattgacaagaaacacataccttgcattggcaagaaattcagaactcatgaagaagcgcgtagtttcttcaacttctatgcatatcaagtgggattttctgtagtcatcacacaccactacaaatctacaagcaaaaaaagatttggtcagatcaccaagtacacataccagtgctacaggtatggtaagaatgatgatggtcagaagaagaaaaaaaagaaaactcagcagcagaggaatacacaggtgattgacagaactgattgcaaatgcatgctaacagtgaggcttgatggtgatgtttggagaatactaagcatgaatctcaaccataaccatacactcacacccaatagagaagcaaagttcctcagatcacacaaacatatgacggatgaagagaaaaagttgataaggactttgaaacaatgcaacatacccacgagaaatatgatttcaatattgtcatttctcagaggaggcatagcagcactgccatataccggaaaagacgtcagcaatgttggaacagcaattaactcagagacaagaaatactgacatgaatcaagtgatggaatatctaaggcaaaaagaagcaaaagatcctggctactattacaagctgactctagatgagaataacaaagttaagagcatgttctggactgatgggaggtcaacacaactctatgagcaatatggtgaatttgtgagtttcgacacaacttacaaaactaacagatataatatgccatttgctccaatagttggtgttacaggccatggaaacatatgcatttttgcatgtgcatttttaggagatgaaactacagaaactttcaaatgggtttttgaaacgttcctaacagccatgggaggaaaacatccagaaacaattataacagatcaagacttggcaatgagggcagctatacgtcaagtatttccaaacagcaaacatagaaattgtttgttccacattttgaagaaatgtagagaaaggtcaggaaatacattttcagacaagagaaggaaagatctctatgcagaatttaatgacattgtgcacaatagcttgacaagagctgaatttgaaagcctatggttgcaaatgattgcacagtacaacttgaaaaatatcaaatatctggaaataatgtggagaacaaggaagaattttataccggtgtattccaaaacagatttttgcccatttatacatagcacagcacttagtgagggcacaaatgcaaggtttaaaaggggagttggcccaacacatagtgtcatgacttttctactggaatatgaaacaatcaatgacatcatcttcgacactgagtatgggaaagattatgaatccagaaacaagaagccaaagtctttttggtcaaattacatgatagaagaacaagcagcagacctatacaaccatgggatatttgataagtttcaagatgaattgaagggaacactaaatctagaagtggcagctatacaacaaggaaaagcatatgaagtatatgcagcgccaaatctgaaacaacaagaattcagaccaagaagatatgttgtgatgacagacttaccacaagaaaacttcgtgtgcatatgtgcaaagttctccaaagatggaatcctatgcagccatgttttgaaagtgatgttgtatctgaaaatgagcaagattcctgataagtacataattgaaagatggaggaaaaaggagagaaaattaacggtgagcatgcaacttgcaacaaatgatgagaacagttctgtgctaaggttcaatgtattatctagaagaatatgcaacatggcatcaaaggcatcaaaaagtaaggaaacatgtgagtacctgttaggagagattgataatctggatagcaaccttgacttgataattgaagatgcagctcaaaatcaagcatcaattgatgaaagcaacacggtggaaaacacaagtgaggatcaagcagaaaaagaaacaacaaatgagcaagaagatattcaagaccctgacatagctaacacaaaggggaaaaaatcagcaagaacaaaagggatggtagagaagataaaagaacagccaaaaaaacattgtacaagatgtggaagaacaagtcacacaatagaaaattgcccgctgatgcaaattgcaagaagtacaaagaaaatacagaagtctacaacaacaagtaaaagaaatgaataa

SEQ ID NO: 45125 - DNA, 201 bp, Oryza sativa
  Clone ID: PAT_MRT4530_48120C.1
atggcgacggtggtggacgagctcgggtacggtcgtacggcgaattggatggtggggtcggcggaagacacggtgttagcggggcagagggaaggctggtgcagcgttggctttacaagctttgcagagggaggtgcaagggtaggcagagggatccagggccggtcagtatcgccttgttgcgtcgagcatcggctttag

SEQ ID NO: 45126 - DNA, 330 bp, Oryza sativa
  Clone ID: PAT_MRT4530_48121C.1
ccatgttaaaaatgtatttgggtttaattagatattcatatttttaaccaaccattaaaaatttttaaaaataatcttttagaggaaaatttgtagtcggcgatgagctgctggccaaactagaattgttgacccctcaggattattcgcatgctttgttttagcgaaccatgatttcggtttttgtcactttgtaagaatagcctccatcagttgggcagtaaaagatttcatagtaggggattctggggaactacccaagaagccctcctttagcgcatatttaacagtggctgatgtgattttagcatcaacttgtcatggatcttg

SEQ ID NO: 45127 - DNA, 1920 bp, Oryza sativa
  Clone ID: PAT_MRT4530_48122C.1
ccgggctgcaggaatcggcacgagggtcttcatgagcatatcggttacactctgcatgcaattctatactaacagagttcaacgagatagtcattcgggaatgttcttttttcaaagcagggaagttgaaaagagattaccaggtcttcagtagcagatggggtacaggagaagctccccccgctcaactcaccaaaaccctcctcccctcgaaatccttcccaagacgccgcacgcttctccatttcatataagattcccgagagacgccgccgcccgagaggcgtgggccgcgcgcgccgaaacatatcccgccggggcgccgccatggccggcgaggtggccatcgactccggcgagaagcgcctcaacgagctcgggtacaagcaggagctccgcagggagatgactctgttcaagacgctggccatctccttctcgacgatgacgctgttcaccgggatcacgccgctgtacgggagcagcctgcggtacacggggccggccagcctcgtctggggctgggtcgtcgtctccttcttcacctggttcgtcggcttcgccatggccgagatctgctcttccttccccaccactggttctctgtacttttgggctgctcatctggctggcccagtctggggcccgttggcatcttggtgctgtgcttggttagaggccataggtcttattgccggaattggtacacaggcattcgcgggatctcaagttctgcagagcataatcctgctatgcaccggcacgaacaaaggcggcggctacctgacccctcgctggctgttcctcctcatgtacatcggcctaaccttcatctgggccgtgctcaacaccttcgcgctggaagtcatcgccttcctcgacctgatctcgatgtggtggcaggtgatcggtggcacggtgatagtgatcgtgctgccgctggtggcgaagacgacgcagccggcgtcgtacgtgttcacgcacttcgagacggcgccggaggcgaccgggatacggagcagcgcctacgccaccatcctgtccctcctggtgagccagtactccctgtacggctacgacgcggcggcgcacctcaccgaggagaccaagggcgccgacaagaacgggcccatcgccatcctctccagcatcggcatcatcaccgtcttcggctgggcctacatcctcgccctcaccttcagcatccaggacttcagctacctgttcgacccgagcaacgagacggccggcacgttcgtgccggcgcagatcctgttcgacgcgttccacggccggtacggctcctccgcgggcgccatcgccctcctcttcgtcatctggggctccttcttcttcggcggcctctccatcaccaccagcgccgcgcgcgtcgtgtacgcgctgtcccgcgaccgcggcgtcccgctctcctccgtgtggcgccgcgtccacccgcgccaccgcgtccccgccaacgccgtctggctctgcgccgccgcgtgcgcgctgctgggcctccccatcctgtggatcaacgtcgtcttcacggccatcacgtcgatcgcaaccatcggctgggtcggcggctacgccgtgcccatcttcgcccgcatggtgatgcgggaggaggacttctcgccggggcccttctacctccggcgcgcgtcgcggccggtgtgcctcgtcgcgttcctgtggatctgctacacctgcaccgtgttcctcctcccgacggcgtacccgatcagcgccggcaacttcaactacgcccccgtcgcgctcggcgcctgcctcggcctcatcgggctctggtgggtgctcgacgccaggaggtggttcaagggacccgtcaggaacatcgacgatcctctgaaagatggtggtggtgatggcgtccataacaatggcaacaaggtctaa

SEQ ID NO: 45128 - DNA, 332 bp, Oryza sativa
  Clone ID: PAT_MRT4530_48123C.1
gatggactataaaaatttactatcctacgcagggaacatatgtaagaagttacttcacagctttctatggctaaactaactgaagctttacatcgtaacagccaggctaaaattacttatagatgaatgcttacattttaacccgcttaatcaatccaagtgcagactaacaatcgaagagattcctttacaactaccaaactcgtgctctactcccctgaatgcctcatctccacagccgcaggcattcttggccttcctgggaccaggcttgcatgattcttacaagaagtacatcatgctgctgcttgtttctggagccaccttcaccg

SEQ ID NO: 45129 - DNA, 265 bp, Oryza sativa
  Clone ID: PAT_MRT4530_48124C.1
ttgatgctactccagcatagaacattcaggctcccgttaaaggttgtggaaaagatggttttcgctccatcaattctctccgatgacccctatttccccttcatcaattcctcttttcatctcattcctcttcctctattttttttcctatctctccccatctcttttcttttccctttccctttcttctctttcttattccttctttcttctctccctctttcttttccttctctctcctttctccctcctttttcctcctttt

SEQ ID NO: 45130 - DNA, 384 bp, Oryza sativa
  unsure (1)..(384): unsure at all n locations
  Clone ID: PAT_MRT4530_48125C.1
angcgagaaggagaaacgaacgaganaagtgatcagggcggagcaagaaggggacaacacacgggacgacgccgacgggacgagagaggggataaggaggacagaagaaggggacgtgcaaaaggagagggcggacagaacggcaggaagaaagaggaagagaggaagagaccggcgggcaagccggataacccggaaagatacaggaacgaaagaaaatgcagagacgcggacgcgaggggagcgagaacaagacgaacagagaagacagggaggaaaaagggacaagtgacacaaaaacgagcgcccagagcgatcaaggcggacggaaaacgatcaagaattgacatagatcaaggcgaacggaaaacgatccagaattga

SEQ ID NO: 45131 - DNA, 329 bp, Oryza sativa
  Clone ID: PAT_MRT4530_48126C.1
ggtggtttgggggttcataatctggagatacaaaataaatgttttttgagtaaatggttgcttaagttaataaatgagcaaggggtttggcaggacttattgaagagaaaatatctttataatcagtctataacccaagttgataggaaatagggtgattcccatttttggtcaggtctcatgaaagtcaagagtattttcttgaatatgggttctttgattgtgaataatggggaacaaacaagattatgggaagataaatggttaggtaatgtggcttttaaagataagtatccatcattatatgctattgttagaaggaagaattc

SEQ ID NO: 45132 - DNA, 258 bp, Oryza sativa
  Clone ID: PAT_MRT4530_48127C.1
atgtctgttgctgaagagcaagaaaaaggtccactcatgaacatgaagaaaccattggccgtagaccacaccgagctggccatggacccatggtgggacggtgtgtgctgtaaagatcacccagccttttttgaccatttgagtatggtgatgacctgtaagttggatttggattttaaacctgtggtgagcaaaaaggaaatggaaagtttttgtcaggcgcaccgaagcacaaaggttggcatagaatctctctga

SEQ ID NO: 45133 - DNA, 276 bp, Oryza sativa
  Clone ID: PAT_MRT4530_48128C.1
atggcgacggcggtgacgcgaaggcgtggtagcatcacggggctcggggcgcggcagcggctcagggcgacggcgatgggacggccgcgcggcggggcgcaggtgcgaggcagcgagaggacgggcgtgcggcggctcgggaccggggagcagcacacggtgacaggaggtcatggcgatccgacggaaatgacgacggcgcacggccctgtgatgatggcaacgggcacggggcgcgagggggagcgcggcagtggaggggggaagaagggctag

SEQ ID NO: 45134 - DNA, 461 bp, Oryza sativa
  unsure (1)..(461): unsure at all n locations
  Clone ID: PAT_MRT4530_48129C.1
gcgccgcgcgggtgctcccaatcctcgccgccgctggccccgcgccgccggggggtgggcggcgatggaggcatagaccggcccgccgcgacgggcagaggcggtgcaaaggcgctattgaattaatttactctggttatttatgctgcatccttatgacttctgtttgccaagattccaactgcttatttgcccttaccagtgagatcttataataattgccaccctgactacaaagaagcaactatgcggctgtcttcttcacttcaagatttgcctacgttctcaagaattgatgcattagaaaggggctctagcactggtagtgatttggtctcagggcgtgcaaacctatccggaacacttcaaagagatggcgctgttgcaagcttttcaaagagaaacanccccctcatcaccaacaattcgaagaatgcatganactgctggttggcaatggc

SEQ ID NO: 45135 - DNA, 1612 bp, Oryza sativa
  Clone ID: PAT_MRT4530_4812C.1
atggtggtggtagactcgattgaggagtggatgatggctgtgctcacgcagctgatggcgaaggtcgacaacattgacgtcatcaccaagcatttgggggagatcgacgccaagctcgtcactcaaggggagcgcctggatcgggttcaagcgaagatggatctctccatgacatcactggggcaagttcaacaggagcagacacaagtggctcgcgctctgaaggcggacgcggcggctcccgtcgcatcggcaccatctacaccgcctcctcctcaacctccgcatctggcgactccgggggcgtcctcttcgtcttcgccaccaccccctccgcctcccccaccacctcccccacctccgcctccgccgtgcctggttcctcctgttcgggagcaggttccttacccacccatactccctgctccgcgtgattttgggtactacatgccacgtcgccagtggtcacctaaaatggattatccgaaatttgatggcaccgatgttcgtgtgtggttggataattgcgagacatactttgtgttttatcaaatcgctaaagggtttaaggtttctgctgcggcgttgaatttgttggagaaaatggacattaagccacgttcaaaactaggcttcgccggaatgccatcacgaaaacgggattcgctaaaatgccaggatgaagcgcgccgcactcgccactttgccattttcctccttttgctcattttcgaaatgaatttcccttctatgcaagttgacctgatggaattgcccctacggtcgggtcttgaaagcgagagggggttgagccagcccgttcaagatgcttgcacatttttcaagtggtatgatagttaccaaagaatggtggaaggaatggaattagatttcaatgaagaagttgcaacaccagttgcaatagcagcagcagaatggggctggtgtgaagagatggcctctaagaaagagcattctgctgtcaagagttttgataagcctaagttggcccctggggaactttggaaggctcagcaactcaaggagtatcgcgagctcagggactttgttttaaatgtgttaaaggctattcagttacaggaggagtctgaggtattgtctgatgccctgttggatgttgtcatgaccctggatatgtctggcactgaggtgaatgtatcattgcatgctttagctgggacttgtccttctaatactattcagttgcgtgctttggttcaaaatcaagtcatcattattcttgtggattcagggatggattggttatctcaattcagccctatgacctgtgattgggcagccaagcagttgcagttctgttataaaggctcagtgatttctctgcaggttaatgctcgaccatatcggtattctcctgctcaaaaagatgagatagaaaggcaagtttctggcatgttggctgctgggttaatctctcccagctgcagtccctttgcatctcctgttattttagtgaagaaaaaggacaattcctggcgcttttgtgttgattaccacaggttgaatgatcttactgtcaaaaataagtttcccttacctgtggttgatgagttacttgatgagttggctg

SEQ ID NO: 45136 - DNA, 492 bp, Oryza sativa
  Clone ID: PAT_MRT4530_48130C.1
atggcgggcagcaggcgtcggctttgcgcagggattgcagagggggtgcacggggggcggcggcttcgggttggcgaggcgcactgcgaggccgactttgcaggcgggagacatggaggcaggggcgtcggctttgcagacaacagacgtaggtcggaggccttgcagacgaaggaagcaacggttgagttcgtagcgtctcgtcgctccgggcagagggcggcgccggttgggcgcggtggctacgagggcagcgctgggcgcggcagggcatcaggcagaggcggggcagaggcgagcgtcagctttgcacagccttgcagcgagattcgcgggcagaggaagaatgggcggcttggaggcgacgactttcggctcgcatcctatgtgttcgatggaatgcctgcaaggaaagagaggggaaagaggaagagagagagatggggtgctgggccactggcaggtggggtccagggtgcttgggcccactga

SEQ ID NO: 45137 - DNA, 1407 bp, Oryza sativa
  Clone ID: PAT_MRT4530_48131C.1
cgcgtccgcggtccaaaagcccctgcccctcctcgctctctctctctctcttgtgcctcctcccttcgcaatcgccgccgtgtccgtgcagccctcgccgcgatctcccttcccctcctcctcccgatccccaccatggctggaataaggctgacgccggaggagcccgagctgccgcagggcaccccgccccgcccccagctgccgcccgccttcgccggcgcgggcgccgtcctggctggcagtggcagcggcggcggcggcggcctcgagatggcgtcggacgacgagcggtcggtggcggcggactcgtggtccgtgcggagcgagtacgggagcacgctcgacgacgaccagcggtacgccgacgccgccgaggtgctcgcggcggccgcggcctccgccaacttcccctccgataccctacagggttatgtagtctcatgctcttgtggagttgccgtccgtaccttttactttgtgcactttctggttgcgactagcttgatgattgcatttaggattgtaatcaaatatgtggaaagaggaagtgctagagatgtctttgccagcttcgtggttattgggcaagttggcatcggaagtcagatgcgcatccaaattgactgtgttctgacaaagatgatcaagatcctagcgaggttgaaggctcaatgctggggctccaaagttattgggatgcttcttattcagaagatcttgcaaattttcaggaacatgggcatgctggagaaatatgatgtaatggacaccatggctgtttggacaaaaaaattgtgtatagacattattaatggtgggactccatctggtaatgaaagcatcaattgtgaagttgatgagaagcaactatccaactaccctgtgctcgatgttggaactgggaatgggcttcttttgcaagcacttgccaagcaggggttttcaaatttaacagggactgattacagtgaaggagccattgaacttgcaaaaaaccttgctgcacgtgatgggtttacttctataaatttcttggttgatgatatacttgagacaaagttagatagaaaattcaaaattgttacagacaaagggacattggatgccattggattgcaccctgatggtcgtataaaaagagtaatgtattgggagtctgtatcgaacttggttgaacctggtggcattgtggtcgtaacatcgtgcaaccacacaaaggatgagcttgtgcaagaggtagaagatttcagtaagacgaaatctggtaaggaacacttggatgaaggtgaaggtaatgtgccacagatcttccggtacatcgatcatgtccggacataccctaccattatgtttggaggggttgagggttctcaagtgtgcacggtggccttccaacgggtgtga

SEQ ID NO: 45138 - DNA, 316 bp, Oryza sativa
  Clone ID: PAT_MRT4530_48132C.1
ccacgcgtccgggagactacggatgaggaatcaaccctaaatcgggatactgccaccagtgaaccggacacatccatgtcacatatgccttggtattgtgcagaagatgcgagatcattactactgcaatacgctaatgcagcttaacttggacatgcaaaactacacctctcaaccctttcttgagatccatgaacccttacttgctgaaggatgtttgttttttcattgatcaaccacgccaacttctaaatgctgacagcgattgttgactgccagccaagttctatccacacgagagactgctattgctaag

SEQ ID NO: 45139 - DNA, 1377 bp, Oryza sativa
  Clone ID: PAT_MRT4530_48133C.1
cccacgcgtccgcccacgcgtccgatctggtcaaactcgtcctcctctctcatctccctccccgtctcgccggcggaggtaggcttcgccctctcgcggcctcgcgtgcgcgtcgccggcgagagggccgcccgtaggcacggcgccgacggcctcgatccttccctatccacgcgctctgcgtggcatcctcgtcgaggtcccggaggggttgaccctgccaagctgcggcgcgcgcgcggcctgttcgacggaatgcgccactgagagactcccagcgtgagccgcccattccgagacaagaatggccgctggggtggctggagcgaggggcgcaggtcgcccgctcatgcggctggtcaccatgagcggcgtgccgatcctgcggcagctgcacctggaggaacggctgctgcgccgtaccggggataactggtgcatcatcaacgacggcacggctcctgccaccatcgtcatgggcgtgtcagggagagtttcggagcttgtcgagattgagccggtcctccgggataaagttccggttataaggaggttcagtggtggtggcacagtcatcgtcgatcaggggacagtgtttgccacattcatatgcagcaagaccgccattcctggactgcagccatttccgcgggatatcatgtcttggactggtcagttgtatgacaaggtgtttgatggtttcggtgaatttcatctgcgtgagaatgattatgcctttagtcaaaggaagtttggaggaaatgctcaatccattacaagagatcgttgggttcatcatacatcattcttatgggattatgatatgaagaatatggattatctcaaaatcccaaaacgtgcacctgattatcgactggcgaggaaccacacagatttcttgtgtcgcatgaaggagtatatgccatcacgatccgttttcaccgaagggatcatctctgccctcggagaccacttcacagtcgaacccacagaaccagaggcagtgctctctgatgacacagggtttaagccttccacgaagctgttatcgccacaagacctagaggatgttatcgcctcaaaagaatcactcaagggtggcagcgtggacggtgaccggcggccatgtactccagttacaggtagcagcgcacgttccacgtaaggtaccatcgaccagtgaataaaatcaaccttccagtttgaacgccgttgtgctcactgaaaatttggcaccgaaggacacaacctcagcttccttgaagcggacttccgcatctaaagcatcattgctcaaacagctaattgttattcattccggtttcggtatcttttctactgcaatcagcagctggagttcacacatgttccttcgct

SEQ ID NO: 45140 - DNA, 483 bp, Oryza sativa
  Clone ID: PAT_MRT4530_48134C.1
tttcgtgtgtcgcatgaagcagtatatgccatcacgatccgttttcaccaaagggatcatctctgccctcggagaccacttcacagtcgaacccacagaaccagaggcagtgctctctgatgacacagggtttaagccttccacgaagctgttatcgccacaagacctagaggatgttatcgcctcaaaagaatcactcaaggtacaggaagtcgaagcatgacaacagctgtgaagatgacttcttttctcatgatcatgcctgacaagcggtaccatcgaacagtgaataaaatcaaccttccagtttggacggcgttgtgctcactgaaaatttggcaccgaaggacacaaccacagcttccttgaagcggacttccgcatctaaagcatcattgctcaaacagctaattgttattcattccggtttcggaatcttttttactggaataatcagctggagaacacaaatgttccttcgct

SEQ ID NO: 45141 - DNA, 1698 bp, Oryza sativa
  Clone ID: PAT_MRT4530_48135C.1
atgcacatagtcaaggagacggaattacttgctgccaagcttgacctcctcatgaagcgcttagacgaccacgacaaacggcctcaagacactgtcaaggctctggactcacacgttacatgtgaggtctgcggcaacacgggtcactctaggaacgactgccgggaaacccgtgaggaggcgatgtatatgggcaacaacaacaacaacgggtatcgtccacaaggaggccaggggtggaaccaaccacgcctatattatcaagggggtaacaacaatggtaacttttctaaccaaccctccttgaaggatctcgtcattgcacaagctaaaaccactgatgcgctaaacaaaaagctcgctgccaatgacaagatccttgaaaatataaatgttaagctagatgtccctgcaaaagaaactgggaggattccggggcaacccgactcctcccttgaaaatgttaaggcgatcacgacgatgggagtaatccagaaaatccacataaacgtgctgttgttggatgctatgcaagtactaacatatgcccgttatctcaaggacatactcaacaacaagagaccactcccaacaacggagcagttcgaccaggccttatgcgatcttggagccagtgtcagcgtcatgccaaaagacgtctttgacaagctcaacttcacggtgttggcaccaacactgatgcgcctacaactagctgactcgttagtccgttacccagcagggatggcggtggatgtgccagtcaagatacgggatttcttcatcccggttgactttgtggtgctagacatggacacgggaaaagagatgtcgctcatcctggggcgcccattccttagcactacggaagccaacattgacgtgggagcgggaagtatccgttttcatattaacgggaaggaggaaaagtttgagtttcaaccaagggtcgaacaatgctccatggtcaggataaagtacgggccgaacccgcagaatattcaagtggtcgaagtggagccacccaagacggatagcctggtgaagttcatgcagaatttcctagagaaggaaacaacgatgcctaggaaccgttattggaggacgttgataaaaccaactataccggccaagaagtcagagcagtcggctgagaagaagccgccttctgcaccaaagccatggaaggggtccggctcttcatcaagtcatcatgatgagtctagtactcattcatcagctgatgtctcgttggaagacgccgaagctccgcgacgactcctgaacgacaccgacctcgaccttgtctgtgatcgggagagaaaagcctactacatgctgagcaaccgggagtatgctcatacacgagaatactctccggagctgctgaaaaagatagatatggatgttgaatttcgtgctatttggaaagctgttggttggcagagatttgctgtggttgggaaccaactggggatgcacccggatggacccaagttccacgccacagcattagagtctcaagctgggcaagtgccagtgaggaccggtggcgtgtgcctcatgatatccaatggggggacaaccaacgtcttagatcaagtgtttgccaacatcaacaacatgatgcagcaacagcacgatgatgttcaagcgtacttccgctttcaggggttcaatccttatcaaggaccctga

SEQ ID NO: 45142 - DNA, 506 bp, Oryza sativa
  Clone ID: PAT_MRT4530_48136C.1
attcgtcgtgctcgatgattcaaatgttaagaaagaccagaagtttgctacaatagcttcaaaatcagttattccctccatgtttgacacagttctgagaaattttactccagatgtgccagctggaacagcttctaggccaaggcaggaagatgctcaagaattcttaagttttgcgatggatagaatgcatgatgaactagtgaagcttaatggccatggcttcaattcaaaggagggtatgaatggttcattaaatgatgatgatgcttgggagactggtggaaagaagaaccagtcagcccttatgaggaggcagaggtttggtcccttcgaggtaactggtttttttggagggcacctgcgaagctgggtgaaagcttctggtaaccaagcattagtcaccggtcaagcctttcgaccggtccatcttggcatattccccggtgctggtcaaaaacctggtgatgcccttcgtctggttgctggttctggatctttggaag

SEQ ID NO: 45143 - DNA, 701 bp, Oryza sativa
  Clone ID: PAT_MRT4530_48137C.1
ttagtgaagctggccctgagggccggccggattcccggtcgcccacctcactgtcccccttaattaaacaacaggggcacgcttgtctgagaaaaatggcggatctccttaaattagggtttcgatcattcgatggaattcacatgatggcgtcgttctcctcgttctcagtgagaattgccttactctttctggttttctgcttgatcggtttacaagctgcggatgggcaagctggtggcgacatctgcggcggggttccggatccatttgcttgcccaataaactgtgtccaggaggatctggtttgcggagccaatggagtcacgtactcgtgcggttgtgaggactcagcgtgcaatggagctcgtgtagtcaaaagaggagcttgcgacgctagtaacgctggaagtgattctgtacgtggataagctttgttattgattcatatcgtttggctcttcttgttcggactctctcttctcgttggtgttttctgatctcaagacttgtgtttgagatgttgtatcatgttcgttgatcacatgttgaatggtttctttttcctttatatctgtgtgttctaagttgagttgttgtctcaacttagaatacacgtgttgtgtttgtatgttctaagttgtgtttgtatgtttttacgctgtatgtcatgctctctaaatcccaaataagcttattat

SEQ ID NO: 45144 - DNA, 304 bp, Oryza sativa
  Clone ID: PAT_MRT4530_48138C.1
gcaggataagtcccagaattcaaatggaagacagaaagagaaggcaattcaaacctaatggccaaacattacgaatccaagacagaaagacttatagccataaaagaataacaagagaacaaaaacaactccatattctactggcctgcctctctgatctactatccaactgccatggaagcaccactgaagactggcttctccgaccttccacccgatcctgggtgatcccggatcgacaagccgacggtatggattccctatatatttccgcttcctcgctcactgactcgctgcgctcggt

SEQ ID NO: 45145 - DNA, 261 bp, Oryza sativa
  Clone ID: PAT_MRT4530_48139C.1
atggcaaccctcaccgtcgcacgatgggaatggcgctccggtggcggacctctacaaaggagggttgaccttggggatcttgggccccccaaccccaccggcggcaacggccggggcggcggccaacctagcggccggttaccggcgccgaattaccgaaaccggcggcggcggttggttccccggcccggaaccaatggggaccccaagggagttgggcaaattggggaaaaaccaaaagggggcaacggcagagcttaa

SEQ ID NO: 45146 - DNA, 482 bp, Oryza sativa
  Clone ID: PAT_MRT4530_4813C.1
atggagggtgacgggcggccggagtggagatgggcggcggcggccgtgctccgggagggaaactttctgccttgcccccgtgccaacgccaacgaaccaggaagggtcgcgcgcgacaaggcggaaggtgcagacggggacggagcgccggaggaggaccgcgtcctcgtcggacgccgcgacgcccttcgtcgccgtgcgcgccgcagccggcgtccaagccgtcgcagctcgccaacaccaacgcgcagggcgtcgcgcggtacaccatcatctgccaggagaacgggctggtccccatcgtcgggccggagatcctcgtcgacggtgagcacggcatcgaggtgtgcaccgaggtgacggagcgcgtcctcgccgcgtgctacaaggtgttgagcgaccacgtcctcctcgagggaacgacattatccatttcagacacgacaaaaattgcaactgtcttcgtctgtgatctctgctga

SEQ ID NO: 45147 - DNA, 319 bp, Oryza sativa
  Clone ID: PAT_MRT4530_48140C.1
cctacgcgtccgaccactcgtggtctgacgcgtggggtcctgcaacagtgaagatcatttacggctctgctctcgttgctattgctccgtgcagcgccactgcgcagtttgatgtgttaggtcaaaatattaagcaatatcaggtgcagtcgcctgtcctgctacagcaacaggtgcttagcccatataatgagttcagaaggcagcagtataccattgcggcaagcaccttcttgcaatcagctgcgtttcaactgataaacaaccaagtcttgcaacagctcatgctggaggcgcaacagtctcactaccaggacat

SEQ ID NO: 45148 - DNA, 258 bp, Oryza sativa
  Clone ID: PAT_MRT4530_48141C.1
atgcctctgcactctcctttgcaccgtgcaccgctcaccgctgacttcgtggcctcgaaacctccttgcatcggcgctctgctcatccccaggctgtgccgtgccaggtccaccactgcttttggatctgccagaccatgtcggatgccatcacttcacggccgatgctgccatttgctccaccaccgtcgacgctacctcttgctcgagctccaccccatcgccactgcttgctgccgttgtttgaggatgacggtg

SEQ ID NO: 45149 - DNA, 1654 bp, Oryza sativa
  Clone ID: PAT_MRT4530_48142C.1
atggaggccgctccggcggcggcggcggggaggtacggcaacctcgaaaggtccttcaagctcgccgcccgctccgtcctcaccgcctgctcccgcgaggttcggtccccttctctccccaccttcgaatttctcgggctcagctctcgcggccactgcgctttgctactgagagagaccagcgatgtgaagagggctttcccgtcgtttacggatgcggagagggaacgcttgtaccagatgttcatttacgtgatcaagtctctgcacagcaacatagaggttgctgctgcccttgaaaagatagatcagtttgttgaagaacaaaagctggatgtgctgtcttcagacaagactaacattgaagacaccaagcaaatgatatcaaaggctaagaaagatgaagttgaatacctgaaaagtctaatagaagaggttgaagagaaaaacaatgccatgaaggctcgaattgaactcttgaagaaagatgatgatttggctgcaggaaaacaagtccttgagaaggttcacagtttccacagccacaccatctccatccaaaatggcagccatctcctccctcaacctccacaccacctcccccgtctgccatcctctcaccaccgccatggctgccacactctcctctgctcctgccccctccaagcactgctccattgtcagagcccagcactcccctcccccttccatcctctcatcatcaactaagacggccttccatgggctgtcactggtggacaggcggtgggcggcctctgtcggcggcggcagcgggcggcggcggagggtgcttcaggtgaacgcgaggacggccggcgcggcgaagaacatcgaggtggaggtcgacaagccgctcggcctcaccctcggccagaagaccggcggcggcgtcgtcatcaccgctgtggattctggagggaacgcggcaagagcaggcctgaaatcaggtgaccaggtgctctacacaagtacgcttctttggagatgaactatggcctgcatgataagctggggttcaccaagacaagccatccatggcaaagccagactctgtctactttgaggttggcaagggtgcacaagttgatgtgaagtgacttccgaaaaggccggcgcctccgagatttggccggaaattgacggaatcacaaaaggctagagcaacacacatttgccttgattgtggatacatatacttccttcccaagcctttcgaagaacagcctgatgaatatggctgcccacaatgcaacgcaccaaagaagcggttcgcgaaatatgatgcagaaaccgggagggcgattggtggtgcgctaccacctattacagtgatcgtcagtttgataatcggcattgccggagtaggggctttgcttgtatatggccttcaataggctgccaatatcttcacaggtttttgactgtgtaacaagaagctcagcagattgctggtgcactctcttatctagcaagaaattctgagtgatatatatcaagggggaaaggaaaaacatgagttggaggctaatggctaaatgaaaaatcaaatcttcttatatgaatggagattaattttctaaaaaaaaaaaaaaaaaaaaaaaaaaaaaaaaacccaaaaaattcaaaaaacaac

SEQ ID NO: 45150 - DNA, 917 bp, Oryza sativa
  Clone ID: PAT_MRT4530_48143C.1
atgaatgaaactcttctctgcaaatggatctataaattagaatctggtaacaccagcccctgctgtgaattgctaaggaaaaaatacttctcagctgggggaggtttctttcagtcttctactgatgggggatcacaattttggaaaggacttcatgaagtaaaaaggtggatgaagtttggtagtgcatacaaaattggctgtggggattctgtacagttttgggacgacatctggttaggggagtctcctttgaaaatccaatgtccttacattcacagtgtttgcagtgaccctgacaaaaccgtgaaacaaatgttgtctggaggggagtgggaaattaatctcaggagatctttaggtcaagacgaattacctgattggctaaggttgtaggacttacttggtacagtccaactgacgacaaagagagatattatgatttggaaattgaatccatccgggagatttacaacaaaatctctttacaaggaaattttacaacaaaatctctttacaaggaaattgtttttgggggagtcaaagacattctgcttcaggaactctggaaagcccctacccccctaaaaacgagagtgttcatgtggttgatgttacaaggaagaattcaagtagctaagaagctcaaaaaaatgaattggtcagactcccagcgcctttttgttctatccctgacttgttatggctgtgccagcagcatttctgtcctacttaaactcctgtgcatctcgagctggcagtcccagcggttggcagagatctgttactatcgctatgcagatgtagccatactgatactgctgcctctactctaccgatcggccatcaatggatcgatcgatcaccatcgatgcctgcctgctgcaagtctggatggacgacctttttctctgaat

SEQ ID NO: 45151 - DNA, 469 bp, Oryza sativa
  Clone ID: PAT_MRT4530_48144C.1
tttttattatgatcgaagtaaacaaagtgacactgaaaatttaaaggtcgcatcgataattcaaacgcatggcaaaaaacactcttgatgccacgctatatatacatatggtgatcataacactcccctatcaatttcttcatgtatacataagtaacataactcaagaaaattaagctaaacaaccccctaaaaagacagaaaaaaaaaatcaaaaggaagcctcgtatcaactcaaaaacttttggcgccatcactcttccttggctgcttgacacactcatcatcagtaaccactactatagctatctagctaattaattactacttagaaaactactcattccatcctaaaatataagatatttagactggatttcaattacctaagatatatccaatccgatcaaaaatccttatattctgtgacgagtaggagtattaataagatcgagatggtgttgcatgt

SEQ ID NO: 45152 - DNA, 375 bp, Oryza sativa
  Clone ID: PAT_MRT4530_48145C.1
atggcgcggccaccgggctctccgtccgccgccggcgtggccaccatgtcggactcaaccacgttgcagtggagtatggggagaggcggacgccgcggcggcggtgaggaggagatggtggtggcgccaccgcccgaggtcgccgaggtcatcgcccactcttcgcccgaggtcgtcaaggtcgccgcctctcttctcctgaggtcgtcgaggtcgccgcccactcttcgcccgaggccgccatcggatctggcccgtcgcctcctcatcgttgtcggcggcggcggtgaagaggagatagcggtagcgccgccgcccgaggtcgccacccccgccgccgatagctccaggccgagccgcccactcttcgcctga

SEQ ID NO: 45153 - DNA, 269 bp, Oryza sativa
  Clone ID: PAT_MRT4530_48146C.1
ttggcgcgccagggaggggtgcgtcgagtttcccgtcggtaaagtgcgttggaatcaatcaccaacatgaccggatcgtacacgcgcgtcattcaccgccgcaagaagcacggagggcgcgtctcatcagagcgttgagcgcctgccagatcgagagatcgcgccgatcggtcgtgtgctgtttggacttccggatcggcgagcagctacgcgtgaccggcagcaaccagccgccggggcatgatctccgtcgacgtcgcttggtctaa

SEQ ID NO: 45154 - DNA, 240 bp, Oryza sativa
  Clone ID: PAT_MRT4530_48147C.1
atggatcttgccaccactgagacggtggtggccgaatctagccgatgccaaccttgtggtggcaggatctggaaggctcgagccgcaactagatccgccaaacagagagaagagtcattggcggatgtggaagggcacaacggggattcggtggagaagcacgttggtggcattggtgcagatctggtggagaaagctcgggagagcagcaaagaggaggcggaagcagaggcggcttga

SEQ ID NO: 45155 - DNA, 186 bp, Oryza sativa
  Clone ID: PAT_MRT4530_48148C.1
atgaccgtggcccgtggaggcaacatcccaacagtgggcggtggaatggctgaaacggtcgacagcaaccgtgtttcaaagatgcgccgtcgattacttcttacatgtagaagtcaatcacacgctcgttcacgcattcatgttctgcaaccaaagaacttctgccagccatatgtcctgaacgag

SEQ ID NO: 45156 - DNA, 339 bp, Oryza sativa
  Clone ID: PAT_MRT4530_48149C.1
atggtcggcgcagcgggcgcggccggcagccgatggaggaggagcgcagcggagaggagggtcggcgcgatgagcggtggttggctgccagcgggggaggagcgcggcggagagaagggccggtgcgacgggcggcggttggtggccggcgagggaggagtgtggcggagaggagggccggcgcgacggtcgacggttggcgacggagaggagctaggcatcgggggcggcagcgtcagggaggagccgtggccagcggtggtgaatacaacaatgacgccgccgccacagcctcgccctatcatgcccgtcggcgcacacttctcctcctcgcccggg

SEQ ID NO: 45157 - DNA, 3975 bp, Oryza sativa
  Clone ID: PAT_MRT4530_4814C.1
aatacaacagcaagaatagaagagctatatcaatcaaaaaatagccatttcactacaaaggacaatgaagtggatatggcgactgaaaatgatgattatgtggagctgaattcagatgatgaaaatgagcaggaagggacttcaaagatgcttcagcaagattcccaaatcaatacattcacagcaattgaacaagtagagcaacatgttgggcaagcagaaacaacaagtgagacaaaagctacctcagcagaggacaatgacattatcaatgaagaagacattaacaactacttggctaatgaagaagatagccaagataacactcctgtagtaattgacaagaaacacataccttgcattggcaagaaattcagaactcatgaagaaacgcgtagtttcttcaacttctatgcatatcaagtgggattttctatagtcatcacacaccactacaaatctacaagcaaaaaaagatttggtcagatcaccaagtacacataccagtgctacaggtatggtaagaatgatgatggtcagaagaagaaaaaaaagaaaactcagcagcagaggaatacacagaggaggcatacagcactgccatataccagaaaagacgtcagcaatgttggaacaacaattaactcagagacaagaaatactgacatgaatcaagtgatggaatatctaaggcaaaaagaagcaaaagatcctggctactattataagctgactctagatgagaataacaaagttaagagcatgttctggactgatgggaggtcaacacaactctatgagcaatatggtgaatttgtgagtttcgacacaacttacaaaactaacagatataatatgccatttgctccaatagttggtgttacaggccatggaaacatatgcatttttgcatgtgcatttttaggagatgaaactacagaaactttcaaatgggtttttgaaacgttcctaacagccatgggaagaaaacatccagaaacaattataacagatcaagacttggcaatgagggcagctatacgtcaagtatttccaaacagcaaacatagaaattgtttgttccacattttgaagaaatatagagaaaggtcaggaaatacattttcagacaagagaaggaaagatctctatgcagaatttaatgacattgtgcacaatagcttgacaagagctgaatttgaaagcctatggttgcaaatgattgcacagtacaacttggaaaatatcaaatatctggaaataatgtggagaacaaggaagaattttataccggtgtattccaaaacagatttttgcccatttatacatagcacagcacttagtgagggcacaaatgcaaggtttaaaaggggagttggcccaacacatagtgtcatgacttttctactggaatatgaaacaatcaatgacatcatcttcgacactgagtatgggaaagattatgaatccagaaacaagaagccaaagtctttttggtcaaattacatgatagaagaacaagcagcagacctatacaaccatggcatatttgataagtttcaagatgaattgaagggaacactaaatctagaagtggcagctatacaacaaggaaaagcatatgaagtatatgcagcgccaaatctgaaacaacaagaattcagatcaagaagatatgttgtgatgacagacttaccacaagaaaacttcgtgtgcatatgtgcaaagttctccaaagatggagtcctatgcagccatgttttgaaagtgatgttgtatctgaaaatgagcaagattcctgataagtacataattgaaagatggaggaaaaaggagagaatattaacggtgagcatgcaacttgcaacaaatgatgagaacagttctgtgctaaggttcaatgtattatctagaagaatatgcaacatggcatcaaaggcatcaaaaagtaaggaaacatatgagtacctgctaggagagattgataatctggatagcaaccttgacttgataattgaagatgcagctcaaaatcaagcatcaattgatgaaagcaacacggtggaaaacacaagtgaggatcaagcagaaaaagaaacaacaaatgagcaagaagatattcaagaccctgacatagctaacacaaaggggaaaaaaatcagcaagaacaaaagggatggtagagaagataaaagaacagccaaaaaaacattgtacaagatgtggaagaacaagtcacacaatagaaaattgcccgctgatgcgaattgcaagaagtacaaagaaaatacagaagactacaacaacaaaatttctcattggaagaataatatgattactttgtattctgaccttgacaaagttgatgaagaaaactttggccttaggcccattaaggatttcaatgatacaacttatttcaaggttgtaccccctgaaaatagaattaatacattcagagataaattggagtctgctattggtaccatgttacctgctttcattaaggagaaaatttgttcaatggttgttagtcattgttctgccaatcacattgttgacagtgagtcttgtgaagatattgctatcagcattatgctcttgctatgtgaacatgctggttctagagatggtggtgatcctgatgaaaacttaatttttgatgatatcaaccctaggtttcagcctaactatgcaattgatgttgaaaatgaaatcccttgtgatgctcataacaatggaagtaccaataaatctgttgctagtaaagctaatgaaacaagttttcgccatacaccttctcatgataaggaattgggggtaaatgatgattctgttattgtctctaaatctgctgttagattttccctttcaccaaactttgaaaaagatcaaggcttactaacccctgaagttggatatgctaataactccaattcacaatttgaacattctcgatctgcttcaggtcctactgtatctgctgttgctgctgttaggaatgttgcaaataaaattaaatcaagattatctcaactcaacaatgatgacaaaagaggagcattgttccctgatttaattgattcttgtgaagatgaagctgttggttatgctaagtcactttcatgtcaaaaggaatatcttaaccctcgatatgtcacttcctcttcatcacagcctggtatatcttttcactgtcttgacaattcacctgttcaagtaattggtataaataataatgaaggaacaagcagaactcattgtattcagaatgtgaagaagaggcgttttgatgatgttactaattctcctgatgtggaatatcttggtcattctacatttcctgattgctgcaaggtgttgtgtacccagactgataatttgtataatgccaagaacatgttgaaaagtaacaacctggatttgagttctaccggtggaaaattacctccccatggccctagaagagtcttagttccttctcggaaattttcagatccttatgttctttctgttagacaccgatttccagtgtcagatcaagaaaagagacattacaatgcaatatgcaagttgtccgagagctctaaatggcatagttatgatgctgtagacattgataatgaactattattaactgatctatcttgtgctgatttgagcaaggtgaaaagatcgtttcttggagcagctagtgctaggaagttgcacctttctgacatgctatttttccccatcgaacaccttgaacattggttcctttttgttgttgatataaaggacagaatgttggtcctcttagattctttatatgaaaaaggtgatccctattttgaagacattgaatgcttattgatcaataatttacagacattctgggattcttatgatggctcttcaattgattttactactttgaagaaagtttacccttgtgttccaaaacagagatcttggtatattttttgtgtttaa

SEQ ID NO: 45158 - DNA, 1648 bp, Oryza sativa
  Clone ID: PAT_MRT4530_48150C.1
atggggaggcgatccggggggaggaagctgcccttcttcgcctcgaacgcctccacgtcgtcctccaccaagcggacccgctcggcgcgccgcctcccctcgctcaccaggccgcgcgcgtcgagctccccatccccggcgtcgccgtccccgccgccgccgtccgcgtcgcaccccgcccctccgtcccctcccctcgccgtatctcccgccggcgccggtaaggtcgggaagaagaaggccggggcgcgcctctggatgcggctcgaccggtggggcgtctccgaaaccctccatctcgacaagggctccatcatccgacgcgccggcctgccgccgcgggacctccggatcctcggccccgtcttctccgactcctccagcatcctcgctagagagaaggcgatggtgatcaacctagaattcatcagggcgatcgttacggccgatgagatccttctactggatcctctcacgatcgatgtgatcccttttgttgagcaattgacacatcatctccctctcaagaacctggtgtgtgggaatggtcaacctggtggtgatgaccatggggaaaagcatgatgactcgcatggagatcaggtgccccgccttaacgaggccaccggagcagagcacgagttgccatttgaattccaggtgctggagctcgcactcgagaccgtgtgctcatcattcgacgttaacgtgtctggtcttgaaaggcgcgccactccggtacttgaggaactgaccaagaatgtcagcacaaggaatctcgatcgtgttgcgaactctcaagagtgatcttacccgtttgcttgcccatgtgcagaaggtcagagatgaaatagaacatcttctggcatgataatgaagaacatgggcacatctgtatctaacaaggaaggcaattacaaaacccagcaagttagaggctttaatatcctcgggctgcttccaattgcattgttcctggaagaacaagtctgtccaggttgaacaatagttttcggcgcaacgtgagcatcactacgagcatgcatttggataatgacgtggaagacctagaaatgttgcttgaggcttacttcacgcaattggatggaattcgcaacagaattttgtcggttcgagagtatattgatgatacagaagactatgtcaatattcaacttgacaaccagcgtaatgaacttattcagcttcagcttacactgactattgcatccttcggcatagctgtcaacaccttcatagctggggcttttgcgatgaacatccagagcaaattgtacagcattgatgatggtagcttcttttggccatttgttgggggcacctcatcgggctgcttcatgatctgcatcgtcttattatggggatccaatcatcctgaggcagcagtatgtcttctttgcagagagatagctgatgaatcactgaactttatggacaatactgaatagtatatcggtatgtcattaactcattatattccagttaaaccatatttagacaaatattggttatggccaattgaagctttcttccatggccctgtgtacatgaaggattgacggggttgtttggttctacaccattcttaacattaccaaataattggcattgctcaaatttgtccctt

SEQ ID NO: 45159 - DNA, 1664 bp, Oryza sativa
  Clone ID: PAT_MRT4530_48151C.1
cactagccccacgcgcccgcaatttctcacaccagaagcaaagcaatcatgtcactccttgcattaccactcctagccttcttgtccatattcttgactcctacaacggcagtgagcagctcaacgctgcagctggcacgttctcactcggtgacgcccaatgccggggcgccgctcagcgcgtgggccgcgtccgtagccgcccagtcggcggcggacacggcgcgcatcgtcagcatgctcacgtcgggggcggggcctctgacgaccagagccaagcccaaacccaagaacagggcaaacccacccgtgccgatcgcgccggggcgtcagatcctcagcatcccgaactacatcgcccgcgcgggcctcggcacgccggcgcagacgctcctcgtggccatcgaccccagcaacgacgcggcgtgggtgccatgcagcgcctgcgccggctgcgccgcctcgtcgccgtccttctccccgacgcagtcgtccacgtaccgcaccgtgccctgcggctcgccgcagtgcgcgcaggtgcccagcccgtcctgccccgcgggcgtcggctcctcctgcgggttcaacctcacctacgcggcgtccacgttccaggccgtgctcgggcaggactcgctggccctcgagaacaacgtcgtcgtgtcgtacaccttcgggtgcctccgtgtcgtcagcggcaactccgtgccgccgcaggggctcatcggcttcggccgcgggccgctctccttcttgtcgcagaccaaggacacgtacggctccgtgttctcctactgcctcccgaactacaggtcgtctaacttctccggcacactaaagctcggccccatcgggcaacccaagaggatcaagacgacgccgttgctctacaaccctcatcgcccttcactctactacgtcaacatgatcgggatccgcgtcggcagcaaggtcgtgcaagtcccgcaatccgcgctcgcgttcaacccggtcacgggcagcggcaccatcatcgacgccgggacaatgttcacgcggcttgccgccccggtgtacgccgccgtgcgcgacgcgttccggggcagggtgcgcacgccggtggcgccgccgctgggcgggttcgacacgtgctacaacgtgaccgtctcggtgcctaccgtcacgttcatgttcgccggggcggtcgccgtgacgctgccggaggagaacgtgatgatccacagctcgtcgggcggcgtcgcgtgcctggcgatggccgcggggccctcggacggcgtgaacgcggcgctcaatgtgctggccagcatgcagcagcagaaccaacgcgtgctgttcgacgtcgccaacggccgcgtcggcttctcccgtgagctttgcacggcctgatcgatcactgtgcgaattgcgtaattgtattgtacgtacgtactagcttggccgtcaggcgttcgacttttggcttaccattcatgagctcatgccacagttcatctagtatgttatttttaaacgctgagttagtaaataaggattgtaataggtgatttcgtgtgggttaaatcaattatgtagcatatgtgatactgtatgtggcttgtttggtccttgtctcgttagagaatgaaaacgatccgattaaattcaaaaaaaaaaaaaaaaaaaaa

SEQ ID NO: 45160 - DNA, 640 bp, Oryza sativa
  Clone ID: PAT_MRT4530_48152C.1
gctattgcaatctgggccgggctggcacagcccacatatatctataactaatataaatatttatatttttccggtcgtcacatctaattttcatccatacacgatccgattcggttagcaatagccatggaaaaaaattgcaaaaaaaaaaaaaaatcggccgccgccgacgcctccaccaccgccggagggagaagagaggcggcggagggagcgccgctgccggatccgcccgcggtggccgccaccgccgacggatccaccctcggacgaagccgacgccgtcgacgccgccattgagagggcgacggggagagggagggagagggggagggagggacgaccatctccgtcgtctccgccgcacccgaccgtcgccgcgccgcccgcaccccgcaccccgccgtcgccgtcgcccacgccataccccacacctcgccgtcgcccgcgccgtgcccacgggagggagagggagcggtccaccgtcgccgctgcaccccgtcgtcgcccgcgccgtgccggtggggcggcagggatagggggagagggagcggcgccaccggaggggaggggaaaggaagcggtgccagtggaaagagggggagggggaaaggccgcctccgggacgggggaggcgccg

SEQ ID NO: 45161 - DNA, 778 bp, Oryza sativa
  Clone ID: PAT_MRT4530_48153C.1
ccggccggggatcttttccttcatctctcccttcctcttcactattccaacggtgcagatctagagggaagcaatggatagaaacaccttgggacatagcaacttattagaggaattgaaggaatcagtcaagcatacgaagggaaaacaagaagatagttttggagagacagcaaagaatgatcatgttgatcattccgatcaaggaatcctcaacttacctgatctaggaaagcaaaaacgtaccaaaagatttggaagctctagctgggggctaaaaaggatgtacctaaggaagcggaagttattgaaatgaattccatgatttagacaacaagatggggaggaacattggaaagagaaatcgtcaagatgataatgggagtaaaaccaagaaatcgtctaatcgtaatgtgcaaggtcacggaactagtaggtccatgaaaggaaggacaacagaactaactccagatcctactgaatacgcaacgggaaggggggcaaccagactcacacttcctcacggttttgtgtagctgttattggaggatttgatatgttaagaattagtgtctgcgctgaagtttctgaatattgtgcattgttgctggagtttgtaacttcttaagaattggtgtctttgccgatgtttttgaatatgcttcctcagtagccacccttgagatgttagcatttagttttaaagttgtattttcattgtcaagtacttaagtgctttatttatcaaatcaagtaattttgcaaaaaaaaaaaaaaa

SEQ ID NO: 45162 - DNA, 326 bp, Oryza sativa
  Clone ID: PAT_MRT4530_48154C.1
gccttgaatcactatcacatcggccgcccgttatggccttgcctttatacaagttctccctattcctcattgggctcgccgagcttaccgaccgggcagcgggggcgggctacggcggctacagcgacatgggccagaactgcacaatggggaaggcggtgtcccgcaacccggtccgatactggccggaactacatagcccggaggcgcgccgaccccaggggccgcctggactccggcaagcagccgccgcggcagctcctggagcctggctgccgggagctcgccggagtgccgatgcaaagccggcacgacacgttgagcgt

SEQ ID NO: 45163 - DNA, 2307 bp, Oryza sativa
  Clone ID: PAT_MRT4530_48155C.1
atggccgccacccactacgcctacctccagataaagatgccaggccacagtggccccatcaccgtctttggcgatgtcaaagtcaccctggcttgtgcagagcagcgcgccgataacttggcggcagccaccaagccgcaggccccggagccctccacaccccgcgcctccaagaggcgcctcgcctcggccgacgagttgcccgtcaaggagattccccttggcgatgatccatccaagaccgccaagattggcaaaagtacggcaccaagccccggagcggcaagccttcatccgagaggaggtgatgcggctcctggaatccgagaagtcatccacccagagtggctggcaaacccggtggtcgtctcaaaggccaacggcaagctccggatgtgcatcgactacacggacctcaacaaggcatgccctaaggatcccttccctttaccacgcatagatcagatagtcgactccactgcggggcgtaatgtagaggtgtatgtcgatgacttggtggtaaagacgcgccaccaggacacgttgttgcaagacctagctgagactttcgacagcctcaggtccacgtgcatgaaactgaaccccgagaagtgtgtgtttggtgtgccggcgggcaaactcctcgtgcgtcacgggatgcatggccgccctgagtcgattaatatcgaggctgggaaagagggcgttgcccctattcaagctcctcaaacgctctgggccgtttgtatggtcggaggaagcggagcaagctctcagccagctgaaagcttacctcacctcccccctatcctagtggccccgggaccagaggaaccgttgctgctctacttggctgtgaccccccattcggtgagtgccgcccttgtagtagagcgtgacgaaggtgacctgcgtcgcgagcccggctatgggaagggaccaggggtccccttaactagtgatggcccctcgtcccccaacagcccgatgcccgaagcccccaacccccgggaaggccctgaggtccccgtgggagagagagaggccccggcggacggccccgaggcctgtcgcactgacgtggctcgagaccccctcggggcccccgagcacgggcgccccgagctaggttgccctaacgacaaagtcttgatggcctcaaggaaattgcgccattacttccaagcgcatcgggtttccgttgtaacgtcttaccctctcggccagatcctgcacaaccgagagggcactggtcggatcgtgaattgggccatcgagctcgctgagttcgatctgcactttgaaccacagcacacgatcaaaagccaggttttggctgacttcaacgctgagtggaccccggcggacgactctattccgtcccatattccctccctccccggagatggagaagacccgaacgccgatattcgcaccggacattgggttatgcactttgacggctctctcaaccttcaaggtgcagggaccggagtcacgctgacttcgccaagcggggatgtcctcaaggcccttcaaagcggccgaggcgggtaccagcacctatacgtcgccatcgacaagtttaccaagtggcccgaggcttacccggtcgtcaagatcaactggcattatgccctcaagttcatcaggggcatcacatcccgattcggagtacccaaccgtatcatcacagacaacggcacccagttcaccagtgagctattcagcgactactacgacgacatgggcatcaagctgtgcttcgcctcgctcgcccaccccaagagcaacggccaagttgagcgggccaatgccgaaatcctcaaaggcctcaagaccaagacgtacaacatcctaaagaagcacgggtattcttggctcgaggagcaacccgcggtgctgtgcgcgaatcggaccaccccgagccacgccacgggggaaacgcctttttccctggtgtacggccctgaggcggtcctatgctcggagctttccctacgtttgcctcacgtcgcgctgtacgatgaggccaaccaagatgatcttcacagcgatgacctcgattatttggaagaacggagaaggcgcgccgccctatgtgcggcgcgctaccagcaaagcttgcggcgctaccatcagcgccacgtccgagcccgatcactacaagtcagcgacctcgtcctacgccgcatacagtcgtgtttagggctgagcaagctctcaccaatcgccgctgaccaccttgtcccaatcctcgttgccatcatcgccgccgccgtcatcactcccgctctcctcatctga

SEQ ID NO: 45164 - DNA, 291 bp, Oryza sativa
  Clone ID: PAT_MRT4530_48156C.1
cccacgcgtccgaatttttactttttatcgcgactacacggtgccactgccgctcgggagcgagcactatcgacactgcctcacggttgttcttgctagtcgggatgcttgtgaaccacctgatgaggcagccgtccacccttcacataagcggcgcgccagccaacgctcctttggtcaccatcttccatccatccgttcctccttccggtcacgcatcgcttttagccgcgactaagaggaggcccgtcccgtggggggaggacaggggcgtcataacggcggctgggg

SEQ ID NO: 45165 - DNA, 666 bp, Oryza sativa
  Clone ID: PAT_MRT4530_48157C.1
cacgcgccgaccgggagcatccacgccgcaccacataaacgcagaacccggaagccaccacgccgcgattcccgcacccgccccacgtcgcaccgcgcccccactcatcgccgcacacaccggcacacccacgcaccaaaacaccccgccgcgccctcgacgcgcgacacacacgccgcaccgccccacgcccccgcaaccacccacaccggcacccgtacaccacaacgcccccccccccatcgcggcaagaaacgcccacacccgccagcgccgcccccagcgaaacatcacgccgccgcccccaccccccgcagaagaggaaaacgagcccaagaccaccgcctaaccacacgcagggcggggaccgacccgccgcaagaacagaggccgtccaccaaacacggccgagagaaaaaatactcggggcgggcgagaatcacacccactcccgggcacatgcaagccaaaccccccccgataaagcaacaaacacaatgggcccggggcacgggaactcccggaacaaaacgccccggggggaagaataacccatccccgcacacacctgaaaccccgccccagtcagggcacgccagggaccctctccccacgtcaccccccccgcccccagtcgggccgtcaaactgcccctcccgggactaa

SEQ ID NO: 45166 - DNA, 799 bp, Oryza sativa
  Clone ID: PAT_MRT4530_48158C.1
gggggtggcgactgggtcatggtgaacctcttccccatggccctcaggggccaagcgcggggttggcccatgaacctgctgccgcatcggtggctggctttggtcccgccggctggctacggtgcccggcccggctcaactgatcgtcctttcaagtttcaacggctggctttggacccgccggctgactacggtgcccggtccggctcaactgtggacggggattgctggctctagaatttttcggctcccacactcgtgcgaaagtaatcgtccatgaagaaggaagagagattggaaggaagccaccgaaaggaaagagcgaacaaaatgtgtagcgttggggcgcaggttcaaaataagttcacaacctaaggtacgggccggcgagtcgccctcaagttggggcgaaaaagacgcatgggccctagtgccaacaaagaatggagaagagaccgggcccacatcgttagactaggagagtggcgtcaaccatggccaccgggggaaggttttggtcagggctaacgccgggggctactgtcggtgatatgggcccgggggcgtgctgtgcatctgaccggtctgtgaccggttgaatgaccgatgggacggcgactgtgtacccccgctctgtcagtgtgtcaggcggcgagcggtgtgctccgggttcccgtttcctggtgtgaatgagaacccggaagtcctcatctattaaatggcgaatgacaagggcgccctgcatgatttgatgggccccgcgcagcaaccgacgtgcagatagcttctggggcttcat

SEQ ID NO: 45167 - DNA, 460 bp, Oryza sativa
  Clone ID: PAT_MRT4530_48159C.1
gtcttccccacccctcgcctcctcgcgcgctcggtgagagaagcgaagaagaagaagaagaggaggaggaagaagccaggctaagccccgcggcatggcggaccagctcaccgacgaccagatcgccgagttcaaggaggccttcagcctcttcgacaaggacggcgatggtaaaagaacaccctctcctcatccctgttcttgcagcttgctgttattctggatatccatgtcgttgtagcagaatattttgggcgttcttcgctaaccgctcgaattttgcatcgctgtcttacactgtgcgcactacataatgtgaagatctcgtgttacgcttaatctggaaaatttactccgagaattttaccgggctgtagagcttattgggttagattaattagtggcttcccttaaagatgaaactgcaactgttgcgatgcgccgcagcggcttggcatgt

SEQ ID NO: 45168 - DNA, 3516 bp, Oryza sativa
  Clone ID: PAT_MRT4530_4815C.1
atgaagtcatatgcagatcctgtcaaaattagcatcaggcagaaaaaggaatctggggagacaaacaaggaaaaactacaattaggaatgaaatttactgaaccagtcaaggttggatccatggagaaaaaagtttatatgacaatttatttgtcatgtcgtgaagcaatacaagaaggagaaacaattagacaacaatcagaggagagcaaaaatgatgcaatgcatattgaaggaagcaaaagaaacatcaacatggctccagggaggctggcatatgcaggaagtcctaatatctacaatttgcaggagggtgaaggaagcagcagcaaaatgccccatttaggatgcaggaaaatacaacacgtaggaaaaaacttcaattcaccagaattaagcaataccataggaacaattgcatcagaagttgtcaattatggaggacaaatgctatatgatcaattcacattgctaaactcagacccaagacaggaaggacagttgagctacactaacctcatgcaccaaataattcatagtccaactgtcaccatacagcaacaaacaggaggacaagaaagctttacaagtctacttcggacaccagcatttgataattcaatgatcttaacaaccagtagattttctccagaactagaagagcagcaggatatgacatatgagcaacacatatcaactacacactggagctatgaagaatttgatcagatttacaacagcaaatacatcacaccttttgctgagaatacaacagcaagaatagaagagctgtatcaatcaaaaaatagccatttcactacaaaggacaatgaagtggatatggcgactgaaaatgatgattatgtggagctgaattcagatgatgaaaatgagcaggaggatagatctgcaatggtgctgacatattacttgaacaaaattttcaggaagggacttcaaacatgcttcagcaagattcccaaatcaatacaatcacagcaattgaacaagttgagcaacagtgttgggcaagaagaaacaacaagtgagacaaaagctacctcagcagaggacaatgacactatcaatgaagaagacattaacaactacttggctaatgaagaagatagccaagataacactcctgtagtaattgacaagaaacacataccttgcattggcaagaaattcagaactcatgaagaagcgcgtagtttcttcaacttctatgcatatcaagtgggattttctgtagtcattacacaccactacaaatctacaagcaaaaaaagatttggtcagatcaccaagtacacataccagtgctacaggtatggtaagaatgatgatggtcagaagaagaaaaaaaagaaaactcagcagcagaggaatacacaggtgattgacagaactgattgcaaatgcatgctaacagtgaggcttgaaggtgatgtttggagaatactaagcatgaatctcaaccataaccatacactcacacccaatagagaagcaaagttcctcagatcacacaaacatatgacggatgaagagaaaaagttgataaggactttgaaacaatgcaacatacccacgagaaatatgatttcaatattgtcatttctcagaggaggcatagcagcactgccatataccagaaaagacgtcagcaatgttggaacagcaattaactcagagacaagaaatactgacatgaatcaagtgatggaatatctaaggcaaaaagaagcaaaagatcctggctactattacaagctgactctagatgagaataacaaagttaagagcatgttctggactgatgggaggtcaacacaactctatgagcaatatggtgaatttgtgagtttcgacacaacttacaaaactaacagatataatatgccatttgctccaatagttggtgttacaggccatggaaacatatgcatttttgcatgtgcatttttaggagatgaaactacagaaactttcaaatgggtttttgaaacgttcctaacagccatgggaggaaaacatccagaaacaattataacagatcaagacttggcaatgagggcagctatacgtcaagtatttccaaacagcaaacatagaaattgtttgttccacattttgaagaaatgtagagaaaggtcaggaaatacattttcagacaagagaaggaaagatctctatgcagaatttaatgacattgtgcacaatagcttgacaagagctgaatttgaaagcctatggttgcaaatgattgcacaatacaacttggaaaatatcaaatatctggaaataatgtggagaacaaggaagaattttataccggtgtattccaaaacagatttttgcccatttatacatagcacagcacttagtgagggcacaaatgcaaggtttaaaaggggagttggcccaacacatagtgtcatgacttttctactggaatatgaaacaatcaatgacatcatcttcgacactgagtatgggaaagattatgaatccagaaacaagaagccaaagtctttttggtcaaatgacatgatagaagaacaagcagcagacctatacaaccatgggatatttgataagtttcaagatgaattgaagggaacactaaatctagaagtggcagctatacaacaagcaaaagcatatgaagtatatgcagcgccaaatctgaaacaacaagaattcagaccaagaagatatgttgtgatgacagacttaccacaagaaaacttcgtgtgcatatgtgcaaagttctccaaagatggaatcctatgcagccatgttttgaaagtgatgttgtatctgaaaatgagcaagattcctgataagtacataattgaaagatggaggaaaaaggagagaaaattaacggtgagcatgcaacttgcaacaaatgatgagaacagttctgtgctaaggttcaatgtattatctagaagaatatgcaacatgacatcaaaggcatcaaaaagtaaggaaacatatgagtacctgctaggagagattgataatctggatagcaaccttgacttgataattgaagatgcagctcaaaatcaagcatcaattgatgaaagcaacacggtggaaaacacaagtgaggataaagcagaaaaagaaacaacaaatgagcaagaagatattcaagaccctgacatagctaacacaaaggggaaaaaatcagcaagaacaaaagggatggtagagaagataaaagaacagccaaaaaaacattgtacaagatgtggaagaacaagtcacacaatagaaaattgcccgctgatgcgaattgcaagaagtacaaagaaaatacagaagactacaacaagaagtaaaagaaatgaataatatgtaaaatattacaaacatgggcaagcaaaaaaaatcaagcctccaagaaacgatcttttcaccttgctcaaatcagcacaagatagatcagttaacaatagttcctgaaaaaaaattaaaagtgaaataaacataccaaaa

SEQ ID NO: 45169 - DNA, 530 bp, Oryza sativa
  Clone ID: PAT_MRT4530_48160C.1
tgtatttttggtcggatttatttgggccgtccatgcagatatctcgcagcagcagcagcatctgcacgttactcacgtggcatctccaactctaccgccaaaatttgtattctttttttgaaaaaaaaatcgttggctcccgcgaccgcgacgcctcgtcgcggccttggtggtagagtacaagaaggagccaggcttctcttctcctcgagccagcagcaacacgcacgcacgcaccacacacgtagcagcagagcaatggcggcggccatggcgacccggccgtcgaagcggccggcggcgaagcgccggactcgcgccgccgaggtccacaacctgtcagagcgtagaagaagggataggatcaatgagaagttgagagcattgcaagaactggtacctcattgcaacaagactgacaaagcatccatactagatgaagcaattgagtacttgaagtccctgcaaatgcaagttcagatcatgtggatgactaccgggattgtgccgatgatgttccccggtaccca

SEQ ID NO: 45170 - DNA, 328 bp, Oryza sativa
  Clone ID: PAT_MRT4530_48161C.1
ggggcaaaccacaccaattccccattgattaatttcactgggaatatcaggggttcctaacattacaaaaattcattcgctgttacacccttacaccccgagagctccacctgcttaattaatggataacacaccggtttaattcagcattaatcttcacacccccaaacccccctcatatggggggtgtttttttggggactaattaagggaggtaactcgccggagaagagatttatattgttttcaaacttaactttcccaacttgaaaaacgggcagaaacaattggttgccgacttgggacccctttttttcttagcgagggg

SEQ ID NO: 45171 - DNA, 316 bp, Oryza sativa
  Clone ID: PAT_MRT4530_48162C.1
cccacgcgtccggggtgcgatataggttgtcgtcgacgcacatcaccaccccgtggctggcgtcgcagcggcggcgtcgccgtcgtaaacgcaatgctgtcctcggcggcggcgtactaacgccgctgccatctttgggccaatagagctggcttcgccgcagcagccggggattcaaggtggcatggtagccaagcagcaccagaaggcaaccgaggcgcgtgctcccgatgtagacttgatcataggagatgtctcaaaggaataattcacttggtcccatatactttaaagggattaaaaaggtggttaatgc

SEQ ID NO: 45172 - DNA, 322 bp, Oryza sativa
  Clone ID: PAT_MRT4530_48163C.1
gttgacgtaaaacacgaggcctgagagatctgcttaactccagtgcatgtccaaaactcgccttcgggtatgcaagcaacaagaaacaaagacaaagaaaccgcggttaaacctataaacgatagccgatcggctaagggactatccatgcgtggcaatcatcttgaagcatatcaattcaacccgatgacgtataccaagtcgtattgtcggaatcggctgtatcatctaacccagtctgactcggatttagccgatcccgattgtagccgatttggactccagccgattcttactctgtttccgcaacgatcttcatctt

SEQ ID NO: 45173 - DNA, 107 bp, Oryza sativa
  Clone ID: PAT_MRT4530_48164C.1
gcactgggggaggctaggattggtgcttggacgcctgcagcacacagatgccgccggctggctttctttcaccgatcagaatgcggccggcgccggcaaaactgaag

SEQ ID NO: 45174 - DNA, 475 bp, Oryza sativa
  Clone ID: PAT_MRT4530_48165C.1
caaaaatatacttatcctcccatcatgatagaaactgattgtgctttgtgaattgtgatcgagaggagaggaaatgggggataaccttcctagtcattcctttgtactgacaatgtttcagtacttgaggaaatctcagtgatgatacctcgtattgacaattaatacctgtgttaatagatggatacaacacatctttgactgaaatttgcatcggcaatgattgtgtccaaggctctttctccaccagctgctgcttatgtgggatggaacccatgtataacttgaggaagagaagtaaatccaccttttgtttatttcattgaattcatcctttttccttttgaacactgaaaataacagcttgtatgtctttaggattggttcaggaaaatgttattatgacagtgcactagcttttcaccttgttatcccattacattgttaaattaaccatggttttattgccttaacc

SEQ ID NO: 45175 - DNA, 167 bp, Oryza sativa
  Clone ID: PAT_MRT4530_48166C.1
gggcagggatggggaatggccaagtgtatttctaagattgcaaggttgttttacctgtttggcagcccgaacaaagtgctggtgggcctttgaggtgggagatcccctttgccgctgcgttctgccctttgctgaggtggttctcctttgtgttttctgtgcttttc

SEQ ID NO: 45176 - DNA, 383 bp, Oryza sativa
  Clone ID: PAT_MRT4530_48167C.1
ggatcagaaggccaaaaacatatgtatatgaaaaatgaaaatgcttaattgttcatagttagatagatcaacaacaccgcactgcacacatatatactgtttactcatcatgttcattcattctacacatgcatatgatctcatctggcaatggcaagaagccaagaactcctgaaaaaaaaaggatgaaatcttcagagatgtccatagcctaagacctgaccacctgagaagaggttgaggcagagcagggaagcagccagcagcgtccctggaatccaccacctgacaccctcgtcggcgaacatggcgcacagcaccaggcacagcagcagcagcatgtagaaccccagcccggaccagaatccgtcgccgtcgtacca

SEQ ID NO: 45177 - DNA, 307 bp, Oryza sativa
  Clone ID: PAT_MRT4530_48168C.1
aaagaaactaacaccacatgcatgattttttttctttcatgtaccatatcaagttatcaacaaaggacaaagtattcacattttaatttgcaagatcacataacaattattagacttaaagctattttatgtctttctcagcaactggtgtttgtcagattttctttctgtctaaacacaaacttgttactgtaataattaccaccgattcagttcagaatcagagctgcacctgacggccatggaatccagctgaacggagccggcggcggcgggcggcgcccgctttgccggcttctgggccctt

SEQ ID NO: 45178 - DNA, 843 bp, Oryza sativa
  Clone ID: PAT_MRT4530_48169C.1
atggttccggtcactgctcccacaaatgttactcctccaattgatttggtgagtacagcatgcctaaagaaaaaggaggtgcaaacaaaaagctcaaagcggaaaagaaattggcttgataagatgcacaagtccacagagaaaggaagtaagaagggaggtaagaaaaaggaaaaaggatcaaaggaacaaggaactataaagaagggagggaaaaaaaaggaaaaagaagcaacggtacaagacagtgcagcggtgcaaaatatttatcctaatacttctttgcccatggaagaattgtctgaaccatacatggccatcaataccttctctcagatattgacgacatcattttcagatatgtcgactccaatccctgctatcgtacagacatcttctagcttaattggaatcacggctgtggcaaccctccagcgggtcctatccattctgagacatgctacaattgttgcgctgcctgacgaggccatgctgctgcagcagaagctgtaccgcggcgtgcggggcagccgcagtggggcaagtgggtggcgtagatccggctgccgcagaaccgggccaacggcatgtggttgtggagctcaggggcgtgttccgcatcgtggccagcgcggtgcccatcatgagggaggagtcgcgccgtcgcgcgtccacaactacggcgtcaccgacgacgactgcctcgtccacctcgacctcggcttcaagttcgaggcgctcaccgacgacgtccatggcgtgctcggccagacttcccttcatctatctactctactgatttcatttgatgatgattacccatttaccctcatgagttactga

SEQ ID NO: 45179 - DNA, 606 bp, Oryza sativa
  Clone ID: PAT_MRT4530_4816C.1
gatttcgaagatcttggactatatggaaagctagtttcatgggctatcaaacctaacataaaacatggtccaaaaccatcaagagatgtcgaaaaacttgcaaagacatatttgtgttaacgaccaaatttggtaatccaaggatcagagataaagaagaaaccgagatggaactcgagatgtaaatcgtcccgtaaacagagtgagggtcggctgaagtccgaatcggctacgactaagatcggcagagttcgagtcggacgaggttagccgattgagccgagtccgacgatatgatatgtttggcaaaagtctgacgcgaagacttatggtatcttagagtttgttagagatatgagtcgtgtccgacatggacatattttgatcaaatcaactggcacgctagcatacccgaaggcgaattttggacctgcactggagttaagaagatctcccaggcctcgtgttttcacatcaacaatttctaaatctgaaaattttatttttgatagtatatttcaatccaataacctatcatcttaatgactttctcggatttaatgcgtgactcttcatttttccacacaagattggctacatgggcat

SEQ ID NO: 45180 - DNA, 560 bp, Oryza sativa
  Clone ID: PAT_MRT4530_48170C.1
ttcggcacgagggaacagtcaaaggaatgtggacggtgacacttctgcggcacctggagatggtgtgtatggctcaccgttgtctatcaatagtgttcttcaatgcctgatccactgcatagcctgttttcttttgtgccattagttatctctgctttgtataaaaaaaaataggcctccatatctgatgaagctatccctaagcgcttttatttgcgaacccttttgtttaatcctaaaaatataaaatgagtcctttggatgaggtactttctttttttagtaaattagtatggagtatttctttctgcaattccaattatatcaatactttaatcctatttattactcctggaattctctatttatgcggacagataatacctcaccctaggaagagccgttttgaaggatgactaatttttagaggatatatgcttgctatcttccttcccgtcctttgtttaggatagtgaaaaatattttttccttttattttaggaattttgggaacatcctacttctctgttatgcttttgtaggatttttttagttgatgg

SEQ ID NO: 45181 - DNA, 1117 bp, Oryza sativa
  Clone ID: PAT_MRT4530_48171C.1
attgatttggtgagtacagcatgcctaaagaaaaaggaggtgcaaacaaaaagctcaaagcggaaaagaaattggcttgataagatgcacaagtccacagagaaaggaagtaagaagggaggtaagaaaaaggaaaaaggatcaaaggaacaaggaactataaagaagggagggaaaaaaaaggaaaaagaagcaacggtacaagacagtgcagcggtgcaaaatatttatcctaatacttctttgcccatggaagaattgtctgaaccatacatggccatcaataccttctctcagatattgacggggccaattacagatgatgttttggctgatttctagtagcatggacagttgctgcaatctgaaatataacagattgtttagggggatagcttttgcttttgtcgaagtgtaaagttcagggaattgcagaattgcatttctgaatagcagagcattttgtgcatctctgaacttgcaacattcagaattaccttttattcaattccaaacaatttacaacacaatgacaatcacaagttacagtcttgctagctctagcacaaatgtcacttcacaagcaagacaaccttcctctgttactcactgaaaatttcagacatagcacacgatgaataaaacacactggaaatttcagatatatcgactccaatcactgctatcctacagacatcattttcagatatgtcgactccaatccctgctatcgtacagacatcttctagcttaattggaatcacggctgtggcaaccctccagcgggtcctatccattctgagacgaggagcaactccattctgagacgtgctacaattgctgcgccgcctgacgaggccatgctgctgcagcagaagctgtaccatggcgtgcggggcagccgcagtggggcaagtgggtggcggagatccggctgccgcagaaccgggtgcgcgtctggctcggcacctacgactcagcgacggagcagcgctcggcgaggacggcgacggagcagcgctcggcgggatggcgcggcgctgctctcggcgaggacggcgccgctctaggtgacgacggcgacgggacggtcctccatccctgcagcccggggatc

SEQ ID NO: 45182 - DNA, 3073 bp, Oryza sativa
  Clone ID: PAT_MRT4530_48172C.1
agtcgatcaaaatgttactccaatgtgtttcagtatattgctatactagtgtttcagtaagcgccggagcgcagcaaaagttccaatgtgctccaatgtgcttacgtatctctacaattctgcagcacaaggagaggtaaagtaattaacctgaaaattaactaattatcaaggctttagcatgaagcggtggtgctgccgctgccgcttgacgtgaagctgacgccgctcatggaccctccgctgccgcccagaccagacgccttctccttggccgccctccggatgtcggcttcccggcggtcggcgaaggacaggaaggactggagcttgctgcgccgggagagggagcggctgccgtcgctggcggacggctgcagcgcagcggggtcctcctccgcggcgtggcgggagtactggtagaagaggttgcaggcgtgtatggcgagggcgaagatgcaggcgaggccgcagatgaggaacagcgccgagaagctgtacacgtccagccggtccggatcctgatccagctcgctggcctgcgacatggacgacatgtcgctcgccagccacttgtcgtggatcctctgcaggtcgccgttctccgacagctccaggatcgccgtcgacaggtccactgacagcggcgagtccctcgggaacgcgaagccccagccgctcttggtgaactcggagcccacgacggcgaacttagggttctgatacaagaagagctcaatgtacgggcgctcgtcgacgatggccgcaacgcctcctttgctggggccaaggtcaagtgccttcttgtactcctctggtgagccgagcgccttaagcctcgagtgggcaacgccgagctcctgggcgaggtagttctccgcgaaggacccgacctgaaacccgatgggaacgtcgctggtgatcaagctgtcgatcccggtgatcggcgacgtgagctgctgcacggtgagtatggaggtcaggctggcagtgtagctcgactggatgatcagaacgacgaacagccatatgatgatcacgaagcggccgagagtgctcctggtgtcctctcctggccagatcacatcatgaagtttttgagtttctctagtacgatttgctggtttcttgtagagagtctcaggagatataactgatagcccagaatagttggaccagtaaccaactgtccgcaaaccagatcctattatgctgacaatgtcatatgcaggctggataagattaccacctgaatcaaattttactgggccagttgcacccaagaagtctacctggtggattttttctagtagcagctgtccgccgtcaaagacactcaatgcttccaaattcaaccctcttcctgaaatttcatttagtttggggtcaggagagaaagaaatgtttccgccactattgaaaaatgcatccagcgcatgagcaagcatccagacagtatcataagcatacaggccataagtactaagcaagaatctgctgtgaccactatcctccttaagcaattcactccattttgaagacaacatactcttccttctggtattttcagtgtggtgacgcaatgtaagaacaccctgcattgtgctcagtaatccaatgtcgagatgtaccgatggatcaaggtatgaagtgagccaatctgttgcaatccacgcatacccattggataccatgccaagtttgagtgcttgttggaaaaccacaagtccagagtcgggattcgcatgcaggatgatgacccgagactccatcattgcaaccttgatcagcacatcagctatttcattgttgcttgctcctggcctaaatggagctttatacaggatcttagatcgcctcttggaaagttcatcgcctaaagaggatattgcatttcttccataatcattatccacaaatatggttgtcacttgcttccacccataatactcaactaagtcagcaacagcagtcatttgaaattgatcactgacggtagtccgcacaaagaacggatactcaagtgacgaaagagttggatcagttgcagaaaaggacatcagaggtacgtggagttcatttgcaagatgagaaaggacatgggcggtggtagaagacaatgggccgatgattgccactgtatctttctccatgaattgcaaggcttgcacaatgccaagaaagcgattgcaactggaatcatgcatatgaagatccagctttgttcccggaaggatattcgaatcattgttgatgtcattgacagcagcaaggacggcaagcattgcaccagactttgcagggtcagtctcttcattgttgaaaggatcagcgccaaccttcttacgttgactagcttcgttaaagatttcagaatcatttgcatcaatttccacgacataccaaacatcagtgtatatgaagtactttggtccaagcaactctagcaaaggatcaattgagtcggtagcatgaatcaaattgtggataaacttgtggtaaattgccgactggaatctcccatccttgcccagcttcacgaaatccatgagcgcatcaagtgccagatccctgattgcatcatcactgtgcggagacacggtgagctcgacgagcgccgcaacgagctcgtcgaaacgcttccgcaaccaggacctaaacacaagctcggggtctgcatcccccgcggccgcggcggccgtggcggcggcggaggggatggaagggaggaggggcacgaagaacgactggagcgagatgagcgcctccagcgcgaggtccagcggcgcggagggggagaggagcgcgaggagggtgggggcgtggttgaggttggcgcgcgacgagaggagctcctcgccaagcgtcttcacctcccctagggttagagctccggttttggacctccgcttcttacttcccgccgccgtcgccgacgacgatctccccatggctggacgaccgcgcgcgtgggggaggaggcggcggcgaggcgaggggacgaggtgcggccgggcggcgaggctggggagaggaattgttcgcggcctcgtgccgaattcctgcagcccgg

SEQ ID NO: 45183 - DNA, 1273 bp, Oryza sativa
  Clone ID: PAT_MRT4530_48173C.1
atggccgcggcgaccgcggcggcggagacgccgcccacgctgctcgagtacatgggccaggctggcgcggccgacgacctcgtcgtcctcgtggcgcacgtccagagcgcgtgcaagcgcatcgccgcgctcgtggcgtcgcccgggaacgccgagctgtcgcgggggaaggcggggggtggtgtggcggtggcggccgggcgggacgcgcccaagccgctcgacgaattgtcgaatgagatcatcttgtcatcactccgaagatctggaaaggttgcagtgatggcttctgaagaaaatcatctccccatttgggtttccaacgacagcccgtatgttgttgttacggatccgcttgatggttctcgcaacattgaggtatccattcccaccggaacaatatttgggatatacaataggctggcagagcttgaccatctacctgaagaggagagagctcagctcaattcactgcaaagcggcactcaccttgtcgcttcgggcttcggtgcaggtacccatggcttcaccttggatcacttgactggagaatttgttctaacacatccttccatccaaatacccccaagaggacagatatattcggtgaatgatgcgcggtatttcgactggcctgagggcctaaggaagtacattgacacgatcagacaaggcaagggacagcatccgaagaagtactcggcacggtacgtgtgctcgctggttgctgatttccaccggacgctgatatacggtggagttgccatgaaccccagggatcaccttcggttggtctatgaagcaaatcctctgagtttccttgctgagcaggcagggggcaggggttcagatggcaagagcagaatcctctcgattcagcctgtgaagctgcaccagaggctgccattgttcctgggaggcatggaggacatgcttgagttggaaagctatggagatgtgcaacagaaggttaatcctggatatgaggtgtgaagatatataaccttagataatgaggtctgaagataatgtagcatgcgaaaagagaacagggggacctactggagaactctgtatttgcaaaaccgatgtttttacctgtcaggttttctgtttttgtctccgcgactatgcggtttcactgtgtaatatagcagaaaaattaggctgcatttctcccggtacgaaatggaagggacaacacaaatttatatgtaatgcatcctttggctacaccgccccttttatctggcaaaaaaaaaaaaaaaaaaaa

SEQ ID NO: 45184 - DNA, 168 bp, Oryza sativa
  Clone ID: PAT_MRT4530_48174C.1
atgaaggtcaagggtaacatgctcaacaacaagaggggaccttatggagagtatccacaagtgcaagctgagaaagctaggaagagaactctttccgaccagtttgaagccaagcttgccaagagcatggcaagccaagaaaggaagatttccaggagatattactga

SEQ ID NO: 45185 - DNA, 135 bp, Oryza sativa
  Clone ID: PAT_MRT4530_48175C.1
gtcttatagaccactccgggtctggaaggtggggccactcttacctctgggggattgctaacgaacccgttagggacatggggaaccacgactcggcacaaccgcaagtagaggatggggtggtctataccaaat

SEQ ID NO: 45186 - DNA, 542 bp, Oryza sativa
  Clone ID: PAT_MRT4530_48176C.1
cggggggccgggttttgtttttttttttttttttttggtgtttttttttttttttttttttttttttttttaaacaaagaaaccctttttttttaactctaaaggaaaataacaaccccctcccaaacccaaacaacccataacccttttataaaggggagggagggaaaaaacctttttttggggggggggggccaaaaaaaggagggggggggggaaaggggaaaaaatgaccacctttttaaagaaattaaacccggttaccaaaaaaagctaaggggcccaacccaaaaacctaatccaaaaaaaaaaaaattggggggaccctccaaattcaaaattaacaggaaaggattttaaacccccaacctgggccccgttaaaagccccgggggcccgttttccccattttaaaagggggggggtcccactttgtttgaacccctgaaaaggcaaagaaccaattccttgggggcctgcttcccgaccaaaaaaaaaggttcccaaaaaagggaatataaccggagggggtgaggggccct

SEQ ID NO: 45187 - DNA, 375 bp, Oryza sativa
  Clone ID: PAT_MRT4530_48177C.1
atggcgaatctgcccctcggagccggagcgtgggacattgggacgtcgcgagtcgacgcgttcacgtcagcgcgggcgggcacaaaggcggaggttggccggagcggcgccggtgtcaaggccggcgcacgggcggaggtgctgtggacggcgggcgcacgggagaaggcggtgcagacggctcggcgcacggtggatgcgaccgtggtgggcgctgctagatctggacccccttggccatatctggcggccgatggcaaggacggcgggcgtatgtgctggcgcgcgagcaacgccggcagccggaggtggatgcggggagaggagatcggtgacgggctgggctacttgtgcggaggacacgtgatggtgtga

SEQ ID NO: 45188 - DNA, 381 bp, Oryza sativa
  Clone ID: PAT_MRT4530_48178C.1
atggcgtgggttgctggcgtagatggcggggacggcggcgggcggcggggatggcgtgggttgcgggcagagagcggtagcggagagctgcaggcgctgtggacggggggacggcgacgcgggtggcggggacggaggtctcgatctgacgtgcgctcccgcaaggttgtggagtgcgaggccgagctggttgcgccgccgagctactgcatcgccaaccgcttcactcgcgattgggctgtacaacgggcgctgtcctcagtggatttggcatcagctgctggggtgttcgccaggggacaattggcagcgatggagttgttgttcacagctctatggaaagacgccttgcgcttgatacgaaagattgcggaattatga

SEQ ID NO: 45189 - DNA, 352 bp, Oryza sativa
  Clone ID: PAT_MRT4530_48179C.1
gtttatctcacaaaaacttgcaacaactgtataatgctcatgaccccacacgtggtgcgctcgttgccattcattaaccgaggagaacattaatccttctgcactttaaacgggctagcaggcattagcaggcacaagagccaccatgataccaacaaggtaaattctgcagcaaaggggttgtacgaggccaaccatagtattataactacgccatatatacgtggagccactagactacataatgcatgaactacacgataacaccaggagcgccactgtggcactttgcttgaacgcagggatatccactaccaagacggagccgtacatgatgcaactaaagtggata

SEQ ID NO: 45190 - DNA, 579 bp, Oryza sativa
  Clone ID: PAT_MRT4530_4817C.1
ccacgcgtccgattcggaagcgccagaggtctctcctagcctcgcctcgccttcttgcgccgcaagaagaaaagcagcagcaaagcaagccagccatggccgccgccgctgcgtcctccgccgcctggaagaggtggatccgccccgaggtgtacccgctcttcctcgccaccggcgtcgccgtctccatctgcgtcggccagctcgtccgcaacatcaccggcaaccccgaagtcagggtgttgaaggagaagagggcggccggtgtgctggagaacttcgacgaggggaagcgctactcgcagcacggcttcaggaagttcatcgacgggaagcgccccgagatcatgcccggcatcaacagcttcttctccgacccgcccaagtactaagaccgtgttgttggctggtgggattgattgccatatgccaccgttttgccggaatttcaattcatatgcatgtttcaacatgttcgaatatttgatttgagcgtatacaaatattggtctctgatctgaataatattcatcagacccatgcgtatgcagttttgacttttaaaaaaaaaaaaaaagg

SEQ ID NO: 45191 - DNA, 536 bp, Oryza sativa
  Clone ID: PAT_MRT4530_48180C.1
atggcgtgggttgctggcgtagatggcggggacggcggcaggcggcggggatggcgtgggttgcgggcagagagcggtagcggagagctgcaggcgctgtggacggggggacggcgacgcgggtggcggggacggaggtctcgatctgacgtgcgctcccgcaaggttgtggagtgcgaggccgagctggttgcgccgccgagctactgcatcgccaaccgcttcactcgcgattgggctgtacaacgggcgctgtcctcaggcttgcagcgccatgtccatatccacctcccatgttccgtcctcacctcaacatcctccttgaattatctcctagctcagtgggtgggttggcggctgcgtggatttggcatcagctgctggggtgttcgccaggggacaattggcagcgatggagttgttgttcacagctctatggaaagacgcctttcgctagagtatgttgtagcacaatcaatgttgtactggagagaagcaggaatagagcagctgcaatgaatatttacaatgataag

SEQ ID NO: 45192 - DNA, 417 bp, Oryza sativa
  Clone ID: PAT_MRT4530_48181C.1
ggagaactgcataaacagtctggtttatttttatagagaaattgccgaagttatgtcattacatcgagaatgatgtaattacacagaaaacatcattctgtaattgctaggtaatataccatttattgaggcaaatattactgtataccaagaatagcatagaccttcaatgaatttttcaaatcttcctacatttcagacagataaattccagataaatgaccatatgtcaagcaacgtttagacatccacaagctaacaaggcttgaagaagatcaaggattattgggagggaacaatgtcatacttgttacgagtgttcaatagcacatggtagatcgggtcttggtacgacacttggaaaagttgtatgacaatgtagccgcatgtcgtgatgcttccaaagctttttaacaa

SEQ ID NO: 45193 - DNA, 402 bp, Oryza sativa
  Clone ID: PAT_MRT4530_48182C.1
atggttattgcatcagcagtggggcgggtgtggaccgagtccaccaaaggtgggccccactcgtcagcggtacaaggggcagcaggccaccgtggaccaagtccacggcgtcgatcggacggtcgagggtggccgggcggcatagccagcgaggaaggcaaccgtgcaagcaaggcggctgcccgacaagcagcggagaggagagcggggagtagagaagggtgctctccgagcaccaacgacgaaaaaggcggtgcgcggaagctcagctgtgagagaccgaggcggcgctccacgaggaaaacggggagcgaagctccgacgacgaccggtggtcgtggaggagcgtccgagcacctccaagacctgctaaaggtggagaaggggttaggggaggaatga

SEQ ID NO: 45194 - DNA, 252 bp, Oryza sativa
  Clone ID: PAT_MRT4530_48183C.1
tgacgtcgcatgccctacgtaagctgatttaacgcgcctgtttgttgtggacaaaacattattgtgtggtggcatttggcctgcccacaggggactatacttggagccgtacctatctgccgggaaactgctggggtaccgcatacgagtgccggactgctgctgtagctaccggcatccgtgtgtgtgtgctaagctctcacacctgcgatcccctgtcacacacctgcgcgatatcacaacacacacctt

SEQ ID NO: 45195 - DNA, 2903 bp, Oryza sativa
  unsure (1)..(2903): unsure at all n locations
  Clone ID: PAT_MRT4530_48184C.1
atggccaagaatgtgaaggcagcagtaattcaagcactccgctccatggatctcgaggaggtaccaacatgctcccgtgttattctggtctggcacatcgcaacaagcctatgtgagatcaagcttgccaatgaccataaaatcaacttaacaacaatgtcaagattatcatcgtttctggtggatgaaaaagctcttacaggtgagcttcaaaaggcatacacagtgtcaaattgcttatcatggtactgtatgtacctgctggcttcaaagcccaaactgctcccagaaaccattttgatgtccaagaaggcctttcaagatgctgttcagtgtgctcatgaaatgctcagtgattgtcactcctggcagagcatatacaacaagcttatgaaagaggcgcagaaagctcttgttcaaggtacgcatggtctaaatctgagtggaaacatattgcaacaaggtgctatactggctaatgaactcatcaagaaggaggaccaaaaatgtcgttgggagatcctatctgatgtgtgggttcacttgcttgtgcacattgctcccagttctgacgcagcagctcttgccgaggacctcaaatccggtgtcgagttcgtaaccgtcatctgggctttgttttgccactgtggcatcgagaagagcaaattatggcaacagcagaagagtgcaaatttcaggaacagcactcctggaccatctaatcagagcagtgatgtgtctacccatgttcaggacacagtcagctctagtccacctgctgctcgatcttcagaaattcatgtagaggctagtcctacttctgagcaaacggaaaagacctgcttcgtcgtcctcctctccggtcaagcctggatgtttatcacggccaacctgccgccggagtgctataaaaccgatggccggctttcatcagcagctgagccggctgggctctacagaggagtaggccaccaaaatccagctcctcagccagcaagaagaactactaccacgattcatggaggaggctaccaaaagagcactggtgttaggagccaccaaaaacaagcagttgttcagccaactgtaagaccatcatcatggctccctggaggaacttacaggaaacctgttaccttcaaaactcaaaagccaccaaaaccagccattgctaagccggttgtaagaaaacatcttattcaaaatgcatttgctaaccagaagaaccatgagcaccatgagcagaataaggttaaacctgccagctctagtggcaaggtgaagttcaccgagttcaaaacttcagatatcgatgctgcggtcagcaaaccagtgatgcggctccatgaaatgaaagattataggcaagatggtacctgggatgttgcacagatcaggagggaatacccccacgctgatctggaaaaaggtaaaactgttgttagcagatctgttataagtgcacttagaagaagaggaccagatggtcctcctactgcatcgacccgtttgcactgggagaagccgaggctgggctggatgaaacttaatgtagatggctcatttgatgctgatcgtgggaagggaggtatcggtatgattctacgggacaacagtggtagtacagtttttgcagcatataatatatgcaagctcagaaactttggaatttccactctgttacatccaacaaaacatgtaccatccgccattgaggaagttattcagggaatgcccggtgaaaaagttattcagggaatctttcggactttcatggacattgatgactgcaagattcagattcagacagatgtatcagctctgggtatcatactacttcagctagttacagggcattcagatgcaaagagtctgagagattttgtggcacagaaactgggagatgatagtgaattccaaaggaagagcattctgcagaagagagaaatcctgaaagggattgtggatcctgagctgaaaaggtgtcaaacaccagtggaagaggaaaagcctatggacgttgctgttggcattgttgtcgtcgttgttggcgccatcagtgctgttgcgaccttcatccttcttggtgctgtcatggtcaccttggcgattgttacaatcattgtcgtttgtgtagtcactgctgcacaacaataccttgaacaggcgaacaagaacaaagcttctcgctcaagtggcggaaataagttcattgtgttcaaaccttcagaaatagatgctgcagtcagcaaacgagcgaagtggctccgtggaacagctacatataatgtgtatcggtcagattttgatggaatggatattgctacaactgttcccaaaggaacactaccagaatggattttgatgcaagagtttcatcaagcgttggatgtatctgctctgggcatcgtgttgcttcagctagttacagggaaactagatgcaaatggtttaagagaacgtgtgatctactatctgggagatgctaaggggttctacaagaaaacttcatcgcagcaaagaaaaatcctagagaagattgtgaatcttgagttgaaaacagacagaacatcagaagatgttgccaggatgttattcttgggattgaggtgcagcgatccaatatcgaaaaatcatccaagcctcgccacagaagttttgccccagattgagtcaatgaagaagtagtgccttcntcatacttaagttggtgacggcttcaagtactnngtgtgatgaggaggttggccaanntatatgggtttcttccaagaaattggaaaagaacatgggtcattggacttctatgggtaatctattggttgttaagttcaactcttgaattaacatttcctgtacctagtgcaccaccacgttaataatctcgattgacattggatctg

SEQ ID NO: 45196 - DNA, 163 bp, Oryza sativa
  Clone ID: PAT_MRT4530_48185C.1
gctgcacatctaaacgatgcatggcttcagttatgatgcgcatattgttgatgaatcacatgcattatatcgagagatctgtgcccggatcacaaggcatagatttattgggcgacgactggcttctaaggcttcgaagaatggttcgacaaaaggcttgtca

SEQ ID NO: 45197 - DNA, 374 bp, Oryza sativa
  unsure (1)..(374): unsure at all n locations
  Clone ID: PAT_MRT4530_48186C.1
gatccggtcgagattgtttatatactagtattatctgatttctaaaaggaatctcacaacataatcttccaaaaagttgcacgtttttggtcccatanccgtgttgctgaaatttcttgccaatgacatttcttggatttttctcntaatttaatggtagctacttanancggcaattcaattttactcttgaaacactgtcctttacttttcggcgcgggtgagtncaatttggataggangctctttttatntntngagaaacatacntacatacatatatatatatatatatgatgtgcttgattaanctttggatangactggtttctttctgatggctgtctgccattttcaggtgcggtaccagaaca

SEQ ID NO: 45198 - DNA, 789 bp, Oryza sativa
  Clone ID: PAT_MRT4530_48187C.1
ttaacccactcttgtacctgtcaaatgcaggagtgctgcatctgcttgtgtccctatgaagacggtgcggaacttcgagaactcccctgcaatcatcatttccactgtaccttggtccagaagacgtctaggtttcacaggacgagcaatctgttgaaggattgatatgctccagttgcgttctttagattctacccctttggtgcttgatacccttgtctgcaatcctgttgaagcaaattttgcactttgttcgatgatgtttaagcgacagaggctcgccacaggcatgatgtagatggtggctcgagatgaatagcagagcttcttggtatccttgagcctaaactcaaccgtagtaaccaccacggatctgcccttcctgagtatctgcgcttcaacttccacttcggaattgagtcgggcggcggagagataggcggtgctgagctcgccgaggaacatctccttgtcgccggccgcggcgcgcgcgcacgccatcccgacggcctccgccacggccgccaccatgccgccgtggagcgtgttgtacccgttaacggcggcgggggagacggtgagcgtgcaggagacgcgcggggaggcggaggaggagacggcggcggaggagaggacgccgcggacgagcgcggagtaggcagcggggagctccgcgggggccgggaggggctccccggcgccgaggacctggaagaagcgctgcgtccactggcgggactccgccggcgaaggcttccgccgctcctccggcggcacgggcggcggcat

SEQ ID NO: 45199 - DNA, 252 bp, Oryza sativa
  Clone ID: PAT_MRT4530_48188C.1
atggactatcgtgtattcgggtcggcctggcacgggccgactattattgggccgttggccggcgacctcggcgaggcggcgccctcgccgccaccttccctctccgacgggcccgcgtcgggtgccaagttccgccggaacgagtcggagcactcgaccgcgggctccgacgatgacttctgcgccatcaccgcggcgtgcgccaagaaggggggacgagaggtcaccggcagtgaagccacacggggatga

SEQ ID NO: 45200 - DNA, 120 bp, Oryza sativa
  Clone ID: PAT_MRT4530_48189C.1
aacgcaatgatgtcaacagtgaacaaatgctgacatgcggtagattagagaatacatgaccgaacaactagaatgtagcaggctattgtacattaatacagacagagctacgagagctcg

SEQ ID NO: 45201 - DNA, 508 bp, Oryza sativa
  Clone ID: PAT_MRT4530_4818C.1
tttgcatcgcctccggatgagcaattataatgtactgcttgcctgccccagtgctgactctagtgtattgtgcagtgcagcaacgattatgtggccatgggatgctttagttaaagggttggatttctcaccaaaacattttaaccaaccacctgatggtatatccttttcttggtacggtcactataggggaccccttgatgacttgttcttgaactcagagtcagatgactctatggcagagtcagaggactccctggcagagtcaagggactccaaggcttttcaaccacataccaagtcagtgaaaccacctattttacccaaatctgtggccaatggggttaggcaagtactgtactcctttcctgaaggtatcagtcttccaaatcttcgagcagagcttagaaagaatcatgtgttcatggataaaggattatttggcttcaaaaacttctcttctcttctccaagccatgcctgatgttgtgaagtttatagatcctcta

SEQ ID NO: 45202 - DNA, 1505 bp, Oryza sativa
  Clone ID: PAT_MRT4530_48190C.1
aagtgtccaattagtacggactaattaaaatcatttcttccatatcgattttgcaaatttgcagttcgttctgcggctacacttgacttggatcaagagatgatgattaattgattgattattaattaagcctagtgttttcttggtttggttcatgcatccatccatggcggcggcaggtggtgcagttgatcgatggttctagtggtgcaggatgggagggtggcagtagggtcccctgagccagccgccggcgacgagccggttcgccgcctccgtcgtgtggacgccgtcccagcacacgtgcctcgacgggtcacggcacgccgccgcgcccttcatcccgcaccgcgcctcgaactcgtagttgtactccccgccgccggcgccgcagcacgccgtcatcccttaattgaacccgaagcgcgccggcgtgtgcagcatctgggcgaccatggtgtagtagtcggcgtacatgatcctcaccggcgccggcgccgccgccgccgccgacctgtacctggcctggagtccggcgagcctcgcctgcagcagcgcgttgtggtggatggccagatcgttgagcggccggaggcatccgtgctcgtcgtagtccgactcgttgctgctccggagcatggtcaggtagagcgggaagcaccccaccggcatcacccccggcaccacgatctccgccgcgcccatcgcaatcagcttgccggtgatgatggtgtcgacgatcttgggcgtgtaattcctggcctgatcgacggtgaagccgaagaacagcatggcgttgtagtcgttgccgccgagcgagccgaacaggaagagtgacttggacaagtaggctctgcaaccctgtggttgtgtggcgcagatggaggggagaagatggtggaaccactggagctggacgttcatggcgccgttgttccagatcgggtagccgaggccgatggacttgaggaagtcgaagtcgagggcggtggcgccgacgatggccatgttggcgcctcgccggaagtcgccgccgccggcgctccgcttcgacggcggcagcagcggcaaccccagctcctgcgcgaggaagtcgacgacgaggcggccgtcggagcagcggcaggtggggtggccgaagtaggtcatcccgtacggcggctgcgcgaacgtcagcagcagcgtcgccgccgccgacttgttcacgcagatgttccccgtgtccgccagcgagtccccgaacacgaacatggcgttgtacttgcacctcatcccaccatcgccgccgccgccgccgacgccaccggccaacgccggctgcacggcgcaccagcagaggcagcaaaccaccagcacgctgccgacgacgtcgacggcggcggcggcaagcgcgcctcctcgccgcgccatcactcgcaacgccacagctcagtcccggccggccggcacgacaaggcccatgggccttactgggctatctcggccggaaagtgttctgccgtaaa

SEQ ID NO: 45203 - DNA, 404 bp, Oryza sativa
  Clone ID: PAT_MRT4530_48191C.1
atggcggcgtgcccggcagcgaagctgctggctgcgggctacggcacccagcggcccgcggaggcgctgcgcgccggagagcgaagctgcggcaccagcaggtggacggcggaggcatcgcgtcagacagcagctccgtcgttcgctcggcatacacgctccctcacgtatcctggagctgggaatggggctagctgctgctgggcctcgctgcacttcgtgagggtgaacgacggcggcgcacgagtctccccctccaccgccgccgcgccgcgcgagtgtgtgtcgccatggccgtgcatctatgcagccgccgccgttgcgtaccatgcatccgcctccgccccctcccccatcgccgtggggagagagaactgcggattcagtataatctgcgctgggag

SEQ ID NO: 45204 - DNA, 602 bp, Oryza sativa
  unsure (1)..(602): unsure at all n locations
  Clone ID: PAT_MRT4530_48192C.1
atgttctctagcatgaaagaagtaggccgaaaggcgattgataaacagaaacatgctctgcatcgcttaaggaagacccctgatagtaattgccccgcaacagtcaccttgtcattaagtaagcaagatgacctaggtaaaagtgtttctatgaagacaaggagtgaaatcttcaactcggtatcggatgctacacggagtgaaaagtgcaagcaccggttaccaggtaatgccatgtcttgggagatgatccaatgggaaagaacacatcaagggcaaaggtgtaaaggaatacgttgaatgctaaatgatgacaagcatggtatcctagtaatgacgagccaatcgaagtcagctaaaggttcaaccagggacaagtcaagtgaagagaagaatccatctgcaacaggagatcgagccaagcagtccagagtgaagaaagtttgttaggcaagtttgttatagaagaccgagcgaaagaagtcagacaagaagagaagaccgnccaacctatttctttgttgccttcttgaatttcggggacgagaattttcttcttcttgggcaaacaatccaagaccccctctccctttttttccccc

SEQ ID NO: 45205 - DNA, 945 bp, Oryza sativa
  Clone ID: PAT_MRT4530_48193C.1
atgcacgtcccgctcgccaccgccctcgccaaggagctctcctcctatcctgccctttccctatccgtcgtcgtgccctcctcctcctccggcgcaggcttgctgcttggctgggatgccggcgagcgcccgcggaggggatgcggcgagcgcgccgagaggaggaggcgggcggtgcttctctcctctcccccgccgtcgcgccgcgccgcgcggcgctcctctccccgaacgagctcgaacgcgaggggcgtagggaggctgagagatgaggaggccggactcccccgcggccgctgcctccagccagatcccagcgagcaggtgtcggggaagagtagcagggcacagcggtcgtcgtcgggccagaggtggtcgtcgcagcaacgacgatggttgggctcgtcgtacttcggcgggagtggctcgaacgacgacgacggggggggggggggggatgactccgacgactctcccggcctcaccgccccctcgccggcctcctcccttctcgtctcgctccctggcctcctcacctcctctctctctggcctcccccgctccggccgccctgctattgccggcatgcttcggccgttgccgctccgcccgtcccgctctaccactgctgcttcgccccaccgttctgcctacggcttgccaccacagctgctccacctgtggcttgccaccaccaccgctctggccatcgctctgccgtctcagggaggccaaggagccgaagcctgtgctctgctctaccggctgctctccctccgtggacgtggacttggtccggtcttccttcccttcccgggcggcctcgccagaaaagactccactccagcagtccagctcctgcgcccggtgggcccactagacttggctgatcgggaccgggacccacccagacgtggacgcgctcactggagtcctcgactctag

SEQ ID NO: 45206 - DNA, 272 bp, Oryza sativa
  Clone ID: PAT_MRT4530_48194C.1
gtgtggggtttttttttttttttttttttaaattaaaaagtgtgtgtgttattctcctaaattgttcgttctcttgggttttcccttttaataaacgaacagggacctgcgaggcgcaccaacttttccctatcagggagtgtttttcttagcacgggggggggatggccatagctggttccaagagagaaatggggatccgctcacaaaaccacacaacaaacgaggcggaagcataaaatgtaaagactggggtgcccaaaaagagagct

SEQ ID NO: 45207 - DNA, 576 bp, Oryza sativa
  Clone ID: PAT_MRT4530_48195C.1
atgatagcacaagaagtacaacgcgacaactccaaggttgatgtgaagggacaacgttgtaatattttccagtccgagtgcaagattcaagacaagatatgcaaattaataattgatggtggtagtactactaatgctatcagttcagatttagtgcatgctttatctttgcctatgagaaggcttcctaagccgtgttatattcaatggatgaatcaagcaggcacattaaaaattactcacaaagtgagggttgcattttctattgggagctatgttgataaagtggattgtgatgttgtgcctatgactgtttgtcacatgttgttggggaggccatggcaattcgatcgcaatgctacccacgagggtaggtccaatcaatattcttttatgcatcttggttttaaccatgtggtgaaaccgatgcacaacagtgctattaaagcggaagtatttcctgtctttaggaagaagaagaataaggcccaaacctcctctccccacctgatgctggcctcctcccttgttccccatcacatagctccagctgctgctgccatctctcctgcgcga

SEQ ID NO: 45208 - DNA, 561 bp, Oryza sativa
  Clone ID: PAT_MRT4530_48196C.1
atgcctaacaggaggccacgcggcctgagacggcctcgcacctcgctccagatcggcgtccgccagcgccgccgccgcgaccgaagaggcgccaggccgccctgccctgccgctgcgaccgggggtgcgtggaggcggccggccggcagggctgatggcgcgctgatgcaggcgggcagggccacatcccgagcccggcgggtggaggaggccgcggtgctccgaccggtcgtcaggaacacactccgcccgcgccgcacctccaatttcggcggcctcgactcgttgatggggttcagcgtacgagcccgcaccggtcagtcacccacttcgtcaccggcgaggggggacgccgtcgcacggcttcgtccagtggagaacgctgcaccgtttcctgtgtccgcgagggtgatcggcggtcatgacgccgatcggccgagatggaccaccacgccgtcgtcgctgtaccgccgatggattacctgtagccaccgggcctcgcttcctggccgaatcgccgacggatcgcgctggcatcatggccgaattgccgatggatag

SEQ ID NO: 45209 - DNA, 2069 bp, Oryza sativa
  Clone ID: PAT_MRT4530_48197C.1
taatcacgcagtgcggacgcacacgaacatcaccgcaacctctcgctcgccgcgccgcggcgcccggccatctcgctcgttcacgcaggcgaagagagctgtaaacactagccaagatgggcgagggacatgaaaccgacaagaacattgaagtatggaaggtcaagaaattgatcaaggcacttgatgctgccaggggcaacggtacgagcatgatttcgcttatcatgccacctcgtgatcaggtctcccgagtcaccaagatgctgggtgatgagtatggaactgcctctaacatcaagagcagagtcaaccgtcagtccgtgttggccgccataacttctgcccaacagaggctgaagctgtatagtcgagttcccgtgaatggattagtgctctatactgggaccattgtcaccgatgacggcaaagagaagaaggtcaccttcgactttgagccgttcaggccgattaacgcttcgctgtatctgtgtgacaacaagttccacacagaggcactgaatgagcttctggagtctgatgacaagtttggtttcataatcatggatggcaacggaacactgtatggtacacttagtggcaacagcagggaggttctttacaagttcagcgtcgatctcccgaagaagcacgggcgaggagggcagtctgctgtccgctttgcccgcctgcgcatggagaggcgtcacaactacctgcgcaaggcggctgagcttgctacccagttcttcatcaattcagccaccaaccagccaaacatcgctgggcttattcttgctggctctgccgatttcaagaccgagctgggaaaatctgagatgtttgatccacgcttgcaagcaaaggtaatcaagactcttgatgtgtcatatggaggggagagtggcttcaaccaagcaattgagatgtctgcagaggtgctgtctgatgtcaagtttgtccaagaaaagaagctgatcggcaagtactttgaggagataagccaggacaccgggaagtatgtcctaggtgtgcaggatacaataacggcgctcgagataggtgctgtggatacactgattgtgtgggagaaccttgatgtcaggcgatacgagctgaagaacaccgccacaggagaaacagtgatcaagtacctcaacagtgaccaggaggcagatcagagcaactttgtggacgaggcaacatcaggagagtttgatgtcatcgacaagccgttgctgctggagtggttcgcggagaattaccagcagtatggctgcaccctggagtttgtcaccaacaagtcgcaggaaggatcacagttctgccgtggctttggtgggatcggtgggatcctgcgctacccagccgacgtcgctgccttcaacgatgacgatgacgacatgctggatgaggccgactatgaagactttgaatagcaatcaactgaaactctgatcaatcccggtccggaaggagcctgcgctggccctgaccgcgtcgggccgggacaagaccctgaaacatccaaaagatcggtgcaagaagattaaaatgaattggagaggatcccagaaatttgatgatgatgccatgggcatgataagtctgttcctcttcgctcaaagcttggaacttgaggatgttcttaagcaaccatggctcccttctgatgctcctatcagaagagcttaagtaataccatatccacatattattctctcattatctcatgttactacaaataatgagccagtttcagcgctggccactggcctgcagcatactctacttgaagaggctttcgtttgttcctttaagtctgtgtctgtggctctgctgctgcaccagccattttaacttcttgattaaacccagagtagtgtgatttgcagccgctacgcttgagttgcctgtatcatgtggcagtatggttaaagcgtcaatgatatttgtgaagtgtggttcttagtattgtgatttacactgctataagttcatattatactagtgttatgtgtttttatgctctgaattatgctgtcgtatattaaatatcttcatgttgc

SEQ ID NO: 45210 - DNA, 440 bp, Oryza sativa
  Clone ID: PAT_MRT4530_48198C.1
gcacgaggaggagttcctcttcccctactgacaaactaccccaatggataaaaacacgacttgcttgtgctcaaaattatggagaggttcatagattgttgcaccagttcttcaaactcaacaggcaaacgcattgaataattacagatcacacggtttcagaacagttcataaaagcaaacacatacagagctaaagcacagttaactcatttgatttagtctgctgattttccaaatatcgagaataagcttcaatgcttttcctaacgcatcgcaacaggattcaggaggatcaagcttcacttattgaatatgctgagcttcactgtgcagaacatgtttggggttgagctgtaaaagtgacctgaatgcagttgctaactgattcgataagatggagcttcatgtagatatattttgtggacacggtttgttcgt

SEQ ID NO: 45211 - DNA, 500 bp, Oryza sativa
  Clone ID: PAT_MRT4530_48199C.1
gcggacgcagggtgaggaacgcaagcggccgagcgacgcgggcgagtacggaaaccaacgaggagggcaagggaaacgaacgatacggggaagcgcgggacacgggggcgcggagaaggcgacgggcgggcaaacagagggcggcggaagaggggggagaaggcgacacagcgaacggggcagaaagcgaggacacgggaccccctcggaagccaaggcaggtaggggaggcaacgccacgaaaccaggaacgcagaacagcaaggcgcgacgagaagacggaccgacacaaggcggagcaagcggcggggcgagggacgggcggacgagaagaagacggcacgaaggacgaggccggacagacggccgagaagagacgaaagggagaaaacgcggggaaccggggaaaaaagggggaagagggcaacacgggaaagcgcagaccacgccgggggagacggaagcgccgagggaggccgagcaaaggggaaggaagctga

SEQ ID NO: 45212 - DNA, 2594 bp, Oryza sativa
  Clone ID: PAT_MRT4530_4819C.1
ccgcaggatccgccagagttcctcaagagttatcttcacgaggcatcctcacgcttttttttttttttttttaattttttttttttttttttttttttttttttttttttttttttttttttttttttttttttttttgctttttttttttttttttttttttttttttttttttttttttttttttttttttttttttttagcgttcgtttatttttatttcatcaactttagtagttctattattacaggacagctgtgattactccaatcaattgacgtatatacaccaaacgttaatccctttcaggactaaattattgattgcactacaacactctttgcaaatttagttcctacgagttcggacatttgtttcaaaattaagttcctactagttcggacatttagaaacattttaatcgacatgcttgtactacattcttctcatctagtatacacatgaaaaagtatgattctcccctcactccttgcgcttccagatactcagcttgccatcaatgggcgtgcagtacatccttctcacctatttgttattcaatataaagctatccttgaggatatcagcagctaatattagtagctccaccatttccatgcccgcagagctgagggggtcttgtttctctgacttcgatgatttaggtgattcagatggatcatagagagcatcactagtaatagcatctgatgaatcccctaaccagcttacggggagagctacaccaagagctgtcttcataaggtttgcttcggttatgagactgttcaacgcttcatacgtactctctaaagagtgagccgatttgacatcctcaaaggccttcataagcacaatatgcagtctatgcactgacgaagtgaggtgttccatagtggcaacactttccaaaagagcagcattttcagctttaacccttgcaagatcctctgagtgatgtttcctgactgtatgaacgttttcatcagagcactcatgcccaatattagtgttttctttttttatccaatgtcttagagatgttctattcatgatagttttaaacatcccttgtcgatcatgtgcaggaatgattttcatattatcaacagccccatgaccatcctttggtgttgaatttcctttcaacatcagatattcttctttaagttttgctaattctaccaagattttaaccttttcctcttttacttgagataagttcttctgaagttcctcgatgacaatttggtttctctgcttctccaataggtatctttcttgttcctgtgagaagagcataagtgcctccatcttctcatgcaaagcttgcacaagcacatccgattcaccaaatgttgcacaatcagaaggaatgtcccccttagggctgatgccagggctgacatctgtagtaacatgtacatctttacaactgctgtcacagcattgcatctctccaacagggttttcattgatttcagggttgatacgaattttacttaacttatcttgaatctcattaacaacagtgctcaactgagatgattcttcttccaatattttcataatgtcatccctttgttgtatatgcaacttttgaagagttgaaaggccatttctcataaactcatcatagagtgcctgtcttttctctaatactcgtgcatttctttgcaaatgttgctcaatttcaaggcccattcttagattgttttgaagcttagctattttagctctcagtgaatctttctcttcttctagagatgcaatgtacttcgaagttgaggttcctccatctgagctgaaactccaattatcagcagaatcgtccagaagaactgaacatttttcttcaagagtaatgttcacagagcattcagggtctctacaacgaacatcataaaatttttgaataactttcaaggaagattgtgtctgctctttaagcctcatcagctccatttgtaaggcatcgtttgaccgtttctgatcatcaattgatgattgatattctcttgtcctttcctcgaatttggcaaacttttgtaaaattgcttcttctcgctcctttgctttctcacactatcaatttcaacagaaaaaatatgcactttgtaacaaagagcaaaagtcacgtatgcagttatcaactctcctgttgcttctctagttccttgttctttgatagctcagccccatgtaattcagcaagctgacttttaattctataagcctcagcaagctcctcttgcaaattttggttctctcttaaacatccacctaacttcttctgaagattttcaatatcctgctccaaagcagctgtcctctgagaaagcattcgagttgcaacagaaacatatccaggaccagcttgttgttgcatgcataattgctcaatatctttcctaagttcatctcgttctgggaaaccatctccgtcggtcgagcccacggtgagcgttctcctcacctctccaccttgactactgcttggggctaacgtctcctgtgccaactgccaagtcgctgccccagggaagagatagggacgaagaaaggctcctgcgtcgtccgaatctagctccat

SEQ ID NO: 45213 - DNA, 603 bp, Oryza sativa
  Clone ID: PAT_MRT4530_481C.1
ggagtgcttgctgcagtacgctcatggcagtggcaaagtccccgttggcgtagaggaggcacctgatggcttggagttcagagaggttgtagtccccggcaaaggcaatgaggccagcgacgaggccagccgctggcgacaccctaggatgttgaataggaccctacgggctagggtctcgtggtagggtgggggtgggaggggtgggagggggaggaggaagaggaggagttcgctggttttagagggatggccgtgggaggcggcagcccagcggtgggcggtagatcgggcaggcggcggcggcggagccacgggatggaggagggtagtgggccggcgttggtggcaggggcaagcaagcatttggttaggaggcagcgggcgatggttgcggattcggcggcggggagccaccggagatggggaagacagcagggcgggggcacctcgccatcgccgccttgaggagaaagagacgggggagggggagagaggatggggagggggctcgccggtgccgttgactctttccggccaaccgacgaggcgagtggcggcacgatggggtggtggcggagggggatcgcgcgagggacagga

SEQ ID NO: 45214 - DNA, 522 bp, Oryza sativa
  Clone ID: PAT_MRT4530_48200C.1
aaaaaaaaaaaaaaaaaaaaaaaaaaaaaaaaaaaaaaaaaataaaataaaaaaaaaaaaaaaaaaaaaaagaaaaaggaaaaaaaaaaaaaaaaaaacaaggccaacctttttataggtatccaaatttaaattcccgggcgggccccccttttttatattccctactttcccctcccttcccttccctggcttttttttttttttgccccccctgaatttacttctccggcccccctttttaaccgccttggggggcaaccccttttcgccccctgatttttttgccttggggccccctcccttttcccttccttacatttaaaaaaaatggtcccgacctgtttcccttcctttagggtccccttattggctgggggtttggcccttccccttagggttacctttaccctgggggggggtttggccccccctcatttggcttttttcctttcctttttcccaccgccccgtggtttttcttccttccctttttttccgggcccccttttgggcttcccc

SEQ ID NO: 45215 - DNA, 236 bp, Oryza sativa
  Clone ID: PAT_MRT4530_48201C.1
ggtactacattgggtagggcatgccctgtgttgattcggttaccaaacgcaaagcactttgcgaaacaaccatgcacagggcaacagaagtacctaatacatgctcgagcataaacagaaaaggggggcccactaaaccaagagagaggtaaactcgcatatggggggcaagtctaggatgaagctagggaacattgacggagctaagtgatagggtacatgcggaaggaaccgac

SEQ ID NO: 45216 - DNA, 2478 bp, Oryza sativa
  Clone ID: PAT_MRT4530_48202C.1
tcactgagacaagtggcgctggatagccgatatagctctctgcctaatttgttctacttcttcaatggcctgggcgtcttgagcatcggttccagagatgacttttaaggacttggtcatgtcagcgacatttttgatggccgatttcaaccttgccttctgttcttcgacagcttgcgggagatcgggtagcttattgtgttccaaatccagttcggcgttgcactcttgaagttgtgccaagagctcaatcttacgagcttcaagccgatcaatattggatttgatcaggccctcggatagttgatcaagcttagccttttcttcatgaacaagctgccgattggcctggattgtagcttcaatatccctacgctcccagcgttcggttaatctcagtttggatttctccagtttgaattgatgttgttcaagataagcagctggagtgaggatgtcggctagttcttccgggatcagagcctgaacttcgtgtagccgagtcctaattgatccacaatctaccaccaagctgtctagagatgatgcctctaacgaatgagagatatcttcaagagtcttcctcacatcattggataagggagctaaagctttgcttgtggtgtcatcttctgtctcatcaaagtaatccttgatatcaaaagagaacagatcggctaagactgggatggcagaagcggctggttgtacttcttccttgacatggtgactccctgcagccgatggaatttggtcacttgatgattgctgtacaggggaagaaggaggaggaggaggtggtggagccaatttgagagttgttgctgctgatttcttcttcacagcagttttcttctttctagctgcagcttgatcaacatcttctccaatctcttcttcatccagagcttgttcaatggatggatctagggcaggcaagtcatcggttggcttggtcttcttcgacttagctttcttctttggggctggagccgatgggtctatagtcgatgctctggtttttctctttttgccggcatcggttggttctctaatgagcccttggagaagacttgaagtcttgggggcatgatagccgatgacagggggagatggtccaccttcattgggaatgagacttggagcatattcgatgtatttgccactattgctcttgtgagggggagaggattctgttgtattggaaaagagatctgtcatgtacatagaagccgattgatggaacagatgcatcttccattcaccccaccatctgtcaaatgccccgctcctgaaggttgccagctctatattttcaatgctgcccaaaggaggtccttgaagattgagcaaccgatccatcattagggttgatgaaatttctcctcggcattggattttatcggcaaagaacaggccgattggtaattgacccatatcaaactgtctggcagaactcatcggatgataaaattcataacaaacttggatatttcttccttgatgaatgccgataggaaggatgcatgggctgattgcagccgagaagacttctctggacttttggtatctctcgtggttgatgtcttcaaatctaaagtctgatgggagctctagaagtgctgagtcctcataggggaaccaaattttagcatctttttgaaagccctcataaaagctgcagaaccaatctttgagcagctcagccgataactttgctccaacatcggctggtgtggatgcatattccccataagacatacatctgcgatgggtgcgttcttctccatcgtcttctataattggctctagtcttgggaattcggcttctgtcacagatggccgattgacaaatttcataaccatcagatttagccaagtctgcaatagccaccatggtccacctgttccaactactaagccgacagctattttggccgatgctttatttaacacttggtataggtagccgagaagaattttgcctaagggaaattgtttctttgattctagggcttcggctacaaattgccagttggttgtaggaccacaactggatccacagaaaaggaacttttctagccacatcagcaagaaagccacatgttcccgaggagtgacaggccctttgcccatgtatgccgctacatagccttggccgattccgatttcgtcccagtgaactttcttgctagccgacatgcgcttgtaccatatagtccagctcttctcgggtgaagttttctcgagagatggccaagatttgaaggtattcttccagtgtcctagatctgggttggctaatctgaaaggaatcgtattggtttcaccgatgatgaacttagtaggatcaaggttgccgactgggccgagaaagtaatggttcttgtgagataggctcggaactgcgatcagattggaaagatgctccacgtattcggctgatgatgtggcagacgggctagtggaggtcgacat

SEQ ID NO: 45217 - DNA, 456 bp, Oryza sativa
  unsure (1)..(456): unsure at all n locations
  Clone ID: PAT_MRT4530_48203C.1
ttttgtgacccggattatacccatgtgtcacacaccacggatntaccacgctattgacccnctgattacgccanagctctanatacgactcacctatagggaaaagctggtacgccctgcaggtaccggtccggaattcccgggtcgacccaccgcgtccgctttgtaaaatggttgaccaattaaggtagtagtccaccgtttaattatagtttaaaccctcctgattttgttacacagcttttataccgatattttagaaatggatttgtgacatatatgaatatttggttggcacgagggtcggagttgtttcttaagaatcatcaccgaatgtttaggagtacccaaactgaatggtatagattttggatgtggaagaagatcccatttatttgcttcagagctatgaatanaaaaaagggccattgttgttaaaaaaaaaaaaaaaaaaaa

SEQ ID NO: 45218 - DNA, 446 bp, Oryza sativa
  Clone ID: PAT_MRT4530_48204C.1
ttattttattcagctgaagtgtatttgaatgggcatagagaggttcttccaaaaggaatgttccgaaggcacaccctcgatattactgatgttcttcgtccggatggtaaaaatctgcttgctgttcttgttcatcctcctgttcatcctggtgcaattcctcctcaaggaggtcagggtggcgatcatgagattgggaaggatgttgctactcaatatgttgaaggatgggactggatgtgtccaataagggatcgaaacactggtatctgggatgaagtatcaatatccgtaactgggcctgtgaggataatggacccccacctagtttcaactttttatgatgagtttaagaggtcatatcttgcactgcacgcttcagttggagaacagaagtttatgggtttcagattgtaaattgaaaattcaagttttaactgaactcg

SEQ ID NO: 45219 - DNA, 966 bp, Oryza sativa
  Clone ID: PAT_MRT4530_48205C.1
atggctgctgctgctgcggctgcggcggcggcggcggccgaagtggggaagcgggtgctcgacacgggctggctcgccgcgcgctccaccgaggtggccctcaccggcgagcagctcaccaccaccgacccgccgcccgccgacccggagccgacggcaccctggatgcacgccgccgtccccggcaccgtgctggggacgctgctgaagaacaagctgatccccgaccccttctacggcctcaacaacgagtcgatcatcgacatcgccaaatccgggagggggcactacaccttctggtttttcaccaccttccagtgcgctccggctggacaccagcatgtgagtttaaactttcgtggaataaactattcagctgaagtgtatttgaatgggcataaagaggtacttccaaaaggaatgttccgaaggcacaccctcgatattactgatgttcttcgtccggatggtaaaaatctgcttgctgttcttgttcatcctcctgttcatcctggtgcaattcctcctcaaggaggtcagggtggtgatcatgagattgggaaggatgttgctactcaatatgttgaaggatgggactggatgtgtccaataagccaagggacaatattggaggcatacatgacagtgggcatatgtttgaaccaaatatgctcatattatgctggggatcgaaacactggtatctgggatgaagtatcaatatccgtaactgggcctgtgaggataatggacccccacctagtttcaactttttatgatgattttaagaggtcatatctgcactgcacgcttcagttggagaacagaagttcatggctttcagattgtaaattgaaaattcaagtttcaactgaactcgaggggaacatttgcctggtggaacatctacagagttatgagatatcagttcctcctaactcagttctagagtacactattcctcct

SEQ ID NO: 45220 - DNA, 411 bp, Oryza sativa
  Clone ID: PAT_MRT4530_48206C.1
atgggcctcacccaacagctgctcaaaacagcctctccgtcgccaaggaagcgtcgggccgtcgctgaggccggccagctctgcgccctccccgacaccgtcgcccagttcttccgccaccgccgccttccagtttcttccccgttggccgccggccgcgccaagctcctcccccgccgccgccgtcagttcttccccgtaagccgccggccacgccaagcgtcgtcgccgcgtcacgtcctcgtcagcctccgcgcccaacggccgtggcacccgcccgcgcgggaccgcttctccgccggcggtgacgcagcgtcaccgacgccattcgcgaccggcctccgcctcgccccgacggcctcctccccagccgccgacgggcttgccaaaagaagagtgagagagagatag

SEQ ID NO: 45221 - DNA, 750 bp, Oryza sativa
  unsure (1)..(750): unsure at all n locations
  Clone ID: PAT_MRT4530_48207C.1
atggtgatggttggctgcttgatcgccatcttggcgcgttcttgctggcacctcgccgtcgccgccgtcaagctcccggcgctgctctgctgcgacgccatgctctccaccgtcgccttcctcaccttcccgctccgcctcctcgccgccgtcgacagagagcgcaaggcaaaactcgcactgctggatcggctggtgggggagatgcagaggcagatggagaggttggtgtgggagaacagggagctggaggagaaactgggcatggcgctcaaggagagcagggccatggaggagattcttgacgagatggaggaggagcacgacgacgcctttgccaggatcactctcctcgagacccagatgcggcggggcaaggcggtggcgcggcggcggagcctggtcagcgtgggcatggcggcggcggtgggggcggtggtgtgggcggcngacccgccgtgcctgccgctgctggcggggctgctcgccacggtgggcgtgtccatgtgcagcgtcgcgcgcttcttcctcctccgcgaggaggccgccgccgcgctccggggtggcagcggcaggccggcctcctcctcatccgacgccgtcgttctactcagcctcaactggttcctcctcggcgttctcacctcccccatgctccccggcgccgcccacgccgtcttcccgcgcgccgcccgcctcgtcgccccggccgtcgcctggttcactgccactgcgccactctcaagctag

SEQ ID NO: 45222 - DNA, 332 bp, Oryza sativa
  Clone ID: PAT_MRT4530_48208C.1
gcctcgaggcgccactccggcgacggggagcggccagaggggacagcaacaggacgcgaaaggacgctcgcctccgggcccgcacagcaacgtgctgatgacgacaccaccaacaacgacaagcatcgcccccccgcaacaaccagacgaagcctcacagcagcgctcatccagggcgtatgcaaggccaacatactgattcatcctgcaatggggcggaaatggaggaaacaacaccaccacggaaggaggaatgcgacctcccaaggcaggagacgatggacgaagaggccccacgccacggagagccaatgagaagaaaactgcaccca

SEQ ID NO: 45223 - DNA, 993 bp, Oryza sativa
  Clone ID: PAT_MRT4530_48209C.1
atggtgatggttggctgcttgatcgccatcttggcgcgttcttgctggcacctcgccgtcgccgccgtcaagctcccggcgctgctctgctgcgacgccatgctctccaccgtcgccttcctcaccttcccgctccgcctcctcgccgccgtcgacagagagcgcaaggcaaaactcgcactgctggatcggctggtgggggagatgcagaggcagatggagaggttggtgtgggagaacagggagctggaggagaaactgggcatggcgctcaaggagagcagggccatggaggagattcttgacgagatggaggaggagcacgacgacgcctttgccaggatcactctcctcgagacccagctgaaggccctcaagctggagaacatgcggctcatcgagcacagggggaaatccatgtgggacaagaagccgccggcgacggcggtgcacggcggcgagagcttaccggcgtccacgagccgcccgtcgaacacgaggaagaggaaggaccgagaagacgaagcagaggaagccgccgccgctcaggaggaggagggcggcggcggcgtcgcgacggaggaggattccgagatgtccgtgcagatgcggcggggcaaggcggtggcgcggcggcggagcctggtcagcgtgggcatggcggcggcggtgggggcggtggtgtgggcggcggacgcgccgtgcctgccgctgctggcggggctgctcgccacggtgggcgtgtccatgtgcagcgtcgcgcgcttcttcctcctccgcgaggaggccgccgccgcgctccggggtggcagcggcaggccggcctcctcctcctccgacgccgtcgttctactcagcctcaactggttcctcctcggcgttctcacctcccccatgctccccggcgccgcccacgccgtcttcccgcgcgccgcccgcctcgtcgccccggccgtcgcctggttcactgccactgcgccactctcaagctag

SEQ ID NO: 45224 - DNA, 189 bp, Oryza sativa
  Clone ID: PAT_MRT4530_4820C.1
atggtcatatctctgaatgcagtgcaccctcttttcagcatgctcatatgtgaaacatgctcatatgtgaaaccacctaactgtattattaatggccctgttatatcatacactagcaatatgtatgacaccttcaaagagcaagctataaaaatgagtgcaaaaaattttatggctggaggtcattga

SEQ ID NO: 45225 - DNA, 609 bp, Oryza sativa
  Clone ID: PAT_MRT4530_48210C.1
agacatgtatgatagctctgcaactgcaagtttgaacaactctgctgaacttggtggacaagatgaattagataacggggaaggcagggggagagggcgcggtgatggtccaggaaaagcctggcagcaagatggggattggctgtgcccaaatacaagttgtggcaatgtaaactttgcctttcgtggtgtctgtaatctctgtggagctgctcgccctgctggtgttagtggatcaagtgctggtggtggtggtaggggtagaggccgtggaagtgatgatgcaagaggaggcagccgtgctgctgctgctgctgctgttggtggtcctcctggactgtttggtccaaatgattggccttgcccaatgtacgaacacccacagaagcttgctgtttcctaacttgttctgtcctctccttatctgtatttattattatctgttgcctgtctggcctatgaacccattgggcagtgctctctatgcctatttgtgcctgttcaaatcatcaatattatttgtaccctgtgtttatgcaccattggagaaacacttaatattggtaataatagctattagaaaattaaatttcaaaaaaaaaaaaaaaa

SEQ ID NO: 45226 - DNA, 306 bp, Oryza sativa
  Clone ID: PAT_MRT4530_48211C.1
acgcggcgggggtaaaggacatgctggacaggtatttcaaaggggaggacttcccggcgcagaactacatcgtcaaggcaggccagctcgccagccagtatcagtaataacccccccttgtgtgttgggtgggtgtccatatatcctctgtttattcctcaagtgtggaattatttctcaagggagagagggacggataggacccaacagcccaagaaacaccctctgttaatgttgtagtaacttgtatgagtgttgaaataatgaatgcctggaagctgaataacagctcaaaaaaaaaaaaaa

SEQ ID NO: 45227 - DNA, 561 bp, Oryza sativa
  Clone ID: PAT_MRT4530_48212C.1
atgcgggcggcgtggcggctcggctccggcgcaaccacggtgcagtggtgcggctgcatggcgtcctggccccggcgcgaccacggcgcgacggtgcggctgggcgtgccatcagcgcgtgcttgcggccggacgcgtcgccggcgcgggtgcgcggccggacgcgtcgccggcgcgggtgcgcggccggcgcgtgtctgggcttgtgccgactgtgatctccaccaatcggcatacgccggcgactccgagtctgcggtggtggatttcatcgggaacggcaaaaacggaacgagtgtggagagaggatttcaattttgcaattcattcaaggagattcaaagggatcaaagagttctctaccttcttcttcatgtctcgaaagctggtagtttattcaatttcattgtccaacaatttgccttaaaatatcttagtgattgtattatagctaggcatgtttgtaaggttaatatcgaaaatatatctaataatgtccttggggtaatatataatggaataatttatgttgttagttttgttttacaaactaaaagatga

SEQ ID NO: 45228 - DNA, 1923 bp, Oryza sativa
  Clone ID: PAT_MRT4530_48213C.1
atggccaggagaggaggagcagcagcatcgtcgtccatggctaatctcctcggcgtcgccttggtgctcgccgccacggcgcagacgtcggcgcgtggcggcggcggcggcggacgccatgactaccgcatggcgctgagcaagagcatcctctacttcgaggcgcagcgctccggcgtgctccccggtaaccagaggatcgcatggagggccaactccggcctcgccgacggcaaggccaacggcgtggatcttgttggtggctactacgacgccggagacaacgtcaagttcgggttcccgatggcgttcacggtgaccatgatggcgtggagcgtcctcgagtacgggaagcagatggcggccgccggcgagctcggccacgccatggacgccgtcaggtggggcgccgactacttcgtcaaggcgcacccggcgcccaacgtgctctacggcgaggttggagatggtgactcggaccacgtctgctggcagcggccggaggacatgacgacgagccgtcaggcgtatcgccttgaccctcagcatcctggctctgacctcgccggagaaaccgccacggcattggccgccgcgtcgctcgtcttccgtagctccaacccgggctacgcaaaccaactcctgcaacactccaagcagctgtttgatttcgccgacaagtaccggggaaagtacgacgacagcatgcctgtcgtgaagaaattttacgggtcattcagcggatacggggatgaactactgtgggcatcggcatggctataccaggcgaccgacaaccgccgctacctagattacttggccaacaatggtgacgcactcggcgggaccggttgggctaccaacgaattcggctgggacgtcaagtaccccggagtgcaagtcctagctgcaaagtttctcctgcaagggaaggccgggccgcacgccgccgtgctgcggaggtaccagcggaacgccgacgtcttcgcgtgctcctgcctcggcaagggcggcggcggtggcaacgtcgggaggacgcccggcggcctgatgtaccaccagggctggaacaacctccagttcgtcaccggcgcgtcgttcctgctggccgtctacgccgaccacctcgccgccgccggccgcgggcaagccgtcgtgcggtgccaggccgggccggcggcgcgggcgtcggagctcgtcgcgctggccaagtcgcaggtggactacatcctgggtagcaacccgagggggattagctacatggtcggctatggcgcgaggtacccgcggcgcgcgcaccaccgcggcgcgtccatcgtctccatcagggccaacccgtcgttcgtgagctgcaaggatgggtacgcgagctggttcggccgcgccggcagcaacccgaacctgctcgacggcgccgtggtcggcggccccgacgggcgcgacggcttcgccgacgagaggaacaactaccagcagacggaggtggccacctacaacaacgcgccgctcatgggcgtcctcgctcgcctcgccggcggcggccgcggcgggctcgccgaagcagcgatcaagaggccggacaaccagaccttgctgccacctctcgcagctgcggcgtcgccggtggagatcacgcagctgaacgcgacggcgtcgtggaagaaggacgggaggacgtaccgccggtacgcggcgacggtgagcaacaggtcgccggccggcggcaagacggtcgaggagctccacatcggcatcggcaagccgcacggcccggtgtgggggctcgagaaggcggcgaggtacggctacgtgctcccgtcgtcgctggccgccggcgagagcgccgccttcgcctacgttgtccgcggccgcgccgcgccgccgccggctgacgtctgggtcatcggctacaagctcgtctga

SEQ ID NO: 45229 - DNA, 338 bp, Oryza sativa
  Clone ID: PAT_MRT4530_48214C.1
tgacacgcgtccggaccgacgttcggagccatgatgatgtcctgccagaaggcggcgcacttggcgctgaaagcactagggcggccgaacgccatcgacagcacgatcaagaacgcggcggcggcggcggcgcacccatagctgaccctggcgcgaatggaccacggtgagatcaagtacgcctgacctaatagaacaacgtaagaaaaaatccccaagacaagatggtgacactgaggagtgggggacgagaagaatatgcgtacttccccctgtgtgttttatctgggaatggcaatgatccccttgtttgattgagctctggatgtcgatgagcg

SEQ ID NO: 45230 - DNA, 301 bp, Oryza sativa
  Clone ID: PAT_MRT4530_48215C.1
accaggaaattgcttgccttttaaaataatttttcacaaaaaaaaaagagaaccaagattcattttgccaaaaacaaaacgtacccgtttatccccccccaccaatgggaactcacggtaagagctagacaggaacaaaaccatatacattttacagtttaaatgtaaactgccctacaaactgtgacacggagaggccccccgccaccgggggggggcgtttccaacaaatgctaaacccccagcaaaaaaattttgttaggggcccaaacagcgggacaaggttgtgccctcaaattgg

SEQ ID NO: 45231 - DNA, 268 bp, Oryza sativa
  Clone ID: PAT_MRT4530_48216C.1
accccaaaaacagccagaaagacacccatgccccaccgagcaacacatggcaaactcaacagtaaaaataaatttataggataccaattaatcagccaaatgaacatgaaaaacctttgataatcttaccaagaaagaaacaaaccttcaatcaaaaagttgcaacaacccaaaagcatatatatgtgaaatgattcactagccggaagaagaagacatcacttgggggcggaagagcttcctccatgtcctcgaaggctccgccccc

SEQ ID NO: 45232 - DNA, 408 bp, Oryza sativa
  Clone ID: PAT_MRT4530_48217C.1
atgaattccgacggccactcaccggagttcatcatccacgtcatcaaggacctcgcgccgccacctccgccgccgccagcccgtgctgcagcgccgcctcgcatcttgccggcggcagcggcgtttcagcctcgtcttcgtccttctagtgaggcgaacaaaactattcgcaccgtcctattcatcttcaaggtcatctgcttcgccttgatcgcattggcgtcgagcacgacgatctactccacggtgcacccgaatccagggcaaagcatcgctgatcaacggttagatgtgcaggtcatgtgtggcttcatcctagcagttggtgtgctctggctgctcgtttcgtacttcagcttgatcatacatgacgaagaacaaggcctcgatcctttgtttgttgattaa

SEQ ID NO: 45233 - DNA, 2061 bp, Oryza sativa
  Clone ID: PAT_MRT4530_48218C.1
atggagaagtcaagcattgcgttgctttttcagaagcatgaagcaaaaaaaaatgcttgtgatctaccaatcccacatgtggatgaagggtcgtctattcctgctgtaaatgatgctccaattgatgaagacatagttgttgatgaaggggtatgtgaagaaactgaagaagatactgttgtagatgacgctccacctccagatgttgttgttgatgaggtttcaattgaaactaaagaagaatctctgccgatttatgatgttgatgatcttgaacatgatccaggcttaagggttcctatttcaagttttgatgccaacgatcaagatgcggctagaagagggtacattctaaaaggtccatgccatctttgggccttcaattttccatccagaaaaatatatggtaaagatcgccgctttagtgttatttggtttcataagtacccttggattgaatatagtgttgacaaggatgcaacattttgcttcgtttgttatttgtttggcaaagaaagtggaaaatttgttacgggtggttggcataattggaatgtaggagctaaagcccttgataaacatgttggaggaacatctagtgatcacaattttgctcaagagaaatacaacttatttgtgaaaaaaggatgtttgaggtatcttttgcgtcaaggattggcctttcgtggacatgatgaaactgaagaatctaacaacagaggaaacttccttgaacttttgaagtggcttgcaggaaataatgaaaatgctaataaggtggttctgaataatgctccaggtaattgcattttgacttcccctcgcatacaaaagcaagttattagatgttgctctatggaaaccactagttgcatacttaaagaacttggagatgagcactatgcaattctagctgatgaatctagtgatatatcacataaagaacagttggttgtttgcttacgttatgttgataaacttggaggggtttgtgagaggttccttgcagtagttcatgtggccgatgttagagctcaaaaattgaaaaaagcacttaacttgggtgaaatagcaagtggaagtgggttaaatcaagagatggcattggctaggcctggggacactcgttggggttctcactacaaaactattttgcatatcattgacatgtatgatacaatccgggaagtactcataacaattggaaaagatcccactcaaagagaggattggccaatcatacatgctatggttcttgcttttgagtcatttgagtttgttttcaatgcacacttaatgcttgtcattttgggttacacaaatgagttttctaattcattgcaaaagagggaccaagatattgttaatgcgatgtcacttgtgggtttggcaaagaaaaaaatgcaacaaatgaggttcaatggttgggaaggtttcttaggaaaggttacatcattttgcatcaaatattccattgatattcccgcaatggatgctaaatatgtgcctcatggaagatcccaccgtttttacccggatcaaacaattgatgaccactataggagagaagtgtatattggtgtcattgatagaattcatcaagagcttgagaatcggtttgatgaagttagtatggcgttgcttctttgtatgtcggcattcaatccgacagattcatttgcctcatttgatgcacaaaaaatacttagacttgcaagcttttatcctaaggacattgaaggctctgatttgatgaaacttgagctccaacttgatacatatattagtgatatgagcgaggatgatagattcaaaggcctaaacaacattggtgagctctctattaagcttgttgaaacaaagaagcatgatctttatgatttggtgtatttgcttcttaaattggtgttgatcctaccggtggtgacggcaagtgtgaaaagggtattttctgcaatgaatttagtgaagactaaagtgagaaatagtatgagtgacaagttattgaataattgtttggtcaccttgattgagcgtgatatgtacatgagaaagacataa

SEQ ID NO: 45234 - DNA, 222 bp, Oryza sativa
  Clone ID: PAT_MRT4530_48219C.1
tttagtgactttcccctcctctcctcacctcgggctgcttctactactcctccgccgcaccgagggtttcgcctccgccttccaccgatgccgcagaggggacgaaccgaggggcaggaatggcggtgcggtacctcacatccggactccccctgctacgcgcccacggatcccaggagggctcaaggggcttcgcgtccaacgtggcacagccgaacggga

SEQ ID NO: 45235 - DNA, 519 bp, Oryza sativa
  Clone ID: PAT_MRT4530_4821C.1
gtacgcatatccgcgtgtcggcctacaaagccgcacaagctgccatacccttcttggacacccttactctatgtggccggccctacagcacctgacgcacctgcagatgctacccattaacactttgcggacggagaagggcggggaaccagacctgatacggaggacggagcgcaaccgatcgatcttctttgagctcgtggaggaggcactccctctgatgagcagcggagccagaggcaaggcacagctcgacgaagcccggagcgaggtaatcatagccgggggggaaaagcccaaggtgattgctagacacgatgagcgcggggatgggacattagcagggaaagagatgaaagaaggttcgttgccaaggggactgtggggcaggaggaccacgggaccctcgatgccgaactagagacaatgggaaacattgcgcatgacacaccgcatgtcgattgtggcgaagataacagtgggcttgttccgtcatggtgataaaggacgctggaaggt

SEQ ID NO: 45236 - DNA, 744 bp, Oryza sativa
  Clone ID: PAT_MRT4530_48220C.1
atgcggcagaagcagcctggtgatgtgccgatgtcggcggcggcgtcggaggccgacctcgcccagctctccatcgccatcaccgccggggaggacctgggcccgttagtgcggcgcgtgttcacgtgcaggtgccccgagccactactcgcctcgctctgggccgcggcgcgggaccgggagaccgagatcgaggagctctgccgcgcgcacttccacgacttcatctgcgccattgacaacctccgctccctcctcgccgacgccgatgcgctcaagggctccctctcgggctcccacgctgtgctcctctccttcgccgcgctgctgctcgcctcgctcgagtccttcctcgttgcacgtgggttcgccgggaacctctcctccgcgctcgcctcctcccgccgccgcgtccgcctgctggtgctcgccaaccgcgccaacgcgcacctgcagggcggcaaccacaacctgtacctcgccctgcgcgccgtgccattgaccgcgacctcaccttcagcccctccccaccctccgccacatggtgctcagcctcgtcccccgcgtccctgtcctcgacgccatccgcggagagagtgctcgggagccgctgctgccgttgtccttctgcggtcgcgccggatggaggaaaagatggggagatgggaccgacatgtgggacgggaacggagacggtgtgggagagtagtcggaaaaggggacgggagtagccgatatgattaa

SEQ ID NO: 45237 - DNA, 223 bp, Oryza sativa
  unsure (1)..(223): unsure at all n locations
  Clone ID: PAT_MRT4530_48221C.1
tcacacatctcgggctcccgatggactccgcctcgccgccctccccgccgccgggcaggcgtccgccgcagaagccagtggggcatccaatgccagcctgcggtggcgcatccttngccgcgccctgctcgcgcgctccgcctccacctcccgcgnaccanaggaaacttctaacgatcagcaagataaaaatgatactaacaaaatttccagaaagacatcg

SEQ ID NO: 45238 - DNA, 769 bp, Oryza sativa
  unsure (1)..(769): unsure at all n locations
  Clone ID: PAT_MRT4530_48222C.1
ttgcttcttttttttaatggcaaaaaattaccgtgcctcagattttgctaaagtgggaatcccctccacaaactgttcttttcgtgactaaacctaattccaactccgtgcacgctctctgtgctgaaatggttaggtatgttttctttctgctctgtgtgccaacatggtcaggtatgtcaaaggttttatattttatcaatcatctgagttcggcattaaaaatagcttcttttttgtttctggaacttgtcctctcctaatttacttatgttaagcagattttgttgataaataatgttgcatggaattgtatatttttcattcaatatcgttgtttcacttgtgctaatgtctgccgttctccgcagatggcttaaagagcacaataatataaacatctttgtagagccacgagttagcaaggaactagtgactgaagattcatacttcaactttatccaaacatgggataatgatgaggaaatgaagacattacacacgaaggttgatctcattgtaactcttggaggtgatggaacagttttatgggtatgtggtccaaactacatgacaatttactgaatctgaatactgtgtggttaattttgaaatttaagctataaatatgagtttggaaataactaacactctgatggtatacaaagagatgaaatgccatccaagaaatgctgatggtctaatgcatttgtcgatcaaagttgaactagtgtctacctacttgggatcaagttanacactcattcac

SEQ ID NO: 45239 - DNA, 501 bp, Oryza sativa
  Clone ID: PAT_MRT4530_48223C.1
atggcggcggcggcagaagagaagaacaagaagatgatcaaggtgatcagctccgacggggaggccttcgagatgacggaggcggcggcgagcatgtcgcggatactcctccacatgatcgaggacggctgcaccggcgacggcggcgccgggatcactctccccaacgtcgccggcagcgccctcgccaaggtcatcgagtactgcaccaagcacgccatcgccgccgccgaaggtagcagcagcagccgcaaggcgaaggaggagctgaagaagttcgacgtggagttcatggaggtgggcatcgacatgctgtacgacctgatcatggcggccaacttcatgggcgtggagggccttctcagcctggcggcgcagcgcacggcggagctgatcaagggcaagtcgccggagcagatcagggagatgttcgggatcaagaacgaccacacgccggaggaggaggagcagatccgcaaggagtatgaatgggccttctag

SEQ ID NO: 45240 - DNA, 324 bp, Oryza sativa
  Clone ID: PAT_MRT4530_48224C.1
atgcccaggaaccgttattggaaggcgccggtcaaatcaagcacaccggccaagaagctagagcagtcggctgcgaggaagccgtcctccgcaccaaaaccaaagaaggtgtggaacgaaaagccaaagacgctcgctgcatcacctccggagatgagtagaaattcgcgaactaaactggaaggagtggtctccgacggcggcgaaggggcggacgaggacggcgacgcgacggcgaacacgacggcggccttcccgagcgacggcgacggctggaacgacggcggcgcacggctggagcggcggcggcggcagcgaagctag

SEQ ID NO: 45241 - DNA, 294 bp, Oryza sativa
  Clone ID: PAT_MRT4530_48225C.1
atgccgccgtggcccgtggtggtgaccggggtcgctcattgccggcgcggcggaggagtcgcggaggaatcgcgacggtgggtggtggaaccgagcggggccaagtgtcctattgggcttttagcgttgggcctatcgaaagtggccctatcctgcaagggcgttgggctgggcctgctcgacaggcccaccaagcgagacggcccaccttacaatactgtagtactggcattttccacagagaatccagcaaaagcacaaggggaggtgggcccagaggaatcccacctataa

SEQ ID NO: 45242 - DNA, 491 bp, Oryza sativa
  Clone ID: PAT_MRT4530_48226C.1
gggacaagcaaaaagtatatatattcatccatttctcaaaccaccacaaaagggcgaaaggaacacaaaatcaggagggattgggacaatttacaacaacaggagtttggaaaacgaggcaaaaacaaaacaggcagcagcaaagctcccctttttatttccactgaatttttacacatttggaatccatggaaaccgagccttccctcccggcggcgggggggcaccggagtcccaaaaaaaaaaagggcatggggggctcaaaatccggaacgcccccccccctttaagaaggagggggggcgattgttcaggcggctgttgaggaaggggttcaaaaccttgacaacaatgctcatggtgggcctgaagtccgccttgtactggacccacagggcaattacgggagccattttggaaacaaccttgggaggaaaaaccccttaaagccttggatccacccattggttcaccttgggttcacttaaccc

SEQ ID NO: 45243 - DNA, 357 bp, Oryza sativa
  unsure (1)..(357): unsure at all n locations
  Clone ID: PAT_MRT4530_48227C.1
cccactcgaccgaaccccctctctctgcttcctctgctcctcggagagccgcagccaaggacgccaagatagggaccgaaacccccgccgccgatggcgacgccgcccgcaagcggcccagcgccggcgacgcgcccgccccagcccccntcgccgacaagcgccaccgccccaaccccccgtcctccggctcccgcgaccgngaccgccaccaccgccacggccacagccacagccacggccacgcccggccgtccaccgcgggcggcggggagaagaagctgcgggcctcgcacatcctgatcaagcacgagggctcccgccgcaaggcctngtggcgcgaccccgagggcgtcg

SEQ ID NO: 45244 - DNA, 2743 bp, Oryza sativa
  Clone ID: PAT_MRT4530_48228C.1
aattcaacaatgtcatcatatattttcttctgaaagaaaaaatgtcaccatatattccatccttcccgtgagcttttttttttttttgtgcactatcaaatcctatacctctccaaattcttacaaccaacatatgctgctcctgaacatcataatggactcacaagagctcacattctgatgtgtttgtgatacagtgataccactacaatgaatcttacaactcaacaacaatcttgtgaaccctttccttgggcatggtctccaggtcaaggatcaccagcccagatgaggaatcataggtgaactccacctgagctgagcctagcatgcactttcttggcctgactgaagagtaggcaccaaactttccacatcccctcacttccatgcagaccaatccgatggcctgggagctcaagctctggagctcaggcaaggtggaagcagagccattgctgagtgactttacgccgtcgagacgatgataggtcaggccttcgaccgctgccccgctgttgaacatgtcgactagcccgattggtgcaaacctgaatccgggtgccaaatccttgattggggacacggtgaggatgtcatgttccaagaccttgagggagatgggcagtgctgcgccatttggaaggactacaagatcagcactggcatgacggtacaccgcacaatcaccgttccactcggaatctgtcgcggcgtcggcgataagatggacgtcactgcccttgacgccacaagaaagggcctcggcgccagtcttgtggaagatgttcttcttctccacagagctccatgccgcgccctggcaattgtagactccgagcactccggtgaacttgttcatgttccaaatcttcagcaagctgacgccgtcacgcgccggatcggtgaagaggcagtccttggttggccggccaggtagccacgcgcgaagaacggagccatcgggcaagaccatcttcttcagcagctcaaagttgtgcttcccaggggcatcactgacatagacagggccgccgctgatcgccctcgccgatccgtggtagtcgccggcaggatgaagagagtggaacatgtcccaatccgggagcatgaactcgccgaggaatacgctgttgtacgccaccgaggcaatgtggatcgtgtgagacaccggatccctcgggtagaaatcatccgatgctctcaccactgccgtctgcttagcacagtagagggcgtcggtgtggtggctcatgcaggcgatgatgccgttctcagggaagttcttggcaatggaggcgtcgagggcctggtggaactggcgggtgagcgagacgcggccgccgtggccggcgccgagcgtctccaggatgcactgcacgtcgaccttgacgccgtcgacgccggcggcggcgaggtaggcgtggagctcgtcgtagaagcggtacacggcgcgcgggtgcacgagcccgagcccctgggtggtgagcacgtcggtcttcatgccgggctcgttctcgacgacgcccggcgagacgttggggaactgcatgttggagtggtacccctccatccccgcgacgccggggcggacgccgccccagtagccggtgatggcgtgccagacgtagacgtacttgaggccgtacttctccttcgcggcgcgcaccaccgtcttgatgccggcggccgggtcgtcgccgtcctggaacttgctgttctccttgattccggtgagccgcgcgaggagcggctgcttgtccttggcgtcggcgccggtgtcgtcggggttctggtggtcggtgccgacggactgccagccgtcgtcgatgatgacgaacttgggcggcgcgccaccggcggtgaggctgcggaggccggcctcgacgccctcctgggtgacgtcctggtagaaggcgtcccaggtgcaccacccgaagtagtcgacgatgcccgggagcttcttctcggcgcggatgcggaacgtcttgaggcaggacttggcggcggcgacggcgccggcgatggcggcgaaggggtcggagtccgcggcgccgacgaagagcgcgcggtcgaacgacgcggcgcgcgtgcccgcgtcgccgctctcgacgcagagctggagctcgtcgccgcccgcgccgcccccctggaggctggcccggaacgcgccctcgacgagcgggaggaagacgaggtacgacgcgtcacccccgccgccatcgacgccggccttggactccaccagcaggaactgcgtctcgtgcggcacgtcgccgcccttctcccccatcctctgcgccatccaccacagcttgaaccggaagcacgccatgaatcgcacccccctcatcgcgccgagggagacgacgtggcgggatgccggctcggcgaagtctccgccgaggaagaccccatcgacgggccccgccgccgcggcggacgacgcacgcaccgcctccggcaccccggacagcaccgtccgcccatggaccgagagctccccaccagcgaccttcaccgacgacgtgaccgtcatctccgacgacgacgcggcgcacctgctccgcctctggcaccggcgagaagaggaggggagaggggcggatgcgatggggggaaatgcgcgggaagggaaggtatatatggtgcgcgggcgcgggagaaggggagaggaggaggcgggcggcgtggcgcgggtggtggagatcatgagcagccttcgcgccaccggcacggacat

SEQ ID NO: 45245 - DNA, 208 bp, Oryza sativa
  unsure (1)..(208): unsure at all n locations
  Clone ID: PAT_MRT4530_48229C.1
aaccttgtttctgttttgcttctctctggtgctttgatcatcttatattggcagtcaggttgttgaggtgcactgtncatgagtcgnggttatgttacttnctcccaataattttgggcganattgtnaaagtggcatgacttcgttctgatncatatgttaagatgcgtccatggacaaaganaccatacgacaaaaaaaaaaaaaa

SEQ ID NO: 45246 - DNA, 1788 bp, Oryza sativa
  Clone ID: PAT_MRT4530_4822C.1
atggatcttgacaagtccacctcaaccaccgcgtccatgaagaagttgcaggacgacggtctggacagtgacaccgtgggacgccgcgtcggccaggtgatgattagtgccccctcagaggcgagcgacatcccgatccccctttgcgagaggggcccggccgaacgcactgctgcgatcaatgctctccctctgacggacgtcatcggaccgctcgtggatcatcaggcggcggcgtcattgaaggagggcgtcgccaaggaggcgtccgatgttgctgctgctgccgctgctaccacgagtggcagcaacattccgaagaaggggagtaaattctcctctgtactcgggacccatcggaaagcgccaaacccggcgctttatgaaagagaggaaaatcttcgtaggacggcgcgggcgaaggcgacgcaaggtgggaccgatgctgcctccagcgcgtcccctgcggcgacctcgacagatgtcgtggtcgctactaaggaccgggaggcggcaccgagtaaccccatcatcagcctcatgcctactcggggcccatccaccgatgacctcacctggggggagctccaagtggagatggagcatatcctccaggccggcgctcgcggcgtaggtcgtgagattgaggaggccagggtggtggcgtcgtcggcaaaccagcgtgccgaccaactggctcgcgacctggcggaggcccgcgagaacctcctaaagatgagggagctggtggtcggcaacgagaggcagcggcaaggacttgagcaccggatgtcggagctcgagaacaacctgtcaaggatccgaggctcgctgcggatatcgcacaccggcctgcaccaactcgccggcgagtgtggtgtcacgactaccatcccggcgaaccctgacgagttctcgctgacgtcctcactcgcggaactggctacggcgatggaggagatcacctccaagcatgcggccaggattggggaggagacgtccaataggatctacaccggggcgtgccatgtcctcgcatgcgtgaggctggcacaccctgatctagaccttaagaaggctttggatcagggggccgccgatgacgcgcgcaagggtgtggtggaggaagtcgatgacttgggggagtccgtcctccccctttttgaagaagatatcgatattgaggatgtccagcagcgcgggcagcctaatatgccggtggtcgttccggcgcttgcactcgagccgtttgtgccgcgggaagaggcagattttgagaacacgatggctgaccgagtttgtcgaatccaatattggaggacgaagctcgagatggccaaactcgaaaacaccatgatcgaggtgaagaaggatcaggctgtggaaactcttcgaggtcgcgaggtatggttcaactcgtacctcaagagctgctgtacggcgatggcgagggtctgcaaggagctccgagttcctcgcagagatctcgaggagtcggcagccggatatatctcatggttgaatggggcttgtgcacagctcgaagggatcggcaaacgtatcgacgaggccctaaagcaggagtgtcgtcgatcgagccagtacaccagaggacatgtgctggcctgcatccgagatcaccgcccgcagcagcacctcgagttccttcacgaagggttctcacgttctcggaggactcccacggagattgatggtcttgagcagtcgatggcgccgcttaccgagaaggtatttcggtccgtggattggcgttggccgtcctggtag

SEQ ID NO: 45247 - DNA, 412 bp, Oryza sativa
  Clone ID: PAT_MRT4530_48230C.1
ttttgggttttttgaatttttggggttttctttttttttgtttttttttttttttttttttatcgaaacaacctgggacattgggaaactggggctgggtgggaaatgctccatgggtgccgcgctaagcatgggcggacgggagtggcttgcggaaacaatccactggtaggcaagtagtaccgccacacaccggggcaggggttctctacatgggggccctggggctctgactgtccttgggaggggctgaaacccaaagggggccggggtgttggcgcccccccataagaaaggtccccatgacgagctttacaaaaatcaacgctcaagcccggggtggagggccccgactggacctcagggaaaccggtttttttcccctctacggtggctagggcggtttgcccaa

SEQ ID NO: 45248 - DNA, 638 bp, Oryza sativa
  Clone ID: PAT_MRT4530_48231C.1
atgaaatattctatcacttgacataatcttaatcaagttcctacttcttaatattgcaagctctgttgtccactggaactgttttcatccgaaatttgccataccattcgtccgtacacttacgaattggagaaattgaattggatagcatctactaatccaaggaaagatattcaaaaataattacactataatcgaaaactattatttcaaggtggattttattgtgaagctatactatcgttttcaaataaagttgtaaggacagattgaatttaaccgccgtaaaatgatgtctcctaacggaaccaatgcacctagaatgaacgaatctgacgtcaagtgacgtgattctgaatgcagtgacgtcatttacggtacttaaattcaattggaatttcgtgcacctgactagatttgaataattatgatttaacaaattgtcgaaaaaaaatttaaacacaaagaacaaagcgatgtatttgatgatgagaacatatttgaacattgtactctatgtggatgcgatggccttcacacgtagtaatgagtgctcttgaccgcttaagccgctagcttcaaactggttacttcattctcgcgattatggcaatgcaacaccactctctcatagaaaa

SEQ ID NO: 45249 - DNA, 412 bp, Oryza sativa
  Clone ID: PAT_MRT4530_48232C.1
agatgaatgaatatgttcatttttcatgttttgggacagaaatgatgagattctgccttttacggatacatacatgctattttgcacgccatgagaccgatctataattaatgcagcctctccacaggctacatgacgaacattgcattactcgctataataatcagtcaggtggaactgctagagtagagcgcaaaatatgggcaccagggatgcccttgaagtctcccaaagggatggctaaccacatgtagtgacaaatgccggcattcctggtgagcaaaacacggggacgatccctttgggtctaaatttcagagcagttggcaaggggcctggggacgaggacaacctcacaaatgttcatcttatggctgaacttgcaatcaagattggatgctccggtgtcatc

SEQ ID NO: 45250 - DNA, 499 bp, Oryza sativa
  Clone ID: PAT_MRT4530_48233C.1
ggaaaaaaaaagccccaacaaagcatcattgggcaacaaccaaaatgggaccaacagggcggaagggaagccccaaaacaaaatataaaatatccccaggggggatataaccccccatcaaaatttattggggttggagacccccccccacccccgggtggttcggctggtcaaaaatttgggagggggaaaaaaaagggcacccccccccagttggttcggttcggcccgggcacaaaaaatcttttttttttgggacgaccatcgcataaaaggcccccaaggaccccccgccaggaaacgacgggggggaccatttttcagcagggggggtttaaatgggaagggcaataaaccgggttttggaacaaatcccaaaaacttcacggaaaaatctcagccctaaaacacccttttagtttttggaggggaagcaaaactttctcaacggaccagtcaaaaggaagggggcaagcttcccaaggaacagaaaacccca

SEQ ID NO: 45251 - DNA, 1380 bp, Oryza sativa
  Clone ID: PAT_MRT4530_48234C.1
atgaagacgatgacatcagagatgaagccgccgtcatcgtcgtcatcgtcgtcgctgtcgtcacgaggtctcccgattgacgtcatcgtggagatcgccgagcgctccgacccgatcacgctcctccgctgcgccgccgcgtgcaggcagctccgccgtgccatctctggcgagggcctccgccgcgagctccgcctccgcaacgccgccggcttcgtcccggtcctcctccggggcttctactaccagcctctccacggcgcccacggtttcctccaagagccggtccgcttcttcgccgccggcgccggcgccggcgaccaccatggccagctcccggcgggcgacgacgccgttgagtcgctggccctcgggttcgaacccgtggaggcgcgcggcggcttcgtcgtcgctcggactggcaggtcctccggcgaagtgtgcaaccccatgacgggctacgtgctccccatccctctgccgaggaaggatttggtgacgtcatacctgctgctcaccgccgacgatggcgtcggactcggaccgagctccgacgacgactccgagctccaccggttcaggctcctcgccgtgcagctctgccagccgacgaaccaggggcggcggcttcgactgaagatgcaggcgttaaccccggtcactggcagatggggccccaccaccaagattcccgtccatggcgtcggcggcgacatccaccaacacccgggcgccgagctactcggccggcatcccgtcgtcgtcaatggcgccgcctacttcctcgtcgtgtcccactccttcgaccgccagcgcccgcacccgccgtctcactacttcatcctccgcgtcgacgtctccgaccacggcggcggcgacggtagaaacgggacgacgaaggccgcgacgatcatcccggcgccggaggggctgaagccgccgtcgtgctcgcgctgcaccagcagcgaggcggcggcggcggtcgtcacgtcgaagcagctcctgctgacgccgtcgcgcgacaggaggtcggtggcgctgctcgtctgccggaccaccagggtggagatccacacgctggacatgctcgcggcgccgtcggcgtgggcgcgcgcgacggaggtggtggacacggcggcggttcgccggaggccgtgcgacctgtcggagtcggaggtggagctgcattggtccggcgaggcgagcggcgccgtggtgctccggctcggcggcacggtgtgccagctggaccgagcgaccatggcgatccgcacgatcgacgaggagttccccgagtttcgctacaggagtcgccatatgttgctgccctacgaaatgggtttgtccagttgggttccttcgatatctacatctgcataa

SEQ ID NO: 45252 - DNA, 1096 bp, Oryza sativa
  Clone ID: PAT_MRT4530_48235C.1
ccggccgggaatcgatccccaacgccatggcctccacgctcgcctggagctccgccgcctcctcctccgccccctcctcccgcctcccgccgcgccgctccccgtcgctggtcgtcgtcgcccagggcaaggtcaagaagtatcgccaggtcatactgacagatgacatagcagaggtggggaagaaaggggacacgcttaaagtgagggccgggttctaccgcaacttccttctgccaaagggcaaggcaacgctgctcaccccagaagtactcaaggaaatgcaagtagaacaggagaggatagatgctgaaaagaagcgggtaaaagaagaggcacagcaacttgcccgtgtttttgaaactattggggcattcaaagtgccacgtaaaggtgggaaaggaaaacagatatttgggaggcaagtttttatcgacgtcacagcacaagatcttgttgacatcataaagtcacaacttaatagggatgtcgacaagcgtctcgtgacagtgccagaaattcgtgaaattggggaatacattgcagagattaagcttcaccctgaagtcacagctcaagtaaggctgaccgtatatgcgaaataagccctgaagctgcttgattgaatctttagtggatggtgggctttggatgaattctgatttcaccagagatttttgctgaaactccaaggtgcagtgtcacatcacggggcttggtctttacacattgccactgtccatcctacctgtaaagtcagtttcttgcacctttttttttttgacaaatttatttgtgttaatgttatggggttaaatgggcatgatgtaaacaacaaagggttcagagtctagagcaactgatacttgtcttgtaatcttgtttaaaggtgcacgttctttatagtcatatagtttgatagagctactacaatatttgggttgggtgggccaaaatggcacgtaggcagtctggtggtcgtaggttgggccgcttggtcgctgtattattaggcccaaacatagggatttcaacacattttttaatgaaaactttcatctgaaaaaaccttcgtttggaaaaaaaaaaaaaaaaa

SEQ ID NO: 45253 - DNA, 836 bp, Oryza sativa
  Clone ID: PAT_MRT4530_48236C.1
ccggccggggctcgagccgcaaaaaaccctagccgccgttccagcttgcggagaagaagcgcgcgagccagcaatctcgggcggcggcggcggcgaggaggaggaagtagccggagaggagggagatggggagcgacacggaggcggagaagaagaagacgcccgtggcgctggcgcccatcgcgaagccgctcgccggcaagaagctctgcaagcgaaccctcaagctcgtccgccgagcgtctgaggccaaatgcttgaagcgaggagtcaaggaggtcgtcaagagcatccgccgcgggcagaaaggattgtgcatcattgctggcaacatttctcccattgatgtgataacacatgttcccatcctttgcgaagaagccaacattccttatgtatatgttccgtcgaaagaggatctcgcaacagctgggactaccaagaggcctacctgttgtgtattggttctgaccaagccagccaagggcgagcttgaggaagatgtcaaggagaaacttaagacggactacgatcaagttatgtctgaagttgctgaggtcacgtcttcaatgttctaagttcacacttgtacttgtagctacaaaatcagaatcaacatccacttccagcacacagccctgttttgtactgtgtcagcatgacatcaacctgtggcggatgtttttcgagtgcctgtaggagacaatagttcctctgctagattatctatcggatgttgtctttttggactaattgattccctacctggatcatatataattagctcctctataaatcattttgtgcgaaacaaccaaaaaaaaaaaaaaaaaaaa

SEQ ID NO: 45254 - DNA, 777 bp, Oryza sativa
  Clone ID: PAT_MRT4530_48237C.1
atggacgtggccggcggcggcgaggaagtcgaggaggtggaggcggttgacggcggcgagcagcagccgccgatggagatcggttggcccaccgacgtccgccacgtcgcccacgtcaccttcgaccggttccatggcttccagggcctccccgtcgagctccagcccgaggtcgccggcaacgcccccagcgcaagcaagacggtgttcggcgtgtcgacggagtcgatgcagtgctcgtacgacgcgcgggggaacagcgtcccgagcatcctcctcctgatgcagcggcggctctacgagcagggcgggctgaaggcggagggcatcttccgcatcgccgccgacgacgcccaggagcaggcggtccgggagcagctcaactccggcgtgctcccggagggcggcgtggacgtgcactgcctggcggggctcatcaaggcctggttccgcgagctccccggcgggatgctggactcgctgccggcggcggaggtgacgcggtgccagtccgccgacgactgcgcgaggctgtgcgcgcggctgccggcggcgaaggcggcgctgctggactgggcggtgcagctgatggcggacgtggcgagggaggagcggagcaacaagatgggcagccgcaacgtcgccatggtcttcgcccccaacatgacgcacgccatggatccattcaccgcgctcaagcacgccgtccacgtcatgaacttcctcaccatgctcatcgaccgagctctcaacgacgtccaaacctgcaacaactga

SEQ ID NO: 45255 - DNA, 549 bp, Oryza sativa
  Clone ID: PAT_MRT4530_48238C.1
ggaaaaggaggattattgcgtcagcggctagggtttgcggtggaccgggtgcacggcgacggctcacggaaacgaacggccgagatcaaccctatccaaaacggacggctgagatcgatcggtccacgaccgactcacggcgaacggctccgatgacgtcagcgatgacggcagcgatgacgtcagcaccggcggcgacttgggcagctcggacgcgcatgctcgccggcgaacgacggcgcggcgacgcgaacggaaggcaccaacgggtagagcgcggcgccgcgaactcaccggtgaccaaaacaacggcggaagggcaacggacggcaccggcggcgactcgggctacgcggaggcggcgctagacgcgacggcaggctaaggcaaaggtggcggcggatagaggagagctcggggatccttttataggtgcaagaaggcggcggcgaaggcccacggcgaccggcgacgagaaggaaagatcgggttcgggagagagagaagaatccgattcgatctcgaatccatcgagtttccaaaccgaat

SEQ ID NO: 45256 - DNA, 291 bp, Oryza sativa
  unsure (1)..(291): unsure at all n locations
  Clone ID: PAT_MRT4530_48239C.1
angnacggttcgccnntttataaaccaaattccccancggcggttcgttcttgncgatcccgagggctngagatnaaggcgaggtcgaggtccancaattgcgnctncanggtntnggtgaggaagnccnaggcggagaaggacccgaacaagccgaagaggccaccgagcgcgttcttcgtgttcatngagcagttcangaaggncttcaaggagnagnaccccaacgtcaagcangtcttggtgatttgcaaggcttgtggtgacaagtggaagtccatgacttatgct

SEQ ID NO: 45257 - DNA, 705 bp, Oryza sativa
  Clone ID: PAT_MRT4530_4823C.1
atggccgagactgatcctatcaaagtttcctacgtctcaccaccaccgttggtatgcggtgtcagcacaactgacagaaaaagaattgttcccaatcaagtttcctacgcgcaggctcatttcgcagtgctgcaacatatggctgaagtaaccccatactttgaggagcatttagcgaaggtccgacaggacaatattggtcgatcagatatttggatcaacagagaacatggtgctcgcttcaacgaatggatcaaggatcgtgtagcacagtcgaccgatggcccaagtgagatattacaaaggttggcaaggggtccatcttgggatgttgacacatggcaaggagcagatatgggcgctgaaatatctgaaattcaaagtccctttgtttcgttgcagttgggtgacaaggtcgacaaggaaggcttcacattagtggacctggccaaggttggatacgcagacgaaccattcgtattagcaaagcaggtcgaacagattttctacataaaagacctcgcaaacaagaagatgcacgtcgttagggatggcaagcgaagaattgtgggggtggacaacgtcgtcgatgaagaagaatacgaccagaatcttcatgttagacctcagatcgaccttgatgatgatcccgaagacgaagtggcttacgttcgttcggaccattcggaaggcatatcactgtga

SEQ ID NO: 45258 - DNA, 463 bp, Oryza sativa
  unsure (1)..(463): unsure at all n locations
  Clone ID: PAT_MRT4530_48240C.1
ttttagtanaatcacattttttttttttttattttgggtggttttttagatttttttgagcggtttaccaccattttagactatattgtttatgataaactactactgcaaatttggagcgagctatctacacagatcactgtacgacaaaaggcaagcagcaaaaaaaataagctgacccctcaaaacgcgacaacgataaatggaggaacgaaagcaaaaaatacaaaagagaccacgctgaccaaaacgaaatactagccgattacacgtaagagaagacctaaaacgaaatgaacataacaagcgggcgcctgaaaggcttcacactcaatgggctgaacttgctcgctaaacaaagtccagcccgggcgatgcagacagggaagccaggcgggcaccagctcccatgacccatgaaccaggtcgcaccatcaactgagcaacagccccaaaccaaaaa

SEQ ID NO: 45259 - DNA, 107 bp, Oryza sativa
  Clone ID: PAT_MRT4530_48241C.1
ggaaggaaactgccccattttttaatcatttggacattcaatttggtgattgctctaaggtacccgacccctgggcggaccccttggccgacccctgggccgacccc

SEQ ID NO: 45260 - DNA, 261 bp, Oryza sativa
  Clone ID: PAT_MRT4530_48242C.1
acgagtatggggatgtttcggtttccccccgtggcgagttcttcccgccttccgaaaccgccactttgggtctctagattattttattcttggaattggggaaatattcccttccccgtatagttcctcgccctcgccggtaatgggtaggattacctatggtttgtcccttccggtaccgggatttaccactgccttgtaatggcccggttaaaccttgggcctgttttccttggttcttaaaaaaaaaaaaaaaaaaaa

SEQ ID NO: 45261 - DNA, 213 bp, Oryza sativa
  Clone ID: PAT_MRT4530_48243C.1
atggggccactgctgccggtcgctctgcacatgaaccggccagctccgacggaagcggtgggcgccgtcggagcaaagcgcggctgcgccgacggtggggcggccggccggagggggagggcggcgcgctgggccggcggcggcgcggacgacataaggtgcccgcttggctctgagaggcctaccgcctggaaagaatatttgctatggtaa

SEQ ID NO: 45262 - DNA, 276 bp, Oryza sativa
  Clone ID: PAT_MRT4530_48244C.1
aaaataaaaattctataggaatgaaatcttttaaaattcctatgaatttcctttgaatcaaatggggcctagtgcttacctttttaacggaccacacaatctcatcagtaacgaaagatattagcaaaaacacatagcagccaccaacaacacatactcctgctacgtgttcttagcactacgaaagatattagcaaaaacacatagcgaacgactgctccaaaccgggatgaagaaaagacatgatacattcaattctgaaatctagctacagca

SEQ ID NO: 45263 - DNA, 283 bp, Oryza sativa
  unsure (1)..(283): unsure at all n locations
  Clone ID: PAT_MRT4530_48245C.1
taaaactctataccgcccnnccctttttttttttttttaaatctaatttcaccttttaacatcaattggggggcatttttataaagagtgacaccccaatttctcacctttactatagaatcattagctttcacaaatctatatacaattttttaatcttaactttaacataccatattcttcccttctacaataatcattattacttctttgtactattttacaaatctaatttattatctcaatatcttcattcgttatcatcttcatcttcttcttctac

SEQ ID NO: 45264 - DNA, 174 bp, Oryza sativa
  Clone ID: PAT_MRT4530_48246C.1
atggaggtagtcgatgggcgcgccggcgttgaccaacctccagctcccgtagtcaccatggccatcgtcgggatcgagctaggccccatcgccatggacctcccaccaccaccgccgcttcctatggacgcgacggtgaccgccgccaccaaccacctgctccaaatcgcgtga

SEQ ID NO: 45265 - DNA, 438 bp, Oryza sativa
  Clone ID: PAT_MRT4530_48247C.1
atgaggaggtttagtgccatggcgctagcgtttgcagtggtcgtgatgagctcgtgcgttgctgatggcgtcaggacgataccagcaggtgtgcaaggttcagccggtggcctacacaacggcggcacggctccatctgctgctgctgcgaacgggagcaccaccaccgcctacgacgacagaggcaccggcggccagacggcgacgttccaggtgcagcagggcgcacagccggaggaagagacgacgacggagatgggcaacgcggcggaggcggcgacgggatcgcggctgccggactgcacgcacgcgtgcgggccgtgctccccgtgccggcgcgtgatggtgagcctccggtgcgccgaggccgcggagtcgtgccccgtcgcgtaccgctgcatgtgccgcggcaggttcttccgcgtgcccaccctctag

SEQ ID NO: 45266 - DNA, 1095 bp, Oryza sativa
  Clone ID: PAT_MRT4530_48248C.1
ctacagtccttgcatgctatccacaccgttcgattgtggctgcaagcatctctgcccttgagcgtgtcttcccagggagcctcggctgctctccaggggacccccatttttttccccatcggttgattcatcccccagcttctctatttgcacgcagttcacacgcttcctccgtcgatccatccagcgccgccggtggcatcgccgcctcccttgcccagtgtgttcttgcgtcttctttggcttagctgtggacggccgtggtcttctgctcggtggcttcgtctccaccatctccattccatccgtcagaggctgtcgccgtccgcgagtagcagcagcctctcctctcccagtgacagtccagttgcgccaccaccgacgaccttttgccttaccggttggttctccggtgcccattgccatcgtgtgcgggagcaatgccctctttttcccacggcagtccaggagtggtttggtgatggggatggatgcggtgcctgacactctaacaccaacaccattttctcagctaacttagggacaaatgagacagagaacaggccaggaatctccatgtcagtgttttgtcgtccatttcaacgacccaagaacaccatacctgcttttaaccctatcaatcctgcgacttcaatagatcaacattttgtctcctcatcagatggcccaacagtgccaggtgttcagtcccttcctgcagtgcgcggtaaaggtcctttggataatattggtttgagactgtctcgaccagattcatctattgctacggaagcacgcatgaagcgtaaagtcacaatggttttaaggagaggacataagttacccatattcaatattctctccttcaactaactggcttatttgttgcttccattggttcctacatttctatttgatttcgttcagcaagtgttgattcgaccaatctatagctcctcaatttgtgattgttacattaggagctggtcctgaagatttctcatcttcacattcgatgtgttcaacgttgtacttcccccaccaagtcaattgccaggcatttgtgatgtgctgatttgcctggaattatgggta

SEQ ID NO: 45267 - DNA, 897 bp, Oryza sativa
  Clone ID: PAT_MRT4530_48249C.1
gggccccccctcgaattttttttttttgctcgtgggttgttctttttttttttttttttttttttttttttttttacacacaaagtagctgtcttcttattattcaccacacaaaattaacaacagagctgagagacatttacaaaacatcatacagatcatcagttaattaacaagcaaattaaagcagagccacaatccagagacaagcatgcatgcagctatatatccagccaaagagctctcctacttcatgaaaccctgcgccatcttgaacagcccaccggcggcgccgccgctgccggcgctctcctccccgccgcccttcttctccatcagcgactcggcccccttcatgacgtcgtcgagaccgaacccttccgacgacgacggtggcttgccttcctccttctcagccggcgcaggctccttgggcggctcctccgccgctggcttcggcgctgcggcgtctccggctgccggcggtggcggtgcggcgccgccactgccggagctgaagtccttgaggtacccctccgccttgtcgatgtactgcccgaccggcttgtcgtcgagcttgccgtaggtggacgccgagtgcagcaggtccgcggcggcgccggcgacctccttcttgtcgacgccctccacgctcttctgctggaacaccgacatggtcgcctccgcgaccaccttgccgctcgccatcaggtcgccggagccggacttgttctcctccgccattgagcaaagcttacacagttatacactccaagattttttttgcagcgttaagttcagagcgggagcggggcggcgtgggtaacgcgagggcggacgcgtggagccatccttatagatggatgagatagaagaagatggagacgtgatttggac

SEQ ID NO: 45268 - DNA, 1206 bp, Oryza sativa
  Clone ID: PAT_MRT4530_4824C.1
atggctagaccagctccgctgctgcttcttctcgcggcggtgtgcctagtggccgccgcctccgccggcggtgccgatgcggcggagaggaaggcgacgacggtcggcgtctatgagctcaggaagggagatttctccatcagggtcaccaattggggagcggtcatcatgtccgtcgtgcttcctgactccagagggaaattggacgatgttgttcttggatatgacaccattgctgaatatgttaattcttctacttactttggagcgctcgtcggacgggtagccaacagaattgccaaggcgcggttcgtgctcgatggaaaagcttatcatctgtatccaaatgatggcaaaaacacacttcacggtattcttgagaaatttcccgaggtgcaagaaatccatggtgcatggttcatctctacgaacagtggtcacaggggtttcagcaatgttacatggacagtgaaggagcatgttggtggaggtgacgcaccatacatcacactgtactaccatagctttgacggagaacaaggattcccaggcgccctagacgtgtacgtgacgtaccagctgtccggcccgtacgtgctgagcgtgcacatgaacgcgacggcggcgggcaaggcgacgccggtgaacctggcgcagcactcgtactggaacctcggtggcacgggcagcggcgacatccggggtaacacggtgcagctgttcgcgtcgcggtacacccccgtggacgccgagctcatcccgacgggccaggtcgcgcccgtcaccggcacgccctacgacctccgcgcgccgacgcccgtgggcgcgcgcgtccacctggtgacgggcggcctcagcaagacgggcgccaccatctacggcttcgacaccaactacgccgtggacggcggtgacgacgtcgacgcgcacgcgcacgcgctgcggcgggtggccgtcgtccgggacggcaagtccgggcggtcgctggagctgtgggcgaaccagcccggggtgcagttctacaccggcaacttcctcacggccgacgtgaaggggaagggcgggaaggcgtacgggcagtacggcgcgctgtgcctggagacgcaggggttccccgacgccgtgaaccaccccaacttcccgtcggtgatcgtgaggcccggacaggtgtacaagcacgagatggtgtacaagttctcgttctag

SEQ ID NO: 45269 - DNA, 267 bp, Oryza sativa
  Clone ID: PAT_MRT4530_48250C.1
atggcggagagggaggtgaggacagaggcggcggtggccatggttgctcctcctgctcacttactcacgccgctcctccaccttctcgtcgccggtgcgacgtgcaatggcggcgctggggaaaacggccagcttggcggtgccctgtttggagatccgatggaggtgatgcagctgattccgatgaagacggtttcgaagctgtttccagaatcgttcaaagtgcttcatgaggattgccatgatggagataaagctctcggataa

SEQ ID NO: 45270 - DNA, 137 bp, Oryza sativa
  Clone ID: PAT_MRT4530_48251C.1
ctcgttttacgcctagggagcagtcaatgatgggccgggccaactaagactaccgcgccgttctttgacccaaggacccttgcatatccggtttcatccgtggagccgacacgaatccatcgaggaggagccttctc

SEQ ID NO: 45271 - DNA, 537 bp, Oryza sativa
  Clone ID: PAT_MRT4530_48252C.1
gctctcgcaaaatctcgctgccgctgccgctcgcgagcaagctctaccgccactgccgcgcggctgttcttgcttctccggaggggaaggaaccccgcggggagggagccttccacccttcgcaaaagccacgcgccaccaaatcctccttttctcctcatcttccctccatcccttcctccctccggccgcgcgtcgctttcgccgcgaccgaattggtggggtcgtgtggggggaggagaggggcgccataaaggcggctggggtcggcgatgatgagcggcgttggaggaggcagatcgggcgggagggacgcggagggcgagtgggaggtccggcctggcgggatgctggtgcagcgcagggacggcgacacgggtccggccgtcaggctcagggtctcccacggcgcctccttccgcgacgtcgccgtgccggcgcactccaccttcggtgaattgaagggggtccttacccaggcaactggcgtagagcctgaaaggcagaggctcttcttccgtgggaaggagaagagtg

SEQ ID NO: 45272 - DNA, 785 bp, Oryza sativa
  Clone ID: PAT_MRT4530_48253C.1
atggccgaagatggcgatggcgagtttgcctttgatctgaacgagcctccgttggagcacggcaatgtcgatttcgattatgtacaacaccttgctgttgtgttatcttaccatttctttggcatcatccttcctgggagtgagctcacgttcgcgcttctcgtcaagcatcttgagcacaatgcgagcggcggcggcggtgtcgagcgtgagagagcacggccggtgagcgcgacgtaagcgacgagagcggggccggcgagcacgacgcaagcggcggcggtggcgagtgcgacgagagcagcggcggcgagcgtgacgagagtgcggccggcgagcgcgacgaaagcggcggcggcggcggcggcgagagcgacaagagcagggccggcgagcgcgacgcaagcggcggcggcgagcgtgagcggcgaggttgagcggcgtgtagccgtcaccgccttcccatcgtcatcgccgtcaccgtcgtctttgtcgccatcgccgtggccggatccgccgcccgctcccgtcaccgtcaccggatcgtgcgtgatgacgacatcctcccaccagggccagatgccgcaggatccacgcaggggggtggccgcaccgccgccggatccatgcggggggcggccgccgccaccgtcacgccaccggatccgcgtgggggggggcctccatcggttggaggcgccgccgccgtcgcacgccacctcgtcgtcgcaaccgcccaccgtatcctgcgcctccacggccgccgcgctgccgctgcgcgccat

SEQ ID NO: 45273 - DNA, 354 bp, Oryza sativa
  Clone ID: PAT_MRT4530_48254C.1
gttcgtgtcgtgttcagtggggggtgatgggggcgcccgatgtggatcctcgctgcttcgacggccgtctccttttgcccacatctaccgttgcctagaagccgtgttgtccacctgcggagagcatcctgcggtgcgaagcctgagatgatgccagacgcggatgacacgagggcttggctgccttcccttatcgtccgagcagggaatgcgcgacgccttgttctgcattaccggcgagcatgctctctgctgcgtcatatccgtgggtggaggatacacccgctggtccattatatgactccatgtctacggagacgaaggagaggggttcttgctgtggcctgtgggtct

SEQ ID NO: 45274 - DNA, 377 bp, Oryza sativa
  Clone ID: PAT_MRT4530_48255C.1
aaaaagccagcctcctggctggtccggattggagccaaccaaaccaattcggcctaaacttggtttaccttggttcaagggtcaaaaaatcctaaaccagaaccttccccgggggaattcctttggattttcggcagcgcccccttatttttcccttttccggaccgaccttgccaaattagaaaccagcggctgggaatggcaccacccatttaacaagcttggggggcttttttgaggcatacacacttttccggaatttcaggccttggctttttgtagtggccacatcctccacccttgatttttgaccagcttgaaaaactgttcaccatcctttaagttggtctttggtggaaaaccattccacccggggg

SEQ ID NO: 45275 - DNA, 321 bp, Oryza sativa
  Clone ID: PAT_MRT4530_48256C.1
atggaggggcaggcggcagacggcggcacgtgggggctcctgtaccgcaccgcgctcgccaccgtcttcctcgagggccacatattcctcttcatctccgtcattgggttgcgctccaagttcgccaagttcattcccaagctcatccggatatcgtcgtctaccgggattgggctcttcttggcgttcatcgggctgcagagcagcgagggcgtgggcctcgtcggattcagctcgtcgacgctcatcacactcggcgcatgcccggcgtcgcaacgcgcttccgtggcgccggttgtgacgttccccatcgtcaactag

SEQ ID NO: 45276 - DNA, 507 bp, Oryza sativa
  Clone ID: PAT_MRT4530_48257C.1
ccgagacggactactttgcaagcattacctggcggagaaccggttaacttgcacattgacattgttagacgcgtctatattaaccaaacattcaacaagggatactttcacacattcgtgcacgataggatatgattcacagctaatatgagatggggtccgcgcgcgcacacaagaagctatgaactgttggcatgaagaagaacgcgtacatatttactcactcaggacacttcaatacaaacagtagctcatcactccaacacagtggtgccccacatggttgctattgggacgagccgtgtggctgtccctgaataagcctccatggatctgtggggctgatgtcctgggcgggacccaagccatgctggatgaaaaaggctgaaggctttgaggatgcgccgatatacttcatggtgctgaagatctgtacgaggagcgccatgaccgttaagtacttgtccgcggtgcccgggtcgtttagtgagaaccctgccatgctgt

SEQ ID NO: 45277 - DNA, 556 bp, Oryza sativa
  Clone ID: PAT_MRT4530_48258C.1
gcaaccgaggcgtacagaacgaccaaatatcaatcagcaacgcacgagattttgactgatgcgcagattgctgagatgcaagccaaagggcaaggcgaaaaatttgagatcactggtctgtccgacaataagtcacatcaaggacgccgggagctaatcgcccaagctatttccgatagcagttctaaggcgcaaccgcaagaacaaccacaagaacaaggactaggagcggatggcagatggcattttcaaaaccctcgcgtaaagcctggacaagacatcgcaggcgcgatcaaagaatggatctggaatgatgcaaaaaatctgccgggtgaagttgctcaagccgtatcggaaatgcctggcaatcttgcaaaaaacgctgtaaatggggcttggaatgcggctgtaggcgttagtgaagtagtaaatagaaatttcgccaccaatacgattcctgaaggtgccgctatggactacatttcgggcattgtcaaaaatcctgaaaaatacgacccgtactacagggaaatcagccctattgcttgcattgacg

SEQ ID NO: 45278 - DNA, 426 bp, Oryza sativa
  Clone ID: PAT_MRT4530_48259C.1
gcgttctgcgcaggcgagattgctggcagagggtgtaccatatccggatataaggactaaaagagttctgattcagacctggcttataaaatacactgttagctgacgcttgttgaaatgacaaacatacctactgccttttcacaatttggtttatggaaaggctgtctagggctggatgtcatgcatgactagcacatgcatgcagcactgcttcaagaatgtgctcgatctctagagggccattttggtgtaccgaaatgtgaaatactgaaataccatagtgccccactcgtcagattgtcataaatctggtccataggatccatctcatcatataccattctatgtgaatattcttggatggatgctggggggggccagggaggcaagcaaaggcaaaggcaggaatctgtttggggtttt

SEQ ID NO: 45279 - DNA, 288 bp, Oryza sativa
  Clone ID: PAT_MRT4530_4825C.1
atgcgcgtggcgagggcgatcgggtgggccgacgtcgcggacgcgctgcgcgagcacctgcaggtcagctgcatctccatcggcctcctcctggtcgccgccgcgtgcccgcacatggcggcgctcaacttcgccaagcgtttgcaggcaacggccatcgccatcgccttgcctctcgtcggggattggaagtatgcttggtgcttacaccttcaagggaaaatgaagcctcctttagtacagaggaatttcatgggaattttggaagaaatgacccgtttcctgtga

SEQ ID NO: 45280 - DNA, 475 bp, Oryza sativa
  Clone ID: PAT_MRT4530_48260C.1
gggaagcaacaaatttcaaattcaatagtcatcaatcaaaaacttacaagaaaattaaatctaatctgaatctggtaccgacataccgacgggggtcaaaatttccccctttttcccctcaaaaaatctccctttttggcaagaagggaacctagggtttcttttcgacagataggggatgaaacgagcaaaaacaactactacgggcgaattctcaccaagcactgtacacgtccaaaattttccctcccaactgccaagggccatcggttcagctatacaaagcttccttgccctatctctctctggcccttgggctccttacttgctctttttctgcttccggttttttgtttgcgttctcttagcagggagcgccctggcggggctcttcccttcgagcttcttgggcacctttatgacactggtcatgcccttgggggccgccgctttggggtccgacctggggttaaaa

SEQ ID NO: 45281 - DNA, 292 bp, Oryza sativa
  Clone ID: PAT_MRT4530_48261C.1
gataaaacgcgagcacagtatttgacatataattaacggcgtccattaatgagtagtaagaagattatttatgcgacccatatccatgcggtcagccggccgacgaggcggtagcggcggaggaggtcaggccctcgccggtaaggggatggcggcgcgcgtcatgatacacgccgggcgcgaggagatgtcgaccaccaggctttgacgagcggcctgtatcctactagctccgcctgggcgtcttgagaggaaacaggtcggaatgtggctggggcgggctagcgagaat

SEQ ID NO: 45282 - DNA, 651 bp, Oryza sativa
  unsure (1)..(651): unsure at all n locations
  Clone ID: PAT_MRT4530_48262C.1
gnaattgtaatacgactcactatagggcgaattgggtaccgggccccccctcgagtttttttttttttttttttttttttttttttttttttttttttttttttttttttttttttttttttttcttttttttttttttttntttttttttntttttttttcccaaaaaaanaaaanttccccccaaaatttcccngnngnatttttncccccccnnnaantttntnncngggtttttnanttttcnaaaanncccncncccngggaatggggntnncttngggncaaaaanntttttcccntnncccccccttcangngnaaaaaatnaantttcccccccanaaaaatncnntnnaaaannggnnnaaaaaancccccngggnnnggntnncaaaannttttngntntccccccccttntaccccncccggggggaagttttnttttccccctcccgggaaaaacgtnccaatttncngggcccngnaantaaataancccccgtttntttaaaaaattnccccctnaaagggaaagaaacccccccccccnaagggnaaaannnnangattttgggggnaaaaaaccccccccccccccnatnaaaatttnnccccccacncncngtaaaccccnccccccggntncc

SEQ ID NO: 45283 - DNA, 1184 bp, Oryza sativa
  Clone ID: PAT_MRT4530_48263C.1
ctgaaattgattttatctgtgtttgaaaagttatctgccttgaaaataaaattatcacaaaagtgaattattttgttttggtcaggcaaagaaatattatgatcaatattctaatatcttttcgtgttaagtatcttagtattccaatgtattttagaaagcttgataataaagatcgaaagattattgaacaaagaattgagaagaatttagcctttagattggttttaattaattctgttttattaagtttagttatatttaccatatccttttttgagattccaaatggagttcttcaaaatattgattattatagatcatatttcttttggtaaggtgatgatcataagaaaaaagactaacaagatagaatataatttgtcaaccaaaagacataggggtttggatgttcataatttagagatccaaaataaatgtcttttaagtaaatagttattcaagttaataaataaacgaggggtatgtcaagacttattgaaatggaagtatctctctaaccgttctataagtcaagttgatagaaaacaagaagattctcatttctggtcaggtctcatgaaagataaaatactttcttaaatatgggttgctagattgtaaataatggggaacaaactatattttggaaagataaatggatagataacgtggcttctaaagacaagtatccatttctttatgccattgttcgaaggaagaattcttcaattgctaatgttatgagatctgttccgctgaatgtttcttttaggagaactttagttggttagaatttagcaaattggcatagcttgtgtgtttctattgtgcatattcagttgaatcaattgagtgattattttagatggaattatcatcagaatggttaattcattgtttgggcaatgtatttagcattaataaataatagttatattgagagaaataagattatttggaaacttcggatgcctcttaagatcaagatctttatgtggtatttgcttaaaggggttgtattaactaaatataatttagcaacgaggaattggaatggtagcttgagatattgtttctatatgacatctttcgtggagtgtcattattttttttctgcaaaagaagctcaatcaacacttggagccagtgctgcattttttaaatccataaccagatccaga

SEQ ID NO: 45284 - DNA, 1006 bp, Oryza sativa
  Clone ID: PAT_MRT4530_48264C.1
atgaaggccgccgcctccccgctccgcgccgccctcctcctcttcctctcctcctcgccgtccccgcgtctcgcgctccccatgaacccctcctcctcctcctcctcccgcggcgccgcctcctaccactccaaggccgccgccttcgcctccccgcagcctcgcggcggcggcggcggccgaggggggcgacgcggcggcggaagaggccgcggcggcgatgggagcgaccgcatcgacgccctcggccgcctcctgacgcggatcttgcggcacatggcgtcggagctgaacctggagatgaggaccgacggctacgtgcgggtccgcgacctgctcaagctcaacctgcagaccttcgccaagatccctctcaagtcccacaccgtcgacgaaatcaaggaggcggttagacgggataacaagcagaggtttggtctgttggaggaagatggtgagctgctgattcgagctaaccagggccacacagtaacgactgttacttcagagagcttgttgaaacccattctatcagcagatgaagtctctggtatgcggcagagtgttaacatcttgatatatttggatgtcagtatggcactgcaagatggaatgaagctgtacatttcagacaacaaggtgattctgacagagggtttcgatggcgttgttcctgtgaagtacttcgagaaaattgaaacatggccagggagagcaccgataccatttgaaaaatagagaacactgttgtaattttgctcatgcgtatagcgatctacttcttcagttcatgggaattgtgccctgaaaggccgaaagaaatgtaattttgcaaacaagtttaggttatgctcgtttgagaaatggagaggtagacattgttgtgaagcttcagtaagctgttcttaatgttgattgggtcaatggctcctccagtttatccaattccatctttgcagttactactaatctaaaaaaaaaaaaaaaaaaaaaaaaaaaaaaaaaa

SEQ ID NO: 45285 - DNA, 1089 bp, Oryza sativa
  Clone ID: PAT_MRT4530_48265C.1
atgtcgaggtctggggccatggatcttgcatctggactcggggggaagatcaccaaggatgaggtcaagtcggctgtcgatgagtatgagaaataccatggatactatggaggaaaagaagaagcaagaaagtccaactacacagacatggttaataaatactatgatcttgccaccagcttctatgagtatggttggggtgaatccttccactttgctcacagatggaatggagaatccctacgtgaaagcattaagcgacatgagcactttcttgcccttcagcttggagtgaaaccaggaatgaaggttttggacgtcggttgtggaataggcggaccactaagagaaattgccaaatttagcttggcttcagtcactggattgaacaacaatgagtaccagataactaggggaaaggagcttaatcgggtagcaggagttagtggaacttgcgactttgtgaaggcagacttcatgaagatgccgttttctgataacacttttgatgctgtctatgccattgaggcaacatgccacgcacctgatccggttggctgctataaggagatctatcgtgtattgaagcctggccagtgttttgctgtgtatgagtggtgtattactgatcactatgaaccgaacaatgcaacacacaagaggatcaaggatgaaatcgagcttggcaatggcctgccagatatccgaagcactcaacaatgtcttcaagctgcaaaagatgctgggtttgaggttatttgggataaagaccttgctgaagattccccggttccttggtacctgcccttggatccaagccggttttccttgagtagcttccgtctgactactgtggggcgtgcaattactcgcacaatggtgaaggcattggaatacgtcggccttgccccacaaggaagtgaaagggtatctaactttttagagaaggcagctgaaggtctcgtcgaaggtggcaaagataaggcgaggagtttgaaagaaacattatggcggtcaaagaaacacctgatgaagctcagaagcttgaagagttcttatgcgtacgaagagatgctgaaatgtgtttaa

SEQ ID NO: 45286 - DNA, 1630 bp, Oryza sativa
  Clone ID: PAT_MRT4530_48266C.1
cgcgtccgcccaccgtccgccgacgcgtgggtgcaaccccacgataaaacccacgcgagggagagaagccaccccatcctccccacctccctcctcgccggccggagttctcgtctccggcgaccgccgccgccgccgccctcaccgtccggtggagctccggtgatcgacgccgcgatgtcgaggtctggggccatggatcttgcatctggactcggggggaagatcaccaaggatgaggtcaagtcggctgtcgatgagtatgagaaataccatggatactatggaggaaaagaagaagcaagaaagtccaactacacagacatggttaataaatactatgatcttgccaccagcttctatgagtatggttggggtgaatccttccactttgctcacagatggaatggagaatccctacgtgaaagcattaagcgacatgagcactttcttgcccttcagcttggagtgaaaccaggaatgaaggttttggacgtcggttgtggaataggcggaccactaagagaaattgccaaatttagcttggcttcagtcactggattgaacaacaatgagtaccagataactaggggaaaggagcttaatcgggtagcaggagttagtggaacttgcgactttgtgaaggcagacttcatgaagatgccgttttctgataacacttttgatgctgtctatgccattgaggcaacatgccacgcacctgatccggttggctgctataaggagatctatcgtgtattgaagcctggccagtgttttgctgtgtatgagtggtgtattactgatcactatgaaccgaacaatgcaacacacaagaggatcaaggatgaaatcgagcttggcaatggcctgccagatatccgaagcactcaacaatgtcttcaagctgcaaaagatgctgggtttgaggttatttgggataaagaccttgctgaagattccccggttccttggtacctgcccttggatccaagccggttttccttgagtagcttccgtctgactactgtggggcgtgcaattactcgcacaatggtgaaggcattggaatacgcgtcggccttgccccacaaggaagtgaaagggtatctaactttttagagaaggcagctgaaggtctcgtcgaaggtggcaagaaggaaatcttcacgccgatgtacttctttttggttcgcaagcctatctcagaatgagctcccagaaccacatttcagagataaggcgaggagtttgaaagaaacattatggcggtcaaagaaacacctgatgaagctcagaagcttgaagagttcttatgcgtacgaagagatgctgaaatgtgtttaactggtgaattttcgtctgttggtttgccgtgtaaaaaccgtttgatcaaggcacttgtctgcagggtgcctgttttagtctaagacgatgaactgactggtttttgtttgctcgtttctaagttgttagtgacacataagttaagtttgcagttcattcgccagtgtgtattgtaactttgcaataaggcacctgcttgatagctttcttttcatattgttcttcgacaaatataagtgatgattattacctgtaaaaaaaaaaaaaaaaaaaaaaaaaaaaa

SEQ ID NO: 45287 - DNA, 1381 bp, Oryza sativa
  Clone ID: PAT_MRT4530_48267C.1
accgttcagctggatattacggcctttttaaagaccgtaaagaaaaataagcacaagttttatccggcctttattcacattcttgcccgcctgatgaatgctcatccggaattccgtatggcaatgaaagacggtgagctggtgatatgggatagtgttcacccttgttacaccgttttccatgagcaaactgaaacgttttcatcgctctggagtgaataccacgacgatttccggcagtttctacacatatattcgcaagatgtggcgtgttacggtgaaaacctggcctatttccctaaagggtttattgagaatatgtttttcgtctcagccaatccctgggtgagtttcaccagttttgatttaaacgtggccaatatggacaacttcttcgcccccgttttcaccatgggcaaatattatacgcaaggcgacaaggtgctgatgccgctggcgattcagaaattcgatgataagctgtcaaacatgagaattggtcgacggcccgggcggccgcaaggggttcgcgttggccgattcattaatgcagctggcacgacaggtttcccgactggaaagcgggcagaggacaaactccgtggaaagccaggctacgaacatctgagtgacccactgcacattttgatagaagctgagttcccagccagtatcattgatgcaagattgagacatgcacaggaggttatagaagaactgctaaaaccagtggatgaatcacaggatttctacaaaaggcaacagctcagggagctggcaatgctaaactcaaccctgagggaggacagcccccatcctgggagtgtctctccattcagtaatggcggtatgaaacgcgcgaaaacgggccagtagagaagccaactctaccaccacccatttgaggtggtatccaggtgccttatgccccttaaaaaggatggcattggcacaccttcaggcattgtttgccatgggtgtgtgtgaaggaagcaatgcaatgcaccttcactagatggagtttggtatcagtcagattttcgccttcaggcaggggaaaacttcagggacaatgacaatagtcgcagatcgtccggtcgatccacctttggtttgttgtaaggtctcaagaacatttgttttatttgttattgactgttaaccctagtatgtggtgctatggtaggttatctccatgacaagctagagaaggcctgggatgtgagcctttttttttcttccatttaccccccatttaggtgtttaattcaccttgtattatatcctttcacatttatggagctgtgaaaaataaaagaaggatgaagggtcatcctctttcttctgcctaaaaaaaaaaaaaaaaaaaaaaaaaaaaaaa

SEQ ID NO: 45288 - DNA, 639 bp, Oryza sativa
  Clone ID: PAT_MRT4530_48268C.1
atggccgtcgccggcggcgcggcgcgcgacgatgcgccttcccgaggcggccgacggcgccgacgcgcggcctgggcatgcagcagtggcggcgacgctaccccggaagaaggggagcgcggatctggcggcgctgctgctgcggcggcgataggcgtcggctccgaatccgcaagcttcccttcccttctcgccagcggacatccacctccgcttaccgcccaggcagatgccaaccttgtgttggctgatcccaatcttcatcctgacgctgccgccataatcggggcacaagtagagctagagtgtggagcaatcgcacttcggtctggtatctttgatagtagggtcaacacacaatgtcaaggcccagacaccagcgtcaaggacgccttcttaaccgccgccaccaccgcccttcaccccaaccccgatgctaaggtgaacctcctcacgttgtgcaaggcgatgatgggatctgaggccttgccgatgatgcagggtggtaaacagctcttctctgacaacattcaccggcttgtgatgttgctatctcctggatcatcaccccgtgcccatgaggatccgccgcttcctccactctccctaacagggtggtctcttggagagctttcatga

SEQ ID NO: 45289 - DNA, 1450 bp, Oryza sativa
  Clone ID: PAT_MRT4530_48269C.1
aacagggcccaagtcgtgtgcagtgcaccggtccgcttccgtgcgtgtgtgagatgggcgttccagatcagctccaagtttgcttgaaagcgtcgcttctcgttgcgttgccacttgccaagcagcagcacgtgaattcgttgctgttatcttatctatcctggaaagcgacatcgccccttgagcctcgccctccagcccatcgatcgatccccctttagctgagcgaattattccacaagttccacgacgacgacgacacggccgggcgaggcaggcgtacatatgaacagcgcgacgcggccggaaacggtcgcgtacgtggaaacggccggtgcgtgccgatcgatccgtgagccaccttccaggcgcgcgggagcagaagtgtactatgccattggcagcgacggcgagcgaagaccgcgagcgagctagtggacacgggaggttgctctcgcggcgcgcgggaggggaggagaggagagggagaccggtggcgcgggtgcgctggaccggttcacgccccgcgtgcgcgccggggaccgaaatatctgtccgcgtcgtcgatggccggtgtcgccgtcgagcgagctcctccaatccacagcctcgtcgatccacttcaaaattcggagggaggaatccaaatcgaatcgaatcgaatcgaagaagcttggggggatattcttgatttgatttgttgttggaagagaagcaaatccaatggcgattgcatcgggggcggctttctcggtgaggccttcgccggcggcggcgaggccgtgcgtcgcggcgtccgcgtcggccgccggcgcggcgaggttccgcggcgacgggagcggtggcggaggcggaggcggaggcggcgggaagtggtgggcgccgctgctggggtggtcggggcagcccgactacatcgacgcgcagccggcggcgcgggaggaggcgcggccgaatccgatggcggcggcggagcagcgtggcggcggcgggaagaggttcggcgtgctgacggaggagaaggcgcggcagctgcgcgcacggatgatggagacggagagcttccacgactgcatgtaccactccgccatcgcctcccgcctcgcctccgccgcccccgccgacgacggcaagcactgagccgccgccgccatccatggctccccgcctctgcccataccgcgccgccatccaacgccgatgatgatgatgatgttgttgtgtcgttttggtatcaataacgtcgccgccgccgacgccgtcaatggccggagaagtattagtatgaggcctcgacggcggcgtgcttgtcggattgattccatggagatgggatgatttcatcctaatatctccatttctgtaactcatagtatagcagctaatgcatctaaacgttgttgtaacaagaaatttaatctggtttcttcaaccatggcttcttctgtac

SEQ ID NO: 45290 - DNA, 801 bp, Oryza sativa
  Clone ID: PAT_MRT4530_4826C.1
atgggaattctgaagtcctacgttcggaacagagcaaaaccagaggggagcatcattgaaggttacacgaccgaggaagtcattcagttctgtatcgattacatggccgagactgatcctataagagttcttgcgtctcgccacgaaggaaggttggcagctgcaccatcagtacccagatcttgctctccatgcttcacccaacatgtgtatctctccatgaatcctcctgtagaacgagacgcgcattcaacccgtcctttgttttgccaggcatattcagcaatagccccagcaagctatcgcacacattcttctctacgtgcatcagatcaatgcaatgacggacctcaagatcttgccagtaagggtgaggagcatttagcgaaggtccgacaggacaatattggtcgatcaaatatttggatcaacagagaacatggtgctcgcttcaacaaatggttcaaggatcatgtagcacggtcgaccgatggcccaagtgagatattacaaaggttggcatggggtccatcttgggatgttaacacatggcaaggttgggtgaatatctgcacaggtgtcaaggtcgacatggaaggcttcacattagtggacctggacaacgttggatatgcagacgaaccattcgtactagcgaagcaggtcgaacatattttctacataaaagaccccgcaaacaagaagatgcatgtcgttagggatggcaagcgaagaattgtgggggtggacaacgtcgtcgatgaagaggaatacaacaagaatcttcatgtcagaccttag

SEQ ID NO: 45291 - DNA, 615 bp, Oryza sativa
  Clone ID: PAT_MRT4530_48270C.1
atggggtccgacgccaccagcgccgccgaagcgatgggagggctccggggggcggtgcccctacagccggacgccgacctcgtcctggctaccggcggcggcgagcgggggcaggtggggtttgtcctcgtcgacgtttccaacgggttctgcaccgtcggcgccgggaacctcggctgcaaatgcgtgaacgacctgggcggtaagcggaggtggatgtccgctggcgagaagggaagggaagcttgcggattcggagccgacgcctatcgccgccgcagcagcagcgccgccagatccgcgctccccttcttccggggtagcgtcgccgccactgctgcatgcccaggccgcgcgtcggcgccgtcggccgcctcgggaaggcgcatcgtcgcgcgccgcgccgccggcgacggccattgtctcatcgtcgcccgtgccctgccgacttccccccctgcccagtgctcctgccgccgccgtcgagtcgccggccgtcgctgccgccgtatcgccgactgccggagatgcctggagagaggaggaagaagaagaagcctcctccctcgcagcgctctctccgcgccgcccgccgcccctctgctgagtagctga

SEQ ID NO: 45292 - DNA, 237 bp, Oryza sativa
  Clone ID: PAT_MRT4530_48271C.1
atggccacaccagaggttctcctgcttcgaatcttggacatgggcctgttgctgggagacgacagtggttgtggagaggagacagggctggccatcacccacactcagagcatggattggccagatctagcggaggtcatcatcattacgtcctcaattgccattgactacactatggaagacagaatggcggtagccatggagaaagccttcttgtcgccggatcaggcaccctag

SEQ ID NO: 45293 - DNA, 831 bp, Oryza sativa
  Clone ID: PAT_MRT4530_48272C.1
atggctcctgctgccacgagagatgaaagcgctatctctgatctcgccgggtacggactcgaggagaaagactaccctgttatccattatgagtcagaccttcagaccggcatgtcgacaacacattttaagttggaatcccgagcaggggttgtaggtgtgtgtgaactagcatgccaatgggccaagcatgccttggcccaggcttcggcctatgtcgtggaggactcctttgccagcgacacggaagtttctgatacccaagtcgtcgtggacatccaagcggtggctgtgaccgagctcgacctctatgggttgatggagagcaagctccaagacgttgctgttgatgtggccgggagcgaggtcgatgccgtcgttaccgtacgtgaggaagctatggccgtggctgagatggagttccatggcgctgcagttgatgtgaccgagagtgaggtccgcatcgtcctggccgtacgtgatgaagcgatggcgatggttgtggctgtgcccaaaatggagcccaatggtgccgcagttgctgtcaccgagagtgagttggatgctgccatggctgtggccgagatggagctcgatggtgccacagttactgtcgccgagagcgagcttgatgccgccgtggatgtggtcgagatggaactcgatggtgccgcagttactgtacttgagagcaagcttgattccgttgtggctgcatacgaggtagtcgtggacgtggacgcgtttattgagcaatctcgagcatattttctacacaatatgcttgaaaaatgctgtcattctgaaaacagatgcaatcgatataaatag

SEQ ID NO: 45294 - DNA, 243 bp, Oryza sativa
  Clone ID: PAT_MRT4530_48273C.1
ggcacgtgtcgcggcgctcgtcgcccaggccgacgacggctgcccgccaagggcttctacacccgcaacgccttcctcaccgccgacggtggctacccttccttcggccgcaccggatccgtcgacgcctccaagcgcgagatcgacgtcttcttcgcccacgtcaaccacgagaccataaagttctactacatcgagaagctcgatggacctcgcaagaacttcttaaccgtgacgagaacg

SEQ ID NO: 45295 - DNA, 352 bp, Oryza sativa
  Clone ID: PAT_MRT4530_48274C.1
gcggggggggggtttttttttttttattttttttttttttttttttttttttttttttttttttttttttttttttcaaacagccacccatgaggaggtaggactttattttaaacaaacaaactattatatggttacaattaaatcccaggcggggggggggggggaatgctcctgggagccctatagtagttgggggagatcccacatatggggggcaaggggaagggcaacaaagttggggcttgagcttgggtctgaccaaaggagaccccactaaattgctgcagttgaagctgttgcacaatcgcttgaacaatactaagggccggggagggagcccacccgtccg

SEQ ID NO: 45296 - DNA, 333 bp, Oryza sativa
  Clone ID: PAT_MRT4530_48275C.1
attcgaaggcaacctcgcggcacataacccaatacagaacgacccctacacataaactgaaccacccgacgaaccgccacccagcataccgatgcggcccacgcctgggagcaaagacagccacctgatccccgcggctgaacgaaacctgccaagagccctcccttgaaagccgataaacaccggcgaccaccgcaacggaaagagcacgaagaatggaggcccgccctgcacactgaccgacgacagcactagcgaaacgggcggaaggatacccatgcaaaaacagcccgaacagccctcaccgccacggaaaaggactgtgggaccaac

SEQ ID NO: 45297 - DNA, 189 bp, Oryza sativa
  Clone ID: PAT_MRT4530_48276C.1
atggagctcatcaaatcagctataacaggtgatctaactagtcgattaatctcctttcttgtgaacaagttttcagatcatacatgctctgaggagaagatggtagtcacagccatgtacagtggctatcgtgtgctggacaccatcaaatacatgaagaataaggaggacaccggtgacctgcactga

SEQ ID NO: 45298 - DNA, 344 bp, Oryza sativa
  Clone ID: PAT_MRT4530_48277C.1
tttttttttttttttataattttttttttttctttctctaacgggccttccaaaaaaagataatttttgatggcaaatcgtgattatcataccttattggaaatccaccgtgccagaaatcaagagagatcgatggccccctggatgggatttcatgatacccatttttttactaagtcctccggggggccataacctaccatgggcttccttgtgtgaacccctttatacttgcttgtggcccttgcttaggaaacaccggagacagtttaactttccttggaacaaaaccggcgtcttgcttttttgcaccaattaacggcatgattggtttttttattacc

SEQ ID NO: 45299 - DNA, 300 bp, Oryza sativa
  Clone ID: PAT_MRT4530_48278C.1
atggtggcggcaaaggaagacgacgacaatcaatggcggtggagtgcgaggtggcgtacgacgaggatgcggactagtggtaggatggtggcggtgcccggtgttgtccgtcaaagcttcgttgtgacctacatgtatcaagacagtggcaaggcaagctcaacaccgatagccaggcctctggtgatgacaaccaaagcacgtctgaccatggtgtctcagtggagtgtaatccaaggtcggcgcccattcgtcctatccacctcccaccatggccccaagcgtgtcgtcgagggttaa

SEQ ID NO: 45300 - DNA, 564 bp, Oryza sativa
  Clone ID: PAT_MRT4530_48279C.1
atgggcacgtctagcaaaaccatgcacccacagcccaccatggctgacgtcagcacggggtggcgcggcgccgacaagcggggcccaccggtcagcggcacggggagagagaggggaagggcgctggtacacgggcccactcggcagcggctcaagggggggggcacggctggcaagcgggccccacggctccggctccacgagccgatgtaccggccaggcccggcatcaagccggccgggcggccatggcaaggcggcggcgcgggcatgcgaccgccagcgacggcgagcggcggcgcgggcggcgggcggcggcgcgagcggcggcgcgggcggcgggcggcggcgcgagcggcgacgaccgaaagcgacggcgagggcgcgaagagggcggcggcgcacggggaaaaaaaaagaaggaaaggaaggggagggagacctcaccggaggggcggcaatggccggcggagaaaaacgagggaggcggcgaagaccggtgatgccgagagcagcggccgggaagggtcttgcggcggcgaagctagtggtggcggtggcttag

SEQ ID NO: 45301 - DNA, 211 bp, Oryza sativa
  Clone ID: PAT_MRT4530_4827C.1
tgtacgcgtgggcggacgcgtgggtgggaacttcggctagggccccccgtgaggcggccggacaccttccctgcatcctccaggacgcggttagcagagtcttcaccgcccagatcctccacttgtccggctacaccgcggcggagccagccgccctccgcgccctcttcgacatcgccgggcgctaccttgcctccctgggccgcgctga

SEQ ID NO: 45302 - DNA, 113 bp, Oryza sativa
  Clone ID: PAT_MRT4530_48280C.1
cggggttccccttacgattcgcgggcggattagcgcgaggcgcgcctccccctcactctgtgtgcatcctgggggtgcaggttcaggccggcagccggggccatccagcccat

SEQ ID NO: 45303 - DNA, 279 bp, Oryza sativa
  Clone ID: PAT_MRT4530_48281C.1
atgctcccgggcctcgcactcagcagccggtacgaagctctccttgatgctttgggtgaactatggaacgagatcaaaagttcttcctccttcaacaactccatgacgagagagaagtgtcttgccaaaagtctgcttgacaaggagatgaagaagaatggaaggacacccatgagaacattcaagtggtatcaagggctcaacggcggatctaggcagggctcagcaaggctcagcgacgacgacaagctagaaggcgaaggcgggggctcgttctga

SEQ ID NO: 45304 - DNA, 166 bp, Oryza sativa
  Clone ID: PAT_MRT4530_48282C.1
attgacaaagctggcacgcctgcatgtgctggtatgctatacagcggtcgacctacgcgttctttttttagaggtggctatagtggtctacaccgcggagatggagccacagcctgctccataacataatgaatattgtgcacccaatataaggcatcagcatgca

SEQ ID NO: 45305 - DNA, 683 bp, Oryza sativa
  Clone ID: PAT_MRT4530_48283C.1
accaaatgaggctgcaagatgcaacatttatagacaaaaattcaaagctatcgataattttaaataacagttacatgctagaaggaattcttatgtctaacatgagaagataaccacttcgatacaatattgttgaatattttaagccatacacatgaacgaccaaatactccaatcgacaatttgagaagagaataagaatatctccaatggagcacataactggaccttctgtcgaatacacaaatgcgtaacattgaaattgttatgctattttctcttgcgctgctggctaaagaaaaacaacctaacattgaaattgctaatgaattgattatgcttcagagatacatctctttcaccatgtttacaaacgcgcaataactctgtggtagaaagtgaagacatgcggcataccaaccttgttttttctgcacttttaggcaagcatcaaacccatcagaattgagaacagatttgtaggttcggcagtagcatctaattttaagtatttgtaggtttctcacatataagctaacacttgtggcatcgggcatctactgcttgtaatcccagacgacactgaaggaaattacttaagaagaggcattgactgcttgtaatcccagacagcactgaaactctggaagaaattacctagaagagactatgtacttgaattc

SEQ ID NO: 45306 - DNA, 257 bp, Oryza sativa
  Clone ID: PAT_MRT4530_48284C.1
gggaggggaaaaaaaaggaaaccggggggccaaaacaggatgggcataccgaattcaagaggtcttttacagcaacaggggtatccacaggacggttcttaaaagggccaagctagggccctatgggaaggaagcccccaagggggagaactaaaaaacgggggaacaattccaggggagggaaggggccgaccctgaaagggaccagcttgtttactggcagcagaagcaggatcaaaaaataactatgaagcccc

SEQ ID NO: 45307 - DNA, 182 bp, Oryza sativa
  Clone ID: PAT_MRT4530_48285C.1
aacaaggaaatatttaggattgcatgataattaacatataaatctttacctacatcgaattaacgtagtggagcataggaggaaggatgatagaatactccaattctccatggatcggaatgggatcaggtggcctttcagaactctacacccagatcgtcgcacgcctactcaaagaacac

SEQ ID NO: 45308 - DNA, 151 bp, Oryza sativa
  Clone ID: PAT_MRT4530_48286C.1
tttaaggggaggaggaggatcgtaggagacagagctgggactattaggcggtgtgcactccatcacacaaagcttactctgatactcccataccaaaacgatccctcccaaccaggatcaacctaaccgctgggtttccgttgccaccacc

SEQ ID NO: 45309 - DNA, 210 bp, Oryza sativa
  Clone ID: PAT_MRT4530_48287C.1
aaaaaaaataatgaagcagaaacaacaaatgaaggtagtcaaacataaaaaacaaaaaaataaagacggccgttgtggaaaaatgcacgcttgcgcacgagcggctcgccctttctagctttctttctgtgcttcccgacttcatttcggtcgtcctctttttatcatggggtctatcgttaatccttcaggtgactgaactaattctct

SEQ ID NO: 45310 - DNA, 687 bp, Oryza sativa
  Clone ID: PAT_MRT4530_48288C.1
atggagggagggaggaagccgcaggccaccaccgtcagatctggaaggagggagggagcaagccgcatcgccgccgtcctcccgccccctccggctagatctgggaggtggggccgccgccgccaccaccacagctacaggggggccactgccagatctggaaggagggagggaggaagccatgccgtggcaaccctcccgccctcttcggccaaatctgggaggggggctgccgccggatctagaaggagggaggaagttgccccgccgccgccctctccgaccagatctgggatggggggccgccaccaccaacgctgcaccctccgatcggatctggagggaggggagccgctgccgctacaaatgtgctccgcgccgccgagtgacgaagggagccacctccgcgccaccaccatcgcgtgcccgcgccaccgcccttgctgcgtccgggggagccgtcgtcgccacgcgtccgtgccgctacctttgacgtgtccaagccgctgccgttgggatgagagagagggagagccgcctcccatccacgtcgcgccgccgccaccctccctcctctggtcggatctggaagggggagggagggaggggaggggaggggaggagggaaggggcacagtgaggggaggggaggcagcacagttagcagaggcaggtgagcgactgtaa

SEQ ID NO: 45311 - DNA, 265 bp, Oryza sativa
  Clone ID: PAT_MRT4530_48289C.1
tttgttctgtaaaagtcattgcacatcacaggggaagggtgggtttatactgggctggttcgttctacacacatgaaatccataacctgttactggtggcatcgattcgtggggatcataatgcggtagtcattggaaggcagtggtagaatggaatggtgctttctaatcctaatttaattgggcattaggtctgactctattgctgtaggaattggtaattcaattgggttttctttattaatgtaccatgtgaagttatgat

SEQ ID NO: 45312 - DNA, 1686 bp, Oryza sativa
  Clone ID: PAT_MRT4530_4828C.1
atggacttgggaggtgcaattgcttgccacacagccattcctgctctaccgaggcctcgggggcacttagtatggggccatgctaagttgcatttgtcttacatgggtcataggagatggctccccctacggcacgcctttaaaagaaagaagaaaattttcaatggtaagaaagaacttgggtctgcccctgagaatttgtccggagatcaagtacacaacatggagatgaacatttgcagtgaacttcaacctgttacggatgagaagacaggaagagtgtacctcccaccagcttgccacacattgtcgaaggatgagaagatcgcaatgctctcatgcctggtagatattaaagttccttcgggctattgcgcgagaataagtaagtatgttaaattggaggatctaaaactggttgcaatggagtctcacgattgccacgtgataatcacacagatcttgccagttgctatcagaggcattctaccaccacaagtccgtcgcactatccaacagctttgtgccttcttcaatgcaatcggtcagaagattatagatccagaagacctagatgggttgcaggccgatattgtcaataccctgtgtcacttggagatgtattttccactggctttcttcgatatcatggttcatctcactgttcacctagtgaagcaaacaaaaatatgtcggccaactcttattagagaaatgtggccattcgagaggtacatgggaattctgaagtcctacgttcggaacagagcaaaaccagaggggagcaacattgaaggttacacgaccgaggaggccattgagttctgtatcgattacatggccgagactaatcctatcggagttcctgcgtctcgccacgaaggaaggttcgcaggtgttggcacaactgtcagaaaaagaattgttcccgatcaagcttactatgcgcaggctcatttcgcagtgctgcaacatatggctgaagtaaccccatactttaaggagcatttagcgaaggtccgatgggacaatattggtcaatcagatatttggatcaacagagaacatggtgctcgcttcaacgaatggttcaaggatcgtgtagcacggtcgaccgatggcctaagtgagatattacaaaggttggcaaggggtccatcttgggatgttgacacatggcaagggtacgatatcaatggatacacattttacaccgtcacacaagatgagaaaagcacagtgcaaaacagtggagtccgtatagatgcatatcagcatcaggttggatcaagcacatactatggccgcatagagcagatatggaagctgaactacctgaacttcaaagtccctttgtttcgttgcagttgggtgaatatccgcactggtgtcaaagtcgacaaggaaggattcacattagtggaccaggccaaggttggatacgtagacgaaccattcgtactagcgaagcaggtcgaacatattttctacataaaagaccccgcaaacaagaagatgcacgtcgttagggatggcaagcgaagaattgtgggggtggacaacgtcgtcgataaagaagaatacaacaagaatcttcatgtgagacctcagatcgaccttgacgatgatcccgaagatgaagtggcgtacgttcgttcagaccattcggaaggcatatcactgtaa

SEQ ID NO: 45313 - DNA, 426 bp, Oryza sativa
  Clone ID: PAT_MRT4530_48290C.1
atggcgctcccactctacttcatgtccgtcttggaactaccaacctgggcaatcaacgaaatcgaaaagaaatgccgggacggaggatcagtgcagtacagatctccaattcttttctctattgtcaagctgagtggcatcatggtggctgccgccctccgtgacaattcctggattgaagatgttaggggcggcctaacatcctgcccgctcggcaagattatttggaaatctcgcacgccagcaagatgcaagttcttcacgttcctttctgcttgccccttctcgcagcaggtttgggtgcaggtccaggctcgattgagcctctcctgctcgccgccgtcctcggattttgccagttggtggcttgctgcccaacagtctgttgcgaagatcgactgcaagacgttcgacaccgggggctag

SEQ ID NO: 45314 - DNA, 552 bp, Oryza sativa
  Clone ID: PAT_MRT4530_48291C.1
atgaacttggcgccatcgctcccactctacttcatgtccgtcttggaactaccagcttgggcgatcaacgaaattgagaagaaatgccgggacggaggatcagtgcagtacagattcccaattcttttctccttcgtcaagctgagtgacatcacggtggctgccgctctctgcgacaactcctggattgcagatattaggggcggcctgtctgtccaagcgatgggggaataccttgcgctctgggacgtgatcgccgggatttctctcgaccccggaagtactgactctatgatctggaaggcggcacctaatggcgacttctcggtgcagtctgcctactctatcctttcggccggtagaacatcctgcccgctcggcaagattatctggaaatcccgcgcgccagtgagatgcaagttcttcatgttccttgcggctcgtttgagcctctcctgctcgccgccgtcctcagactttgccggttggtggctcgctgcccggcaaactgttgcgaagatcgatcgcaagacgttcgacgccgggggctag

SEQ ID NO: 45315 - DNA, 3577 bp, Oryza sativa
  Clone ID: PAT_MRT4530_48292C.1
tcatagaatatcaaaccacagccttgaatcaaacccaacaatgtcggtgaactcttcctgattgccaatcacagcacgtgctggcagattgcttgtatcaagctcaatagaagccatattctcttgtgtgcaactccgtttgagaacaacggctctaataagcaaatccttgaattttagcactacttgaaatcgctgatcaaactttgccacctgatcaacaaactttattttgctggactccgtaactttctttttatatatgctcaccagcattattcttttcctaacaacatctaaatctgcaccagtaagcgaatgatcgaaattagcgcgactaattaaaacatctttcacggcaggaggagcttcaaaaacttgatcaagtcgtgagtagatgccaacttcctgcatcttccatatatagtttgggacatggccttccaagtatgaagcgtgagccttatcctgaatatttacctcaaggaaaacaggtccgtaaacttcagtcctgaacttgtatctgttatcttgcacccagttgtatgcttctttgatttttttttcagcaccacaacatctcactctttggagaatcttatagtttccatttgcttcaatagctgcgtgaccgacgaggttgtttccctcgaaaacccgtgcgtttcgctctttccaaatcaaccatgtaacgaggatgaccccggcgtcgaacgtcttgcgatcgatcttcgcaacagtttgccgggcagcgagccaccaaccggcaaagtctgaggacggcggcgagcaggagaggctcaaacgagcctgaacctgcacccaaacttgctgcgagaaggtgcaggcttggaagatgtgttggtaggactctccatccttagaacaaaggtgacaaattggtgcgagcttccagcctcggcgctgcaggttatcagctgttaaacaggtattgcggaccgcaaggaacatgaagaacttgcatctcgctggcgcgcgggatttccagataatcttgccgagtgggcaagatgttctaccagccgaaaggatagagtaggcagaccgcaccgagaagtcgccgttaggtgccgccttccagatcatagagtcagtacttccggggtcgagagaaatcccggcgatcacgtcccagagcgcaaggtattcccccatcgcttggacagacaggccgcccctaatatctgcaatccaggagttgtcgcagagagcggcagccaccgtgatgtcactcagcttgacgaaggagaaaagaattgggaatctgtactgcactgatcctccgtctggcaaccagttgtcgcaccaaaacgaggtagaggctccgttccccagcagtactttgctaccagcggcaaagcagtgcagcgactttctgtcagctagaggtgcaacacgcgtccaaggatgctctggctcagcacggcgcaaccaaatccaccgagtgcgaagcgcaattcccattaggcgtaggtttctgatccctagtcccccctgctcgacaaagaggcaaagcttctcccaagccaccaagctgcaagagcccgcagcatcttcatcacccttccaaaggaaaccccggcatttcttctcaatttcgttgatcgcccaggctggtagttccaagacggacatgaagtagagtgggagcgccattaacacatgcttgatcagggctagacgggcatctggagataaaagcttgggcttccaaccagccaaatttttggcaagcctatccatcatcggttggatttgcactttcgtcggtttactcacagaaagcggcagccctaggtaaacaatcggcaattgcttgatcgggcatgtcaacacctctgtgacctcttcaatttgaacaacagtgcaatggatcggggtcaacgagctcttggctaggttggaaaccaagccggtggcgtcacccatcaacttaagtatgaagtggatcgtcagcgcgtcccgccgagaaggatggaagaagatgatggcatcatcattgatggtgacggtggttgacgaagtgaaaagcagagctgaaacacagtcacgccatcgagcaccgaagcccaaatgtcggagcagctccaaaaggaattcccatgagaccgtatcaaaagcttttgcgatgtcaatcttcaacagcatggcaggcgttttggaccgatgcaacttcttaaccacaccttgaacgtagaggaagttctcttgtattcttctgcgcctaatgaaggccgactgtgcaggcccgatcagctcatccattctcggggcgagacggagcgccagaattttggtcaggatcttggcgaaactgtgaatcaaactaattgggcggaagtcagttagttgattcgggtcctctttcttgggcagcaggatgatggaggccgtgttgacgagatgcaggtgctgggaattcgctctccaggctaagttaagggccgcaaccaggtcacccttgataattccccaacagaccttgaagaaggtggcgctgaaaccatctggccctggcgccttgtcacttggtgacgccatgatcgcctttttcacctcatccttaatgatgtcgccctccaattcagagagatcgtgggccgccaaaccaatcaaaccgaaattaacggatgccgaaggtggacacggcgtccccaaaatattgaggaaatagttgtatgcagcttgtaacttatcttcttcagtggtagcatagacaccatcatgacagagggtaggaattgctttctttcttcgacgtgcattgatcttaaggcgaaaaaattgtgccgttgtgccgctatgcttgaggaataacagcctggctcgctgacggagcctaatgcgctccagggaggcgagagcaaggcatcgtcccttcaaggtagcacgcagcgatcgctcctctgccgagagaagccggtcgtcctgggccttgtccagctgaagaataatttcatgagccactgcgagctgctgccgaagttcgctgattcgcctagccccccacgaacgaagagatgcggcagtagatttcaacttgagatgaagggaggaaacagagttggagcccgacggcgcagctgcccaagcttgccggaccacttcctcaaacccatctagcttggtccagaaagactcaaacttaaactttctcggacggtgcatcatgttatcgcaagtcaaaagcagagggcagtggtcggatgcggacgaactgagagcttgcaaatgggcatcctggaaaaattcctcccattccccattaatcaacactttatcaattttggttaaggttggctgctcttgttcactgctccaagtataccggcgcccgaacagataaacttcacggagctccagaacgtcaatagtttgtctaaacttgttaatcagtctgcgattcacattgccatttttcttgtcacccatttcagctttaggtgcttcatatggttgtagatcatgttccctctcagcagcagcaagagcttccttagccttcaagatcctttgctgaacagagatttcttgttgttttagatcttctatgtcc

SEQ ID NO: 45316 - DNA, 639 bp, Oryza sativa
  Clone ID: PAT_MRT4530_48293C.1
atgtcaccgacagccgggatttctctcgactccagaagtacggactctatgatatggaaggcggcacctaatggtgacttctcggtgcggtctgcctactctattctttcggccggtagaacatcctgcccgctcggcaagattatctggaaatcccacgcaccagcaagatgcaagttcttcatgttccttgcggtccgcaatgcctatttaacagctgataacctgcagcgccgaggctggaagcttgcaccaatttgtcacctttgttctaaggatggagagtcctgccaacacatcttccaagcctgcaccttctcgcagcaagtttgggtgcaggttcaggctcgtttgaccctctactgctcgccgccgtcctcggactttgccggctggtggctcgctgcccggcaaactgttgcgaagatcgatcgcaagacgtttgacgccggggtcatcctcgttacatggttgatttggaaagagcgcaacgcacgggttttcgagggaacggcctcgtcggtcacgcagttgtgtgcgaccatgtgtgatgaatgggaaacttggaaatcagcagggctagttacctcgttgaatgttgctgcagtgccagctttagaaagattacagattttgtaa

SEQ ID NO: 45317 - DNA, 636 bp, Oryza sativa
  Clone ID: PAT_MRT4530_48294C.1
ggattttgagtttttgcttgcaacgtttgaccactcgtctcattcaatttttttttgcaaatataaaaacgaaaagttgcgcttaaagtactatggataaaaaagtaactcacaaagagcaaaccatggcccgagaagaaggaggtattactccctccctgttggtatttcttacgatcaaagataaatccgcaagcgcacaaaataccgctgtagcacttcaccttcgggtgacccctaaaggatatcgaatttagggaaggattactaggacgggattcagggccgtcaccacctgccgcctacctctaacaaatccgtgggatacacaacaaacatagagaagtttctccgaacccggagcaaagtgtacagatagctccggtactcctccagatttcctcctaggaagctacactcgtcgaggtagaagtcggatgagcgccaaacttccgagcactcctctagagcttcccctcactctctacctaattccaatgtacaaaagatataatagagcctattgtaattcagctcaaagttgtgtgtcattgaagtgagaaggagacctccttatataggctccaaatgacggttacaggcatgggaattgtccaaaacaccctccaaccgcct

SEQ ID NO: 45318 - DNA, 4564 bp, Oryza sativa
  Clone ID: PAT_MRT4530_48295C.1
cggacgcgtgggcggacgcgtgggcggacgcgtgggctccccctaccaacgatcagctcagcttcagcttctcctcggcatgtccgccgccgccgccatcgcgtcgccgatcccggcggcgatcgccgtcgtgcagcagcagaggcgggggaggagccgcggcggcggctccggcgctgccgccgtccgctgctccgcggtggccccgacgtccgcgatcgcgcccatccttgccgacctgaggctgcggtgcgccgccccgctccccgtgctgcggcgcgtggcggacgccatggcctccgggatgcgcgccgggctggccgacgacggcgccggcgagctcaagatgatccccagccacgtctactcactccccactgggaatgaaacaggactgttttatgctctggaccttggaggcaccaactttagagtgctgagggtacaattgggaggaaaagataagcgcattatagataccgagtttgagcaagtctcgatcccaagagaaatcatgcatggtataaccgaggatttgtttgatttcatcgcgagtggcctgtcgagatttgtagcaacggagggtgataagtttcatttgccacaagggagaaagagagagttaggcttcacattctcctttccggtgaatcagacttctattgattctggcattctgatcaagtggacaaaaggttttgctgtctctggaactgctgggaaagatgttgttgcttgtctgaatgctgcaatggagaggcaaggccttgatatgcgtgtctctgccttggtaaatgatactgtgggaaccttagctggagcacgttattgggacgatgacgtaatggtcgcggtgattttgggcactggcaccaatgcatgctacattcaacgaactgaagctattccaaaattgcaacaccttaagcttgaaacaggaaacacgattattaacactgagtggggagctttctcagatggacttccattgactgaatttgacagagaaatggatgatgagagcataaatcctggtgaacagatattcgagaagacgatttccgggatgtatctaggtgaaattgtccgtagggtgctggtcaagatggctgaagtatctgatctctttggtcattccttccccaagaaacttgctgaaccatttgttctaaggacaccacatctatgcgctatgcaacaagacacctctgacaatcttggagaagttgagtccatcttgagtgatgtcatcggcgtgtcccaagcttctctgctggcacggagagtcactgtagaagtctccgactgcatcatcaggagaggaggccggttggccggggcaggaatcgtagggatccttgagaagatggagaatgactccagagggcacattttcggacgaagaacagtggtcgcgatggacggtggtctatatgagaagtaccctcagtacaggaggtacatgaaggaggctgtggctgagctactgggacccgagcgatcgaatcgtatcgccatcgagcacacgaaagacggatcagggatcggcgctgcgctgttggcagctgcaaactcaaagtatgctgctgctcaaatctctacaagtcgatcttcgcaacagactgttgggcagcaagccaccaactggcaaaatccgaggacggcggcgagcaggagaggctcaatcgagcctggacctgcacccaaacctgctgcgagaaggggcaagcctagaagaagtgctggcaggactctccatcctcagagcaaaggcattgcggacagaaaggaacgtgaagaacttgcatcttgctggcgtgcgagatttccaaataatcttgccgagcgggcaggatgttctgccgaccgaaatgatagagtaggcagatcgcatcgagaagtcagtacttcctgggtcaagagaaatcccggcgaccatgtcctagagcgcaaggtattcccccaatgcttggacagacaggccgcccctaacatcttcaatccaggagttgtcgcggagggcggcagccaccgtgatgccactcagcttgacgatggagaaaagaattggggatctgtactgcactgatcctccgtctggcaacaagctatcgcaccaaaacgaggtagaggctccgttccccagcagtactttgctactagcggcaaagcagtgcagtgactttctgtcagctagaggtgcaatgcgcgtccaagaacactctggctcagcgcggcacagccaaatccaccgagtgcgaagcgcaattcccattaggcgtaggtttctgatccctagtcccccctgctcgatagagaggcaaagcttctcccaagccaccaagctgcaagagcccgcagcatcttcatcacccttccaaatgaaaccccagcatttcttctcaatttcgttgatcgcccaggctggtagttccaagacggacatgaagtagagtgggagcgccattaacacatgcttgatcagggctagacgggcatctggagataaaagcttgggcttccagccagccaaatttttggcaagcctatccatcatcagttggatttgcactttcgtcggtttacgcacagaaagcggcagccccaagtaaacaatcggcaattgcttgattgggcatgtcaacacctctgtgacctcttcaatttgaacatcagtgcaatggatcagggtcaacgagctcttggctaggttggaaaccaagccggtggcgtcacccatcaacttgagtatgaagtggatcatcagcgcgtcccgccgagaaggatggaagaagatgatggcatcatccgcatagattgaggcgcgaagtggcaaggaacccgtagcaagtggggaaagcacgccacggctcgctgccgtggagcagagagccgcaaatgcctccatcacaatgacgaaaagcaacggcgagagtggatccccttgcctgagtccccgagctagcttgatcctttgagtgtctctaccattgatggtgacggtggttgacgaagtgaaaagcaaagcagaaacacagtcacgccatcgagcgccgaagcccaaatgtcgaagcagctccaaaaggaattcccaagataccgtatcaaaagcttttgcgatgtcaatcttcaacagcatggcaggcgttttggaccgatgcaactttttaactacaccatgaacgtagaggaagttctcttgtattcttctgcgcctaataaaggctgactgtgcaggcccgatcaattcatccattctcggggcgagacgaagtgctagaattttggtcaggatcttggcgaaagagatgtaggtgctgggaattcgctctccacgcgtccccaaaatattgaggaaatagttgtatgcagcctgtagcttatcttcttcagtggtagcatagacaccatcatgacagagggtaggaattgctttctttcttcgacgtgcattgatcttaaggcgaaaaaattgtgccgttgtgccgctatgcttgaggaataacaacctggctcgctgacggagcctaatgtgctccagggaggcgagagcaaggcatcgtcccttcaaggtagcacgcagcgatcgctcctctgccgagagaagccggtcgtcctgggccttgtccagctgaagaataatttcatgagccactgcgagctgctgccgaagttcgttgattcgcctagccccccacgaacgaagagatgtggcagtagatttcaacttgagatggagggaggaaacagagttggagcccgacggcgcagccgcccaagcttgccggaccacttcctcaaacccatctagcttggtccagaaagactcaaacttatactttctcggacggtgcatcatgttatcgcaagccaaaagcagagggcagtggtcggaagcggacgaactgagagcttgcaaatgggcatcctggaaaatttcctcccattccccattaatcaacactttatcaattttggttaaggttggctgctcttgttcactgctccaagtataccggcgcctgaactgataaacttcacggagctccagaacgtcaatagtttgtctaaacttgttaatcagtctgcgattcacattgccattgttcttgtcaccctccgaggccaacaagttaaagtcaccaaccaccagcagctcctctagaaaaaggattttgtcgccgtcggactgcggcccgtagacattggtaagccgcaagaggtcctgctcttcaaccttgttctcgttgtcgacgacgccgagtcttttcatcacgacgcgttgcgcccatggcggtgtgtagggagctgggcgagagcggtgtcttggctgccgaggcctcttcccaaggatggatgtcgccggcggagtcggcctcagacatggcggcggcaactgaagcactgagtggctggccaggctgcaaagctgggccactcgagggtgaagtgcgctcctccagcccagacccagacggctgaagcgggaaaggtcgtgggccttgaagttctctccggcggcagtagactcggtttgggccgaagaagcgccaatccggcccat

SEQ ID NO: 45319 - DNA, 379 bp, Oryza sativa
  Clone ID: PAT_MRT4530_48296C.1
atgttgagtgaggccgcgcctcacggcacggtgcttcatccctcccccaccaccccacccctagcacagagcacccaacaaatagctgatgtagttggaaaaggaggggaaaatgagcacaacgtgggggcaaacctggccgtggagagcaacatgatccccatgacccttttacagcttgcagggcacctcccctgcgtgatcccgaaccccatggccacctccgtgatgcttggcaccaggggttactacaaaggtccaagccctagcttcaacggcaaggaaaacattctttacaggcaattaatacttatcctgtcttccgacgtgcggagccacgcgcgccttaccatagcatggacccttcccatcacgccga

SEQ ID NO: 45320 - DNA, 1410 bp, Oryza sativa
  Clone ID: PAT_MRT4530_48297C.1
cccgggccgaggcctctctctctctctcctcttcaattctctctctacctccgctgcggagctcgccgcgtagcaatggaggcgggcgtggggctggcgctgcagtcgcgggcggcggggttcggcggctccgaccgccgccggagcgcgctctacggcggcgaggggcgggcgcggatcgggagcttgagggtcgctgagccggcggtggcgaaggccgctgtgtgggctcgcgggtccaagccggtcgccccgctccgtgccaagaaatcgtccggaggtcatgaaacattgcataactcggttgatgaagccctcttgctaaagagaaaatcagaagaagttctcttctatttgaatggacggtgtatttacctagttggaatgatgggttctggaaaaagtactgtgggaaagatcatgtctgaagttttgggttattcgttctttgatagtgataaattggtcgaacaagctgtgggcatgccttcagtcgctcaaattttcaaggttcatagtgaagccttctttagggataatgagagtagtgtcttgagggatttgtcctcaatgaagcgattagttgttgctactggaggtggtgctgttatccgaccagttaactggaaatacatgaagaagggcctatctgtttggttggatgtgcccttggacgctcttgctaggcgtattgctaaagtggggactgcctcccgtcctcttctagatcaaccatctggtgatccatacacaatggctttttctaaactcagcatgctcgcggagcaaaggggcgatgcttatgcaaatgctgatgtgagggtttctcttgaagagattgcatctaaacagggtcatgatgatgtatcgaagctaacaccaactgacattgctattgagtcgtttcataagatcgagaactttgtcattgaacataccgttgacaatccggttggtgactcccaggctgactcacgtgctcagaggatacagaccttgtagaattttgatcttttttgtaccttagtgttaccttgtagcgctgttgagttatttgttctgtgtttcgccaacatgaagtaaacaaccgcaagtgtgttttcaggattaagcctacacacaactgctagctctggcttgggcatcgtgaagccccttgaggcccttcctgctcctgtattgtactcgacgcaatttacacggagactgctacagatcggtgttgcaattctacctttcatcggattttttgcggtaacaatattcttcttcaactcaacaataccgattatattgaagatatgtgggctgaatgcttcagatatgtggggcaacaatgctgaagctcaacctctcgcttttgacctcggacatgtgggctgttctaatccttatcttcgcttaccatga

SEQ ID NO: 45321 - DNA, 346 bp, Oryza sativa
  unsure (1)..(346): unsure at all n locations
  Clone ID: PAT_MRT4530_48298C.1
aattaatcgcactttgaaattattagttagtttctgtcacatgatgaggtgtggcaccaagatattttttgcttgagtgatcatatggactatagaatggccaaagcttcacaaatantctgtccgtgttatcgtcagtttcgtcacaagaagcaaaangaactactaggntcgatcacccaagcctgancgtggaatttgcagnccattgactttggaaggttttccaaattcccaangtttgtgtgcctgtgttcctggntcaaaacataacttacagtaagcaccttggccttgtgntctcatataagtcattctccttagtccttaaacttctgcataacaa

SEQ ID NO: 45322 - DNA, 1115 bp, Oryza sativa
  Clone ID: PAT_MRT4530_48299C.1
atggccgggcaaggcgcggcccaagcgggcggggcgtgcgggaggagagagggggatgggtccgggtggaccggatccatcgtgctgggtctcgggacgggcccacgagtcagcgactcggcgcacgggggaaaggttcatgcggcgcggggtgctagggttttgcggacgcggctcacggcgcggcgcgcgggtggaccaagaggtggagggcccatgtgcagcctaagggctctccgtggaccgcgcgcacagaagaaagggcggtgggggcggctgactaggtgcttgacctggttgcggccgatgtggcgccgacgtggcgccttcgtggcagccatgcgggccggcgagaggaggaagaaggaggccggccgagacggacggcggacggcggcagcttcaccgggagcacaacccgacgattcgagagggagggagtacaccggaacgacgatacagaaggaaggggagttcatttctagagtcggattgggtggagctacaccgaggaaggccggcgacgagcagctactaccgagtttgggcggcgacggtggcgagcctacggcgagcagctgcggcggttggggcggcgccagcttgctactggaaggctactcgcactactgcccagagctaaggagaggagagggagcgaggagggagaacgggagatgcactaccgagccgagacgggcgctgtgtcgagcggccgacgacgcgggagcgagctctccggcctcgggccagggaaggggaaggagacagtgcctggagtcccgcgtcagctcctcgcgcgcacgccggcttcaccagcacgcgcgatggaggagggaggcgaggacggcggtagcaaagcggcaagggcacggtggtggcgagggaatgaacgagagggagatggggcggctcggtttaatagatggcaatgtcggtttagggaggaagaaccgacattggcggtcaaggaggagcgagctggcggtgagctggtgcagtcgcacgaccagcgtccgcgctttggccgcgagcggctgggaccatggatgacctcggcggtggtcgggaaaaaggggaaaggaagagggaaaggagggcttgacccttgctga

SEQ ID NO: 45323 - DNA, 6200 bp, Oryza sativa
  Clone ID: PAT_MRT4530_4829C.1
tacataaaatttacgtaattgatcaatgttccaggaatttgctaactctcgaccctcgccgtctgcaatcttgaatgcacctggccgtaagacttgcgtgatcgtgtatggtccttcccacttgggtgagagcttgttgcaccctgcttggctttgaacccgtcggaggacgtaatcgccgatcgaaagtgtgcgtgctctgatgggcttctcctggtatcggtgaagggcctagtggtagctgactggtctaacggcaactctttctcgatgttcctcgagtaggttcacatcgtcgcttcattgttcctcctatgcctcgtcggagtacttctgtactcgtgtgctctaatgttgtagctccgtggggagcatagcctctgaaccatacacgaggaagaagggtgtctccttgttggacgttgtcggtgtggtacgcacgacccataggagggtcttgatcccttgtagtactatgtcgtttgccctctcgacctatccattgctctgagggtgagaaaccgaggcaaagcagatcttgactcccaatccgatgcagtaatcctggaaatcggcactgatgaactaggagccgttgtctgttatgatgcggtgaggcaatccatatctgcaaaatatccctttgataaatttgatggcgttgtcggccttgatttcccccatgggcgtcgcttcaatccacttggtgaacttgtcgatcgccacgaataggaacctgtagccgccctgtcctcgtgggaatggtccgagtatgtcgagcccccagcatgagaacggccaagtaagagggatagtctggagcgcttgcgctggtagccttgtgtgtttgcatgtcgcaagcgtctttgagcgcggtccgccagaaaaacccttgtcggaaagcttttctgactaatgtctggccggcggcgtgtgacccgtagatcccttcgtgtatgccgtcgttggacgaaatgcgtttgagaagtaccccgattggcgcctttttgtatagatcattgccgatcatacaatagatcttggcttgtcgggttattttcttggcttctgcatcatcctcgggcaactcgtcgctactcaggaacttgacgagtggtgtccactagtcgtttgtggtctcgatgtcggcaacggtgcgttctgcctctgtagcccccgagctgatgtcggggatgactgtgctatcttcgtcgttcacctctttcaccgaaggctttgttaggacatccagaaaggtgttaggttcgagtggctctcgtctggacgcacgccgtgctaggtcgtctggttcgatgttgtccttgcggtatacgtgtcggacctcgatcccatcaaatcttttctccagcttcctgacttttgcgagatacttggataactcagggctagagcacttgtagtctttgtgcacctggttcgcgacttattcggagtcccctttcatgattagtagcttgactcctagtgcggctgctgctcttatctcaacgagtagtccttcgtactcggctgtgttgttggttgccctgaagttgaggtgaattgcatgcttgaactgatctcccgaaggtgatgtcaagatgaaccctgtccctgctccttggctattgagtgtgctgtcaaacaccattgtccatgtgtcgttgtcggcctgactgtctgccctattgtcaggcatagtccagtcagctacgaaatcagcgaggacttgggacttaatggctgttcgtgacacaaagtgaacatcaaactggcttagctcgactacccatttcgcgatgcggccgacaacgtctttatttctcacgacttctccgagggggaaggaggaaacaactgtgactctgtgggcttggaagtagtggcatagctttcttgatgtcatgattactgcatagagcagcttttggatctgtggatatcttgtctttgcgtcatggagagcttcgctgacgtagtaaactgctctttgcaccttgtctctctcgacaacaatgacggtactcactgagtatggtgtggcggcaatatagaggaataattcttcgtttggttgggggccaacaagtacagggggatttgacaggtagtttgagtgcgataaacacatctttggcttcctgtatccacacaaatttgtcttttttttcaggagagcgaagaagggttgtccttgttcacccatcctagcgaagaatttgctcaatgccgccatgcatccagttagcttctggacttccttgagtcttgtgggcgacttcatgttctcgattgccttgatcttcttgggattcgcttcgatccctcttcctgagacgagaaaaccgagtagcttgcccgatggtactctgaacgtgcacttatctggattgagcatgatgcaatatcgtcggaggttgtcgaacgtttcccggagatcatcgattaatgagttgtttgtcttggtcttgataacaatgtcatcgatgtaggcctcgacattgttcccaagctgatcgttaagtgccccttggaccgtgcgttggaaagtatttcctgcggttataagtccaaacagcatcttaacgtagcagaatacaccgaacggcgtgatgaatgatgtcttctcctcgtcatcttttgccatgctgatctggtggtagccggggtaagcgtcaagaaaacttaacaactcacaaccagctgttgagtccaccaattggtctattcgaggaagagggaagtgatccttgggacacgccatgttgaggtcggtgatgtcaacacacatcgtcctccacttcccattggccttgcgcaccatgactgaattggctagccactctggatggagtatctctctgatgaagccagctttgagaagcttgtcgagctcttctcgtatggcttgcttctgatctagtgctaatctccgcagtttttgctttactggcttggcatcgggtcgcaccatgagtttgtgctcaatcacctccctagggacccctggcatgtcagacggctgccaagcgaacacgtctgcattgtcgcggaggaaggtgatgagcgtgagttcggtcttgtcggggttggcgctggagagtggaacgatgttgattgcgccgtctggcttcggagtcttgttggttttgctcactatcttgggcggttcaactgtggtgggcgggttgggagtatgctcgaccatgtcgaggctccgcttgccgcactgcaccgctagcttcggcccaggcatcttgagcacttgatatgcgtagtgggatgcggccatgaacttcgcgagtgcagttctcccgatgatgacattatatgctgtatcaaactcggccacatcaaaggtgatctgctttgttcggaagttgtttgcctggccgaaggtcacgggtagcgtaatcttgcccaatggtttggacgatgactgaggactaattccatggaagggttgatcagtgggcgtcaaatcgcttcgtgagatccccattgcgtccaatgcgctggcgaagagtaggttaatggagctgccgctgtcgacgagaacccgtgcgaccttaatgttccaaattgtgggctcgaccacgatcggatatcgccgccgtggaacctccaaagatgtgtgagacatggaggtcggagtctgggtaggctgagtctgagtcctgagtggctgcttctgtggccttctcgactacacatactcgcttgcccttttctaacgctagtttgtttcgcaagtgcctttttgaaaacgaaacaagtctctagggagtgcttgtctgacttgtgtaaagggcaccatattttcttcgtatcgttgccttgtgggtctgggtgtttgggcgggtccgcatactctgctgtgaggacttctgtttgagctttccttttcctactcctgtgactcttcttcttgcttgactcaggtgcatccttggctggcttcttctctccccctatcttcggcttgtcgttcttgcgtctcagggcgtcgtccgcataggcgcatcgatcaacaatctcgaataacttacgagcagttgtgatccttctagttgccaattctcgggtagtgtagcgatctcttacaccagtcttgaaagcacggattacggaagcatcggtgatctcggggatcgtatttttgcacttattaaagcgctgaacgtagtccctcaatgattcacccggattctgtgtcaacgtgtgtaggtcgtcctcgatcgcgtggcgcttgtatgttccttggaagttggcgatgaactgctgccacagatctgcccatgaagaaatcgagtagggcgggaggtgaaccagccatgaacgtgcaaatcccttcaacgccactggcaaataatttgctagtgtgttgttgtctgctccggcagcgtagagtactgtggaatagacctgaagaaattcctctgggtcggtgcttccgtcgtatttctctattgctcccgatcgaaacctctcaggccatcggacatcacgcagggcacgactgaaagccctacactcgccgccgggggcagtgggttgtcggcgatcatatgttctccgcggatgtctatccgttgacgaagacgatgatgatgatgacgacgatgacgatgaatcactcagttccggtgtgcgttcgggttcttgagaaccttgtcgccacccaccgttgttgttccggcgctgatctctgtcgttgtcttcattgcgtcggtgtcctcgaccagtatcgcccggcacccgttgttcgcgattatcgtatttgcggcggttgtggcgattatcacggtcttggtgatgtcgtgaagagacgcgacgtcgggaacgattctcgttgtcttggccacgtcgcgtttctcggcagccatttagatggtcacggagatcactggcgccgcgaagcggagggcttgacgaggtggcgttcactgcgcaggctgttccccattggcgccgccggtcggcgattgctctggttgtaacctggcagcggcctcctcgaacgcgttacagagattagccactgattcccgttgtcgttctgtccagtgatcgagatcagcgttcaggacaggatcataaggtgtttccctcagtattgcgttgatggtcctgatgtgttgggccggcgtttccacttgattctccgcttctgtgttaccgcccctagacgtgctggtcccatcgatagcgtacacatcgcgtggtgtacttgtcgacgatgaggcctggtcttcgagcaaatgtagaacagacggctcgtggggattgatatcgattaccccaacgaatcgatctgagatagctgtcgctcctcgttccttgtccgtatctctagaagagatttgtgactgctggaccttaggaggtggcgtcctcatggcgctgagaagaaccttgcagcttgagaagtcgtgattctttgtcttatgaataggacaatagacatcatgggttggagaagtatgttgaattccacgctctttgcaggcacggatctcggcttgtacgtcaagaaaaacccagcaggcttgcaaggtgtgttttctggtttagtgaataggacaccaggaccttgttgcctcggaagctgtcattgtcggctcgtgattctcgtcggaaggaccaaatttggccgcattaggatccttctcgggctcagatgtcgtcgatgttccgttctccacttttgcgggaggatccttcgacatggagccgtccggggtcgtaaccacatcgttcttgcttccggtcgttgatggaccagtcgagatcgacaccgtcgtgtagaccgggaagacgatttcaccgacttgagtccacaccagcattgttgaagctaaaactccttggttgatgccggggttgacgctgtcgtcgacgaggcttgatggcatagtagtagaaccttgagcaccaagtccccctaccaggcgcgccactgtcgacgggggataccggtagaccggatatagagggtattggggtacgttggaacgaggatttcgtaggctatggtggatgtgttggcggtgagattcgatgcccttggtcctgcccgagggtcccttttataccgcgggacagttgatctccaagtaggactcggagatatcggacccctcacgatatagtaacgacccagccttgtccgagtaggactccttccatctatggactcc

SEQ ID NO: 45324 - DNA, 547 bp, Oryza sativa
  Clone ID: PAT_MRT4530_482C.1
atgaataaatataatttttccagaatttatcctctctgtttaggtcttctaaaaattcaaactagtttccaatgagcctatcttctcctaatttcccatctctgtatctgttccccagccgaccaagagacaccgagggaaagagagagcgaggaggaagcggtgccgactggcactggacgcgcgcgacgcgtggccgagacgtggcaacgccaagccgagcctccttctcctcccagccgcatcgctcatcctcactcctcactccagtggcgatcaaaccgagagagagagagagagccctcaaacttaccatcactcaagaactcgtcgccggccatgagaaagatgaaagcttccatcgacgtcaagccgcgctcgacatcaactcttttccgttccatactctcctcaccatgccgaagatttctccttttgatttcatcctctctcatgcagtgaatcaacgggaacgccgctgtgtcatcgccggccttggggcgtgctctgcgcgacgccgtcgtgacctcgtcgccgatgcctctct

SEQ ID NO: 45325 - DNA, 135 bp, Oryza sativa
  Clone ID: PAT_MRT4530_48300C.1
atgggcactgccaccgcttccacaggtcaagggtcacgcgcggacaagcgccgctgccatagacaaagggcgacaggacgtggcggcaaactgcaattggtggctcgcagctaccaccgccagctagtggaggag

SEQ ID NO: 45326 - DNA, 1032 bp, Oryza sativa
  Clone ID: PAT_MRT4530_48301C.1
atggctccaccgattagcaaattactcagccaagggcgtcccattgcacccgtgtggtcgcacttgttatatgctcggatgaatttcccacaggaatcggtccttatatgcgaatacgggacagtgccacataggcacaacccccgcatcgcgagttttcacaatccattttattttcaaacacaccgacgccacatgtcgggttttcaaggcttctcaaacccatttcccaagttttcgacaaacaacggtgtatgtgggatatttggtatacgcgctcagagagcacggataccgagtcggattgggtggagctacaccgaggaaggccggcgacgagcggctactaccgagtttgggtggcgacagcggcgagcctacggtgagcagcggcggcggtcggggcggcgccagcttgctactggaaggctactcgcactactgcccagagctaaggagaggagagggagcgaggagggagaacgggagatgcactaccgagccgagacggacgttgtgacgagcggccgacgacgcgggagcgagctctccggcctcgggccggggaaggggaaggaaacggcacctggagtcccgcatcagctcctcgcgcgcacgccggcttcaccagcacgcgcggtggaggagggaggcgaggacggcggtagcaaggcggcaaaggcacggtggtggcgagggaatgaacgagagggagatggggcggctcggtttaatagatggcaatgtcggtttagggagaaagaaccgacattggcggtcaaggagagcgagctagcggtcatcgacgcgtgcagccaagacggcgacaggacacacgtggagcggctcgggcacgcgctgcagagctcgcggcaggcagcggggccgagcggcagcgtagcgcaggcgctgacggaggcggcgaccgggagggcgaaagggattgaatcttgggattttgagttcaagggtggaaggttcgggcattcgacaaagttcacggatggggttccaggaggggattccgaatag

SEQ ID NO: 45327 - DNA, 102 bp, Oryza sativa
  Clone ID: PAT_MRT4530_48302C.1
atggctgcgtctgcattcctgcagaaaaggatgaaaggaggcatcttgcttttggccgttcttggtggtattcttgctttcctctcggctttctgcgagaaa

SEQ ID NO: 45328 - DNA, 976 bp, Oryza sativa
  Clone ID: PAT_MRT4530_48303C.1
aaggagggatatgatttagacttcctcgggcggcttgggtacggcccgagaggagaggcacggcttggccgaactaatgggccggccggcccggagaggcggcccaagggggcgcggggagagtgagggagagagagggctggtgggccgagtccaccttccagggtcccgagtggggcccgcttgtcggtggcgcggctcaccgtgggagcggcgcatgagggtggtgctagggtttcgggtgagcgcggttcacgtgcgtgcaccggatggaccagggatgcggcgggcccacacgcagccggttggcgcaccgtggaccgcgcgcgcgagggtggtggagggaggaggcggctgaccggctcggctcggtcaaagttgaggtggcgctgacgtggcgcctacgtggcagccacgcgggccggcgggaggaggaagaaggggagggcgagatggacggcggacgacggcactttcacctggacaccatgcaacggcgagggcgacggggagcacattggaacgacaaggaggacaagagagagtgagccaacggctcagaattcgccggagggtagccggtgacggcgagatcgcggcggcggcaaccggtggcgagcaaagggggaaacgacgacgagacgacgagggttccattcaaagggatgggagcatctccggggctcaagggtttcgtttctaggatcggatgtggtggggaggcgccgtggaggtccggcgacgagaggcggcctccgggagcgggcgccgacggtggcaaggccatggcgagcggcggcggggcttggggcggcgcctacaaaccagcggaagggtaagggaggtggagggaaataaaagaggaggatggggagtaagaagaggaagcgagtggagggggggcgtagagtgggggttagaaggtgctgctgggcttaggaggggggcgcttgctcttgtaaaaagcgcaagcaaa

SEQ ID NO: 45329 - DNA, 1643 bp, Oryza sativa
  Clone ID: PAT_MRT4530_48304C.1
ccgatggccgtttcccccggacagcagccacgttctatgtagtatccaccacggcgaggttgctactggtgcagctcaaaccgagccgatcgagggacacacgactattaataccgactgcgcgtgtgttctgctcaagccgtggacagcgtttgatcgatcttctgcttaactgctttctacttttttggtagccatccgttatctcgacacagctccgaaaggttcggcgagatcgatggatggagggatgtatattagactttttcgggcggcaagggcgcggcccaagggtcgaaggaggctcggccaagccatttgggccggcgcgggcgcgggaaaggcggcccattagggcgcgcggaagggggagggagcggtccggtggaccgggtgcacctcgcggggtcctgggtggggcccacatgtcggcggcaaggctcacggtggggagagcgcacgcgggtgcggtgctagggtttggtgggtgcggtgtgcgggcggtgcgccgggtggatcggatggcagcgggcccacatgcagccggttggcgcaccgtggaccgcgcgcacgggaggggggggaggaaggaggcggcaccggctcggctcggtcaaagccgaggtggcgccgacgtggcgcctacgtggcagccacgcgggccggcgggaggaggaagaaggggcggccgagatggacggcggacgacggccgagttcaccggagctcgtcgcgacgattcgagagagagggagtacaccggaacgatgggacggacgataggaagtgagccaccggatcggattcgccggagggaggccggcgttgacgaatcgcggcggcgcacgccggcggcgagaaaaggggggggacttcaccggagcaacgggggttcgattaaaaggggtgggagcatatccgggattcaaggaatccgtttccggcgccggatgggacggaggagcaccgagggcagccggcgacgagaggcggcctccgggggtgggcggcaatggcggcggggccatgccggccaacggcgcggaagcgagttccccgtcgtcgggccggggaaggggaagaagaagggtggccggagccctcttcggctccgcgcgcacgccggcttcccggcacacgcgagggcggaggaaggcgaggacggcggcagcaaggcggcgatggcactgcagcggcggcagctggcggtcgtgctcggagctagcggccaagtggcggcagaggcggtcacgggcgtgacgccgatcggggaaaaagcaaaaaggggagggagaaaggagctcggctccttgccgattttggacgagctgagggaggagagagcgcatgggagagagaggcgctgcctccgcgtcttggacacgcgcgcgctgcggcgcagaggtgggggcagcggcagagtgggcgcgggcggctgcgcggcgcaggcgggaatggtgccggtcggggaaaaagcaaaaggggagggaggaaaagggggctctgcccacgtcattcagggagaaaggaggagggagagagggctctgcctccgggagttggacgcacgcggcttggagtggccgggcacgcgcgcggggccgtgcagctgtagcgcggcagggcagcggggccgggaggcg

SEQ ID NO: 45330 - DNA, 975 bp, Oryza sativa
  Clone ID: PAT_MRT4530_48305C.1
atggacgccacggcggagctcgacgaccgcctcctcgccgtgatccttctccgcctcccctccgcggccgccctcgcgcgcgccgccaccgtctgccgccgctggcgccgtgtcgcgtcgtccccgaccttcctccgcttgttccgccggctccatcgccacgcgcccccgctcctcggcttcttcgtctgcaacaacggcttcgccgtctcgaggaaggtcggtggcgagctcgtcggcgaggtggtcgaccccgccttcctcccgaccttccaccccgtgccgagggaattcgaaggcgccatcagccgctgcggccacttctccctcgcctccctccccgacgtcgaccgctgggcgctcgccgacacccgcgacggcctcctcctcctctgctccaccttcaacgaccgcatgagcatcccgcgcaacttcgtcgtcgccaaccccgtgtccggccgctccgtcctcgtgcgcgacgcccgcttctaccagctcgacgcggagagcgcgtacctcggcgccgcgctgcgcatcgacgacgacaacgacggcggtgccggcggcgtcctctgcttcgagatcatcgtcgtcacctacttcatgcctgggccgcgcctctgcgtcttctcgtcgcgctccggcgcgtggaccgtgcacccctactccgacgccggcaccgccatcatgcccatgctcggcgcattcagcgacgacatgcacaccaacgggagcgtctactggctgatcaacgacgacgacgacgacgacgacgacaacccatacctcctggcgctcgacgcccgcaccaagcagttctccaacatcaaactgccgcgcgccatgtggacgcgctaccgcgggaacatgtgcgtcatgagatccgacgacggcgagctccgcgtcgtggcgttcgcggcggcggcgctcgacttctggcatcttgacaagagcaggagcagtagaggccggtag

SEQ ID NO: 45331 - DNA, 1227 bp, Oryza sativa
  Clone ID: PAT_MRT4530_48306C.1
gcgggcgcgcgcgcgcgggagatgcgggggagagggcggcgacatgggcgcgaggtgcgggcgcggagtggaggcgcgacgtggaccgacgcgggtggacgcggtccaccgcgcgggacccacatggcggtggttgggttcacggtggggagggcgcacgcgggggcgggcgctagggtttcgggtgcgcgcggttcgggcgcggcgcgccgggtggacggatggcggcaggcccacgtgcagccgcacggcttgccgtggaccgcgcgcacgggagggaagacggagggagggggcggctgactggcttggcccggtcaaggccgaggtggcgccgagatggcgcctacgtggcagccacgcgggccggcgggaggaggaagaaggggcggccgagatggacggcggacggcggccgagttcaccggagctcgtcgcgacgattcgagagagagggagtacacctgaacgatgggacggacgagagggagtgagccaccggatcggattcgccggagggaggccggcgacgacgaatcgcgacggcgcttgccggcggccatttctagagtcggattgggtggagctacaccgaggaaggccagcgacgagcggctactaccgagtttgggcagcgacggtggcgagcctacgacgagcagcggcggcggtcggggcggcgccagcttgctactggaaggcggccgacgacgcggaagcgagctctccggcctcgggccgggaaaggggaaggagacggcgcctggagtcccgcgtcagctcctcgcgcgcacgccggcttcaccagcacgcgcgatggaggagggaggcgaggacggcggtagcaaggcggcaagggcacggtggtggcgagggaatgaacgagagggagatggggtggctcagtttactagatggcaatgtcggtttagggaggaagaaccgacattggcagtcaaggagagcgagctggcggtcatcgacgcgtgcagccaaggcggcgacaggacacgcgtggagcggctcgggcacgcgctgcagagctcgcggcaggcagcggggccgagcggcagcgtagcgcaggcgctgacggtggcggcgaccgggcggtcggtcacgagaaccaaggagagagtttatgacgcgaaggtgaatccctggacggagttagggttcgggcattcgacaaagttcacggatggggttccaggagggaattccgaatag

SEQ ID NO: 45332 - DNA, 1632 bp, Oryza sativa
  Clone ID: PAT_MRT4530_48307C.1
atgggtgcctgcgtgtcttcaagcaaaaaacggagatcacagaaattgtgctgtatataccggcgttaccgcggaaaagttttgagcaatgcacctatagtacgcgccagtgatgcagggagccgtgctgctcctggagaagttgttcatgtggaggctaaatctgatggctcgaatgtaacatttcatctcacacagttgcagtggcatcatagtgagctagactcagaaaatggaaatgttgtgtgtcaagaagaagcatggttcgactctctcagtattttaggatctgattctgatgaagatttcagcagtgttaatggagacctccctgcaatgtcaaattcagcgggtacacaattaatgcactgtgaagatgcttcaagcattgctgatgcaatccagaagtttgagaggatttttgatggttcatgtgttgctcaagccattggacaatacctgaaaagagacgcgaacaaaatggatagaccaaaccaagcagatattcaagaatcggagaagcctaaaattccaagcccagaatcatgtgatgtatctgatgtgaaggttgatgaaacaaagactagaaatgagggtataaaaattctgacaaaactcagaagaggcgaggatgcatgtaatacgttgaaatcttcgaaagaaggagacaaggctcatgaaagtatcttcaaaagtttgacaccagtgtgcacgcctcgccatgctaataaggttcagcctttggccgtagcaagtcctcggggccaaaagaagaaatcaggagttgtcaggctctctttcaagaggaaatcttttgatggagaacaaactactgaaatatgctcttctaggaggtacttgattcatccaagagctggattgttggttcctcaaggcattacttgcagagacaaaaagaagttgcctgccccaggaagttcaccgtatactccgattggtgtggacatgttcatgtccccaaggaaaattcatcacattgcgcagcatattgagcttccatctgctgggccaagcgagaaaattccttccttacttatcgttaatattcagatgcctacatatcctactgctatgttccttggtgatagtgatggggaaggcattagtctagtgttgtatttcaaactgaatgagaactatgagaaggaaatttctcctctgtttcttgatagtataaagagacttgtaaatgatgagatagaaaaggttaaggggttcccattagattcaacggttccgtaccgagaaagattgaaaatattggcagggttagtaaaccctgatgatatgaatctgagttctgcagagaggaagcttgtgcaggcttataatgaaaagccagtcctttcgcgacctcaacacaatttttatgtgggaccaaattactttgagatagaccttgacgtgcaccggtttagcttcatctcaaggaaagggcttgaagcgtttcgagaaaggttgaaacatggtgtcattgatctaggtttaaccatacaggcacagaagcaggaagaactccctgagaatgtcctatgctgtgtaaggctgaacagagtcgatttcgtcgatcatgggcagataccgacgctcttgccttgcgacgacgactga

SEQ ID NO: 45333 - DNA, 390 bp, Oryza sativa
  unsure (1)..(390): unsure at all n locations
  Clone ID: PAT_MRT4530_48308C.1
ggggaccccccgacccagaaacaaagaaaaacaaaggaaaaaagggggggaggcaggggaccggggaaagaaaaaagaatacaaatgggggccccaaaaaaaaaaccgattaaaagaagggccccccccccccccaaaaccaaaacaaaaaaagggaaggaagattgggggaggcagnaaaaaacggaacgggaaagcgaaaaccccgggaggaaaagcggaaaaatgggcatgggtttttttaaagaaaagggcccatctggagcccctgggggaccccaaccggggggtgcagcggggcccccccgagggggggctccccccccaaatttgggggggggacaagaggcccatgccccaaaaaaaaaaccaaacattttttccccccat

SEQ ID NO: 45334 - DNA, 1366 bp, Oryza sativa
  Clone ID: PAT_MRT4530_48309C.1
atggagggatgtgatttagacttcctcgggcggcttgagtgcggcccaatagataagcacggcgcggccgagccaatgggctgggcgcgggcgcgaggaggcggcccatggccgggcaaggcgcggcccaagcgggcggggcgcgcgggaggagagagggggatgggtccgggtggaccgaatccaccttgcggggtcccgggtggggcccgcttgtcagtggcgcggctcaccgtgggagcggcgcatgagggcagctctagggttccgggtgagcgcggttcacgcgcgtgcaccggatggaccagggatgcggcgggcccacgcgcagccggttggtgcaccgtggaccgcgtgcacgggaggggggcaagggaggaggcggctgaccggctcggctcggtcaaagccgaggtggcgccgacgtggcgcctacgtggcagccacgcaggccggcgggaggaggaagaaggggaggccgagatggacggcggacggcggccgtgttcaccggagcaagcgcgacggatttggtcttcggggagcacaccggagtgacgagggcgtcgagaaggagcgagccaacggctcggattcgccggagggagttcgacggcggtggaattcgacagcggcggccggcggcgagagaaaggggaaatcaccgaggggcgacgaggactcaattaaaggcggcgggagcatctccggggctcaagggtttcgttcctgtaatcggatagggtggggaggcgccgtggaggtccggcgacgagaggcggcctccgggagcgggcgccgacggcggcaaggccatgccgagcagcggcggaggtcggggcggcgtgtacgcgcgttcgaggggctaaccgagctatcatgcaagctagagagggcgagggagaacgaggaaggagaacggagggaggcactaccgagccgggcgcagtgatgggcggcggcggtgcggggcgagctctccggcctcgggccggggaaggggaaggagagggtgcctggagggaggagccggcggtcgcgccattagtccaggcggtggcaggcggtgacgccgatggtggtcgggcaaaaggaaaaaggagggggagaaagggagctctgctccttgctgtttcggggaaaagttgaaggagggagagggagtgagagaggggctgcctctcttagctttggaagctagcggcgtggagcggcagagcggcagtgcacgacgcaggcgacgccagggcttgacgcggcggcaaccgggcggctgcgtggcgcaggcgcgacagggctgacggcggcaacgaccggccggtcggccacgcgcgagcgcgggaaagagcgaaggcggtggtgggtt

SEQ ID NO: 45335 - DNA, 2525 bp, Oryza sativa
  Clone ID: PAT_MRT4530_4830C.1
cttgcacggtggcgggctcggtgaggaggttgacgtgggctcggggacggcggtcttgggcggcaccgggctcggggacggcgtggagggaggcgccgggctcggggacggcggtcttgggcggcgccgggctcggggacggcgtggagggaggtggtggccgttggggaggccggatcttgagtggccccggcctcggggacggcggtcttgcacaacggcggcggtcggcaatcgatagagggaggcagcggcgtggaggaggtcgacgtggcggctagcacgaggtcgacggccactgggcatagatctggagaggaggatgtgggacggccgtggttggtgaggccggatgtaagccacttcgtcttcgggatcatcgtcaaggtcgatctgaggtctgacatgaagattcttgttgtattcttcttcatcgacaacgttgtccacccccacaattcttcgcttgccatccctaacgacgtgcatcttcttttttgcggggtcttttatgtagaaaatctgttcgacctgcttcgctagtacgaatggttcgtctgcgtatccaaccttggccaggtccactaatgtgaagccttccttgtcgaccatgacacctgtgcggatattcacccaactgcaacgaaacaaagggactttgaagttcagatagtgcagctcccatatctgctctatgcggccatagtatgtgctcgatccaacctgatcctgatatgcatctatacggactccactgttttgcactgtgcttttctcatcttgtgtgacggtgtaaaatgtgtatccattgatatcgtacccttgccatgtgtcaacatcccaagatggaccccttgccaacctttgtaatatctcacttgggccatcggtcgaccgtgctacacgatccttgaaccattcgttgaagcgagcaccatgttctctgttgatcaaaatatctgatggaccaatattgtcctgtcggaccttcgctaaatgctcctcaaagtatggggttacttcagccatatgttgcagcactgcaaaatgagcctgcgcgtaggaagcttgatcgggaacaattctttttctgtcagttgtgccgacacctgccaacctttcttcgtggcgagacgtaggaacttcgataggatcagtctcggccatgtaatcgatacaaaactcaatggcttcctcggtcgtgtaaccttcaatgatgctcccctctggttttgctctgttccgaacgtaggacttcagaattcccatgtacctctcgaatggccacatttctctcataaaagttggcccacatatttttgtgtgcttcactaggtgaacagtgagatgaaccatgatatcaaagaaagccagtggaaaatacatctccaagtgacacaggctactgacaatatcggcctgcaacccatctaggtcttctggatctataatcttctgaccgattgcattgaagaaggcacaaagccgttggatcgtgtgacggacttgtggtggtagaatgccacttatagcaactggcaagatctgtgtgattaccacgtggcaatcgtgagacttcattccaaccagcttaagatcctccaatttaacgtacttacttattctcgcgcaatagcccgaaggaactttaatatctgccagacatgatagcattgcgatcttctcatccttcgacaatgtgtggcaagctggtgggaggtacgctcttcctgtcttctcatctgtaacaggctgaagttcactgcgaatgttcatctcctgtagatcgagacgcgcattcaacctgtcctttgtcttgccaggcatattcaacaatagccccagcaagctatcgcacacattcttctctacgtgcatcagatcaatgcaatgacggacctcaagatcttcccacacaaccatggtgggaggttatagttcgcaataagaactggccaagtgctgtgagaactgctcatgtctccgaaaggattcatgccatccgtacacaaacatatcctcatgtttctggggtcggcagcaaagtctttatgctttcgatcgatattcctccattgaatcgaatccgcaggggtgaggagcatttagcgaaggtccgacaggacaatattggtcgatcaaatatttggatcaacagagaacatggtgctcgcttcaacaaatggttcaaggatcatgtagcacggtcgaccgatggcccaagtgagatattacaaaggttggcatggggtccatcttgggatgttaacacatggcaaggttgggtgaatatctgcacaggtgtcaaggtcgacatggaaggcttcacattagtggacctggacaacgttggatatgcagacgaaccattcgtactagcgaagcaggtcgaacatattttctacataaaagaccccgcaaacaagaagatgcatgtcgttagggatggcaagcgaagaattgtgggggtggacaacgtcgtcgatgaagaggaatacaacaagaatcttcatgtcagaccttag

SEQ ID NO: 45336 - DNA, 2246 bp, Oryza sativa
  Clone ID: PAT_MRT4530_48310C.1
ccggaatgcaccaggcgcctccttcgctgcccccatctccttcgccgccgggcaccatcgccggcggtggccgggttcatgctgtcctgaaggagtggaatgctcgtcggtgattagtaggtcaccagaatatcttctctcctagcctcctgggcttgtttacccaatttatcatcagcttcctgaaatctgaagaaaataaattcggttttactaccaccatgggtgcctgcgtgtcttcaagcaaaaaacggagatcacagaaattgtgctgtatataccggcgttaccgcggaaaagttttgagcaatgcacctatagtacgcgccagtgatgcagggagccgtgctgctcctggagaagttgttcatgtggaggctaaatctgatggctcgaatgtaacatttcatctcacacagttgcagtggcatcatagtgagctagactcagaaaatggaaatgttgtgtgtcaagaagaagcatggttcgactctctcagtattttaggatctgattctgatgaagatttcagcagtgttaatggagacctccctgcaatgtcaaattcagcgggtacacaattaatgcactgtgaagatgcttcaagcattgctgatgcaatccagaagtttgagaggatttttgatggttcatgtgttgctcaagccattggacaatacctgaaaagagacgcgaacaaaatggatagaccaaaccaagcagatattcaagaatcggagaagcctaaaattccaagcccagaatcatgtgatgtatctgatgtgaaggttgatgaaacaaagactagaaatgagggtataaaaattctgacaaaactcagaagaggcgaggatgcatgtaatacgttgaaatcttcgaaagaaggagacaaggctcatgaaagtatcttcaaaagtttgacaccagtgtgcacgcctcgccatgctaataaggttcagcctttggccgtagcaagtcctcggggccaaaagaagaaatcaggagttgtcaggctctctttcaagaggaaatcttttgatggagaacaaactactgaaatatgctcttctaggaggtacttgattcatccaagagctggattgttggttcctcaaggcagtgagaaaatatcagaaagttgttggtccgttcttgagccatcgaccttcaaactacgtggagaaaccttttttaaagacaaaaagaagttgcctgccccaggaagttcaccgtatactccgattggtgtggacatgttcatgtccccaaggaaaattcatcacattgcgcagcatattgagcttccatctgctgggccaagcgagaaaattccttccttacttatcgttaatattcagatgcctacatatcctactgctatgttccttggtgatagtgatggggaaggcattagtctagtgttgtatttcaaactgaatgagaactatgagaaggaaatttctcctctgtttcttgatagtataaagagacttgtaaatgatgagatagaaaaggttaaggggttcccattagattcaacggttccgtaccgagaaagattgaaaatattggcagggttagtaaaccctgatgatatgaatctgagttctgcagagaggaagcttgtgcaggcttataatgaaaagccagtcctttcgcgacctcaacacaatttttatgtgggaccaaattactttgagatagaccttgacgtgcaccggtttagcttcatctcaaggaaagggcttgaagcgtttcgagaaaggttgaaacatggtgtcattgatctaggtttaaccatacaggcacagaagcaggaagaactccctgagaatgtcctatgctgtgtaaggctgaacagagtcgatttcgtcgatcatgggcagataccgacgctcttgccttgcgacgacgactgacattttaaccggcatgctaatttaactggatctgatgcttcagtcaagagcagtaggccagtagcaggcgaccacaagttctgtcctgtgaaacttgatgaactcaccttggttttgggagggtgaacatggcatggttgcttcttcgctctggtccatgagatcaacggctctacttcagagttctgtaaaaaccagcgtacatagtcatgcatgttgtttggaaatctggtttgtggatgaattctatgggaaatttgttctgcaaatcaggaattggctggtaccaatcaatctattcattcaattcatctgttctcattccat

SEQ ID NO: 45337 - DNA, 1143 bp, Oryza sativa
  Clone ID: PAT_MRT4530_48311C.1
atggcgattatggaggagcaggtagcttggcttctcgatcttagcctgatcttatacaaggacgatcgattaggccaaatcaggagttcaacagtccatatttcttcttgcgatttacttatgttaaagggtaattttatcattcttaatcaggaatcggtccttatatgcgaatacgggacagtgccacataggcacaacccccgcatcgcgagttttcataattcattttattttcaaacacaccgacaccacatgtcgggttttgaaggcttcacaaacccatttcccaagttttcgacaaacaacggtggatatgatttagacttcctcgggcggcttgggtgcggcccgagaggagaggcacggctcggccgaactaatgggccggccggcccggagaggcggcccaaggaggcgcggggagagtgggggagagagagggccggtgggctgagtccaccttgcggggtcccgagtggggcccgcttgtcagtggcgcggctcaccgtgggagcggcgcatgagggtggcactagggtttcgggtgagcgcggttcacgcgcgtgcaccggatggaccagagatgcggcgggcccacgcgcagccggttggcgcactgtggaccgcgcgcgcgagggtgggggagggaggaggcggctgactggctcggttcggtcaaagccgaggtggcgccgacgtggcgcctacgtggcagccacgcgggccggcgggaggaggaagaaggggaggccgagatggacggcggacggcggcagtttcaccgggacaccatgcgacggcgagggcaacggggagcacattggaacgacaaggaggacaagagagagtgagccaacggctcagatttgccggagggtagccggcgacggcgaatcgcggtggcggcaaccggcggcgagcaaagggggaaacgacgacgagacgacgagggttcgattcaaagggatgggagcatctccggggctcaagggtttcgtttctgggttcggatggggtggggaggcgccgtggaggtccggcgacgagaggcggcctccgggagcgggcgccgacggcggcaaggccatggcgagcggtggcggggcttggagcggcgcctacgaaccactggaaggctaa

SEQ ID NO: 45338 - DNA, 275 bp, Oryza sativa
  unsure (1)..(275): unsure at all n locations
  Clone ID: PAT_MRT4530_48312C.1
catagggttataaaccatttggcatattactagtaagctgtggctgtcgcgacggccgtntggcagaagtccaccgaccctgcctgctacgacaagctcacgcccgtctcctcgccgcccaagtgcgacgacagcgtcgacccggacgccgcctggtacgtgcccatgcgctcctgcctcacctcgccttcttccacttcctcgcgctacaagaagctggcgctcgacgccacccccaagtggccgcagcgcctggccgtcgccccagagcgcat

SEQ ID NO: 45339 - DNA, 2347 bp, Oryza sativa
  Clone ID: PAT_MRT4530_48313C.1
tggatcccgggctgagctcgataaaggttgatatttctctctcttcttcccccccgccgccggctagcactatgctcctcctccgcaattcttcccttccctttgctaccctatcctacccttcgatctgattcattcgccgccgccgaatcccggccgccggcggtagctgctccgacttttcttccttctctcgactccactgggtctggatatagataagagtcttccttgtttctttgctgtgaccagttaaatccaagtcttcatcttccccctcgattcccttttctgcttctcggggtttggtggtgttctagcaggcagttcgttccccacaaaattctaagctcacccttgctttcttctcccccttgttcttgactaggattttcttttcatttccgtaaggaaaaggagatcacgagttagcaatcttgtgctcgcgttaatttcattcgatttgtggattccgaagatgatatctctgtgaattcgaaagggtcaagaagattgtttatcagtatcgatggcatcttttcctcttttccctgctctcctcctccttctgtgctcttcctccctggctttggactccgtctccgagccaaccctctcatggacctgcggagacgaccaagttgccatcttggacacatccgatggcggccgcaacctgtccgtcaatggggaattggttcaggatcgtgttcttggctgccagaagctccggtcgtactacgtgagccgctgcctccgctgcggccagcagtcagaggcatggaggggcgcctggaagcactactgccgtgaagggagtgaatcaagcaacgcacaaaatataccaaggaagcttttaaggcagccctcaatgaatgatgcaaaaattgaagatgacccatgtaaaaacatgggaattcatggacataatcaggatgataatgattctttggaagggcaggatcatctactagctgtgccaggtgtgattctcctatgctgtggtctgatgataccgtgctttcatgctgagaaaaaggaagtcagcaggcataacactacatccattcagcgcaatgcagtcgaatcgattgcatccttggatgtaagcacgtcatctgagaaggttccaccaactccacaccgaatacccccaagtccatctagattcgcacaatctccacaaattgctcgagttggatctgtgaacttaactgtgcagcagattctgagggctactcagaatttctcaccttcatttaagttaggtgaaggaggatttgggacagtctacagagctgtattgccagatggccaggtggttgcagtaaagagagccaaaaaggatcaattcgcaggtcccagagatgagtttagcaatgaagtagaattgcttgctaagattgaccaccggaatttggtgaggttgctgggatttactgataagggacatgaacgtatcattatcactgagtatgttccaaatggcactctgagggagcatcttgatggccaatatggaagaaccctggattttaatcagcgtctcgaaatcgcaattgatgttgcacatgcactgacttatcttcatctatatgctgagaagacaataattcatcgggatgtgaagtcatcaaacatcctgctgacagagagctaccgggccaaggtgtctgactttggatttgcaagaagtggccccagtgacacagaaaagacacacatctcaacaaaagtaaaaggaaccgctggctaccttgatcctgagtatctgagaacataccagttgactcctaagagcgacgtcttctcctttggcatactgcttgtggaaattctctctgctcgccgaccggtagaactgaagcgggctgctgaagagagaataactatcagatggacattcaagaaattcaatgaagggaacaggagggagatattggatccgttgttggaggatcctgtggacgatgaggtgctcgaaaggctgctgaacttggcattccagtgtgccgctccgacgcgggaggaccgtccgaccatgaaagaagttggagagcagctgtgggagatcaggaaggagtatggaaagagtgtcaggagggtgtgaacattaaagttagctctttaggcttttgatcttcagacatgcatattctttgtgccattgtatacgcatgtggtgatatgatgtttctgctgagttgcttccaaatgtgctacttattgaacaatgtacagagaggggtaacaccagccgcactttgtatgtatctttctacttttggaattacatgactggtgttgcgggtttatttctccatggagctaaaaaaaaaaaaaaaaa

SEQ ID NO: 45340 - DNA, 384 bp, Oryza sativa
  Clone ID: PAT_MRT4530_48314C.1
atggagggcggacagcgaggtgacggcggacagcggcggcgactcgtgggcgctcaaggcgacgggcgacggcgggcgcgtgaggcggccagaggacaacaacgagcggcgagcggagacgacgccgagccggcgggctgcaccgcgcagatccactcgtcgccggcctccctcgctcgcccctcaccgccgcgccctccatcccttgccgtcgcgccctctccgccgcaaacaacggcgcacagcggcgggatggcggatctagaggcgacggcggtggacgaggtgggaggcggcaaggcggcggacagagctcagggcgggagtgacggcggcggcggagctcggggcggggatggcgacggcggcggctcgccacaatga

SEQ ID NO: 45341 - DNA, 175 bp, Oryza sativa
  Clone ID: PAT_MRT4530_48315C.1
agtcctccgcctccggagcggcgcaactggggctggtagactgatatgatgaggctgtctagctccttgccgggcataacctagaagctgcctcgcactatttgaaaattcgagaacgataataagcaataccgacgcgaactccaagccggcggaagcgtcaaggagcccgtgt

SEQ ID NO: 45342 - DNA, 307 bp, Oryza sativa
  Clone ID: PAT_MRT4530_48316C.1
acattaaaatacggatggagtaatttgggactaatatacacaccggatacatttatctctgcatttgtagaaactaagtgcctttgaatcacgacgtactcattgcatcaaaaacactgatcatgcgtacgcatgccgatcgaagtgcgtacatatgtacatactaacatacttagtatttctctcatataggcacatgattatgtactgagagcagacagatttatacgaacaacatatactagatgaggcgctaaacatattggattgcatatacgttacgaacgtacgtttacttatacttata

SEQ ID NO: 45343 - DNA, 500 bp, Oryza sativa
  Clone ID: PAT_MRT4530_48317C.1
gcacgagggtgatccctcatccctgaacttcccagagagggagacctcagagaaaaagggcgaggcatggcatccagctccaaactgtctgctctcttcttgacggcaattctgctctgcctcatctgcacgaggagccaagcagcaaggcctgaaccgggatccagtggccacaaatcacagggtgttgttgcctccagtattgcccatcagaagagtgttggtagttctggaatcggtgtggaaatgcatcagggagaacctgatcaggcagtggagtgcaagggaggggaagcagaggaagagtgcctgatgaggaggacactagttgctcacaccgactacatctacacccaagggaatcacaactagtgtagcacagtagctgtgcaaatatatgcaccagtgctctttggcacaagtttctgcccagggtagtttggaacacgggaattttccacgattcttggaggaatgaactagctctgacgcacagtttc

SEQ ID NO: 45344 - DNA, 302 bp, Oryza sativa
  Clone ID: PAT_MRT4530_48318C.1
gttgtatcgccaagtgccaaatctcatccactgagcttggggtcctctcttggggagcatggaggatgatcaccgtcgacccaacaatacaaagaacacatcccagcacgcccacccgcttattctacctcacaattatgctgagtgctcctagcggcgtgacgaggacagcagtgaccatcccgacccaccagagcggctccaagaggtacccatatcctccaacacctgaaatttccaacaagacaaacgaaggtcacgacgcgtgcgacatgaaatcgacccggattttggacacaaaa

SEQ ID NO: 45345 - DNA, 592 bp, Oryza sativa
  Clone ID: PAT_MRT4530_48319C.1
cggacgcgtgggcggacgcgtgggaaataagtgctgcaatatcaccagatcagaacaaacaggcattcaaggaagtggtcatcataaggcatcctcgtattggagaatatgcatttggtttcattacatcatcagtctctctccagagttatactggtcaagaggaactgtactgcgtgtatgtcccaaccaaccatctttatattggtgatatcttcatggtaaattcgaaggatgttataaggccaaatctttctgtccgtgaaggcatcgaaattgttgtatctggtggcatgtcgatgccccaaattctatcaactctggacccacagacaattcttggagacagaacaggagcaagcagaagctgagatctctccttggttgcaacttgactaaaattatcagaccaagtacagtgaactagatcctgagcaacacgatgtattagtggtctgtcgagctctaggatcacaaggatctgtaaattagtagaagtaggtgactcatatattccttgttcatccgttggcagtttgtaccatggtttgcactttctaccacgttctatacaagaatgcttcgtagttgg

SEQ ID NO: 45346 - DNA, 822 bp, Oryza sativa
  Clone ID: PAT_MRT4530_4831C.1
atgagtagagtgtccactagttggggttttgtttaatctagggtgaacaagccgaggggagggggcgcgcggaccgggtccacgggagtggggcccacgcggcagcctcacggtccacggtggaccgggtgcactcgggctcacaccggccagcgccgtaggtcccacgcgtcagccgcacccgaaggcgcgggcggctgacggctgggccccacgcggcagccgctcggtgcgcccgaaggcggccacgtcggcgcggccggcgggaggcggcgcgcccgcgcccctatggtcgccagcggcggccatgggcacaacggagcggcggccgagagaggggagcgaaagggggaaacgaggcggcggttcacggctcaccctaggtcgacggcgacgacgaaaaggcagccggagcggaggaaggcggcagcacggctcgggtcgacggggacggcggcgctccggcggtcgacgagcgaaacggaggggtggacgaggtcggcgaggatgcggcgaagccgaaggaggcggcgccgaggtgggaggtggtctggggcgatgacggcggcagaccggagctcggcggcgacggcggagagagagagcgacggcgcgagctcgattccggcgagaggcggaaacggacggaggaggtgcgaggagggtttaaatagggtggaagggggagaaatcggccggcagggaaagaataagcgcgggaggtccggccgccaacaatggcgccggcgagatttgcgggagcaaaaccgcccgtttgaacgcgagagagaaagggaaaaatggggggaaagggagagggga

SEQ ID NO: 45347 - DNA, 346 bp, Oryza sativa
  Clone ID: PAT_MRT4530_48320C.1
atggaagagctgcacctggggtgccccgccccagtattccgggcgacgccaccacgcgtgctgtttgggactcatacaaaccggacatctccggtggacaaactaagctaaacctcgcgcgttgcgtctattccaacactcaccaacggcaagccgctacccatggcggctgctggctgctgtcgcacgagctcagcctgaggggggatggtggctctcaagatcatactcatatgctacgcccaataatgctcttcatattttatatcgaggccaaggcgaaggccgtcaccgactggctgaagctcaacgactaggagtttaacgcctggacgcatacaagtga

SEQ ID NO: 45348 - DNA, 1921 bp, Oryza sativa
  Clone ID: PAT_MRT4530_48321C.1
acaactacgaagcattcttgtatagaacgtggtacaaagtgcaaaccatggtacaaactgccaacggatgaacaaggaatatatgagtcacctacttctactaatttacagatccttgagatcctagagctcgacagaccactaatacattgtgttgctcaggatctagttcactgcactcggtctgataattttagccggccgggaggacgacggagactccacccagcaggttcgccgtcgccatggcgtccgcccgcgccgcgctcctccgccgccactgcctcgccgcagccggcggcgccaaccccgtgctcttctccggccatggcctccgctaccgcaagctggaggtcatcctcaccacgacgattgataagctggggaaagcgggggaggtagtgaaggtggccccaggacacttccgcaaccaccttatgcccaagatgctcgctgtcccaaacattgacaaattcgctctactcatccatgagcagcgcaagctttaccaacgtcaagaggaggaggtggtgaaagaagtccgacaagaagatgatgatgctaagcaacaggaagagaaactgaaggagtatcaaacggcagcaaagtgtcttgataatgctctcttggtgttgaggagattcatctcagttgggaatgaactgcggtctcctgtgacaaaggacgaaattgtttccgaggttgcaaggcaactcaatatcaatatccacccagacaatcttcacctgccgtcaccattggcatcccttggggagtttgagctgcccctccgtttgccaagggatataccacgcccagaaggcaagctacaatggactctaacggttaacgttgcctatgcaagcatagctattgttgcaaacatccacttgtttaatcttaatgtcatcctagacgctacgagttcacgacgaattattagagattttaacgatgttaaaattgcacgcaagacagtgcgagaaggctttatatttcaagagttcaccaggatgaccttcaacatggttaaaggcaagtgctgtcaacgctcaaaacatcaagttgcaaccaaggagagatctcagcttctgcttgctcctgttctgtctccaagaattgtctgtgggtccagagttgatagaatttggggcatcgacatgccaccagatacaacaatttcgatgccttcacggacagaaagatttggccttataacatccttcgaatttaccatgaagatatcaccaatataaagatggttggttgggacatacacgcagtacagttcctcttgaccagtataactctggagagagactgatgatgtaatgaaaccaaatgcatattctccaatacgaggatgccttatgatgaccacttccttgaatgcctgtttgttctgatctggtgatattgcagcacttatttcccacgcgtccgcccacgcgtccgggacaagtggcatgcgcttaataatccactcaccaaggctaaggacagatgctccaacccaagatgacatgaagactccaaccacaaatatgaaggtaacagaagtgataaagccaagaccaaacatgttgattcccagttgagcatagattggcgagaagaatccgtcaacaaaatgaatgaaccaccatgtgatgtagaatgttattgctatggggaagagaattacacatccagtcatgaatttctttgaagcccaacttcggaccaccttatgaaaagccagtaaacccctaatctcgcggctggaggaggacagagcggcggacgcggaggaggaggccgccctgtcgccgtccccgtcgccgtctccgggggccgagccgccgccggagacggggatgaggagctcccggtcccggtcgcggctgcccatctggctcagcggagacttctcgtcgcccat

SEQ ID NO: 45349 - DNA, 516 bp, Oryza sativa
  Clone ID: PAT_MRT4530_48322C.1
aaacattgtaatataatatgataccgtgtcgtggtcccatatgtattttctattctttcccaatagggtcaataatcaaattttatttgcattagacaataatttacctcatgtcccaatctgacaattattcactccaaagcattaactgaatttggaatgtataatattgtaattctgatcttaactattatcttgaccaaatcctaccaataattctgatcttaactactatcttgaccaaatccaaccaattatacttcttgtttttctaaatgattttgccacatcttataagttttgaataaaggccatgggcagaagtaatctgtgaattttgtttcttattgttatgctatgttctgtaggtttatttgatattggatgagtttattctcgctggagaacttcaagagacaagcaaaagggcaataatagagcgaatgggtgagcttgagaagctggaataagaagaaacggtgtacactagcgtacatgggcagatgatcaagagtg

SEQ ID NO: 45350 - DNA, 309 bp, Oryza sativa
  Clone ID: PAT_MRT4530_48323C.1
atggcgtttggcgaagaagaagaagaaacggagagggtgaaaacgtccaaaattcgtgatgcttggtggggaggcaagcgaaggatgcgcgggctattatatagtgggaggggtagagaggtgtcagatcggcaattattaagcccctgtcagatactcagatcttcaagatcttgcggccctggcagctctggaaaaatcttgagaaagtcacacggtacctttggttctttgaacaagaagaagaagggctgtagtttcgccggcgaccagtggtccgcaagtttcagcctggagaggcatgcatga

SEQ ID NO: 45351 - DNA, 353 bp, Oryza sativa
  Clone ID: PAT_MRT4530_48324C.1
gggccgtgctacgctctcctcctataatgtcaagtctctgactcgactggctggcatctcccctcgccatggagtgggataaacatcggaatcaacggcttaagaaggatccggaggatcctggtcagggcggccgtccaaatcgaggatatgcagctacggatcgtcattgacaccttcagcgccaccggctacgtgacctgcatgttgaagtcgataccgtgcactgacaatggagtcacatgacatcaaatcaaagacttcatactcagatgtcggctagaaacagcctcataatcgaatcagaaccctgactagttccatgcctagatgtgcaaaaatgcctgatcaaa

SEQ ID NO: 45352 - DNA, 133 bp, Oryza sativa
  Clone ID: PAT_MRT4530_48325C.1
ggtgttttgtgcgcaagagggtctatactaattattggatctagttaaaaacaagaagaaaaaaaaagtgccaataggtatttaccatcaacctgtctttgtgagctgtaacgaataggagaacagaatggat

SEQ ID NO: 45353 - DNA, 1251 bp, Oryza sativa
  Clone ID: PAT_MRT4530_48326C.1
atggcggcggaggaggattgggcctccctggagcaaggcctcctccacgacatcttcctccgcctcgacgatgacgccaacgccgcgcgcttccgtgccgtgtgcagccaatggcgcgccgccgccgccggcgcgggcgtggtcttcgtcccccgtccctggctcgccgtgtacgcgcccgagcagcgccgccacgcctggctccggccgtcgcgtcgccgtcgacgggggaggcgccgcttcaagagagttgacgatggggaggtgtcgctgcggccggaacgcggtggcagccccgcccccgccgccgtctcgctcgtcagcgtctcgcgaggctgggtcgccatgaagcacggcgagagccacctggtcagggccgtctccggcgacgaggtcccgcttcctccgtgcggctccaggtacgagctgagcgaggtcccgcttcctccgtgcggctccaggtacgagctgaggtacgagctgagcaaggtgatcctccccgacgacccgctcgccgccgccgcctccggcgagtggacggcgttcgccttcatgtcccatcaccagcaaatcctgtggccgcacacgcggcgggtcgccttctgccatgccggcgacgacgagtggaccttcctcgacaaggccatccaggcgcagcgatacagagggctcgagttcttccgcggcggagcctacgtgctcctctccaacctcacggtcgccgtcggcgacgtcgtctcacggatgctgatcgccaccagcgtaggcctctccggcgcctaccggtggcggcatgacgagctactcgaggccacatgcctggtgcgctgcggcgacgacctcctgttcgtccaggtgtcgcggcaagtcgtacccaggaggtcgtgcttccctctcctcgccggcggccgccaccggcgccggcggctccgcttcaccagcagagtgtacaagctggagttcgcggcggacggcagcggcgtgccggtggggttcaccaaggtggagagcatcggggagtacgcgctgttcgtgtcgcggcgcagccacgcgttcgcgctcccggctagcggagcggcttccccggcgtcgagccgaatcgcatctaccacttggtcagattacgcggcgaggtcgtcgtctgcgcaccgtgggagactcgccgtctcaagcccgtgccattggacgatcttcctgagccccggacacagtggtttccatcgcattggttttgccctcgccggccagtaa

SEQ ID NO: 45354 - DNA, 1856 bp, Oryza sativa
  Clone ID: PAT_MRT4530_48327C.1
aattaagatacacacatgcatattaatttattacacatacatgcaaacgttacacgattttacccacgtactagtatatagtactcactctatttcataatataaaattttttagcattgttcatattcatatatgttaatgaatctagaaatacattaacatctatataaatgtaaacaatgctaaaaagtcttatattataaaacggagaaagtatatgtgtacgtatgtgcatatgcttgctgtatatctaatcaaacagctgggaggggtttgcgaggaagaagttggtgacgaggtctttgatgtcggcgccgaaggtgtacccgtccctgccaccgagatagatcacctccagcatcctcgtcaggttcaccaccagccgcgccgccgggagcagatgatcagcccgaccacccatctccacgcactcccggttgatcgtcctccacgcgcgctccgccatcgcggcaaccgccgccacggcctcctccccgcccacgccgcgctccgccatgtagcactccaccgtgctcgccatgtccctgccgctcctcccggtcctgtaggaggcgacgtcgttgaggaagcgggctagctccccgctggcgcgggccagggcggggacggcagccgcccacccgaacgcctccgcggtcgccgcgccgtcgccgtcgcgcacgcccaacagcaccaccggggccagctccgggaagccggaggacatgacagacacgtccagatgctcggcgaagctgggcatgtatttgtcgctcgaccattgggcctcacggaggtagtattccgacaactgcttgtacccagttttggcgtaagacatgcggtacttctcggttggctccaagcaatcctctaactcttcaaagttgttcagtaactttatgtagaaggcatgaagatattcgggtagaatagagaccgcgctcttatcccatctctgtatagctttgttgagcttgtggcactcctctaaggtggcgtgggcgtcgtaagtatcgtccatcaaagacatgagtccaaaaactttggtgaacatgatacgtgcgcgagagtactcctcctcgtggtatatgccgcacgtccagaagtagttctccacgatacggtctctagcataacttagcttcacgctattgtacaggtctttccaccacagggtgagggccttgagctccctgaggtggagagacctgacgagctcaaagtccagtttggcgagctccagcgccacgccgtcgaaagctggctcgtgctcgtactcggcgatgtagcgcaccgtctctagccgcctgggcgcccgcggcagagggatgtcgagggcgcgggagacctgctcggccatcggcgacctcagcttgccttccacggaccgaattaggtggtgcctcgcgaacgcgatcgcgtcgtccagcccctcctcgccaggcatggccatgtgagccgcgttgtacaggcttagcaggcccctcgtgtcactgcttaggctcgctctgaaactgcccctgctgtctctgaacttgtcgaatacagctgcagttaccccgaagccgtgctggcgaagtagacggaaccggagggaagtaatgtggaggtcatcgtcgtcggcggcgccggcagggcacccctgctcctcgcggtgtacgcggcgtaacatcgccgcgatctcgcgacggaagtggctgtctatgccgaggcgttcgagcgtgtcgactagcatcaccatgtctgccgcactgctgctgctcttggccttcaacagcttgctgcgaacttgcaccttcagcccttccgctcttcctctcgtccactcctctgacctcttgctcccagacat

SEQ ID NO: 45355 - DNA, 1042 bp, Oryza sativa
  Clone ID: PAT_MRT4530_48328C.1
gatttgtacacaatataaacatttctaggacactgattccaatgcacggtattcgaggcgttgtcagcctcgaggccggccggggaaccaaagataaagaaaaaatggcagatcttcagaaagaggtagacatgtatcatgatttcttgtttgttgatgctgaagaagatacaaagcccccacagaaaatgttagcgtttttcaaagcagcttatgacatgttcgacgcagatttctatgtcaaagctgatgatgctatctatctgcgcccagatagactcgctgctcttcttgcaaaggacaggcttcatcagcggacatacattggttgcatgaaaaagggtccagttgtcaatgacccaaatatgaagtggtatgaaagttcgtgggaattattaggcaatgagtacttcagtcatgcatctggtttactatatgctctttcttcggaggtggttggatctctagctgctacaaataatgatagtttaaggatgtttgattacgaagatgttactattggatcatggatgcttgccatgaatgtaaagcatgaagacaaccgtgcaatgtgcgattcggcatgcactcccacctccattgctgtatgggacagcaagaaatgttcaaattcatgtaacacaactgagatagtaaaggcgcttcacaacactaccttgtgctcaaagagccctacattgccacctgaggtggaggatgagtagaaccttagtgttattttttttcccgtcaacagatgcctgcgccgtggcccggtgtggcctccgggaactgctccttcccgggcatgtggttggccttgccggcgcactcccgggtgtgcgtgtcgcggacccgtcatgttgtaggttcaggcaaaatgtatactcccgactgatagaagtgggaacatttgttgtcttatgtgccatagccgattctggccatcgattctttcactggctatgttgttcattgatgtgtatataaccatatatataccccagtctgcattgttgatcatgaacttcatttcatgatc

SEQ ID NO: 45356 - DNA, 273 bp, Oryza sativa
  Clone ID: PAT_MRT4530_48329C.1
atggaagctactgctcgacttcgcgtggtggcaatcctactgatgtcgtcgctcttgctgtcgccgccgtttcttctcgccgacggctcatcaggaggaggtagcagaggccgggagatgaagcacgatgatggccatctggttattgctccaagaaaattgacatggcctcgtcgagttctaaactctggcgatcaaccgaaccacgacccgatacataactctcctatctccccaggaagaagcaaaaatgaagtcaggcctggcaattga

SEQ ID NO: 45357 - DNA, 1700 bp, Oryza sativa
  unsure (1)..(1700): unsure at all n locations
  Clone ID: PAT_MRT4530_4832C.1
atgtggccgttcgagaggtatatgggaattttgaagtcctacgtttggaacagagcaaaaccagagaggagcatcatcgaaggttacacgaccgaggaagccattgagttctgtatcgattacatggccgagactgatcctatcagagttcctgtgtctcgccacgaaggaaggttggcaggtgtcagcacaactgccagaaaaagaattgttcccaatcaagcttcctacgcgcaggctcatttcgcagtgctgcaacatatggctgaagtaaccccatactttgaggagcatttagcgaaggtccgacgggacaatattggtcgatcagatatttggatcaacagagaacatggtgctcgcttcaacgaatggtttaaggatcgtgtagcacggtcgaccgatggcccaagtgagatattacaaaggttggcaaggggtctagcttgggatgttgacacatggcaaggttgggtgaatatccgcactggtgtcaaagtcgacaaggaaggattcacattagtggacctggccaaggttggatacgcagacgaaccattcgtactagcgaagcaggtcgaacaaattttctacataaaagaccccgcaaacaagaagatgcacatcattaggaatggcaagcgaagaattgtgggtgtggacaacgtcgtcgatgaagaagaatacaacaagtggcttgcgttcgttcagaccattcggaaggcatatcactcctccccgagcccggcggccatccacctcgtcctagccaccgtcgccctccttcaagccgtcgcctccacacctcccggttcaagatccggctgctccctgcctccccctccaacgccggctgccgttgacctcctacacgccgtcacctcccgaccaccaccgcctccctcaacacctcccggttcaagatctgggtgctgcctacctccccttcctcgacgccgccgcctcatcctcgacgccgccgccacctcctccctccaagatccagcctccccgagcccggcgccgcccaagaccggcgtccccgagcccccgtcgacctcctcaccgagcccaccaccgtccgagtatccaaagctggttgctgtatctatgggaataagggttcccttacgaaatgatcttggaccatccatgttcctcgaggccggagcagacgggatctcgacctccacatccatatcccactggaacttgctaccgttgccactatcttatggtagtgacattgataggaagttcgagtgggatactgatgtcgaggtcgagttcccggctactccggccatgttgagcatggatgctcgtgttccgtcaacgaggcgaacgcaggtaggagatacaggcatatcaaaccatcagagaatgtgggtagatgcaatgttctgtttaaaaagtacttgcttcctgtacaacagctcacataggacatgtcgtagcaaggcgaaccaatgtcgacgaccactactgggactacttcgagccagaatcctaggacccagaataagattcctaagtaagtctacaccataacagaggtggacgatattggatatccgacggcttcgatgaaagctgtcaaaaagttccctacgatatgtggagtcctanggaggcggaacttcactattctgaaagaccacatcgatctggtccctcaagaagaaaaagaagagcctgga

SEQ ID NO: 45358 - DNA, 674 bp, Oryza sativa
  unsure (1)..(674): unsure at all n locations
  Clone ID: PAT_MRT4530_48330C.1
gcacgaggcaggtcgtcgtcgtccgcctcctccgatcccctcgccggcaaacggcgcgccgccgttggtcgccggccgccgccgtccggctcctctccgatccatttttgttgattcgattttgccgcgtcggattgctcgccggcgtgaaagcttactagggcatcatggacgtcgatnaacaggaaacaatggaagagaccattctcactggtgatgatctcatgcgtgagccaccatcccctgccataccaaaagaaattgcctcgcatgtccttcaaggtgttgagccctgtgatggtatactcaggaatcttttcttatgcctgcaaatcaatgacatcgagcctttttgccaagatgaaattgtgttttaccgacaatgtgctgcaaaaagggacaaggaaataagagagaagatggtagacagtgaatataaactgcgcatttcgatgcccctggaagaaggaaaggaaagaactactcaactccaattggaagtcacattgcttgaaaggcgcatgattcttgctagtgggcttgagggcatggagggatttcgccagagatggagcttgcatggacagctcgaggatacgaggaaaaggatggaagcactggtccgtgggatggagaagggagaaagccaaaattctcaagcgcaagggagctaa

SEQ ID NO: 45359 - DNA, 737 bp, Oryza sativa
  Clone ID: PAT_MRT4530_48331C.1
ggggttttggtgtttcgctccgccttccgcttccgccgctacgcgttcgcctcccctgctcatcctctcctctcctctccactccaccgccaccgccaccgccaccgccgccgccgcaacgcgttctcgctttccgatctcgcggtgcgcgcgcccacatgaggttcaggttccgcaacaaggctgcggcggcgggagacggcagccggccggcctcttctcctcctaacgccggcaagttcgcggcgcctgttgccggcggcggaggggcggcggacgtcgccggcgagagcccggatcaggacagcacaaggaatggaagcaaagatgaatcgttcttcgaggcaagaccctggttagactccgacagtgaagatgatttccacagtgtgagaggagatttcactccatcaagaggcaccaccccagatcatcagagacagtcaccattcgcggggcgaatatcggtggacagatcggagccttctctgatcgagaagaagcagaggctcctcgaacttctccaggagaagcagcagtacgacgatgacagcgtcgctgatgtcggtagcgagatcgagaacggcgctgtccatgctgaagagtatctgaaatcatcgaggaaaggcgcaaaggcgaacagggcatccaagtccaggggaggctgcttcccaagctctttttggaagatcaaattcaggagctgcaggaagaagagaaaagagcagaatgattag

SEQ ID NO: 45360 - DNA, 1548 bp, Oryza sativa
  Clone ID: PAT_MRT4530_48332C.1
atggcgggaaaggagcggagccacgtgcacttgtgcctcaccgactacagggacggcacctacacctacacggtgcaccacatcgacgtcgcccccttcttcctccgctccgacgaccccgacgtcccggacccgggagccatggaggaggctgtcctgcccccacccgccacgcgcctcgccacgcgcccggagaccaacggcctcgagttccaccacctcctccgcgccgccgacggaggcgacatgatcgtggccaccgacgaccagcgccgcaccctcatctacgacgtcgccgcccgcgccgtcggcccggggcacatgctgctctccgacaagcgcgtcccggtctccgccgccgtcgccgaccgcctctacgtcctcgacacctcgcacgccgcccggcgcgccacctgcttcgaggccctcgtgtacgacggcgtcgaggacccgctgcgcgccgactggtactggcgccgcctcccgggccctccctacgccgacgacggcatcggccgccctctccccggctcccgtgtcaccgccctcgcggtggtcggcgcaggcatctggaccacgacggcgccggcggaggacggcgtcgcctccgtccgcccctgctcccggctcgaccccaggcgcggcgtctggacgacgcccaagggcgccggcgccggccccggcacctactcgttcgacaccgagcggcaagcctggaggagagagggcgactgggagctgccgttcgccggcaaggccgagctcgtcccgggctgcaacctgtggttcggcttctcccgcgccgacgggtcgtcgtcgctctgcgccgccgacctcgccgcggcgccgcacagggcgtgcggtgtgtgggaggacttccgcccgcccaaggagtggttcagctgcggccgccacctcgtcagcctcggctccggcaagctctgcgtcgtcaggttcttcgccaccgaccccctcgacaaatggaggcgtagggaccctgtcgccatcatcaccgccatggaggtgcggactatgcctgcttgcgacggcgacgacgacggcggaagaggaggagaacggcggatcaaggtggtgaagcacatgtctaggctcggcccatatggtataaaaatcgacccacgcgattcacaaccatcgacgccagtcgccacctccgagccacggccgccggcgctgctaggaagcaagtcgtcgccgtcggcgtcaccaccacagcctgcgcggctgcgcctccatgtcctccctcgaacgggagcctccgctgcgtccgccgtggaggtcgcggaccgatccactccacccgcggatgcgccggaggagacgacgagcggcagtgagcggccggccgaagaccacgggaaatcaggagccatcccgattttgctggccgagaagaggatggtggcaacgaaggggccctcgcgcgggagacgcaggctgtggcggtggcgacgacgccgacggtgcagaggtctcccctcccccatttgcttcctagccggccgcggctgtggcgtcgatggttga

SEQ ID NO: 45361 - DNA, 229 bp, Oryza sativa
  unsure (1)..(229): unsure at all n locations
  Clone ID: PAT_MRT4530_48333C.1
ccctcgagncangccgggcctagctaggccgcctcgtcgccttcccccctacgcatccccgaccagcaccggcaccggcggtggcgctgtctctcgcctctgctcgagggatgatgaagctaccgtcaacaagaccatgggtgcgagccacttatgcctctggacttcaccagagaaatctggactgcgtttctttttgtttcccaacggccatgatgcgcgtcaagca

SEQ ID NO: 45362 - DNA, 1245 bp, Oryza sativa
  Clone ID: PAT_MRT4530_48334C.1
atggacatggagcatgagctcaggggcggcggcgtcggggcggcggcgcatgggcatggctccatctgcttctccggcgggccggtgctcgtcgacgggcgacgcatccagcagctgctcctccactgcgccgccgcgctcgagtccaacgacgtgacgctggcgcagcaggccatgtgggtgctcaacaacatcgcctcctcgcagggggaccccagccagcggctcacgtcgtggctgctccgcgcgctcgtcgcccgcgcgtgccgtctctgcgcggcggcgccggcgggcgccgccgtggagtttctggagagaggccgggcaccgccgtgggggagggccatgtcggtgacggagctcgccgactacgtcgacctcaccccgtggcaccggttcggcttcacggcgtccaacgccgccatcctccgcgccgtggccggcgcatccgccgtgcactggccgacgctcatcgacgtgctgtccaagcggcccggtggcgcgccggcgatccggatcaccgtgccgtccgtgcgccccgccgtcccgccgcttctcgccgtgtcgagctcggagctcggagcccggctcgccatcttcgccaagtccaaaggcgtgcagctggagttcaacgtcgtcgagagcgcgacgacgacgtctccgaagaagacgtcgacgacgctgtgccaagaactcgcgtccgtgctgtccgacccgccgtcgctggggctaagggacggcgaggcggtcgtcgtgaactgccagagctggctccggcacgtcgcgccggacacgagggacctcttcctcgacacggtccgggcgctgaacccctgcctgctcaccgtcaccgacgaggacgccgacctgggctccccgagcctcgcgtcgcgcatggcgggctgcttcgacttccactggatcctgctcgacgcgctcgacatgtcggcgcccaaggacagcccgcggcggctggagcaggaggcggccgtcgggcggaagatcgagagcgtcatcggcgaggaagacggcgccgagcgctcggagcccggcgcgaggctcgccgagaggatgagccggaaagggttcgccggcgtcgtgttcgacgaggaggcggcggcggaggtgcgacgattgctgagcgagcacgccacggggtggggcgtgaagcgggaagacgacatgctggtgctgacgtggaaggggcacgccgccgtgttcaccggcgcttggacgcccaactag

SEQ ID NO: 45363 - DNA, 724 bp, Oryza sativa
  unsure (1)..(724): unsure at all n locations
  Clone ID: PAT_MRT4530_48335C.1
ctgaaccccaagcgggcacgcgaagcgaccacagatcgcgctgctccactcgctcgcgaacacggctccggtctcgaccgcgatccaactcgccgatgtggcaacttgtagctgcgcgaatgcagccgcgtcattcccgatcaagcatcgactcgcccagtgcccgactcatcngcgacccgcccgcctcaccgcgatcgctcatctcgcccagacggnctcaatcccgcgtnggtcgacaccgccggaccacaactcccgacacaaattcganggcggtttgcatatcggttcggtcacaccaacgcctccacaatctggcggtcttgcatgcatgccatctgtctggctggcattcatcccatggccctttttacctctgtcatggtcgcggctggctaagcaaatcctcagctctgtgtccgtgcaatcctggtcgatcgccattggcacanccaccgngcacgcttcccaccaaccctcatctctggtcagtccgaatggtccgcatgtcggctatgttcgtgtaacctccatccatcnatccntctcgcccctgacggtgatcggtggcttccgcatgcaaccctaacctcctgtaatgttactatccctatcccgaagtgtnacatcgcaaccagtaatatantaccatctcctaatgtactaaaaagaaaaagtgtaccngactcnctgtctatagtacccgtttttctttattcat

SEQ ID NO: 45364 - DNA, 362 bp, Oryza sativa
  unsure (1)..(362): unsure at all n locations
  Clone ID: PAT_MRT4530_48336C.1
ttttttttttttnttaaattgcatcaaatccttgaacacatctagatcacattcaacaaatcacagaggaaataatacaaaacacaaagaaggagggacaagaaggggaggggaagagatcgatccgtggcctccagccgactccctcctgccacccgccgccaccacatcctccctcccttccgcccaccgccgccgcatccccctcctttccaaccttcgccgctgcatcccattcccttctgcccgtagccgccacatccccctcccttttgcccactgccgccgcatcccttccgcccgccgccaccgcatcccccttccttttgcccttcgccgccgaatccccccggacgcgtggg

SEQ ID NO: 45365 - DNA, 489 bp, Oryza sativa
  Clone ID: PAT_MRT4530_48337C.1
atggagtctgacggtggaggcgagccagggtcgacatcatcctcactgtcaacggtggcgcaccctttcgcgcgcgcgctcgtgttggcggacgacaagggcgaccggtgcggcgggcgctacgtgtacgtccaggagctgcgggggcggctagatccgtgtgacggcggtgcccaccccctcagccaccgccgctcccgagggcggggcagccacctccacctccatctcaactaccttcgtctccacctccgctatgcccgccaccgtagctctcacccaccactcactaccccactcgctcaccgctgttcatcacgccgccgcccaacccagtgtctacccacccgttccctcctcctgtcacgaggcaccggctatggtggcggcggagcctctcaaggcagcggagctcggccgggctccccctctctcctagggtcgcctgccacctcccacccctctgccgccggcggccttcctcactga

SEQ ID NO: 45366 - DNA, 702 bp, Oryza sativa
  Clone ID: PAT_MRT4530_48338C.1
atggcgatggggaagaatgggttgctggggtggctgtgcgtcgtcgtgccggggcggcggcggcggcggcgaggggcgcggctggtgctgtggggaggggagaggcgggcggcggcggccgggaggatggccggggaggtgatgatggagcacgcggggcgcctcgtggtgtgccgcgccgacgggttctgcctcggccgcgcggcccccgtgctcgccatcgaggaccgcctcgacgcttgcgccacctacctcgtcctccccgtcgaccgcctcccccagggccgcgacgtcgtcaccgccgcctcgctcgccgcgctcacctacgacagggccgccggcgccccgctgctggccggtggcgcgaagagcccgttcgagtacgtcaaggacgacggcggacggacggtgatcaaggtcacggaggagttcatcgtcaaggccgtcacggggaggcggccaccggctggcggcggcggcgagggggaggacgcgcatggggcggcggcgctgtgcagcacgccggagctgaggaagcactacgagcagctggtgggcgcggcgagggggcggccgtggtcgccgcggctggagacgatcaaggagcggaatgggcggcggagggtggtcgacgtcgtcgtcagccccaccggcaggctgtctccggtgaggttgctcgggttggacaagggaatcaagtag

SEQ ID NO: 45367 - DNA, 1202 bp, Oryza sativa
  Clone ID: PAT_MRT4530_48339C.1
atggggcgcgcgccgtgctgcgacaaggcgagcgtgaagcgggggccgtggtcgccggaggaggacgagcagctgcggagctacgtccagagccacggcatcggcggcaactggatcgcgctcccgcagaaagcagggctcaaccgctgcggcaagagctgcaggctccggtggctcaactacctgaggccggacatcaagcacggcggctacaccgagcaggaggaccacatcatctgctcgctctacaactcgattggaagcaggtggtccatcatcgcgtcgaagctccccggccggactgacaacgacgtcaagaactactggaacaccaagctcaagaagaaagccatgggcgccgtgcagccgcgcgccgccgcctcggcgccgagccaatgcacgtcgtcagcgatggcgccggcgctctcgccggcctcctcgtccgtcaccagctcgagcggcgacgcctgcttcgccgccgccgccaccaccaccaccaccatgtacccgccaccgacgacgccgccgcagcagcagttcatccgcttcgacgcaccacccgcggcggcggcggcggcatccccgaccgacctcgcgcccgtgccaccaccggccaccgtcacggcggacggcgacggcggctgggcgtccgacgccttgtccctcgacgacgtgttcctcggcgagctcacggccggcgagccgctgttcccttacgccgagctgttcagcggcttcgccggcgcggcgccggacagcaaggccaccttggagctctcggcgtgctacttcccgaacatggcggagatgtgggcggcctccgaccacgcctacgccaagccacagggtctctgcaacaccctgacatagtacttccccaacgccgcggcggcggagatgtggccggcggccacggacatcgtcaagccggccgggctgtgccacagcctgacatgacaagtcagacactaatgatccatccatccaacgagagtgctcgagtgatccatgacgactagtctcaagttgttgcgtggctagcttcttcttgattgattacctgatcatctttttctcccccttcttcccgacgagattattacatgtacattatcctatctgtactacggctgttccacagacaggttaattagatgttgattgccaattagcaactgttcaaaaaaaaaaaaaaaaaaaaa

SEQ ID NO: 45368 - DNA, 208 bp, Oryza sativa
  Clone ID: PAT_MRT4530_4833C.1
tcggtttgactacccgctgagtttaagcatatacaggggcttattgagaagaaacttacgaggatggctctagcaacggcgaggcgaggataatggcggcagagcacgcgcacccgctctccctcgccgtcctcccgtcggccccggtttaagcgacgcctgcggcgctatttctgagggacgctgctctccgtcgcggcgggagatg

SEQ ID NO: 45369 - DNA, 1627 bp, Oryza sativa
  Clone ID: PAT_MRT4530_48340C.1
atggaggtggtggaggtgcgtgagtacagggaggaccgggaccgcgccgccgtcgaggaggtggagcgggagtgcgaggtgggctcctccggcggcggcgaagccaagatgtgcctgttcacggatctcctcggcgacccgctctgccgcattcgcaactcgccggcctacctcatgctggtagcggagacagcgaacggcggcggcggcggcaatggcagggagatcatcggcctcatccgcggttgcgtcaagaccgtcgtctccggcggcagcgtccaggccggcaaggaccccatctactccaaggtcgcctacatcctcggccttcgcgtctcgcctcgttaccggaggaagggggtggggaagaagctggtgggcaggatggaggagtggttccggcagagcggggcggagtactcgtacatggcgacggagcaggacaacgaggcgtcggtgcgcctcttcaccggccgctgcggctactccaagttccggacgccgtcggtgctcgtgcacccggtgttcggccacgcgctccagccctcgcgcaacgccgccatcaggaagctcgagccgcgcgaggccgagctgctgtaccggtggcacttcgccgccgtcgagttcttccccgccgacatcgacgccgtgctgtccaaggagctctcgctcgggacgttcctggccgtgccggccgggacgcggtgggagagcgtcgaggcgttcatggacgcgccaccggcgtcgtgggcagtgatgagcgtgtggaactgcatggacgccttccgcctcgaggtgcggggcgccccgcgcctgatgcgcgccgcggcggtcgcgacgcggctggtggaccgcgcggcgccgtggctcaagatcccgtccatcccgaacctcttcgcgcccttcggcctctacttcctctacggcgtcggcggcgccggcccggcctccccgcggctcgtccgcgcgctgtgccgccacgcccacaacatggcccgcaagggcggctgcggcgtggtcgccaccgaggtctccgcctgcgagcccgtccgcgccggcgtgccgcactgggcgcgcctcggcgccgaggacctctggtgcatcaagcgtctcgccgacggctacaaccacggcccgctcggcgactggaccaaggcgccgccgggccgctccatcttcgtcgacccaagagagttttaggaggattttagctttccgtttttccctaggcctttagggttttttcccgaccgtccgatctcctcccgcacatccgacggcgggcagtcgctccctagaaccagcagcgtcaccccaaacatgtgtcactcttcatctcgtcgtatttcccgttccattgaccatcacttttttttttagcttttaggtgtgaatacagtaatagtagtacctttttcccagctaaaaaaattcagaaaagggagctgcttaactgtaactcgcttgctactgcgtacttttgcctcattgccgtttacaaacatcctgtgcgcacagtacttgcatgtgtatcgaaaggcatcgacatggaatagacctgaagaggatacatgtctgttggctgttccaacgcaaccggcttattaccgggaaaaaaaaaaaaaaa

SEQ ID NO: 45370 - DNA, 957 bp, Oryza sativa
  Clone ID: PAT_MRT4530_48341C.1
atggggagggcgccgtgctgcgacaaggcgagcgtgaagagggggccgtggtcgccggaggaggacgagctgctgcggagctacgtccgcagccacggcaccggtggcaactggatcgcgctcccgcagaaagcagggctgaaccggtgcgggaagagctgtaggctgcggtggctcaactacctccgcccggacatcaagcacggcggctacaccgaccaggaggaccggatcatctgttccctctacaactccatcggaagcaggtggtccatcatcgcgtcgaagctgcccggccggacggacaacgacgtcaagaattactggaataccaagctcaagaagaaggccatggccatgcatcatcatcatcagccgccgccgccgcagcagcaacactaccaccaccaccaccaccaccgtgtcgccggcggtggcgcgcgcgtcacgctcgtgtcgcctccgcccgccccgcagagccaatgcgcgtccatgcagccgtcgccggcgtccgcctcctcgtccggcggcgacgcgtgcagcttcggcgccgccgccatgtactccccctccccgtcaacccagcaggcgccacaggcggcgacgctcgcggtcgcggggtacacctccgtggcgacggcggcggcggcggcggcggtggcggcgcagcgctcgccgctcgacgagctgatctgccaggtgccaccacctcccactactaccgccgccgactgctgggccagcggcgtgaccctcgacgacgtgttcttgcccgagctcgtcggagccggcgagttccccaacggcgacctcttcggcgggttcggcccgctgctccaggacaggtcgtccatggagctctccgcgtgctacttccccaacgccgcggcggcggagatgtggccggcggccacggacatcgtcaagccggccgggctgtgccacagcctgacatga

SEQ ID NO: 45371 - DNA, 346 bp, Oryza sativa
  Clone ID: PAT_MRT4530_48342C.1
tagcgaggacgccaacgagaccaccattcttcgtactgctgagtatctgtgcgagctgcctcgccaccacagggactggtgttgtactctcgctctagattcgtgcgcgaggacaaggacgacctactcctcctggtgtcggagcatccgccataagctggttgctagcggagggtttgcagagggtgcactcgggatcggctacggcttcggctcggatcgaattcaaagaagaggcaggaaacctaggcggcgtagatagtgccagcgcccctgtatgaaggggcatgtaggtttcgcaaggatttgtaaacaaaccatgaaatcgcgaagatacgaaggcatc

SEQ ID NO: 45372 - DNA, 2131 bp, Oryza sativa
  Clone ID: PAT_MRT4530_48343C.1
ccccctcgaggtcgacccacgcgtccgcctctagtttgaacgagggatcgtagagaggagggtttggtgagggagggaggaagatggcgacgtgcgcggcggacctggcgccgctgctggggccggtggcggcgaacgcgacggactacctgtgcaaccggttcgccgacacgacgtcggcggtggacgcgacgtacctgctcttctcggcgtacctcgtgttcgccatgcagctcgggttcgcgatgctctgcgccgggtcggtgcgggccaagaacacgatgaacatcatgctcaccaacgtgctcgacgccgcggccggggcgctcttctactacctcttcggcttcgccttcgccttcggcacgccgtccaacggcttcatcgggaagcagttcttcggcctcaagcacatgccgcagaccgggttcgactacgacttcttcctcttccagtgggccttcgccatcgccgccgccgggatcacgtcgggctccatcgccgagaggacgcagttcgtcgcctacctcatctactccgccttcctcaccgggttcgtctacccggtggtgtcccactggatctggtccgccgatgggtgggcctctgcctcccgcacgtccggacctctgctgttcggctccggtgtcatcgacttcgccggctccggcgtcgtccacatggtcggcggtgtcgccgggctctggggcgcgctcatcgagggcccccgcatcgggaggttcgaccacgccggccgatcggtggcgctcaagggccacagcgcgtcgctcgtcgtgcttggcaccttcctgctgtggttcggctggtacggattcaaccccgggtcgttcaccaccatcctcaagacgtacggcccggccggcggcatcaacgggcagtggtccggagtcggccgcaccgccgtgacgacgaccctggccggcagcgtggcggcgctcaccacgctgttcgggaagcggctccagacggggcactggaacgtggtcgacgtctgcaacggcctcctcggcgggttcgccgccatcaccgccgggtgcagcgtcgtcgacccgtgggccgcgatcatctgcgggttcgtctcggcgtgggtgctcatcggcctcaacgcgctcgccgcgcgcctcaagttcgacgacccgctcgaggccgcccagctccacggcgggtgcggcgcgtgggggatcctcttcaccgcgctcttcgcgaggcagaagtacgtcgaggagatctacggcgccggccggccgtacggcctgttcatgggcggcggcggcaagctgctcgccgcgcacgtcatccagatcctggtcatcttcgggtgggtcagctgcaccatgggacctctcttctacgggctcaagaagctcggcctgctccgcatctccgccgaggacgagacgtccggcatggacctgacacggcacggcgggttcgcgtacgtctaccacgacgaggacgagcacgacaagtctggggttggtgggttcatgctccggtccgcgcagacccgcgtcgagccggcggcggcggctgcctccaacagcaacaaccaagtgtaaccaatccagaagcaacgacgtcacagcgaaggaagaaatcacgggtttcaaggttctcccggttctcgatcgtcacgtcatgtatattatcaacataataaatttgatccccatatttgattgccagtttctgtttgggccaaatgcttttgccgctctctctggtgttgcaagactgtaaaaacactgtaggatggacgagtgtctttcacttttgctgggcttctcttgtgtacaggcatgcgtacgtgtcttagaatgtgtggtgtgaagggtgggaagaatcagaggttagggtttaattttcttttgcacaatggttactgctattattgttttattttgtggtcgaattttatcgtcataagggtgtggtggaatggtggtcaagataggtggctgtgcagggctcaaagactttgcgtgggtccttttgtcctgcagtgctctacctctctatcaaaactttggcttatttcctggaatctagtggtttgagagtgtttgttttaaaaaaaaaaagcttaaaaaaaaaaaaaaaaaaagcttgt

SEQ ID NO: 45373 - DNA, 625 bp, Oryza sativa
  unsure (1)..(625): unsure at all n locations
  Clone ID: PAT_MRT4530_48344C.1
gcaagtggagtgtgtcgatcaccggcgttcagaatttgatcagcttgcagaatttgccacagtaccagctatggcatggttcctcgatgtatcaactgccaccagcatctccttgaggccacagacaggttgagtgatggactctccacgccgcaagcaaccttctgtgatgacctctaattaatctgccgcactgtcttcgattatccgagaggagacaaagtgatcgattttcacgtaatacattttccaaactgctaaacagtattttttttaaaaaaaatatttttatacaaaagttgctttacaaaatcatattaatctatttttcaaaattgaagtaattaatactaaactagtcatgcgctaataattcgtctcgttttacgtaacttcttttattttcagttttttctcttcttctatcaaattccaatatgaatgcgaccgtgttgttccgcattgaatatctcaagaaataaaataacaaaatcaagaaaaatattagttttgttatgtgttggcgaccatgttttcctgagaacctaagtaatttttttcttcaagttactcaaaccaagtttataaattaggtcagcaatatcanncggnaacgaagacattn

SEQ ID NO: 45374 - DNA, 4246 bp, Oryza sativa
  Clone ID: PAT_MRT4530_48345C.1
ttttttttttttttttttttttttttttgaaccataaacaaggatacagtcttcgtttcaacaacacagaagacaaggatcatttctgtttttcaacaacacaagaagaccaggatcattacagcattgcagacttgccaaatgtggcgtaatcgttacattcatccatgtgttatacatgcagaatggtacatactacaatagctcaggagtcagcgtagctgtatttgtacaagagccctcgatataacaaaatcacagtacattgaatactttcatcaagttttctcatctatagacccatccttttgggcctcaagtatgtcgagcctttcttcaagcccggcatagaaacttgctgctgctgcttagctctcttctctcgctccctctccttctcaagccgtgcggcctcggcttgttcttgcctcagcttctccatctcctcctccatcgcggtcttgtcctccttctgcctcttcttatggtcgaggagcgaggtgtcggtttccttaacagagaagaacatagggcccaactctgccagccactgcgggtcaacagcggtgacgcactgcatgtactctttggtcgtcaggacaagctcatggtagacaacatagtcaggggtgtaaccaaggccgtagagtgcactgctggggtggaggtggcatggcatcccgttccggcagttcacatactccccgacacccttcaacctcgcggcattatggaagtatgcagagcagatggcttttctcaccacatcccattccatatggcatgatgtcagtgggatcttcagggttttcagtatgtccaatagctgtgaccttacttctcgagcctttcggagacccttgacatggaggaagtggtcattacaccagtctccacgatattggttcgacttccattgcaggtagacattcagaagagttaaatgatcagattctggaacaaaaaatttctcccttgctgcatcactctcctctgctcgatctttgggacgaaagaagactgagggcaccgagagcattgacacaatggtcagtacttcatcaaggcactccagctgttctcccatgagaagcatctttgctagagttgggtccaacgggaattcaaccatcttccaacctattactgtaagagcaccaacattgttcaaggcacccaacacccagagctggtacatggagttgaggatgttctcctgcgggggtgggtccatgaagtcaaagtcaagcaagttttcgactttcagagatttcagtagcagaaccacattccccagattggtcctttggatctcaggcactgggttaggtagcatctcattctggtaagctgattctgtgaacagtctgtagcatgtgccaggaccagttcttcctgcacgtcctgcacgctgatctgcagctgctcgactaactggaaaaacctgaagagcatccatacccatccgtggattgtacaccttcatctttccatacccagtatcaatgacataaaaaataccatccacagtgagcgaggtctcagcaatgttggtagcaacaatgcatttgcgagtgccctcttctgccttctgaaagattttggcctgcaggtcagcaggcaactgcgagtagatgggcaagatggagagcttgggtacagtcttggtggatgatgatatcagctgctccaggcgctcagcaagcgcatagcaggtagcctcaatttcctcttgccctgtcataaatataagtatatccccagggccactggttatgtggattgtcatagcctgcttcactgccgcttccacatagtcttcacatggtgttttgctgaacatgatatttacaggaaatgtcctgccaggaatatggaagacaggcactcctccaaaaaattttgagaatttgtccgcatttagggttgcagatgtgacaattagcttaaaatctcgtcgacgtgcaacaaccttcttcagtatgccaaacaaaacatcagtattgagtgatctctcatgtgcttcatccatgacaataacacgatatttgtcaaggtcagcatctttcaaggtttcccgaagcagcactccatctgtcatatactttattatagtgttgggactagtcatgtcctcaaatcgaattgcatatccaactttatgtcccaactcagtctccatttcttcactaactcttttagcaacactcatggcagccacacgtctaggttgagtacagccaacaatgccggtggtggtatatccatcctcatgcagatactgagtcagctgggtagtcttcccagagccagtttcaccaaccaccacaactacttgattttcacgcacaacctttctccttgaggatagctgcataggtgtactacaatcatcaaaaccatattcaaaatattctaccgatttgtttttgaataatttacactgtagcaagtcatcccgtacagtaaatatcggaagatattgcctctgttgagaaagagattttgattttgcaaagtcgctaacagcttctgcttttaccttcatgtgctgtgaaaattttgcttcctctttaaaatcaatctcaccttggtcaccaacagtagcagtatctgcatcaacctgttcagccgttttctcaacacccaaaatatttccaagcttagatccagcgagctcccaaaagcgttggcgtgacttattcatgctctgtttttcacgaatttccctgaccaaagcagaacctttgcgtgcaactattgccatatcggaggttgggtccttcagtggcattacaggttctgcttgttttgtgaatacaactcgcccatccaggaatgggggttttgtgtcatgaacaagaagtattactttcctttcgtcctcatcatcaaattctgtctgcacctctgttcctctgacagctccagatctcaacaactgtctatcctcccattgagcattatcagcagtcatctgtgataacttcttgctctgagcaagggtcatcagactgccatctttacgagtcagccgctttggtaattgtgcttccctctttttgtaggaactatcatcttcaagatacatagaattatcaccatcaaacatggtgttgtgttcttcacaatcataccacgcacgatcagcattataatccatctcctgcatcatttcttcagatatctcatagttgccatcggcatctgaggggcttctatcagattccctgtcatttgatgcagatgtagacgaaaaagtaagctggtgggatcttccaccagaacgtggataagaagacccttttgatgaaccagaagcgcgaattggtgcaggtgatggagatacgttatcccatggggatgctgcataacgtggcgtattcccacctagccaaggagacactaagcgtgcatcaggggatgcagctgcaagcataggagatggtgaaggatgttgtctatgggaatttgagcgatcatcacggtactcccgacgaggtgtatcttcccattcccatcggccactgtcccaatcagatcttgcaggtgttcttgagcttcttgagctatgctcatgccgacttcgcttgttcatgtagtcaacggatgtagatctctcacgttcatcacgcctattatgcgattctctatcatcatggtgtccccgccttccactgctactatagccaatggatgcagatctttcccgttctccatgtttatcacgggatcccctatcctcatagtcatcatatctacgaggagtgctacgagaatgggaaccttgagaacttctagatttgtgggtatcttgtcgataagatccatctcggtgactgggtgaaggaccccttccatcctcatcagtgatggtaggttctttgaaagaggttctctcatcagagttggctcctcgatagcggcgagaaacactgccacgatggccactgctcaggctcttctcatcactctccgcaggtcccggcttctcatcttcatcgattgaagtagcagctgccactaccttctgaggcggcggcttgaaggcattgccgccttctgcttcccgtttcctgtgcgcgaggaggtccaaacctagggcggacttccccggcggcggccggtacatgaccctatccctgctcggcaggatcagcccctgcgcgcccgtgtcgtcctccggccccagggttgtcatcgtcgcgtccatgtccccctggaacaaagagagaggaagcgccat

SEQ ID NO: 45375 - DNA, 603 bp, Oryza sativa
  Clone ID: PAT_MRT4530_48346C.1
tttttttttttttttttaaagttcggctccttgcttttgaactccatggaaatttgacatgtatacatgacttagcaacaacaaactaaacagttttcaaaagtagaacacaatcatttcagagaaaaacaattgacgggtgttccagaaaatatactcctatttgctaagtcgtaatatggcagctctgcaaattgcccccttgattaggagggcagaaggaacttggattggatacacacattcccaattaacactaacaaaatatcattctaacaacggcagcaggcatccattctgcaactacatgtcacatgcagtctcaacgttaagccttctgacggtatatagttcccagggaacgaaaatctggaaacatgcagtcaatgctaaccattcctggagtctggcctagatgttgtgaacttgcaataaacctaaatctcagatgcttatgtactgatttccgtaactctgaagaacttcaaaaactgtaatttcaaggaatgggaaacactttgagcatcccacaaggttcatcatcgtagcaagtgtcagggttcatcaccatttttcaacaccaagtgtccatcttcagtcaag

SEQ ID NO: 45376 - DNA, 263 bp, Oryza sativa
  Clone ID: PAT_MRT4530_48347C.1
acgggtggggcaagatggaataagagcattggacacgaaaagacaccaaaacagactatagaggactagcgctacaatgaaggactcttaagagaacaaagtacggcggttgcgaaaaaggcactgccggcatttatctttaacaggggagagctacggcggaatgaactacagacaaaatcacgagcaaacgctaacagaggctccaataaacaacaggcgagggagaaagactcgccacatcaaggatgtaaaacaaccac

SEQ ID NO: 45377 - DNA, 253 bp, Oryza sativa
  unsure (1)..(253): unsure at all n locations
  Clone ID: PAT_MRT4530_48348C.1
ggggtngctgngcctctgccctcctcctccatcgctgctcgccgcggccaggcttgggagcagcggatatgccgccgacggcgctcccgggcctagggcggccagatcacgtggcggcggtccccagcggtgcagcgacgacggcagaggcgtcagctgcgtcattcgtgagcctgagttcttgagcaccgaggtaatggtcagcctgctcccctttgatcgggtctcatccttcgcgagcctaagatcttga

SEQ ID NO: 45378 - DNA, 311 bp, Oryza sativa
  Clone ID: PAT_MRT4530_48349C.1
tcttatgttcgccggcggcgcggatggcggcaacggccacctgccgcggccgcggagggcgcggcgcggcggcggaggcggatgaggaatgttgtttactcctttgtgaccgactactccgccctgcaccgactactacttggcctacttcaaggtgtactcccacatcgttgtccactatgagatgttcaaggaccatttgagaactaattcttacagaaatgctatcatgcattaccaggatttaatttcatgcaaagtctgtttttgttgtgtgctgtggcactggtgtactttttttattttgtgct

SEQ ID NO: 45379 - DNA, 444 bp, Oryza sativa
  Clone ID: PAT_MRT4530_4834C.1
atggcgccggcatcgacgacggcgacggcgacgtctgccgcggcggccgccagagccatctgcgtgctgctgctgctgctggtagcggtcgtcgtggtggcggggcaggcgccagagccggagggcgacgatcaggccgcggcgatcgaccaggcgggtggcggcggcggcggcggcggcaacaacaacggcacggccggccgcgcgagaggcggcggcggcaacaacaacggcaccgggcgcgcgagggacggcggcggcgaccgcgaccgtggcgcagacggaggcggaggcgggcggagcaagctggcgagcagcatcgactgccagatctgcgaggcgacgtgccgggtgaagtgcctcgtcaacagcctcttccagtggggcggatgctaccagcgctgcaggtccgacaactgcaacgactggtgcaccagaggctaa

SEQ ID NO: 45380 - DNA, 401 bp, Oryza sativa
  Clone ID: PAT_MRT4530_48350C.1
gaataaaatgctttcaatttccaatagttgagaggacagaggaaaagcaaacaacttcttcaatggaaaacccaaacaaaaagctgggaaaaagaacgggaaaaaaagggactttttttttccaaagggcaccacatcaaggggggaaccaaaaaataccccttttcttaggaatgacacaaagatgcttgggccaaaaaaagggcctttcctaactttttggcaaaaacgggcttcttgttgggcgaaacttggcccaagagaccgtgcttgcaacaatgcgcccctacggggcgggaggacaaggactgcacggcccccaccggtgcgccagcgggggtgggagaggactacggttggccgggcgagctgctgcgggggagccggcccttgaaggaacc

SEQ ID NO: 45381 - DNA, 1218 bp, Oryza sativa
  Clone ID: PAT_MRT4530_48351C.1
atgtggcgggcgaggcggtggccgtggccgtggcggtcgcagcggcgcgcggcgaggatgctctcgtcgggtgagccagcggcggggcggcggagggtggcggcgctgtgggggaacggggactacgggcggctggggatgggggcgctggagtcgcggtggagccccacggcgtgccccttcttcctcaccggccgccccggcgacgacgacgacgacccgcccgcctccctcgcctgcggcggcgcccacaccctcttcctcaccgagagcgggcgcgtgttcgccgcgggtctcaacgacttcgggcagctcgggataggctcctccgtgactcattccctggtactgagcttcttgtacatcatgcctccatgtgaaattttcatctacattgagcctattgaagtttctggctttgatgagaaagttgtggaagtttcagctggcaaccatcattcttgtgcagtaactggggcaggaaaagtagtttctaccccaagaaaggtggactgcttggctgacgctagagtgaaaatggttgctttggggtcggagcattcaattgctactaccgaggagggtgaagtcttgagctggggagctgctggtgctggcaggcttggacatggacataaaactagcatactgggattctctataactacaagtgaatatactccaaggttgatcaagaatcttgatggtgtcaagattaaaaggatagctgcgggaatgctgcactcagcttgtatcgatgaaaaaggtacattgttcatattcgggcagaagactgagaaggtgggatttggaagatcaggtgatgaacttagaccaactgttgttgaggagttgtaccaatgtttatcaaaattgaggatgtttgcttacattaaattccttaccagtggtacagacatggttcgctctccggaggttctgaagagttctttatttaagtttcctgtatctaaggtatcatgtggttggaagcacaccgctgtaatttcaggtggagatatttacacgtggggctggggaggtgctaacggtacttttttcgaagagggccattcttctggtggacagttaggacacggaaacgatgttgattactttgaacctatgatggtggaattcggcaagaatgcaagggccgtccatgtgtcatgtggtttcaatcatactggtgcaatatttgaatacagcgagaactga

SEQ ID NO: 45382 - DNA, 333 bp, Oryza sativa
  Clone ID: PAT_MRT4530_48352C.1
tgacagaaaacacgaggcctgggagatctgcttaactccagtacaggtccaaagctcgcattcgggtgtgctagcgtgccagttgatttgatcctgtaatcaacaagaaatagaaccgagaaaccgcagttaaatctataaatgatagtcaatcggctaggactctatccatgtgcggcaatcatcttgaagcatatatgttgtacaccaagtcgtattgccggaatcggctgtatcacctaacccagtctgattcagatttagtcgattttagtcgtagccgatctggactccagccgattcttactctgttcccgcaacaatccttatttc

SEQ ID NO: 45383 - DNA, 251 bp, Oryza sativa
  Clone ID: PAT_MRT4530_48353C.1
attcttatcaagaacaaatatggatcacccatagcttcacatgccaaataggatgaattaagagctaaggtggacctatcgaaccacgattctggcaaaactcatcacaagacacggacaaaggtggaagacgagctggtggcaccgcagcacctatgaggcagaccatatctagaaggtacgttacaagcacaaagatcttgatctcgtaccagacttcgaacaagatgaatagctccagactgctgaac

SEQ ID NO: 45384 - DNA, 805 bp, Oryza sativa
  Clone ID: PAT_MRT4530_48354C.1
cttgtggggggtttttttttttttttttttttaggtgtagaatgctcttccggtctctttattaaggactattgtctgaacaacagtatttacaagcttttaacatataggagtatctcgctgaaaaacaaaaaaacatgtaggagtagagtaagaacaagaccagaagctcataattatgactagaggccaatgaggtgttaattctggggagatcctaatctgtcctgcaagtttcagcaaagagaaaaagaggatatgcaaaaatcttgtcgtttcagaaacataagctatactgaatttttttttatcttctgggcacaaagggtagctccaagcctaccactctgtcaagatggcgaccaccgatactgctgccagctcccagttaagcttgctgcaatttcagatatcagcatgctccacaggacgatgttgattcggtgtttcttgattctccaggggcatgtactgagccatgatcgcacgaatctctgaatccatgtaactccgtagccgatatttgtatacggcatatgctccaattccagccaaagcgaggccaaagaaaataacccaaaggaagccccagcccactgacgaagaagcaactttgctgatgcaagtgtcatgctctctcatgtataacatattacttccaccacagctgcactcatagcttccccatgtattctcacaagagcagtccttgcactggcagaaaagcttgtctttgcattcatcaatatcttcacaactttttataccatcacccttgaaacctggtgggcatttgcagccttta

SEQ ID NO: 45385 - DNA, 1081 bp, Oryza sativa
  unsure (1)..(1081): unsure at all n locations
  Clone ID: PAT_MRT4530_48355C.1
cctttttccccccaaaaaaaaatttggggggttggggggggggggtttccccccccaacccccaaacccaaagggggcccaaacccccggaaaattggnccaaaaaccaaaggggggcaaaccaaagntttttttccccctttcccaangcccaaaaacccccaaaggggcccaattgggcccctttaattgggggaaaccccccttaaatttttaaagttccttaaaccccttggnaaattgggggttgggggttggtttttcccccccccccaaccaaanaaaaaccccaaaaccccttccttttccccccttcccggccaaaaccccccccaaangggctttccttttccccttccccaacaaagnccccaacaattggggctttttttccaaaaccccttggccttaatttncccctgggcccaattggtttccnccaaaaccccaaaatttggnaattcttttaaaattggcctncctttggaaaaangggttcccaanggaaanaaagggggnaaaaaagnccaagggngttcccctcccncccccccccccttgggcaaacccttaactttggctttgnttttccngggnccttggggaaanaaanggttttcccaaccnttttgggttggcctncccctgggccaanccaaaaaaatttgcttaaccnaaaaaananggggtttctttggcctcccaatcccttttgnaaaaccaaaaaaatccaaanccttttaaccggggaattgnccctttnaatccctttggntttttgggggaanaaaaaaaacaaatttccttttnggggcccccntttggcaaaaaanggnaaacaaantttccncccttttnaaaaancttgaaanaatttccaaaaanccncccanggggcccactttaattttttnttttcccccaaatttaatnaaaaaaaaaaaaccttgntttggcctttttggcctnaacaaaggnaaaaaattttgcctncccccccncaacnaaaaanggggtttttcaaaggnaaaaacttnggttttccncccncccaattttgccnaaaaaagnnaananaaaa

SEQ ID NO: 45386 - DNA, 943 bp, Oryza sativa
  unsure (1)..(943): unsure at all n locations
  Clone ID: PAT_MRT4530_48356C.1
tagcaatccaacaacaatagaagcatcataatatcagatatatatnagctactaccttagactattaagtaaagcatagcaatagcactacatagcaacaagattanaagatacctactataagtacaaaaagtaaataaaagcaaataatacaaactaacaagtcaacatacaacctaactaacagacaaacaaagaagcaacaaacaccatagacaaatagaagtatcgtaaaagagcnaaacagataataagacaataaagatagagcaaaaacacacactaaacataggacaaaacacaaagacataaacagataatacaaaatataagaatanaaaacaanacacaaaagatacaatagacaaaacaagacaaataatatagcacaaccaagcaacaaaagctaagataaacacacaacaaatcatacaacataacaccagagccacaatataagaataaattaagatnaacaaaaagacagaaatntagataagaccacaacaaaagacataaaccacaacataagccaagaccaaaatatatacagatagagatagtacntaacatatatagactacaagaacaaacaaagaccacaaaancaacaaaacaacaagtatagaaccattcacaccttggccacttccaatacttgtagagatatcataacaccataaaacataacataataaaaaagcntccccccanaagacgaccatatagnacaacatagntataggatagagatgatcataggataccatagaacataaggtaaccacaataataaaataagtatccgtacttgttacaaaaaaataaaaagttcaatacccattcaatcactgttgatgacctggtttgacacccttacagaggtcactaataaaattcttaaaaataaaaaatcaatcataaaccctaatataaaaaaaaa

SEQ ID NO: 45387 - DNA, 1264 bp, Oryza sativa
  Clone ID: PAT_MRT4530_48357C.1
agagcaacggcagcgaatgtgcttatggaatgtgcctgtgatggggagagggaagtcggtgtttgcttccaaaaacctttggttcaagagcaacggtagcagcaatggtgtaaggaaggatgaggcggcggcggcgaagagggagcagcagaggtgatgggggagagggaagttcggtgtttgcttccaaagacctttgttcagaagcaacgacagcggagaggtagcagtagaggtactacggccaccaacaacaggaagtactacgaccaccagcagcaggaagagggagaacgacgacgaaggtacggtcaagcgactacgatgacgccaactactacggggcgacgccagcggtgagcaagacggatagccggccacggctagctggcggcggtggcggagagggagcagcagaggtactacggccaccagcagcaggaacgggggaggacgacgacgaaagtgcggccgagcgactacgatgacgacaactactacggacggtagtggtacgccgagcgtgacatcaaccggagggcctctgagttcatcgacagggtgcaccgcgggatgctcgccgacaccggcggtgagcaagacggatagccggccgcggctagctggccggcatgtgttagtccgtagtggtacgccgagcgtgacatcgaccggaaggcctccgagttcatcaacaggtacaccgaaggatgctcgccggcgcactacgacgacaacaactactacgggcggtaatggtacgctgagcgtgacatcgatcggagggcctccaagttcatcgacagggtgcaccacgggatgctcgccggcgccggcggcgagcaagacagatagccgggcacggctagctagccgacatgtgttagtccgtagtggtacgccgagcgtgacatcgaccagatagccttctagctggccggcatgtgttagtccgtagtggtacgccgagcgtgacatcgaccggaaggcctccgagttcatcaacaggtacaccgaaggatgctcgccggcgcactacgacgacaacaactactacgggcggtaatggtacgctgagcgtgacatcgatcggagggcctccaagttcatcgacagggtgcaccatgggatgctcgccggcgccggcggcgagcaagacagatagccgggcacgactagctagccgacatgtgttagtccgtagtggtacgccgagcgtgacatcgaccagatagccttctagctggccggcatgtgttagtcc

SEQ ID NO: 45388 - DNA, 291 bp, Oryza sativa
  Clone ID: PAT_MRT4530_48358C.1
tgtgtgatgagagccccctcctctccatggggcgggccctattcctgcctggggccaccttcgccgccaccaccaagcacatcgccgtcctgcacccgcccgtcgcatccgcctgcaggccccacccgcccaggctgatcaggtgcggagcctacaacacgcacgccgaggagtgcctggcatgttattacagaacccgggttccacggcgaaaatacatggaagtgggctagataccctaaagctgtagatgaaaaccctgttctgaaggcaaaacacgatggccacatt

SEQ ID NO: 45389 - DNA, 279 bp, Oryza sativa
  Clone ID: PAT_MRT4530_48359C.1
atgaggggcgcgcttcggcgtgtgcttcgcccggtcatgcgggccaggcatcttgagcttgagataattgtggcgggagatggcttcgaacttgttcaaggttgcgcgactgaagatggcattatagttgtatgggatgtcgacaacgtcaaacaggttggcatccccatcctggcatatgcttcggcgaagatgacgtcggtcgaacttcctccgtcgactatgattcgccggacttcgaagccaactacctcggccgagatcaccagggggtcttga

SEQ ID NO: 45390 - DNA, 915 bp, Oryza sativa
  Clone ID: PAT_MRT4530_4835C.1
atggaggcgggcccgcccgccgccctcgctgacgggtggggcccacctgtcatcgccttcctcccgccgctcccgccgctcgcccgtgccctagcgccgccgccgccgcggattccgccgcatcccgccgtccccgcgcgccataatgaggggggaatcattccccgcgattccctctctctttccccccgtttttccctctctctctccctcggattcgtccggaatcgctcccgcaaacctcgccggcgccatcaatggcggccgagatctccgcgcccgtttcctccctctccggccgctctttccttcccccggcgctatttaaacgttgcccgagctccgctcttccgtttccgccgctcgccgctcgccctcgccgtcggattcgtgctcgcgccgtgctccgttctctccgccatcgccgccgagctccgttccgccgccgccgccgctccggacttcctccttactcggcgacacctccgtccgcttcgccgtgttgccgccgaccccgtccgccgctccgctccgtccgccgaccgtcggagcgccgtcgccatcgtcatcccgagccgcgccgccgtcttcctccgctccggccgccgtttccaccgccttcgccgtcccggggtgagccgaggaccgctccgttcgtttcccccttccctcctctctcttgggcgccgctccgccgcgccgttggtcgccggcggtgaccatcggggcgcgggcgcgccgctcccgtcggccgcgccggcgaggccgccctcgggcgcgccctcgcggctgccaagtgggcccggccgtcagccgcccgcgcccgcggacgctgcagcttcggaagatccgctcttcgtggaagttgaagccggcgtttgggaaagcgagcaaggcaagtcacatcatccttga

SEQ ID NO: 45391 - DNA, 219 bp, Oryza sativa
  Clone ID: PAT_MRT4530_48360C.1
atggacatcagccaagcccccgaggggcaacttccttcatacggccagcaccagaactccttggaagagactgcaacatatcatcgttgccaagcgtcgccgcaccccttcagcgagcagcttcgacttcatcagcagaaacaaccgaagagcgtgtcgcccaccacaggaaagaagcggacccaagaaggcgaaggcctcgccgaacacaaggcatga

SEQ ID NO: 45392 - DNA, 2958 bp, Oryza sativa
  Clone ID: PAT_MRT4530_48361C.1
atgtgtgatgtaaatgaaggtgtaaatatggttcaattgttatctctaatatatacatatacatctctgtacacaaatgcaggaacttctgaagttagcaaagagcaaaaaatctcgaaaatatcgaaaggatcaacatcagctccagaatcagcaaagaggaagataacaactgtagaaggtgtaaatatggttcaattgttatctctaatatatacatatacatctctgtacacaaatgcaagaacttctgaagtcagcaaagagcaaaaaatctcgaaaatatcgaaaggatcaacatcagctccagaatcagcaaagaggaagataacaactgtagcaggtcaagacaaagccctgattgagtcatacaacaaagagatagtagacaaacataatacatcaaatgaatcagatcttgtgcagaaggagatggacaaatatcagaagcaaaattcaaatcattatggatatcctttgtatgatgaattagctctgtggcaacaagataacatgtcatatactggtgttaacgaccaaatttggttgagctgcatcggtttcgatcttcaacaagaggggcaagtctcaattattactggaacaccaaaagcattccagccaagtgaatttgagtattcaatgcagtcagctgtcaatacaacaagaggagataatagatcagctgacataatcatgcagggtgatcaaaatggtgattcagatgattcagagaatgaacaaaatccagtagacccatggtcactagatattttaagtatggctgcaaatgacaaggagcaaacaacaatggagagtctgaacaatgggccagaacagaacatagaaaagggcacaaatgaaattgctgaatctgatgaaaatgaagaactaactgaggaagatataaacaattttttggaccaggaacagcatgaagcattacaaggaaaaacactagagatcaaagcaagtatatacctcaagttggaatgcagttcaaaactaccacaccacaagcaaacaataaatggggaggtcaccagagtaacttttaagtgcaacaggtttgggaaagagaattcaaagaaaaagaaacaacaaacagaggagacagttgtttcaaagaggaatacaaatcaggtcattctcacatattccttaagaggaggaatgacaacactgccatacaccaagaaagacataagcaatgtgagaacatcaataaacagagaaactagcagcaatgacatgatgcaagcattggagtttttcagaagacaacaagagaaagatccaaacttcttctatgaaatagacttggatgagaatagaaaagtcagaaatctgttttggactgatggtaggtcaagagattggtatgagaaatatggtgattgtgtcagttttgacacaactttcatgactaatagatataatctaccattttcaccctttgtgggtatctcaggacacggcaacacaattatttttgggtgtgcattcttacatgatgagacaacagagacttttgtatggttgttcaatacatttctcaaagctatgtcaggcaaacatccatgcaccattataacagatcaagacggggcaatgaaatcagcaatagctcaagttttcaaacagacaacacacagaaactgcttctttcatataatcaaaaaggcttggaattcatctggcaatttattcaagaaagaggaaaacctttatgatgaatatgatgacattatcaacaactcagtgactgaagaagagtttgagtatctatggaaagatatgatagagagatatggcttgcaacacatacatttcttgacacatatgtggtcaatcagaaaaaggtttatacctgtctatttcaagacaaatttctgtccattcatacaaagtacagctttaagtgaaggaacaaactcaagatttaaacaagatgttgggccacaatatagcattactagtttcttgataaagtatgcaattgtgatggacactattccaaatttagagcagcaggatgatcatgagtctagaacaaaaaggccaactagactatggtctcattactacatagagttacaagcagtcaaactctataatgccaaaatattcaagaagttccaggtgcaacttaaaaaaacaacaagactacaactcaatgagatagacaaattcaaaacctatgaagttttcatagctctgaatcagacaattgaggtgtatagacgaagaaagtaccttgttatgatagacttggagaaggaagatttcagttgcatctgtgcaatgttccaaaaggatggattactgtgttcacatatcttgaaagttatgctccacaacaacctcagcagtataccagacaaatatataattcagagatggagaaaaaaagaagaaacatcaaaactgaaatctggcaatcatatcatacctgtttcagactgctcaactctcaggttcaatatcctctcaagaagaagtgctgaatttgcttcaaaaggtgccaaaacaactaaatcatatgagttcatgatgcaacaatttgatatgattgataaagcttggaaaaataggagtccagaagagacaaggcaacagcaaagcagtacagaaaaccagaacaatgcaaattcagcttcagaagttgatcatgttgaagtagaaaatacaacagttaatgaacttcagatattggatccagagatagcaaaatcaaagggaagaccacaacagcgatacaaaactattagggaacaaatagaagaaaaacatgtgaatcactatagtcactgtggaagaacagatcacacatttccaagctgcccattgaaacacatagagttcaatttagcaaagaaaaaaaaggaaaacaaaaaaccaagtggaacaggaaaagattcaagacaacatgttgaagaaattaaaaactccaagtaa

SEQ ID NO: 45393 - DNA, 501 bp, Oryza sativa
  Clone ID: PAT_MRT4530_48362C.1
atggcggagggggaggacgccgccgtgctgccactagaccaccgcctcccctcccgttggatctggcagaagggagggccccgccatgctgccgccgttgtagatggaggaggaggagaggagaagagcgagcccgctgccgctgtcgccgcctcccctcctgccagatctggtggaggggagggctcctccccgccagagaggccaccgccgcctcccctcctcgagcccatcgcctgctgccaactcctcgagccgtccaccgcctcccctcctcgagccaccccgcccgccgccgaccccgctggccccgcctaccgccgaccccgcccgccgctgatgcctcccctcctgccgccgccacctcccctcccgccggatctggcggaggggagggcgccgtcgctgctgccacctctaccgacgagcagagaagggaggaagagagagaagagagcaagagaagggagggagagcgagacaagagagaagagacgatga

SEQ ID NO: 45394 - DNA, 620 bp, Oryza sativa
  unsure (1)..(620): unsure at all n locations
  Clone ID: PAT_MRT4530_48363C.1
atgttctccggcgagtggacgccgccgtgcggcagctgctgcaccaagaagtacgccagcctcgtccaaatcccatggagggtcttctgcaagaaggggtgcgacgcggacggcgacacctgggacgagtgcataagtaaatgtacggaaatatgctacaaagatcctgttttggaagatcaccagtggagtgcatatatcgatcggtctccaggacaggatagctactccttggagtgcttcaatgcttgtgtttctggatgtggatataggtttgacataccagcggagaaagtggagcaaatcaaaccaaacaggccatccaagccaccaccaccaccacctcctgcagtagagcgggccacgaattcagaacctgctgtgaagggtgaagacgtgccttgcacatcagcataatagtaatctatgcagccccaaattttgtgtaacttttggtgcttctttccctcatactgactccttttttttctcttttctgggctgtttctttgcaccatgtgcttgaaattcgcagtccaccttaggctgggctagatgctaacaagatcttaacgataaatcccaaaatcttatttatattttcatatgctggntcatcc

SEQ ID NO: 45395 - DNA, 505 bp, Oryza sativa
  Clone ID: PAT_MRT4530_48364C.1
cttccttttttttttttttttttttttttttttttttttttttttttttttttttcaattggaaaataacaattcccaacatcaaagggaagctaaaggaacccccaaattacaaaaggaccccaacccaacatacaaaagggccaaccataggtggaaaggaacccatacccaacctagttagggaacagaacaaccccatatgaaaaggatactacgggaaaggcaagcgggaccaagaaaaaataaaaaacggctacggaaaacccccccagggttaaaaaagaaatggttttaactaaaaaaaaacttaaaacaaagggcttaaaaagggggaggcccaaaaaggttcttgaaaaaaatcttcaaataaattccccccaaagtagccaaaaaatttcaaaatcaccttcacaaccttgaaaaatggtccaaaaaaacggccaaatgaatggtcaaccaaaaaaactttaggaggggtcttcttagttacaacaaacccccc

SEQ ID NO: 45396 - DNA, 321 bp, Oryza sativa
  Clone ID: PAT_MRT4530_48365C.1
atgtgctgcgcctgcgcgtggtcgtggacgaagccaagccaagccaacgcaaggcaaagcgcagcgcagcaagaggaagaggaggagcagtcactgttggagttggttggtatcgccgcccgcgcccgcgcccgcgcccgggacggccgatcttatcctgcatccaatccgccgctcgctccctcgctcgcttatccacaacaatactcccgcgcgcaacagtcaacacacacacgcgacgcgatggatggagataacacaactgtagtagtaacggatactgccacccttgacactgttgactttttaacacatgtttga

SEQ ID NO: 45397 - DNA, 139 bp, Oryza sativa
  Clone ID: PAT_MRT4530_48366C.1
acccacgcgtccgcctgctcccacttcacttggaattcgaaatccacacgagcgcggcggcggcggcggctgctatggcgggcactattaacttggcgtcggccacctcgtggttcctgctggccggctggaacggcgg

SEQ ID NO: 45398 - DNA, 810 bp, Oryza sativa
  Clone ID: PAT_MRT4530_48367C.1
atggcaacgcctacaacggcggcggcggcgcgttcgccgagctcctccactgctcgaacaccaacggcaacaagccattgcaacatcagcaacagcaagccattgcaaatgcaacatcagcaggagcagcaagcaggcgacgcttgcttgccccacctcaagatgatggcgatgccaccccacctcgcgttctcgcaggaccagcagcacgccacggtggccgccttcgatcagcgcacacttcagtccaatgttgtcgcagcttcgctgtggccgccgccgccgtcgcagcacccctgcctgctgcagaggttcgccgccgctccggctgaggtcgccggcctcccgttcatccttgcaggcggcggcggcgctgctgctactgctccggcggcgacgaccaatgggggagagcagaggctgcagctctgggactttaaggagggggagcaacgcatgacgtcattcgccacaacgcccaacgtccccaacaccattaccgtcgcgactgtcttgcctgcggatgcaaataacatgtggaacgacacgcaagccaacactgcaagctcttccctcgccgtggcgccactgccaccacccttcccatttcctaggctcgagtctgacgcggctactaaggctgacggcgtggcattcgcctccgtgtctctccaagactccggcatggcagtctcctcactacctccattgaccaaccaagattcgcagcttctcttcctcctcgtgctgccgatatattgggagcaacagcaacaacaactgcagtgccgatatattcttcaacattag

SEQ ID NO: 45399 - DNA, 369 bp, Oryza sativa
  Clone ID: PAT_MRT4530_48368C.1
atggagggcagtcattggatatggctgaggggaggcgccgcccaccgccgctccatgggcgtcaccgcctgccgcctcccctcctgctgcaatacgtcgctgttgcctcccctcctgctgcaatacgtcgttgttgcctccctcccgcctccacgccgtccgccaccaccgtgcctcccctcctgccggatctggcggaggagagggcgcccgacgttcctcccatacctgccgggccgttgccgccgtcgccgccctttctcccgcctgatctggcggagggagaacgccttcgggcgggcgcggtttttccggcgcgcgccactgacgccgtcgacgctgcttcttcagccgccacgagcgagatag

SEQ ID NO: 45400 - DNA, 1420 bp, Oryza sativa
  Clone ID: PAT_MRT4530_48369C.1
tcagtctcttttatcatcctctcccctgatttttcctgccaaatccgcgaaggctacgtggatcgaggaaatgtcgctgttttcaggctctccgttgagaaatctcagagagttttcagctgtggccacattcgattggtcgaagtgcttgtgaagttgtggtaagtgcttcggatcgctgtataggttgttcaaatctcgttgttgcctggtatatgaggattgcggtcgtgatgtttttctattgctgttcgtgaaaataagatgatattcttctcttaaagtcttgaggttgagcctgcacggctgcacgctaggtgtttgatgaaatagctgcgtggatagataagccttagccatgtccaactcaagctcatgctcatgacggtgatctctcactcggtgaggcaggctgtccctttcctttttgagaacttcttccaactcataagctcttgattctgtaaaagggaatgccattgcaccatattttgaaattattctccttccgtctgttttgaacactttaccatctggtccaagtatcaagagtgttgggatgcctttgatagtgaagattctactgagttcttgcacagttgtgtcagaataggggatagcaaaccatggcattgcactcaggcttgcttggaattcttcctcattgcggtccatggaaatgaatatgacctggaaattcccaggtctcaaggctttcagctcatcgtacgcctccctgagttgtttagtgaaggcacggcaaggtgggcaccagtgtgctccaaagtacagtccaattgtcttgccattaaggtcagatataggagtctttatgccatctgcacttatgacatattctctttccttgcatccaagaagttgcagaagattacctccttgtctcctggcatcatccataccctccagttcacttctcctctttgcaccaaaggggtaggcatctactccatactcctcaaccagcttcactgcatcctcttcgactcgaaatccatgagatagcgttgttgacagaggaatcaatgctgggatatgctcaatgtcaaattgcacacataatttttgccttaggccagtgtcaaaaggcaaggcaagccatggcatgcctttgaagtagtccaagaagctgatctcgtcgcggtcaagtgatatgaagattatctccatattcttgcaagtattcctgagtttcctgtagatttggagcaactttggggtaaagttcctgcatggcctgcaccagtgagccgagaagaagaggcagattctcttcccttcaatggacgacagaggtatttcctttcctccattggagagaagagttccaactccagccaactgtggtatgctcacatatttctcgcctgcttcaacaccttctgccgtctctcccatgtgc

SEQ ID NO: 45401 - DNA, 6162 bp, Oryza sativa
  Clone ID: PAT_MRT4530_4836C.1
tggagttcacagatggaaggagtcctactcggatataactgggtcgtcattgtatcgtaccgggtccgatgtctccgagtcctacttggagaccagttgacctgcggtataaaagggacccccgggaggacctaaggcatcgaatcttaccgccaacacatccaccacagcctacgaaattctcgtaccggcgtaccccaataccctctatatccgatctacgggtatcccccgtcgacagtggcgtgccaggtagggggacttggtgctcaaggttctactactatgacatccagcttcgtcgacaacaacgtcaacaccaacctcaaccaaggagttcctacttcaacaatgctggtaaggactcaagtcggcgaaatcgtcttcccggtttacaccacggtgccgatctcagctggtccatcaatggccggaaacgagaacgcagtggctacaactcagggcgattccatgttgaaggatcctcccgccgaagcggagatcagaacgtcgacgacatccgagcccgagaaggatcctagtgcggccaagccttgtctttccgacaagaatcacgagccgacgaggatgaattccgaggtgacaaggtcctggtgtcctatccacaaaaccagaaaacacaccttgcaagcatgctgggtttttctcaacgtccacgctaaaattcgtgcctgcaaagagcgtggaattcagcgtacttctccaactcgtgatgtctattgtcctattcacaagacaaagaatcacgacctctcaagctgcaaggtctttctcagcgccatgaagacgccacctcctaaggtccagcagtcacgtgtccccctcagggatgaggacaaggaacaaggagcgacactgatttcagatcgatttgttggggtaatcgacatcgatccccacgaaccatcagtcttgcacctgctcgaagattatggctcatcgtcaacgagtacgccgtgcgaggtattggctatcgacgagactggcacgtcagcgcacgctaatgcggaagcggagaatcaagtgactacaccggcccagcacccctacgatcccgttctgaacgacgatctcgcacgatggacagaacggttacgggaatcagtgaccaacctcagcaacgcgttcgaagaggccgctgctgcagtgcacccggaacagccaccaactggcgatgctaatggtgagaaccctgaacagtgggaatcgcctcatcgagccacccctccacctcgcggcaccagcgatctccgcgatcacctgaatggccgccgagaggcgtgacgcacacgagacaacgagaaccgctcccgacatcacgtctcttaacggcgtcacgacaacggtgttaaccgccacaaccgccacaatcacgacgattgcgaacggcgggtactgggcgatactggtcaaggacgtcgccataatgacgacgatgatggagatcggcgccgagacaacaacgggagacgacgacaggatcctcgagaacccggccaacgtcctcgtaatcatacgctggaaccaagcgacccatcgtcatcgtcatcctcctcctcatcctcatcatcagatagacatccacgaaggacgtacgattgccgacagcccactgcccctagcgctgggtgtagagctttcggtcgttcacttcgagatgtccgatggcctgaaagattccgaccaggagcaatagagaaatacgatgggagtaccgacccagaagaattccttcaggtttactccacggtactctacgctgccggagcggatgacaacgcgttggcaaattacttgccaaccacattgaaaggctctgcgcgttcatggctgatgcatctcccccctactcgatttcttccaaggaacttacaagcgccacgcgatcgaagacgacctacatgcgttaacgcagaacccggatgaatcctagagggattatgttcggctccttaatgagtgtaggaatacaatccccgagatcaccgacgcttctgtaatccgcgccttcaagtccggtgtcagagatcgctatactacccaggagctggcaacgaggcgcatcacgactactcggagattattcgaaattgtcgatcgatgcgctcacgcggacgacgcactaagacgcaagaacaacaaaccgaagaccggaggggagaagaaaccagtcaaggacgcacctgagtcaagcaagaagaaaaatcgcaagagtgggaaaaggaaagctcaagcggatgttctcgcaacagaatacgcagaccctcccaagtgcccagactcacaaggcagcgacacgaagaaaacatggtgccttatacacaagtcagacaaacactctctagaagattgccttgtcttcaaaaaatcgctcgcaaaacacatgacattggaaaaaggcaagcgagtacgtgtggtcgagaaggacgctgaggcggttactcaggaatcggactcagcatacccagactccgatctccatgtctcgcacatcttcggaggttccacggcggcgatatccgatcgtggtcgaactcactattcagaatatcaaggtcgcatgagttctgatcaacggcggtagctcaatcaaccttctcttcgccagcaccttggacgcgatggggatcccacgaagcgagttgacacccaccgatcaacccttccatggaatcactcctcagtcatcgtccaaaccattgggcaaaattacattgcctgtgactttcggccaagcaaataacttccgaacagagcagatcacctttgatgtcgctgaattcgatacagcatacaatgccatcattgggagaactgcactcgcgaagttcatggccgcatctcactacgcgtatcaagtgctcaagatgccgggaccgaagggaacaatcagtattcaagggaacgctaagctagcagtgcaatgcgacaagcggagcctcgacatggtcgagcacacgcccagcccacccgacacagctgagccacccaagaaagtgagcagaacaaacaaaacgccgaaaccggacggcgcaatcaagatcgttccactctctagtgccaaccccgacaagaccgaactcgcgctcatcaccttcctccgcgacaatgctgacgtgttcacttggcagccgtccgacatgccgggggtacccagggaggtgattgagcacaaactcatggtgcgacccgatgccaagctagtaaagcaaaaactgcggagatttgcaccagatcgaaaacaagcaatacgagaagaactcgacaagcttctcaaagctggtttcatcggagaggtactccatccagagtggctaaccaacccagtcatggtacggaaggccaacggaaaatggagaatgtgtgtcgatttcaccgacctcaacaaggcgtgtcccaaggatcacttccctcttcctcgaatagaccaactggtggactcaacagccggttgtgagttgttgagctttctcgacgcttactccggctaccaccaaattagcatggcgaaagaggacgaggagaagaaaacattcatcacgccgttcggactaataactgctggaaacactttccagcgcacggtccaaggtgcacttagcgaccaactcgaaaacaatgttgaggcctacgtcgatgacattgttgtcaagaccaagacaagcgactcattgattgacgatctgcgggaaacgtttgacaacctccgacgatatcacctcatgctcaatccagagaagtgcacgttcggagtaccatcgggcaagctgctcggtttcctcgtctctggtagaggaagagaagcaaatcccgagaagatgaaggcaatcgagaacatgaagtcgcctacaagactctaggaagtacagaagttaaccggatgcatggcggcactaagcaggttcgtcactaggataggagagcgaggacaacctttcttcgctctgctaaagaagcaagacaaatttgtatggacacaggaagccaaagaggcattcattgcactcaagcgctacctatcaaatccccctgtacttgttgccccccaacctaatgaagaattatttctctatattgccgccacgccatattccgttagcactatcattgttgtcgagagagagaaggtacaacgaccagtctactatgtcagcgaagctctgcacgacgcaaagacaagatatctacatatccaaaaactgctctacgcggtaatcatgacatcaagaaagctacgccactactttcaagcccacaaggtcatagttgtatcctccttccctctcggtgaagtagtgagaaacaaagacgttgtcgaccgcattgcgaaatgggtagtcgagctaagccagtttgatgtctgctttgtgccacgaacaaccatcaaatcccaggtacttgccgacttcgtagctgattgaactatgcctgataataggtcagacaaccaaatcgacaacgaaacgtggacaatgacgttcaacggtgcactcaacagccaaggagcaggggcaagattcatcttgacatcacctttgggagatcaattcaagcatgcaattcacctcaacttcagggcgactaataacacagccgagtacgaaggactactcaccgggataagagctgcagctgcactcggagtcaggcgactgatcgtgaaaggggattccgaactagtcgcgaaccaggtgcataaagattacaagtgttctagccccgagttatccaagtatctcgcagaagtcaggaagctggaaaaaaggttcgatgggattgaggtccgacatgtatatcgcaaggacaacatcgaaccaaatgatctagcacggcatgcatccagacgagagccactcgaacctggcacctttctggacgtcctgacaaggccatcagtgaaagacgcaggcggcgaagatagcccggtctccctcaacaacagctcgggggctacagaggcagagcgcgccgttgccgatatcgagaccacagacgactggcgcaccccactcatcaaattcataggcagcgaagagttgcccgaggacgacgcagaagccgagaaaatatcccgtaaagcaaaagtctactatatgatcggcaatgatctatacaagaaggcaccaaacggggtactcctaaaatgcgtcttgtccgacgacggcagacatctcctcctcgacatacataaagggatctgtgggtcacatgccgccggtcggacattagtcggaaaagcttttcgataagggttcttctggccaaccgccctcaaagacgcctgcgacatgtaaacacacaaagctaccagcgcaagcactccagactatccctctcacttggctgttctcgtgctgggggctaaatatactcgggccattcccacgaggacagggcggctacaggttcctattcgtggcgatcgacaaattcactaagtggatcgaagcgacacccacgggggaaatcaaggccgacaacgccatcaaattcatcaaagggatattctgcagattcggattgccccaccgtatcataacggacaatggctcccagttcatcagtgccgatttccaggattactgcattaggttgggagtcaagatttgcttcgcctcggtttctcaccctcagagcaatggacaagtcgagagggcaaacggcatagtactacaaggaatcaagactctactatgggccgtgcgtaccacaccaacaacgtccaacaaggagacacccttcttcctcatgtacggctcagaggccatgctcgccaccgagctacaacatcaaagtacacgagtacagaagtattctgatgaggatcaggaggagcaacaaaacgatgatgtgaatctactcgaggaacatcgcgaacgagttgccgttcgagcagctagctaccaacaggcccttcgctgttaccacgagaagcgcatccgagcacgcacgttttcaatcggcgactacgtcctccgacgggttcaaagccaagcagggtgaaacaagctctcacctaaatgggaaggaccgtacacgatcacacaagttctgcggccaggcgcattcaaaattacagacggcgatggtcgcgagttggcaaattcctggaacattgatcaattacgtaaattctatgta

SEQ ID NO: 45402 - DNA, 261 bp, Oryza sativa
  Clone ID: PAT_MRT4530_48370C.1
atggggagaagtagaaccagcggcgacgagcaagaagggaacggtggtggtggtcagatccgtgtcctctgcatcggcgtccacctccacgactcgcaatcgacggcgtcgggaggacaacctactgtgggaggtcggctgggcggtgagggcggtcaggccaggaatggtgctgcctcagggctagggcgcgacgccggctatagaatggagaggggagaggttgatggaagacaaggacatttcatccaatatgagtaa

SEQ ID NO: 45403 - DNA, 592 bp, Oryza sativa
  Clone ID: PAT_MRT4530_48371C.1
atggcactgcagctcctcaaccaacagtgcagtcacactctcgcacactatctgcataagaaggggataagctacctgattcatgccatcagtttcagttgcatccagcatgagcaagctcaagttcttggtcactgtcgtcctcgtgatcctgctactgttcgattcatcgtcttcaggcatgttgtttatcatgttcttgttcttttgtgtgttgggcaagctgagacagcatataccaattatgaagtgacttctaaagtgaaagagagaattcagaaacatagcaggagggttctgacagatgttcaggactatgactatggaggacccaaccctagacatgaaccacgtaagaagcctggaaatggacactaagatactcagatgatcccaaatgctacaatcaccagaccactatcttactgtaatgtactagaattaagcagaactgttaggtactattgtgtcgttaattaccttgtaatatgttggtcaggtgcatggagttcaggtcattttagacagtacctgcgtgtattcaggtgtgtgcttatataactagcaactggtaaaatacaactactgagga

SEQ ID NO: 45404 - DNA, 2682 bp, Oryza sativa
  Clone ID: PAT_MRT4530_48372C.1
tcactgagacaagtatcgctggatagccgatatagccctttgcctaatttgatctatttcttcgatagcttgggcgtcttgagcatcggttccaggaatgactttcaaggatttagtcatctcagcaatgttcttgatagctgattttagccttgccttctgttcttcgacagcttgcatgagatcggttaacttcttgtgctctagatccagtttagcattgcattcttgaagttgtgccaagagttcaatcttgtgagcttcaagccgatcaacattagatttgatcgggccttcagataactgatcaagcttggctttctcttcatgaacacgctgccgattggtttggattgtagcctcgatgtccttgcgctcccggcgatcggataacctctgcctggctttctccagtttgaattgatgctgctcgaggtagacagctggagtaagagcatcggctaattcgtccgaaagaaaggcttggatatctgcaaatcttgcccggattgagccacagttggtcaccaggttatctagtgatgctcctaaccgatgggagatgtcttcgagtgttttcttcatatcatcagacaggagagctatcgctttactggtggtgtcttcttctgtttcatcgaggtaatctttgatgtcaaaggagaacagatcggctaagactggaatagtaggtgcagctaattgttcctcctcttcaacatgatgactgcctgcagtcgatggagtgtggccgcctgattctgctgtaggagctggtttaagggttgaagtagctgatctattcctcacagcaattttctttctctttgccaattgagctgaagcagaaggggatggaggagattgcttaggtgaagccaatggtgttctttcagtatcgcttatttcggctgcagcttggtcgatgtcttcctcgatttcttcttcatccagagcttgttcaatggatggatctagggcgggtagatcgtcagctggcttagctttctttgtcttagccttattcttcggagccggggctgaagtatctgcagccgatgatctggttctccgcttcttgccggcatcggctggttctctgatgagtcctcggggaagtgctgaggtctttggggcattgtagccaatggcagaaggggatggcccacctccatttggaattagacccggagcatacttaatgaccttgccgctattgctctggtgaggaggagaagattctgttgtatgagggatagcatcagggaataagtctgtcatgtacatggaagccgattgatggaacagatgcagcttccactcgccccaccatctgtcaaatgtcctgctcctgaaccttgccagctttatgttctcgatgctgcccaacggaggtccagggatgttcaatagctgatccatcattaaagttgaggagatgtcgcctctgcattggatcttgttggcaaagtacagaccgattggcaattgtcccattccaagttgtctggccgatgacatcggatgataaaactcgtaagagacttggatatttctcccttgatggatgccgactgggaggatacatgggctgatagcagtagtaaagatttctctggattgctgaaacttctcatgattaatatcctcgaacctgaaatcggctggcagttcgaaatccattgagtcggcatagaagaaccaaactcgggcatctttttggaatccatcataaaagctgaagaaccagtccttcagaagttcagccgataactttgctcctgcatcggctggtgtagatgcatattctccgtatgacatacatctgcgatgggtgtgttcttctccatcatcttccacaatcggctccaaacttggaaattcagcttctgttccaaccactgagccgataattatcttggccgatgcgttgtttaatatctggtatagatagccgagaaggattttgcctaagggaaattgtttcttcgttactagggcctcggctaagaattgccagttggttgtaggaccgcagcttgatccgcagaaaaggaatttttccaaccacatcagcaaaaaagctacgtgctctctaggagtgactggccctttgcccatatatgctgtgatatatcctgaccaacccccaatgctcttagttttgaactcaaaagtgttcttggtgttcaggttcatagggttagctgatgaggttacatctaggccagtgagcatgataatatccagcagcgttggggtcatcggcccttggttgaaaagaaaagcattgagagtgttggaccagaaataagttgcagcagccattaggggttcatctttggccgaatttgctattgtgagggctagggcttggctgattccgatctcatcccaatgggcttgtttgctagccgatatccgcttataccatacaggccagcttttctccaaagaaggccaggatttgaaggtgtttttccaatggcttgtgtttggattggccgacctaaaaggggttctgttggtttcggctatgataaactcagtggggtctagattgccgattggaccgagaaagtattgttggtcatgaaacagactgggaaccgcaacaagattggaaagatgctcagcgtattcggctgatgatgcggcggtcggattggtggaggtcgacat

SEQ ID NO: 45405 - DNA, 2232 bp, Oryza sativa
  Clone ID: PAT_MRT4530_48373C.1
ttaaagttgtgccaagagttcaatcttgcgagcttcaagccaatcaatattagatttgatcgggccttcagataaatgatcaagcttggctttctcttcatgaacacactgccgattggtttggattgtagcctcgatgtccttgcgctcccggcgatcggctaacctctgcctggctttctccagtttgaattgatgctgctcgaggtaaacagctggagtaagagcgtcggttaattcgtccggaagaaaggcttggatatctgcaaatcttgcccggattgagccacaattggtcaccaggttatctagtgatgctcctagccgatgggagatgtcttcgagtgttttcttcacatcatcagacaggagaactgttgctttactggtggtgtcttcttctgtttcatcgaggtaatctttgatgtcaaaggagaacagatcggctaagacctttgccaattgagctgaagcagaaggggatggaggagcctgcttaggtgaagccgatggtgttctttcagtatcgcttatttcggctgtagcctggtcgatgtcttcctcgatttcttcttcatccagagcttgttcaatggatggatctagggcgggcagatcatcagctggcttagctttctttgttttagtttttttcttcggagccggagctgaagtatctgcagctgatgatctggttctccgcttcttgctagcatcggctggttctctgatgagcccttgaagaagtgctaaagacttgggggcattgaagccgatggtagaaggagatggcccacctccattttgaattagacccggagcatacttaatgaccttgccgctattgctctggcgaggaggagaagattctgttgtctgagggatagcatcaggaaataagtctgtcatgtacatggaagccgattgatggaacagatgcagcttccactcgccccaccatctgtcaaatgccctactcctgaaccttgccagctttatgttctcaatgctgcccaacggaggtccagggatgttcaacagccgatccatcattaaagttgaggagatgtcgcctctgcattggatcttgttggcaaagtacaggccgattggcaattgtcccattccaagttgtctggccgattggcaattgtcccattccaagacttggatatttcttccttgatggatgccgactgggaggatacatgggctgatagcagtagtaaagatttctctggattgctgaaacttttcatgattaatatcctcgaacctgaaatcggctggcagttcgaaatccattgagtcggcatagaagaaccagactcgggcatctttttggaatccgtcataaaagctgaagaaccagtccttcagaagttcagccgataactttgctcctgcatcggctggagtagatgcatattctccgtatgacatacatctacgatgggtgcgttcttctccatcatcttccacaatcggctccaaccttggaaattcagcttctgtcacagatggccgattgacaactttcatgactaccaggttcagccaggattgcaagagccaccatggtccacctgctccaaccactgagccgataattatcttggccgatgcgttgtttaatatgtgttctctaggagtgactggccctttgcccatatatgctgtgatatatcctgaccaacccccaatgctcttagttttgaactcaaaagtgttcttggtgttcaggttcatggggttagctgatgaggttacatctaggccagtgagcatgataatatccagcagcgttggggtcatcggcccttggttgaaaaggaaagcattgagagtgttggaccagaaataagttgcagcagccatcaggggttcatctttggccgaatttgctattgtgagggctagggcttggctgattccgatctcatcccaataggcttgtttgctagccgatatcctcttataccatacaggccagcttttctccagagaaggccaggatttgaaggtgtttttccaatggcttgtgtttggattggccgacctaaaaggggttctgttggtttcggctatgataaactcagcggggtctagattgccgattggaccgagaaagtattgttggtcatgcaacagactgggaaccgcaacaagattggaaacatgctcagcatattcggctgatgatgcggcggtcggattggtggaggtcgacat

SEQ ID NO: 45406 - DNA, 2871 bp, Oryza sativa
  Clone ID: PAT_MRT4530_48374C.1
atggcgcccccgcctgaatccgaaaccctccgcctccacgcctccttcctctgctccctcgccatcgccctcctccgcgccggccgcctctccgccgcctcccacctcctctcctccctcccctcccctcccgcccccctcctcctccgccgcctcatccccgccctcgccacctccggcctcgccgccgccgccatccgcttccgccccgccgaccccgcctccctcaacgccctcctctactcccactgccgcctccgcctgctccgccccgccatcgcgctcctccgctcctctcgcccgaccaccgtcgcctacaacatccttctcgccgccctctccgaccatgcccatgcccccgcggtgctcgccgaaatgtgcaagcgcggggtgccgttcgacggggtcaccgtcaacactttgctcgctgggctctgcaggaatggccaggtcgacgcggcggcggccctggccgacaggggcggagggatccacgccttggatgtcatcggctggaacactctcattgctggatattgcagggttggggacacgcccgcagcattgtccgtggccgacaggatgacggcacaggggctgccaatggatgtggtgggctacaataccttggttgccgggttctgccgcgccggccaggttgatgctgcgcggggcgtgctggacatgatgaaggaggcaggggttgatccgaatgtggcgacctacacacccttcattgtgtactactgcaggacgaaaggggtcgaggaggcattcgatttgtatgagggaatggtcaggaatggagtgctgctggatgtggtcacgcttagcgctctcgttgctggactttgtagggatggccgcttctcggaggcgtatgctcttttcagggagatggacaaggttggggctgcgccaaaccatgtcacctactgtacgcttattgactcgctggcgaaagctgggaggggcaaggagttgctcagcctgttgggggagatggtttctagaggcgtggtcatggatttggtcacctatactgctttgatggactggttgggtaaacaaggcaagactgatgaagtaaaggacacacttcgttttgctctttcagataatctctcccccaatggtgttacatacactgtattgatcgacgctctctgcaaagctcacaacgtcgatgaggcagagcaggtgttgctggaaatggaggagaaatcgatcagtccaaatgttgttacgttctcatcggtcatcaacggctttgttaaaagaggattgcttgacaaagcaactgagtataagaggatgatgaaggaaaggggcatcaatccaaatgtggtgacctacggaacacttattgatggtttcttcaagttccaagggcaagatgcagctcttgaggtgtaccatgacatgctatgtgagggtgtcaaggtaaataaattcattgttgattctctggtgaatggtttgagacagaacggaaaaatagaggaagccatggcattgttcaaagatgcgagtgggagtggcctgtcactagatcacgtaaactataccactttaatagatgggctcttcaaagcaggcgacatgcctactgcttttaagtttggtcaggagttaatggacagaaacatgttgcccgatgcagttgtttataatgtgtttatcaattgcctttgcatgcttgggaagtttaaggaagcaaaatccttcttgacagagatgagaaatatgggattaaaacctgatcaatcaacatataacactatgattgtttcgcattgcaggaaaggagagactgctaaagctctaaaactccttcatgaaatgaagatgagctccataaagcctaacctcatcacatacaacacactggttgctggtctctttgggactggggcagtggagaaggcaaagtatttgctaaatgagatggtctcagctggattctctccatcctctctgactcatcgacgggttttgcaagcatgttcacaaagcaggaggttggatgtgattctggatattcatgaatggatgatgaatgctgggcttcatgctgatatcaccgtatacaatacgcttttgcaagttctgtgttaccatggcatgacaagaaaagccacagttgttctggaagaaatgttggggagtggaattgccccagacacaatcacattcaatgctcttattcttggtcattgcaagagcagccatctagataatgcatttgctacatatgctcagatgcttcaccaaaacatttcaccaaatatagctactttcaacacgcttctgggtggtcttgagtctgttggaaggatcggagaagcaggcaccgtgctcattgagatggagaagagtgggcttgaacccaataatctcacctatgacatactggctacaggacatggaaaacaaagcaacaaagtcgaagcaatgagattgtattgtgaaatggtgggaaagggctttgttcctaaagtaagcacttataatgctcttataagtgacttcactaaagcaggaatgatgactcaagctaaagagctcttcaaggatatgcaaaagagaggtatgatcttgcaagagagcagaaatcccagaatacatattttacggaaatatactgcttcagtgcatctagacattggagacctttgcatacttgtgttgcctggcctggaccacaggattatcagtgggactggtggagtcctgataacagctgaactcttcaggttattgcacaaaacatttaccaagccaaggaaaaaggagatgaagcccatgcgaaaatgccaattgtgcccagactacatagaccccacacaaataattgttaaaaccagataa

SEQ ID NO: 45407 - DNA, 2635 bp, Oryza sativa
  Clone ID: PAT_MRT4530_48375C.1
tcactgagacaagtatcgttggatagccgatatagccttttgcctaatctgatctatttcttcgatagcttgggcgtcttgagcatcggttccaggaatgactttcaaggatttactcatctcagcaacgttcttgatagctgattttagccttgccttctgttcttcgacagcttgcgggagatcagctaactttttgtgctctagatccagttcagcattgcattcttgaagttgtgccaagagttcaatcttgcgagcttcaagccgatcaatattagatttgattgggccttcagataactgatcaagcttggctttctcttcatgaacaagctgccgattggtttggattgtagcctcgatgtccttgcgctcccggcgatcggctaacatctgcctggctttctccagtttgaattgatgatcatcagacaggagagctgttgctttgctggtggtgtcttcttctgtttcatcgaggtaatctttgatgtcaaaggagaacagatcggctaagactggaatagtaggtgcagctaattgttcctcctcttcaacatgatgactgcctacagccgatagagtgcggctgcctgattctgcccttgctaattgagctggagcagaagggaatggaggagcctgcttaggtgaagccgatggtgttctttcagtatcgcttatttcggctgcagcttggtcaatgtcttccccgatttcttcttcatccagagcttgttcgatggatggatctagggcgggtagatcgtcagctggcttagctttctttgtcttagccttcttcttcggagccggggctgaagtatctgtagccgatgatctggttctccgcttcttgtcggcatcggctggttctctgatgagcccttgaagaagtgctgaagtcttgggggcattgaagctgatggtagaaagagatggcccacctccatttgaaattagacctagagcatacttaatgaccttgccgctattgctctggcgaggaggagaagattccgttgtctgagggatagcatcagggaataagtctgtcatgtacatggaagccgattgatggaacagatgtagcttccactcgccccaccatctgtcaaatgccctgctcctgagtcttgctaactttatgttttcaatgctgcctaatgggggtccagggatgttcaatagccgatccatcatcaaggttgaagagatattgcctctgcactggatcttgtcggtaaagtacaggccgattggcaattgtcccattccgagctgtctggccgatgacattggatgataaaactcgtaagagacctgaatatttctcccttgatgtatgccaactgggaggatacatgggctgatggcagtagtgaagatttctctagattgctgaaacttttcatgattaatgtcttcaaacctgaaatcggctggcagttcgaaatccattgagtcggcatagaagaaccaaattcgggcatctttttggaacccgtcataaaagctgaagaaccagtccttcagaagttcagccgataactttgctcctgcatcggctggtgtagatgcatattctccgtatgacatacatctgcgatgggtgcgtttttctccatcatcttccataatcggctccaaccttggaaattcagcttctgtcacagatggccgattgacaactttcatgactaccaggttcagccaggattgcaagagccaccatggtccacctgttccaaccactgagccgacaattatcttggccgatgcgttgtttaatatctggtatagatagccgagaaggattttgcctaagggaaattgtttcttcgttactagggcctcggctaagaattgccagttggttgtaggaccgtagcttgatctgcaaaaaaggaatttttccaaccacatcagcaaaaaagctacgtgttctctaggagtgactggccctttgcccatatatgctgtgatatatcctgaccaacccccaatgctcttagttttgaactcaaaagtattcttggtgttcaggttcatggggttagctgatgaggttacatctaggccagtgagcatgataatatccagcagcgttggggtcatcggcccttggttgaaaagaaaagcattgagagtgttggaccagaaataagttgcagcagacatcaggggttcatctttggccgaatttgctattgtgagggctagggcttggctgattctgatctcatcccaatgggcttgtttgctacccgatatccgcttataccatacaaaccagcttttctccaaagaaggccaggatttgaaggtgtttttccaatggctcgtggttggattggccgacctaaaaggggttctgttggtttcggctatgataaactcagtggggtctagattgtcgattggaccaagaaagtattgttggtcatgcaacagactaggaactgcaacaagattggaaagatgctcagcatattcggttgatgatgcggcggttggattggtggaggtcgacatcgtcgcgggtggagatctggccgggagtggaatcgcctggaaatcgccctgtgcgtcgaggaggtcgccggagagagagaggacgggatctgtttaa

SEQ ID NO: 45408 - DNA, 505 bp, Oryza sativa
  unsure (1)..(505): unsure at all n locations
  Clone ID: PAT_MRT4530_48376C.1
gggctgcacggaatttcggcacgaggcgacttggcgtgccatcaccaactacctatacggtaggaggtatngnaactcaagcaaggccggggggagaagccgccgagcttaaccaattccaaaggggcaccgcctacaagggccgaacccggccagcgaaccgaaggccaagctcaaggtcaagtttctacctgcccccctntacgtaccccgtcatcccccgtcgtccggcgaagactactgggtatgctccttacgttccgaaacgaagacgaagactaccattacgcgctcgtcggcgagaagccgcggcgcaaggaaccttgttggaattcctgttgccggcagaacgaagcatggacgaacgaaggttgttacgggcggctgctggaaaaggccaaggaggaagggtacgactcaaagctgcgcagaccgcagacaccgcgcgaacacgccacaacaggactgtgtcatctctcgatatcaatctcacgcatgatgatta

SEQ ID NO: 45409 - DNA, 2229 bp, Oryza sativa
  Clone ID: PAT_MRT4530_48377C.1
ttacgggagatcggctaacttcttgtgctctagatccagttcagcattgcattcttgaagttgtgccaagagttcaatcttgcgagcttcaagccgatcaatattagatttgatcgggccttcaaataactgatcaagcttggttttttcttcatgaacaagctgccgattggtttggattgtagcctcgatgtcattgcgctcccggcgatcggctaacctctgcctggctttctccagtttgaattgatgctgctcgaggtagacagctagagtaagagcatcggctaattcgtccggaagaaaggcttggatatctgcaaatcttgcccggatcgagccacagttggtcaccaggttatctagtgatgctcctagccgatgggagatgtcttcgagtgttttcttcacatcatcagacgggagaactgttgctttactggtggtgtcttcttctgtttcatcgaggtaatctttgatgtcaaaggagaacagatcggctaagactggaatagtaggtgcagctaattgttcctcctcttcaacatgatgactgcctgcagccgatggagtgcggccgcctgattctactggtggagctggtttaggggctagagtaaccgatttcttcctcacagcaattttctttctccttgctaattgagctggagcagaagggaatggaggagcctgcttaggtgaagccgatgttgttctttcagtatcgtttatttcggctgcagcttggtcaatgtcttccccgatttcttcttcatccagagcttgttcgatggatggatctagggcgggtagatcgtcagctggcttagctttctttgtcttagccttcttctttggagccagggctgaagtatctgtagccgatgatctggttctccgcttcttgtcggcatcggctggttctctgatgagccgttgaagaagtgctgaagtcttgggggcattgaagccgatggtagaaagagatggcccacctccatttgaaattagacctggagcatacttaatgaccttaccgctattactctggcgaggaggagaagattctgttgtctgagggatagcatcagggaataagtctgtcatgtacatggaagccgattgatggaacagatgtagcttccactcgccccaccatctatcaaatgccctactcctgagtcttgctaactttatgttttcaatgctgcctaatgggggtccagggatgttcagtagccgatccatcatcaaggttgaagagatattgcctctacactggatcttgtcggtgaagtacaggccgattagcagttttcccattccgagctgtctggccgatgacattggatgataaaactcgtaagagagctgaatatttctcccttgatggatgccaattgggaggatacatgggctgatggcagtagtgaagatttctctagattgctgaaacttttcatgattaatgtcttcaaacctgaaatcggctggcagttcgaaatccattgagtcggcgtagaagaaccaaattcgggcatctttttggaacccgtcataaaagctgaagaaccagtccttcagaagttcagctgataactttgctcctgcgttggctggtgtagatgcatattctccatatgacatacatctgtgattggtgcgtttttctccatcatcttccacaatcggctccaaccttggaaattcagcttctgtcacagatggccgattgacaactttcatgactaccaggttcagccaggattgcaagagccaccatggtccacctgttccaaccactgagccgacaattatcttggccgatgcgttgtttaatatctggtatagatagccgagaaggattttgcctaagggaaattgtttcttcattactagggcctcggctaagaattgccagttggttgtaggaccgcagcttgatccgcagaaaaggaatttttccaaccacatcagcaaaaaagctacatgttctctaggagtgactggccctttgcccatatatgctgtgatatatcctgaccaacccccaatgctcttagttctgaactcaaaagtattcttggtgttcaggttcatggggttagctgatgaggttacatctaggccagtgagcatgataatatccagcagcgttggggtcattggcccttggttgaaaagaaaagcattgagagtgttggaccagaaataagttgcagcagccat

SEQ ID NO: 45410 - DNA, 2183 bp, Oryza sativa
  Clone ID: PAT_MRT4530_48378C.1
atggcaattgctattggaatggggttctctgcctgtggtcgttttctgaatggtcaccacgacgctccgacgcgctgccgcatccccgtctggttccgccacgaggaggggtcgaggcctgagcccgacagtgtgccggctgccgcgccgcagtggaacagagaggaggcgccgcatggtcagggtcggacgctcatcccgcggtggctgccgatcccgctgccaggtcatcgtcgtcgcgcgatcctggctgctcctctgtcgcaaccctaccggctccttccctgcgccgccgcgaccgcctcggtggtgccacgcgagtccatcccgccgacaggcgacagcgcctacttcccggatgcgacggcccctacttcccggcggcccaactgtgggaggggaggcaattgtggcctgatggcggcccggcggcggcggatcctcggggtgacggtggcagcggtggcggatctggtagacagcgacgctacaaattctcacatcaatcattcactcgagggctcctgccttaaagatgctgcttctgcagcctccacctccctcaccgacaagtcgacggccgtgaaaaatggaacgatcgagatcatctccacctctcccccaacacccgcgcgtcctcatcccccaacccgcgcccgcaccgtcgccccccaaatccgccctccttgccccgattcgccgccggtctcctcccctccgccgcagattcctccctccgtcgatcgccccttcatcacccagccctctcacccttgctccctccctcccctaaccctaatctcatccgcgccgccgccgccggtactgcggatccccgatccgtcgcccgcctccactcagctgccgccgcctccaagacgtcgtcaccaccacctccatccgccacgacgcccccacaacctccgtccgcgccgaccccacgctgccccacaccgcccggtccttcgtcgacgcgccgccgttgcgggcaccgcccccgcccacatcgccgcctcgccccaactgctccgccccaccgcgccgcgcgggtgctcccaatcctcgccgccgctggccccgcgccgccggggggtgggcggcgatggaggcatagaccggcccgccgcgacggctggtgtgcgcaagctaccgagtgcagattctgagtggcttctggacaaggcttgggatattctgaagaattcatcgtttctgtgttctagagacagagtcaagattatcagtggcatggatgaagcttattatggatggatagctcttaaccatcatttgaatatgcttggcacctcatcttctaaaatgacatatggttcacttgatttaggtggatcatcattacaggtgacatttgagactgataattccattcaggatgaaacaagtatgagtctaaggattggttctatcagtcatcaacttagtgcttattctctgtctggttatgggctaaatgatgcatttgacaaatctgttgcacatcttgtgaagaagttgggaggggcagctggcagtcctgtgcttagcatgggatcacctttcagatttcatctatggagtcatattacttcaggtgatgcaagaacaaagacacctctgagtcctactgttgctgggtcagagccccatccattcagcatgagccatggattaggaggcagcagtgttcagcttatggagtcctccaggcagtcattgggcgtctatcacagctattctgttggaagcttaggtcagatgcagttttctagtggaatgtggaagccagtggtgtcgggtgagccccctcagcatctccgtgctgccgcctcttgcggcggtgtggactgccctgattatcatctccagcctaaacaccaaggagcgttcaccgcaaccggccgttcgagccttccccgtccgcccgtagctgctggacgacgtcatagtggtcgtccgccgcagcgagccaagtcgatcggcgaggtgtacgaccactgtttgccggtgctctcccaccgcagggatcgataggttcaggttaagcatccttgtctacaaacgggatacaaagaagattatatttgttcttactgccacccgctcaaactagatggaagtcccagtgttggagggaagacaacaggcaaagagaagcagggaatggcagatgaactgatcgggat

SEQ ID NO: 45411 - DNA, 2121 bp, Oryza sativa
  Clone ID: PAT_MRT4530_48379C.1
atgtcgacctccaccaatccaaccgccgcatcatcagccgaatatgctgagcatctttccaatcttgttgcggttcccagtctgttgcatgaccaacaatactttctcggtccaatcggcaatctagaccccactgagtttatcatagccgaaaccaacagaatcccttttaggtcgaccaatccaaaaacaagccattggaaaaacaccttcaaatcctggccttccctggagaaaagctggcctgtatggtacaagcggatatcggccagcaaacaagcccattgggatgagatcggaatcagccaagccctagccctcacagtagcatattcggccaaagatgaacccctgatggctgctgcaacttatttctggtccaacaccctcaatgcttttcttttcaaccaagggccgatgaccccaacgctactggatattatcatgcttactggcctagatgtaacctcatcagctaaccccatgaacctgaacaccaagaacacttttgagttcaaaactaagagcattgggggttggtcaggatatatcacagcatatatgggcaaagggccagtcactcccagagagcacgtagcttttttgctgatgtggttggagaaattccttttctgcggatcaagctgcggtcctacaaccaactggcaattcttagctgaggctctagtaacgaagaaacaatttcccttaggcaaaatccttctcggctatctataccagatattaaacaacgcatcggccaagataattatcggctcagtggttggaacaggtggaccatggtggctcttgcaatcctcgctgaacctggtagtcatgaaagttgtcaatcggccatctgtgacagaagctgaatttccaaggttggagccgattgtggaagatgatggagaagaacgcacccatcgcagatgtatgtcatacggagaatatgcatctacaccaaccgatgcaggagcaaagttatcggctgaacttctaaaggactggttcttcagcttttatgatggattccaaaaagatgcccgagtttggttcttctatgccgactcaatggatttcgaactgccagccgatttcagtatcgagaacataaagctggcaaggttcaggagcagggcatttgacagatggtggggcgcgtggaagctgcatctgttccatcaatcagcttccatgtacatgacagacttattccctgatgctatccctcagacaacagaatcttctcctcctcaccagagcaatagcggcaaggtcattaagtatgctccgggtctgattccaaatggaggtgggccatctccttctgccatcggctacaatgccccaaagacctcagcacttccccgaggactcatcagagaaccagccgatgccggcaagaagcggagaaccagatcatcggctgcagatacttcagccccgactccgaagaataaggctaagacaaagaaagctaagccagctaacgatctacctgccctagatccatccattgaacaagctctggatgaagaagaaatcgaggaagacatcgaccaagctgcagccgaaataagcgatactgaaagaacaccatcggcttcacctaagcaggctcctccatccccttctgcttcagctcaatttgcaaaggcagaatcaggcggccgcactccatcggctgcaggcagtcatcatgttgaagaggaggaacaattagccacacctactattccagtcttagccgatctgttctcctttgacatcaaagattacctcgatgaaacagaagaagacaccacaagtagagcgatagctctcctgctcgatgatgtgaagaaaacactcaaagacatctcccatcggctaggagcatcactagataacccggtgaccaactgtggctcgatccgggcaagatttgcagatatccaagcctctctttcagacgaattagttgatgctcttactccagctgtctaccttgagcagcatcaattcaaactagagaaagccagacagaggttagccgatcactgggagcgcagggacatcgaggccacaatccaaaccaatcggcagcgtgttcatgaagagaaagccaagcttgattag

SEQ ID NO: 45412 - DNA, 927 bp, Oryza sativa
  Clone ID: PAT_MRT4530_4837C.1
atggcggccggatcttccgctcccgttcccccctcatcggccgccctctctcactcccaaccctatataaacactccccgtgcctccctccaccgtttccgccactcgccgctctctctctccgccggaatcgagctcgcgccgtcgctctctctctccgccgtcaccgccgagctccagtccgccgccgtcgtcgccccggaccttctcccgcttcggcgccgcctcctttggtttcgccgcaaccttgccgacctcgtccacccctccgtttcgcccgccgaccgccggaacgccgccgtccccgtctacccgagccgcgccgccgccttcctccgctccggtcgccgttcccgtcgtcgccgtcgacccggggtgagctgtggaccgccgattcgtttcccccttccctcccctctctcgggcgccgctccgccgcgccggtggtcgccggcggcgaccatcggggcgcgggtgcgccgcctcccgtcggctgtgccggcgtggccgccttcgggcgcgccccgcggctgccatgtggggcccggccgtcagccgcccgcgccctcgggtgcggctgacgcgtgggacccacggcgccggccggtgtgagccgggtgcacccggtccaccgtggacccacctcggccatataaggaccggtcttcgggcctctgttgcaaagcactaccgtacttccacatgtctagtggggcaaatgaaggctacacgagctgcggcccggtagtcgagatgtcgtggcacagggccggtgtcctgctgctaggggctcagtcctgcctgcctgtcccgggggttccggccgtaggtgggattgggtcgatgtacacctctgatcagagtataatctattcgaatagccgcgccctcggttatgggcaagccgagcaatgtacccaagttagt

SEQ ID NO: 45413 - DNA, 2771 bp, Oryza sativa
  Clone ID: PAT_MRT4530_48380C.1
gatagccgatatagctctctgcctaatttgttctacttcttcaatggcttgggcgtcttgagcatcggttccggagatgactttatagacttggtcagatcagcgacattcttgatagccgatttcagccttgccttttgttcttcgacgacttgagggagatcggctagcttcttttgttccagggccagctcggcgttgcattcttcaagttgggctatgagctcaatcttttgggcttcaagccgatcaatgttagacttgattggaccttcagataattgatcaagcttggccttctcttcatgtacgagctgccgattggcctggattgtactttcaatatccctacgttcccggtgttcagctagtcttagcttggcattctccagcttgaattggtgttgttcgagatagacagctggagtaaggatatcggctagctcatccaaaatcagagcttgaatttcgtgtaaccgagccctgattgatccgcaatcgaccaccaagctgtccagtgatgactcctctagccgatgagaaatgtcttcaagtgttcttttcacatcatcggacagagaggccaaggccttgctggtggtatcagtttatgtctcttcatcaagatagtctttaatatcaaacgagaacagatcggctaagactggaatagcaggagcagcaggttgttcttcttcctcgacatgatgactccctacagccgatggagtttggttacttgataattgctgtacagggggagaaggaggaggaggctgtggtggaactggtttgagagttgttgctgccgatttcttcctcacagcagtttcttttaccctggagaaatgaactggagtacaaggagtcggaggagtttttttgggtgaagccgatggtgttctttcagtatcgcttatttcggctgcagcctggtcgatgtcttcctcgatttcttcttcatccaaagcctgttcaatggatggatctagggcgggcagatcgtcagctgacttagctttctttgttttagtttttttcttcggaaccggggctgaagtatctgcagccgatgatctggttctccgcttcttgctgacatcagctggttctctgatgagcccttgaagaagtgctgaagacttgggggcatttaagccgatggtagaaggagatggcccacctccatttggaattagacccggagcatacttaatgaccttgtcgctattgctctggcgaggaggagaagattctgttgtctgagggatagcatcagggaataagtctatcatgtacatggaagccgattgatggaacagatgcagcttccattcaccgcaccatctgtcaaacgccctactcctgaaccttgccagctttatgttctcgatgctgcccaacggaggtccagggatgttcaacagccgatccatcattaaagttgaggagatgtcacctctgcattggatcttgtcggcaaagtacaggccgattggcaattgtcctattccaagttgtctggccgatgacatcggatgataaaactcataggagacttggatatttctcccttgatggatgccgactgggaggatacatgggttgatagcagtagtaaagatttctctggattgctgaaatttttcatgattaatatcctcgaacctgaaatcggctggcagttcgaaatccattgagtcagcatagaaaaaccaaactcgggcatctttttggaatccatcataaaagctgaagaaccagtccttcagaagttcagccgataactttgctcctgcatcggctggtgtagatgcatattctccgtatgacatacatctgcgatgggtgcgttcttctccatcatcttccacaatcggctccaaccttggaaattcagcttctgtcacagatggccgattgacaactttcatgactaccaggttcagccaggattgcaagagccaccatggtccacctgctccaaccactgagccgataattatcttggccaatgcgttgtttaatatctggtaaagatagccgagaaggattttgcctaagggaaattgtttcttcgttgctagggcctcggctatgaattgccagttggttgtaggaccgcagcttgatccgcagaaaaggaatttttccaaccacatcagcaaaaaagctacgtgttctctaggagtgactggccctttgcccatatatgctgtgatatatcctgaccaacccccaatgctcttagttttgaactcaaaagtgctcttggtgttcaggttcatggggttagctgatgaggttacatctaggctagtgagcatgataatatccagcagcgttggggtcatcggcccttggttgaaaagaaaagcattgagagtgttggaccagaaataagttgcagcagccatcgggggttcatctttggccgaatttgctattgtgagggctagggcttggctgattccgatctcatcccaatgggcttgtttgctagccgatatccgcgtataccatgcgggccagcttttctccagagaaggccaggatttgaaggtgtttttccaatggcttgtgtttggattggccgacctaaaaggggttctgttggtttcggctatgataaactcagtggtgtctagattgccgattggactgagaaagtattgttggtcatgcaacagactgggaaccgcaacaagattggaaagatgctcagcatattcggctgatggtgcggtggtcggattggtggaggtcgacat

SEQ ID NO: 45414 - DNA, 2667 bp, Oryza sativa
  Clone ID: PAT_MRT4530_48381C.1
atgtcgacctccaccaatccgaccgccgcatcatcagccgaatatgctgagcatctttccaatcttgttgcggttcccagtctgttgcatgaccaacaatactttctcggtccaatcggcaatctagaccccactgagtttatcatagccgaaaccaacagaatcccttttaggtcggccaatccaaacacaagccattggaaaaacaccttcaaatcctggccttctctggagaaaagttggcctgtatggtataagcggatatcagccagcaaacaagccctagccctcacagtagcaaattcggccaaagatgaacccctgatggctactgcaacttatttctggtccaacactctcaatgcttttcttttcaaccaagggccgatgaccccaacgctgctggatattatcatgcttactggcctagatgtaacctcatcagctaaccccatgaacctgaacaccaagaacacttttgagttcaaaactaagagcattgggggttggtcaggatatatcacagcatatatgggcaaagggccagtaactcctagagagcacgtagcttttttgctgatgtggttggaaaaattccttttctgcggatcaagctgcggtcctacaaccaactggcaattcttagccgaggccctagtaacgaagaaacaatttcccttaggcaaaatccttctcggctatctataccagatattaaacaacgcatcggccaagataattatcggctcagtggttggaacaggtggaccatggtggctcttgcaatcctggctgaacctggtagtcatgaaagttgtcaatcggccatctgtgacagaagctgaatttccaaggttggagccgattgtggaagatgatggagaagaacgcacccatcgcagatgtatgtcatatggagaatatgtatctacaccagccgatgcaggaacaaagttatcggctgaacttctgaaggactggttcttcagcttttatgacggattccaaaaagatgcccgagtttggttcttctatgccgactcaatggatttcgaactgccagccgatttcaggttcgaggatattaatcatgaaaagtttcagcaatccagagaaatctttactactgctatcagcccatgtatccttccagtcggcatccatcaagggagaaatatccaagtctcctatgagttttatcatccgatgtcatcggccagacaacttgaaatgggacaattgccaatcggcctgtactttgctgacaagatccaatgcagaagcgacatctcctcaactttaatgatggatcggctgttgaacatccccggacctccgttgggcagcatcgagaacataaagctggcaaggttcaggagtagggcttttgacagatggtggggtgaatggaaactgcacgtgttccaccaatcgacctccatgtatatgacggacctattccctgataccattcctcagacaacagaatcttctccacctcgccggagtaatagtggtaaagacattgaatatgccccaagcttgattcccaatggaggtgggccatctccttctgccatcggctacaatgccccaaagacctcagcacttctccaaggactcatcagagaaccagccgatgccggcaagaagcggagaaccagatcatcggctgcagatacttcagccccggctccgaagaagaaggctaagacaaagaaagctaagccagctgacgatctacccgccctagatccatccatcgaacaagctctggatgaagaagaaatcgaggaagacatcgaccaagccgcagccgaaataagcgatactgaaaaaacaccatcggcttcacctaagcaggctcctccattcccttctgctccagctcaattggcaagggtagaatcaggcggccgcactccatcggctgcaggtagtcatcatgttgaagaggaggaacaattagctgcacctactattccagtcttagccgatctattctcctttgacatcaaagattacctcgatgaaacagaagaagacaccaccagtaaagcaacagctctcctgtctgatgatgtgaagaaaacactcgaagacatctcccatcggctaggagcatcactagataacctggtgaccaactgtggctcgatccgggcaagatttgcagatatccaagcctctcttccggacgaattagtcgatgctcttactccagctgtctacctcgagcagcatcaattcaaactggagaaagccaggcagaggttagccgatctccgggaacacaaggacatcgaggctacaatccaaaccaatcgacagcttgttcatgaagagaaagccaagcttgatcagttatctgaaggcctgatcaaatccaatattgatcggcttgaagctcgcaagattgaactcttggcacaacttcaagaatgcaatgctgaactggatctagagcacaggaagttagccgatctcctgcaagctgtcgaagagcagaaggcaaggctaaaatcggcaatcaagaacgttgctgagatgactaaatccttgaaagtcattcctggaaccgatgctcaagacgcccaagccatcgaagaaataaatcagattaggcaaagggctatatcggctatccagcgatacttgtctcagtga

SEQ ID NO: 45415 - DNA, 297 bp, Oryza sativa
  Clone ID: PAT_MRT4530_48382C.1
atggttgtgacccgtcacagacgatctgtgacgggttacaactcggggcggaaggagacgcggacgagatggccggaggaggagcgggaggtcgcctcggtgattggcgccatcgccgtcgacgacctcgagcatcacccaccctgggtgggtggtagcctgaggcctgaatctctggccgccggcatcgccaagggctctagggtttcgatgagcggcgatggcggcggcgagaggctctgcacccgcacccggctgtgttcggggctccacggaattctgcctgattttagttag

SEQ ID NO: 45416 - DNA, 1089 bp, Oryza sativa
  Clone ID: PAT_MRT4530_48383C.1
gatacaaaacaacatccatatatgagccagttttatagacaattcagggttgaattgagtacaacagcattacttggatgcaggtatgaatcagtgattgccaaaagttgcatcaatcgcctaccaaatttagacagatgtcatcgagcacactcaaaacgcataaaactacattgtacagctgacttgccaattcttgtttatggttaaaatgataatgctgagatgctagattcagtaccccggctagggagttgaatcttctttctctgaaagccagagcgatgtactgaattcttctctcagaggctggcagtgttggtttgctgttcaatgatgcacaccacaagctttacttcactgcatcttacacattttcctagccatctgtgtgtgaaaagttggtagcaaactctaaatagttctagtgtcaaccagatttgcatcctcatcaatgaataacgtcacagccgtcatcacaagcctgtagatcgttataataaacaaactaaagtagaatgcaagcttgatcatcctgtattttttctcccaattgagttgccggaatatctcggtaacatctacaaggtgtttccgatccatatacaatttgccatggtagtatgctactggtgccataactagaaacgggaaccaatgcagtgtcaagaggaaagaagcgcacaaggccccttggagtgcgtattctataaggaccactgagttgatgcgagatgaagaatcgtatgggttgatataatcaaactccaaatcagataaacatataagctggtaggcggtgaggccgatgaggaccatgatggaggcgaaggagaagagccacaggatgagctcgatggacatggctgctgcctcacttttgcctctctgctcccaagaattcaagaaacccccggagtggatttgaccgacgacctccgctccggtcacacctccgcttctgcggtcgactaggccggccggtgccgagaggagaccggcgcgtctgggtgtaatggcgcggcggcggtcgccggagacgggaggaggaggtggtggatcgcggatggacgcgagcccacgcgtccg

SEQ ID NO: 45417 - DNA, 662 bp, Oryza sativa
  Clone ID: PAT_MRT4530_48384C.1
acgcaatcgcgcgcccacactgtacagccactgtaactcatcagaaacgaggtcaatatacaacagtaattttcgccgttccataagtccataaaataccgatttctaatatcccaggagactctagctgcagatttagtaaggaagaacaaagcaagttactcacagtcacaggcaagctacacattgtttgttgcaaaaaaactcgaagtattgaggaactacacagagctgatctgggacagggaaatgagcacactggaaaattacagccggctgttcacttgacgatctctggtatgctgcgctttacaatcagctctccgttttgatcccctgcttctggttctgcttctccttctgtttccgcttcctctcgtttcgcctcttcacccagggcttctcttcctccactggcgcttctgcctctgcgctgacagatcctgtaatctgcgcaaacgactctttggcgccagaggttacgtcgccgaagaagtccttcaccttgtcaaccacagttttgagctcttctttctttgggagctgggataatcaaaacattttactgttagtgacttgctacctttgctcaagacatgcttactgaaaacatggtcatttgtacatttactataagaaatgcctaccatcctcacttaact

SEQ ID NO: 45418 - DNA, 597 bp, Oryza sativa
  Clone ID: PAT_MRT4530_48385C.1
atgcgagcttctctctcccacactggcatctctccctcttttctccccactctatttttttctccccactacccactcaatcctcccactccctctcctcctctacttacttctctcatcgcctcaaactccctctccccatctacccaactcctcacctcccacacctacccaatcctggcgacggcggcggcaatcttaggtgacagccagagcggcatcggcgttgtcgacgagggcgacggtagtctcggacaatggtggcatcagcgagggcagcaacagtttcctggcaacgacggtggcaggagcatcgatggcatcgacgagggccgggtctgcaaccgccagactcaagcgagcagatccgttgccgacaaccgcggcgacgacagcaggacggacaacaacgatgacagtggcggcggcgagagcaacgtcggcggcattgacgaaggccggatgcaccaccgccgggctcgagcaagcggatccgttgctgacgactgcggggacgacggtggcggcggtgggaggggcgacgatggcgatggcgggaggtgcaacgatgatggccggcagtggcttctggattag

SEQ ID NO: 45419 - DNA, 3042 bp, Oryza sativa
  Clone ID: PAT_MRT4530_48386C.1
ctaattcgtcggtcctctgccaaagtttgggttgttgccggtgccggaaaagaagagaagatcaccggtgttggagaagaggcatctggagcacgaatcacgaagcacatccgccctctccacactcctgtcgctgacgctgctgctcccgtcggaggagacgtcggagtcgcggttccttctttccccgtcgatcgccgaggaccacgagcacgcccacgaactggcaaatccttcgctacgagcggataagaggccccgccaccgcgcggcgctgtcccaccccgccagccaccggaaattcccttggcgatgatccatcgccgtcgccattgccagcgaccggcgcccgcgaggacctcgcgtcttggccgcataaagcggcggcagcagcgccccctggccctggctggtcgaggggagggcgcgagtttccgtggattccgcggctctaccgttcacagccgctcgccatgacgccatccatgatggcgcaagaacggggggagccgctcctgcagagcggcaatggcgccgccggcgggggagccaaggggtggccgccgccggcgctggccaggaccgtgctcaaggtcctcatgtgggcggtgttcctcacctgggccgccgcgatcttcttctacccgaccaagcccgcgcaggcggcgttcgagggttggatggcggccaccaagcagtccctctttggcatcaccgggagtattttcctcgcattcagcgcgccgattctgatcgtcgcggctctggcgtacgtctacatctccgccttcccgagtgaccatatccatgtggagaagaacaagctgaagacactgtgtttccggctctggactttccctgttcttgtggacgggcctttcggggttgtctccgcggtagaattcatcggaatcgtcctgtttatcgtctatgttgtctattcaatgacctattacgctgtggagagcgtgagtctcatctcaaaatttggccagatttcgcttacttacagcgagttgctattgtacattattggcctccggttcggatcgatcgggttgttttgcatggctttcctgttcctccctgtctcaaggggttcagttcttctccggcttattgatattccatttgagcatgctactagataccacgtctggctcggccatctcacaatggctctcttcacattacatggcctatgctatgtgatcgcatggtctctcgaggggaatctacttggagaattggctgcatggaaagaaatcggagtggcaaacttacccggtgtgatcagcttggcagccggcctgctaatgtgggtgacatcactccacccagtgaggaagacatacttcgagctcttcttctacacccaccagctctacataatcttcgtcgtgttcctggcatttcacgttggcgacttcatcttcagcttctcggccggacccatcttcctcttcatgctcgatcgcttcctgaggttctggcaatgcagggccaaggtggacatcatctcggcctcatgccgcccttgcggaaccgtggaactagtcttctcaaagccagcaagtctccggtacaatgctctcagcttcatcttcgttcaggtgagggagctgtcgttcttggagtggcacccgttcagtgtgtcttcgagccccatggatggaagataccacatgtcgatcctgatcaaggtgcttggatcatggactgaaaaactgaggggcatcatcactgatgcccaggaacagggcaggaatggctctgagtcagagaccggccggatcaccgcctgcgtggaagggccttacgggcatgaatcgccataccacctgatgtacgagaatctcatcctggtggccggaggcatcggcatatcaccgttcctggcgatcctgagtgacataatccataggatcgaggaaggcaaaccatgcatgcccaagaatgtgctggtgctgtggtcggtgaagaagtccaacgagctctcgctcctttctgccgtcgacgcgcagttcatcagctcgtctgtctctgacaagctacatctcgacatccaggccttcgtgacccaagaatcccaacctccattggaagaaggcattgttggggatgaccagaaggcgaccggcatgttcgtcaagaacgggacgaccatgtccgggctggtcggcaccgggaacaacttctgggcgggcatgtacttcgccgcgtccacgctgggcttcgtcctggcgtacgcgctggcgcaggcgtactacgtgcggcgcctcaacgtgttcgcgtggtggcacctgggcctcgtgttcgtgctgtgcatggccgccggcgtcgcgctccccggcggcctcgtcgtcctcctgtggcacctgtccgagaagcggaaggcggaggacgacaggtgggacgccgccgccgccgccgtcccgcgcgcacaggacggcgaggaggaggccgagcagacaacgaacggcgccgacgcggccgacggcggcgtcagcctcgccgcggtgaagacgacgcggtacgggtgccggccacagttcgaagcggagttcgcggcgttcgcggagaaggccggcggcggcgcggcggacgtgggcgtgctggtgtgcgggccgccggggctgcaggcgagcgtggcgagggagtgcaggtcgcacaacctcggccgccgcggcgggaggcgccgccgcgccggcgccgtcttccatttcaacagccacagcttcgacctgtagtctgtagaccagagctagtacgacactctgcgcaggtggcgaacatattaatttttaattgataatagtagttaatatgtactgtataaaataactaaagattaaaattatagccgaggccctgcaccaatagtaaatccatccatccatcctgtttcctgtacagtacactacacatacgacacgctcgccgtcgtcggcgcgtgcatgtatatattctgcatgatcggaaacgtgagcatacgtgaaggcattacgaattcacatacgtcaaaaaaaaaaaaaaaaaaaa

SEQ ID NO: 45420 - DNA, 477 bp, Oryza sativa
  Clone ID: PAT_MRT4530_48387C.1
gcagtaagcttccttacggaaaatatgcagtaacttacagcaatttccgttgacaagagattcactcaccatgaatggatgagtcttaagtaaaatctaatataggatggtgctggccacatcttccaacccaccatagttcaactaaaactaaaataaactaaatctcacttttaagggtacccgcagatcagcctgcacccatctgtactcggtgctcatgaattgctaacaccgactacagccttcacaaagaattttgcactatattttctatgaatggttgctatactggattcaacaaccaaatgaaaaaagcttacatgttgcagcagccaaaattgatctacagaaaaatggaaacaggggctccctcggttaggcaacaaaacttgcagaggtggtgaggcgagcaaccaacaggtcaatcggtaaagggaggaagaacacaaaaaagagttacacgttttgcgatca

SEQ ID NO: 45421 - DNA, 491 bp, Oryza sativa
  unsure (1)..(491): unsure at all n locations
  Clone ID: PAT_MRT4530_48388C.1
cgaccacgcgtccgacacaatatggggttgactgaaccatgatgcgccattctgatgatacagtttgccgatagaatttatagcattatcatgattcagaaattcattgtagtatgaaaggcctttcaatgttaatgttatgtttacatgtatactgacaggcctacatgtcctattcagattagagaacatttttagatatatgggccccatataagaggagtttgaacatcaatcaggatatttaagtgtaattgaatatcaaacagctacagtatcacattaaggcggcagttgatgcagcaaggaaacatgatgggtagtcatctaggaagatggaacaaaaagttcaatggccatggtcaaaaactgaatgccaaaggtcccaacatgtttttgaaaatagtccagaaggataagtcaagagttaatttgntntgccaaactgcgctttcgctccacactgtttaaaagattgatttccattcaag

SEQ ID NO: 45422 - DNA, 349 bp, Oryza sativa
  Clone ID: PAT_MRT4530_48389C.1
ttgtgagatatacatacggtaaatacataaagtacaagtagtaagttaataaccggtgttgtgctgatgaatttggaacgatttagcacaatttctgaggggtttcccatctccggcctaagagaatgaatgcggtccccattggatatgttttttaaatcatggtccgatgaatgatggacttccagtctccagaaggattaccccccctgaaaataaaacacacgtattgtttggacgccacaatggaataaacttggagacctctttcgtttctccgtgaaaatctttggacagaataaccaccatatcccccagagcgagtacttcactttaaaaaaaaaaaaaa

SEQ ID NO: 45423 - DNA, 2219 bp, Oryza sativa
  Clone ID: PAT_MRT4530_4838C.1
atgcgccgccttctcactccgccatggccggcggcggcggcggctgctccggccagcgccgccgccgcctccgccgtcacagtagaggcggtgctggccctgctggagcgcgcgatctccgcgggggacgtgcgccgcctcggcgcggcggtgcacgcgctcctcgtcaagacggcgctcacccaccacaccctcctctccaaccgcctcgtcgcgctctacgcgctgctccccaccccggcggcatcgctcgccgccttcgacgacctcccgcacaagaacgcgcactcgtacaactcccttctggcggcgctggcccggggccgcggcaccctccccgacgccctccgcctgctcgacggaatgccgcccgcctcccgcaacgtcgtctcctacaacaccgtcatctcgtcgctcgcgcgtcacggccgcgagtctgaggcgctccgcgtgttcgcccagctggccagggacaggggcctggggcagcagcaggtggccatcgaccggttcacggtggtcagcgccgcgagcgcgtgcgcggggctccgggatgcgaggcacctccgcgagttgcatggcgcggtggtggtgtcgggtatggaggtgactgtcatcatggccaacgcaatggtggacgcctacagcaaggccgggagggtggaggatgcacggggggtattcgaccagatgaccatccgtgactcggtttcttggacatcgatgattgcagggtattgccgggcaagcatgcttgacgatgctgtgcaagtattcgacatgatgccagcgcaggacgccatagcatggacagcactcatctctgggcatgagcagaatggggaggaggagatcgctctcgagctttttgaaaggatgacaggtgagggggtagtgccaaccccctttgccctcgtgtcatgtctgggtgcgtgcgccaaggttggtcttgtcgcccgagggaaggaagtgcatggcttcatcttgcgcaggagcatcggttcagaccctttcaacgttttcatccacaatgcccttattgacatgtattccaagtgtggcgacatggtagcggccatggcggtgtttgacaggatgcttgagagggacatcatctcttggaactccatggtgacagggttctcgcacaatggccagggaaagcagtcacttgcagtgtttgagaggatgcttaaagatgaagtacaaccaacctatgtcacttttctcgctgtcctcacagcttgcagccatgctggtctagtctctgatggccgccggattcttgaatcaatgcaggaccatggtgttgaaccaagagctgaacactacgccgctttcattgatgctcttggtcggaatcgccagctggaagaagcaagtgagttcatcaaaggcttgtcctccaagatcggtctgggtacaactgggtcatggggggccctccttggtgcatgtcatgttcatggcaatattgagatcgcggaagaagttgccgaggccctgttccagttggagcctgagaacagtggtcggtatgtcatgttgtcaaacatatactcagcagcaggacagtgggacgatgcccgccaggtcagggctctcatgaaggggaaaggattgaggaaggaccaagcttatagttggatagaggtgcagagagcaaaacacatgttcgtcgccgatgacacatctcaccatgaggcgaatgaaatatatgagatgctggacaagctttttcatcacatgttcattatagggggtaatgttgaggagcttatagttggatagaggtgcagagagaaaaacacttgtttgtcgctgctaacacatctcactgtgacgcaaatgaaatatatgagatgctggacaagctttttcatcacgtgctcggggtaatgttgaggacaagcatggcaattttgttttgtgctgaaagatacatcctctggaatgaaacaattgctttagcattgcaagaacaaggccattggtctcaggcatgagggatgaagcccactgatttgccttcagcatccttggtatggcagattggtggtgtgtttcaaggatgctgcaaaggagcgtcagagtccaaaatgtggttattgtgtttctttgagattgcaatcacaaataaactcgtacgattttgattcgtttggaacttggcatcctgaaggatcaatttttcacttgaagatgacaactgacaggac

SEQ ID NO: 45424 - DNA, 431 bp, Oryza sativa
  Clone ID: PAT_MRT4530_48390C.1
ggatccccgggctgcaggaatcggcacgagggagagagagaactagtctcgagttttttttttttttttttttttttttttttcatgcgaactataatacacatttctcagatggaattacagaaaatagaaaagagtacaccaccacagttattttgttcttcataaggacatatgtaagtggaggccaagcagaagattaaaaaaaaggagcaaatttattcttgaaaataagtacatacatagcagtatgacattttctttcttatcttgttctaactgttattagttctgaagaataaccgtgcagtctaacaattatgtgcagcaagatgttaacagcatctttacgcaagttaaatgatctaacaaatctgttgtcctacagttaccaccagattcacagggatgcctgcgtaacgccaaatatt

SEQ ID NO: 45425 - DNA, 628 bp, Oryza sativa
  unsure (1)..(628): unsure at all n locations
  Clone ID: PAT_MRT4530_48391C.1
agctgagctgagctgctctctataaaagaagccaagnagncttcacatccgcaaagcccggcgcgtagccactgcatatcttccagcttttgtcatagccttttttgtttcttctcttttggtacaaattcagggtctggaatacttgaatcagtgagaagaaaaaacaagatgtataaccctccaagtgcccaggagatgacatacaaagatcatgttcagaggcgccatgaggaaaaaggctgcttatatgcatgcctgtttacactgtgctgctgcttctgctgctacgagacctgcgagtgctgcctcgagacactctgctgctgctgctgacgtcgtcatgacgaagtgatatgcggactgtgacgtccactgggacactcatcgttgtccatctgctttgtctgaataaaaaatgtatctatgtacttaattaattatttgagtgctgtaaatctgcaatgcgttgtgttgatgtgtttaattaccttttcttttctctgcaatggatggaaacctggtgtatttgtatgttcatcaaataagtactctatgcagtgttttggcttgaacaaaaaaaaaaaaaaaaaaaaagaaaaaaaaaaaataaaaaaaaaaaaaaaaa

SEQ ID NO: 45426 - DNA, 468 bp, Oryza sativa
  unsure (1)..(468): unsure at all n locations
  Clone ID: PAT_MRT4530_48392C.1
gcggctacgtcaggatcccgccgcggcgtcggccgcgagggccctgcggcatcgcacagatggcctcctaccccgtctgattatataaacaaaacacacgccgatcaaccacntcattaattgattcgatggatcagtttcaaaatataagtcattctaacattctctacattcatattaatgttaatgaatctaatatgaatatagaaaatacatgaatgacttacattatgaaacggaggaaatataaatattaattaagatgtgtatatatatgtgctctggtatgtatagcgacactgcaccgtgtcaacatgtattctgaaatctgaaccggccggcccgtgcaggaagtctgnaaaagttggacgcgcggggctgtacgtagctgtgtgtatattgtatagtgtatatactacttaccatgatgaagttgtacaaaaaaaaaaaaaaaaaaaaaaaaaaaaa

SEQ ID NO: 45427 - DNA, 1122 bp, Oryza sativa
  Clone ID: PAT_MRT4530_48393C.1
atgcgcgtcccgattcctgtgctcgacgctcagcccttccgggtgtccgtgagctacagacgcatagcggcacagggggcagggctcttctgctgctgtggtctctggactctggtgttggacagggagacgaaaggaaactactgtagacgtgtaggcgaggtagctgacaggaacgtaaacactggctggcacgctgcacccggagcagcagcagaaacggcgaagaaaagagatcaagagagcctcagccacctgacctgcacacacgaaaaatgggttcgatcgacgtcgacgactgggcttactggcttagcatcggtggccgacgatcgtgtcagctcccctccccctccgcgtcgcacccgtcccaagggcgacacggacggcgacaacaacctggctgctgcccctccccaccctaacccccttcgcctcgccgccgcacgagtggctcgtcggcaaagccggacggccgcaaggacggcggcggggcgctctccccacgaggaagcccagaggcgggacaccggagggccgctcggcggcggcaagacggcggccaacgcggcggctccgggcacgacggagacagatccgcaccccctagcggcggatctagcctccccgtcggcggtcgagcttgcagcgacggcgaccggaggaggcaaggggcggcgtcacggctcgacgaggaaggcgacagcgggggtagcggcggcgtgccccggcgtgggcggccgtggacccgtccccaagcggctggatccggcctccctggctcagatctggccagggtgctgtcggtccagcggcaacgggtgcggagtggaggccggcgatatggccggcgtggcggtggcagtggcagacagcgacagcgactgggcagcgcccgtggtggtggcggccatcgacgacagtggccgcagctgtgtcgaggtgacggcggcggcggctgtggaggcaatggctgctgcggctggcgaggcggcgcccgtcgtcgtggctgacggcaacgatgacagtggccgcatctgcggcaaaggcggctaccgctcgcttcggtggcagatgaggaggcagggaaggcgtcgtgcagacgatcgccggcgggagtaa

SEQ ID NO: 45428 - DNA, 2430 bp, Oryza sativa
  Clone ID: PAT_MRT4530_48395C.1
atggggccattggctggaagctcaggtggtattcacatttatgcggtgttcatctcgaaggcctcaggggaggtgttgaagaaattttcaggccatactgatgtagagagttccatgcagcttgtgtggacctttggctcacaacttggagaactttttgccctttcgtttgccttctcagtcatcttcgttccggtcaagcgtgccagcatcgcctccaagaccaataagtcggagaccttcgtcacactccatagatcagattaaggcgcgtctggcacgcacacctctcttaacccctgtagtcatttgtctccacgaatctctgtcaggtgcgcatggccgcacatttcccagtctggctatgctttaggttctgcacatgttcgatcagcccatatatccggcttgacgtgtggatcttttagatactattccggttcatcatgccaggatagataatgcctaagtttctgtggggtaccagggcctagcttgtctaccatggcccgtcagtggccgcaaccgtcccagttacgtcaaggcggcgaatcccacttaaatctagcaggaccatcctcaggccagtcttcccggcaatcctacctgagacactgtgctgattcagaggcggccatggggatgagttcatgcgtgaacctatcccgtgtcgccgccgccgccgcagggagacggccgggatttgccggtgagctgggaggtcgccgtggtcatggcagaagcgtgcttccggttgttgctgcactgccggtgaggaggaagggaagcggttgtggcgtggcgtgctgcgtctcctcctcgtcttcctcctccgtgcacggcaagaactcggcggcggcggcggagggtcacgccggcggcattgggatcgcggagttcctcggcggcaagaacttcctcatcaccggcggaaccgggttcctggcaaaagttctcatcgagaagatattgcggacgaatcccgacgttggcaagatctacgtgctgatcaaggcgaaggacggtgacgcagcactgaaaagattgcacaacgaggaaatccatggcaaggattaccacagcttcgcggcaagaaagctggtgcctgtagtcggagatgtcagagaagccaacgttggcatcgcccctgagcttgccggcgtgatcgccgacgaggtcgacatcatcgtcaactcagcagcaaacaccactttcgacgagaggtacgatgttgcaatggacatcaacaccgtagggccattcaggataatgagcttcgcgcagcggtttcggaggctgaagctgttcttgcaagtgtcaacagcatatgtgaacggacagaggcaaggtgtggtgctagagaagccatttcgcttgggggacaccatagccaaggagttaggatctccagattcttcacaacacaagaacaccatgcttgacatcgaggcagagatcaagctggcttttgaccacaggagacacggtgatgattcagcctctttctctgaagaaatgaaagagttaggattagagagggcaaaactccatgggtggcaagatacatatgtgttcaccaaggccatgggagagatggtgatcaactccatgcgaggagatataccggttgtcaccatcaggccaagcgtcatcgagagcacctggagggatcccttccccggttggatggaagggaacaggatgatggatcctgttgtgctgtactacggcaaaggccagctgagcgggttcctcgctgacccggagggtgttcttgacgtggttccggcggacatggtggtgaacgcaacgctggcgtccatggcgaagcacgggcgcggcggcgcggcggcggcggcggcggcggcggaggggatgcacgtgtaccacgtggcgtcgtcgacggtgaacccgctggcgttcggcgacctgagccggttcctcttccagcacttcacggggtcgccgtacagcgacgcggcggggcggcccatccacgtgccgccgatgcggctgttcgacaccatggagcagttcgccagctacgtcgagaccgacgcgctgctgcgcgccggccgcctcgccggcgccggcgccggcgccggagacgagagggtgtcgcagcggctgcgcgagctctgcgccaagtccgtcgagcagaccatctacctcggcagcatctaccagccctacaccttctacggcggcaggttcgacaatgggaacacggaggcgctgatcggggagatgtcggaggaggagaaggcgcggttccacttcgacgtgaggagcatcgagtggacggactacatcaccaacgtgcacatcccggggctcaggaagcacgtcatgaaggggaggggcgtcggcggcggcagcggcgcgtcgtcgtcatcgaacgcctcgctgctcgccggcgcctccgtttga

SEQ ID NO: 45429 - DNA, 857 bp, Oryza sativa
  Clone ID: PAT_MRT4530_48396C.1
atggtcacccaggtatggccaccactatcggtgatatgggccagggtgtacaaagattggagggaagaggctgcccccagtgtccacgtggcactcctcccagggggtcgggcccaaggatgggcggcggccatcccctccaagcccgaggggtcgagccgccacgtgtatatggttaggtgggtgcctcacagcgtccacctaaccgcatttaaggcagttgcagcgggcgttccacgccgtgccgagcgccagaccggccgccgtgaagtgccccgtctcatcataatgacgagaggctttcagcctctcattccagctggagtcggtccgcccgctctggtcaaagaaaggatcccgtttcccggtgtaacaggagcccagaagtctccatccggtcccccgctcgaggagttcatcctccgataaattccttttcgccttctcccctaagtaatccggtaaactcctgtggtgcctccttaggtgggtctcggtgccgccgccgccgtccgcttgtcccgagccgcgtaggccggaggacgggggcgcacaccaccggtccccgccgcggcgccgcatcggcacagccacagaccaccgccgagcgaaggcgtccatctgccgcaccgccaccggtcgccagctccgggagctcgggaaccccgtctgactggctccctctcgcactgtcgcctgaccctcatcccctgcccgtcgctgtcgaccgccgttcgcggcttctctaccctccgcgccgcggctcccggctgccgtctcctgctccgtaggagtattgacttttgtaatgtcttgtctcctaaacttctcccttcttcctaccatatctctcttcc

SEQ ID NO: 45430 - DNA, 444 bp, Oryza sativa
  Clone ID: PAT_MRT4530_48397C.1
cgttatccgacgttggcaatgatctacgtgctgatcaaggcgaaggacggtgacgcagcactgaaaagattgcacaacgaggttgtggacacagaattgttcagtcgtttgcaggaaatccatggcaaggattaccacagcttcggggagagaaagctggtgcctgtagtcagcgatgacagagaagccaacgttggcatggaccatgagcttgccggcgtgatcgccgacgaggtcgacatcatggtcaactcagcagcaaacaccactttcgacgagaggtacgatgttgcaatggacattaacaaccgaaggccattcaggataatgagcttcgcgcagcggtttcggaggctgaagctgttcttgcaagtgtcaacagcatatgtgaacggacagaggcaaggtgtggtgctagaaaagccatttcgttgggggacacca

SEQ ID NO: 45431 - DNA, 327 bp, Oryza sativa
  Clone ID: PAT_MRT4530_48398C.1
atgcggcccaacacggcagccacggaggcgcctcctcagcccgacgtctgtggcacatggactataaggggtcaccatggtatggcgatgtcattgaatacggccagcgccgggggagggactgagggagggggttgtcgggtcgatgatggcaatgggcgatggcatgtcgatggtctttgggtaagggcgtgcttggttcttggtgttgtaatgtcggagtgggaacaccactccaaaggcatcctcgacggcacggacgaagcctactcctcggagaaacctccatctgacacatactcgcactctggggttgggaaaaaatag

SEQ ID NO: 45432 - DNA, 3687 bp, Oryza sativa
  Clone ID: PAT_MRT4530_48399C.1
gacaaaaaaagaaggcatacctgcaaaattggcgaacacagatgtcaattaactatcagcttcccatactgccgcgaaccaagatgcatgtttagacaggagagctaatagatacaatgcatctttacacgtcttcctgctctcgaccaacactttcctaacagacaagtttaccacaactaacttcagctaaactaactatactaaccattctacttcctggacaaaatagtctcctccagaagaccagaacccgcacaaagagatcaattggctcactcccgtaatgctctactgacccactgcacattttggaccaagcatcactgtgccttacaagccacctgtatgctgttgctcttgctctgtattgctactgctcccacgatgctcctgttgcaaggccccttgttcacgacatgggttatcattctgtgcattttctctgctctccgttatcaacttctcttgaatcttgtctagttcctgcatgaatatgctgcattttgcttcatcatggcaaattttcgggcaaatttcagccgctttactcattagcattgcatatctcaatgtattttctgaatcctttataccatgcttgtcaaataatttttccttgttctgttttagctgctcctctctgaattttttagtccatctgggcattatgtactgctctggtatttcattgattccaaactgagtgaaaagtctgaatatgtggcagcaaggtattccatcccttgtaaattttgcacattggcacttgaatgcattgatgccaggttcagcaagcacttcaaaataatttctatcaaactctgggttctcatagttgaagaccttttcaagtctgtacactgtccctatttgtatctcctgcacgttgaatgcagtagaatgtagtagttcttcctgtactttcagaaatatttcccttgtgtaaatatgtgctgcatgttgttctattggttgcattgagatgtatttaaggtcagctcctgactgaaatctatcttcttcatgaacttttgctatattctcttgtatctccttaaattgcccaatgaacttatctattgtgtcctttggaagcatattacctttaaataatgagtttattccctcgttggaaccaactgagtcaataaatgggtagagatcttctctaaaatagacaggtgcccaactttttcttgtttgccacatgagttgcaggtgttggttttcacttgcattgtatctctcaataagctcaacccatccttcttcaaattctgtttctaccagcgagttgcctactaagttatgtagatctgtatttatgttacctcttgctgtcatgaagtctccaagcttttcctgagctttgctcataacatgccgcttgcaaaacctaagccttacatgcggcatgagttctgcaaatgccttctccattgatgtgtcctggtttgttatgaccgctcttggcatttttcctcccatcacttgcaaaaatgtacgcaacatccattcgaaggtttctactttctcatcttttaacaaagcacatcctaacaggaagggtgtcgcgtggctatttattccaataataggcacaaaaggcatgttatacatatcagtgctataggcagcatcaaacataatgagatctccgaaaatatcatactcgatcctcaatcttgcatcagtccagaagatgcttgtaactgtgttgtcctcatctttttgcattacgtacagaaattctgggttttgaatctgcaattctgtgaagtgcttcaatgcgctttcaacatctgagtttgcttttctatgttctgtctgtgctatgttgtgctcatctttattttcaaatggtatgtctccgaaacaaactcttagtttcctgaaaatcttcataattttcttaggaggtaccctattttgttgcagaactcttaaaaatgacttctctccagttgacatttgtttgtggtctactatgaatcttgcaagcaaagggcttgggcataacggatgattgtgctcatggcgaactgctgtgaactcccattctcccttatcgagtttcactatcacccttgccttgcattgtgtcttctctacaagattgcttctcctcttcttcattgggttttcagatgacttcgttaacttcattttgccactcttgttgcattctaagtgaaacttctttctcttgtagttggttcccctctttcctacaaaaccagtaaggagagcatgtgcgtaatagaatctttgtgcggcttgaagggatggaaatttcattccgggttctggtggtcttgaattcttcagttcgtcgaaactaggatagaagtacttcccaagctccttatccgactcatcacctgagctgctgtctgaattgctttcactgcttgtatcctcgcttggcgcttcactgctttccacattatcatgtgatctgttatgctcttcagtatgctgaagtgaatggtctatcgagcttgtttggtctcccaatttatctacaattggtcgttctgtatttttgtctatgccatttgaagattgctcctgataatcaccagctcgctgtagtttgtcaacaggttccttctctacagtagatatactaatctctgcatgtctaggcatccttttgttgtttacttcatttgaatcagctgaaataagaggttgcgacaaccgttcctcaagattatctgcctgtgtcagttggtcactatttctctgaacatccagctgtttctggcttggaggatttcgcctgcgtttgcgctttgagaatctaagcgaatagctaggacacaatggatggttgtgttcattccggactgctgcatactcccattgtcccttattgagcttcactaccacctttgcctggcattgagtcctctctataatatttttcttcctcttcctctgtgggttcggagttagctttgatgtgccagtcttgtggcactctatggtaaacttttttctcctgtagttcgtcccccgctttgcaacaaagccagttttaagagcatgtgtctcatagaatctctgtgcatcttcaagtgttgcaaatttcattccaagttctggtggtcttgcattatccaattccattaaactaggactatagtgtgctccaagccctttatctgattcatttcctaggcttctgtcagaatcgccatcactgtttctatcatcgcttgacacttcattgctttccatattatcatgtgattggttttgtccatcagtatgctgcagtgattggtccattgagttggtttgtctccctaattgatccacgtatagttgttctgcagttttgtctatgccatttgaagatagcagctgatagccatcaccagcgagctgcagtcttccttctgttatcacttgcttctcaacaggtttcttgatcaactcgactggagttatcaccgtttgcccatcattgttactggtcttttcgccgcgcagctctggttggcaccaggcttgtacaggagaaatttcattccccagattgtttacacgagcaaaaacctggagaacagatctcttaaaaaggtcaatttcaccgaaagcacttaaccgattccaattctctgcaattctctgttcggaatcaactggaaggatgtgcatcagcacgtcctccat

SEQ ID NO: 45433 - DNA, 825 bp, Oryza sativa
  Clone ID: PAT_MRT4530_4839C.1
ccccaaaaatggcaggaaaggggaaaccaaaaaggccggtccctggctcccccccaagttgccccacacgacgggaaacgcccaccaaaacgaaaaaagccgccggcccgggttcggttcaccaggacggcggcgttccggccggtcggcggggcaaaacgaaggagtggacgaggtcgacgaggacccggcgaaacccaaaggaggccaacgccgaagcgggagaaggtcccaaggcgacgacggcggcggaccggagctcggcggcgacggcgaaaaaagggaacgacggcgcgagctcgattccgacggggagagagagcggcgagtggcggaaacggaggagggaggcacggggaacgtttaaatagtgttgggagtgagagagggcggccggatgagggggaatcggccgcggaagatccggccgccattgatgtgccggcgaagttcgcgggggagtttccaaacgaatccgagagagagagagagggaaaagtggggggaaagagggagggaatcacggggagtgatttccccctctttattgcgcgcggggacggcgggatgcggcggaatccgcggcggcggcggcgctagggcacgggcgaggcggcgggtgcggcgcgaggtaggggatgacgggtgggccccacccgtcagcgagggtggcgggcgggcccgcccgtcagcggcgcgcgcgcggggaggaggccgatgggccgcgggggagaggagagagagggagagggctgggccgagccggcccaagaggggaagggggggaaaaagacttttagggtttttctttttataaaaccactt

SEQ ID NO: 45434 - DNA, 1233 bp, Oryza sativa
  Clone ID: PAT_MRT4530_483C.1
atggcttcgctgccgccgccgccgccgccgccgcggccgctgctgctcaccgtcctcccccaagagctggtggtggagatcctaatccgcctcgacgacctggccgatctcgcccgcgccgcctccgcctgcagagccctccgccgcctcatcacctcccgcgccttcctccgccgcgtccacgcgctccacccccgccccctcctcggcctcctccacctggaacaccacggctcccgctgccgcttcctccccgccgagccgccccacccctccgccgccaccgccgccgccgtcgcgcgggcgttcgattccgactccgactccgactcctccttctccttcctccccggccgctccggcgactggcgcctccgcgacgtccgccacggcctcgctgtcctatcaacccgccatgccgtcaccgatgatggatgcttctccttccccgacgtcgtcgtctgcaaccccttgcgccgccgctacgcctggatccccccgatctccgacgacctagcggcccccatccgaagcctcggcgtcggcgtcgaggatttcgattacctggtcgctccagccggccgtgagggtttgtcattccgagtgatctgcagaccccagttgccaatgggctgtgatgtcaccgtcttcgtcttcagctccagtgccgtcatctggcgcgctgccacattgcacgcctgcgctgccaccgctcaattggtctccccgcagtacgcgcacggctacgcctactggcggctgatccgatccgccaccagattgctcttgctggacactcgcgacatggacttcttctttgtcgatttcgagcaaaggagtgtgccgtggcaggccattggggaggcaggggaagtaggcaggcttgccatgttcaacattgctcatgctaatcatacagtggagctcctctctggggcgattagaggcagcgccgatgaacattggcggcatgacaagactatcccattgcttcctggctacaaatggaggattctaaagctagccgaagggtacttactcctgcaaggaagaattctcggtgacggaacttcgcagtttactcctggtgaccaattacagtatttcacgctagacatcaacacgtttaagcttgagaggctgtgtgcttcaacaccccaaggcatcagttatcatcctcaatttgaattatacagatgcttccctccaccgttatcgttttcaagtatatga

SEQ ID NO: 45435 - DNA, 393 bp, Oryza sativa
  Clone ID: PAT_MRT4530_48400C.1
cggcggaattggggggacccacgcggccgctttttagcggacatgggcagatcgatccaagggggggccaccctggggcagcagggcaatctccccaacctgccctgttctggcgggctggaatcgcttccttggtcatacgtggccatggaatgcggccgtgacacacatgccggcggccggaacacgtgctatcagcatgaccacagacgtgaggtacgcaacaagtgcggcgaagcccctaaggtcatcgtctgcgcacacgccatcttacctgtggtggtattgggcgccagagtacaggggggacacaggagggttatcttcgaccagagtggagtcagaaggacacaggaggctaagggaaacgcacggcgaaccagtgacctacgg

SEQ ID NO: 45436 - DNA, 588 bp, Oryza sativa
  unsure (1)..(588): unsure at all n locations
  Clone ID: PAT_MRT4530_48401C.1
ccgcgccttctagttcgccttttagagctctttttcgccggagacgacgggcgtgggcgnttcggctggattcctctccgcattcctgttaggacttaggngaagtaanntcaggagtattnncaaaaanngctattncatctnnggtgatgtggacagctccagttgccatccgtgtatggattttactacccagatgattccaggtgtgagtcaactgtcatcctcgacgcaaactctagcaagtggattccttgctgttatatcgattaatctggtaatncggcttttatatatgcatggcgatgaaggagactccccaccaagagccacaacctgatccaaccttcttggcaaatgctaaagcaagcatttgatcaaccaactccgtctcaagtgaatgatgattcccatggaaagggaaaggtggagtaggtcatatcacaacatgtgcatgtttcacatgttatccagaaacagttcttctcgataccctgccttctaattcaatattatcttctgtaaatcttgagaattatggaaccaatatgagttttaccttttgtactgttaaaaaaaaaaaaaaaa

SEQ ID NO: 45437 - DNA, 308 bp, Oryza sativa
  unsure (1)..(308): unsure at all n locations
  Clone ID: PAT_MRT4530_48402C.1
ctccngcacccgctccgaaccttctccctcctcacgaagctcaccgcgaagcggcaaaatcctcccggagagagagacacaaacacaacacaaccagctcccccgcgccccggtgcnatcgatcacgatcgatctcatccctctcgatcgcctactactaccagtacaaatccaccccgccaccactacatcatcccctcatatccatgcagatttagcgccaatccttataaatacggagctttcgcgccggcctcgtactcggncatggcgggcagtcggcgcgcacgnagcggtctaccaccaac

SEQ ID NO: 45438 - DNA, 259 bp, Oryza sativa
  Clone ID: PAT_MRT4530_48403C.1
gggaaaatgaacctaagtaggacaatattttccagctgatcatgttccaaccaaaatggaagaaaaggaaggctagacaaaacgaaattcaagctggggtttagcacctataaaaaccgagcttctctttttacatagaccatatatgaatttgtacaaaaaaattttgcaagcctactcaactttcgggatgtgtggataaataactccactatttaactgcaagtttaatataattggaaggaataattagccatct

SEQ ID NO: 45439 - DNA, 344 bp, Oryza sativa
  Clone ID: PAT_MRT4530_48404C.1
tttcacgaggctaaaatcatatataacctgtatttgaaaggattaattaatttagcgttacatagattgtgctgtcgttgcggaaatcatctcaatgcattaattaatctcaatttcatgatttgcctcagcatttgcgctaggggtgaaaacggtacggaaactttctggattccggacctattttcgaaaacggaatctgtcagtcggaattttttcggaatttttcggaaatggaaacgaattcggaaatattttctcggaaatagaatcggaaatgataagggcagtttccgtcggaactcggaatcccggttggtaacaccaaccgggactaaagatgg

SEQ ID NO: 45440 - DNA, 333 bp, Oryza sativa
  Clone ID: PAT_MRT4530_48405C.1
gcgcagtggaagaaggcgctaagaaggcgaaggaaccttcgcgatgtggcgcgcgtcgatgtagaggaagtagtcgatcgcaccggctcgaccttctcctcctcgtgcgttcttctcgtcgtactcccacgcaaatcagcaccgcaaaccagcaacgcctctactggtatccacacgtacagggacggaacgccacgcgcagatgtgctagcacccgcgcgcggctcatatacactcggctgtaacccgaaaactccttttcggtccacgtgtcaacagcggcacttagcagaacgtattgacccaccgtgcatacataaagatcatatcggc

SEQ ID NO: 45441 - DNA, 2637 bp, Oryza sativa
  unsure (1)..(2637): unsure at all n locations
  Clone ID: PAT_MRT4530_48406C.1
ttatggctggttctcctcctcatcctccagttccatgaaagctggaagatccacttgagtgtactcgatatgcctgagtccaacttcgtacatgtccttcaagattgcccccacatcagacgttagagttgaggatagaacctccagggaattggcaccagcgctatcggagccaccaggctgcacggggagcgtcgagtcgaggcgctctaggagcttcagcacctcagcacgaagagcctcaggctggcgatcgctgagcgggggaaggcgagccaccgcatccttgacggcggcaatcatgttccaatcgtcttcaagtagctggtgcttcttcgagaggctctccagggaagaaactaagcataggaatgcattcctgaaactcgcgatctccttaagctctgccaagttcccaaccaaccatctgttaacttctctctccttgccaaccttgaggacttgctccagcatgtacggggcatgggcgaaggtgaccccaaggatgcacatgtgcttcaggtggaggtacagcttcaggccttcaggatctgggtactgaaccttcaagccttggatagtgttggcctcaaaaagtaacttgtccagcttagcaagtatgtccttcacaagttcattggggtattccgtttgatccgcgattatgtcagcgggcatgggggggaactcggatagcagagtgtcaatgttggtgaagaattcaaaagtgatatcaccaagttccatgggttgattatcacacaattcagtggtcctgtccttcagctgtttgatccttttaatctcaaaccagtcaatctcaccttctagcaatgtcatctgcacatttgagatggactcagaaatccgagaaaataaggatctgaagtggctcgtcgtgtgcaggatatctatgttgccgacccaccatcccttctcaattgcctcgtccaccctatgggacacttttgtcgcgtcggacaacttgaagctgacaatgcagatatcagtggggaactgggagtccatcgtgagcagaagctcattgtagctgcggatccgaatgtatggggattcctggacctcgggctggttctccactaccgacaccggcagaaatgcagactggtcccttagagcagggtacttgatagggatgagcccaagtaaggacatatccttgacaagaagctccacatcagacactagttttgtcgacgctatgacgtcagtgctgtcagcatcgtcaggctgcacagggaacaacaacttgaggcgctctaggagcccaagcacaccattgcgcagagcttcgggctgatgatcgctgagagggtggagcgcagctaccgcatgctcaactgcccctatgaaatcccaatcgatctcaagtattccatgggtcttccacaggctcagcaaccgctcaagtgaggatgaaacacggagaaaagcaactctgaatctagtaatctcaataagctcaggcaaattcccaatcagccatgttttctcttctcctggcttgccaacctccaaaatagtctccagcaagtgcggggcgtcgacgaatgggaactcaagcacgcaaatacggtcgaactcgcggtagagtcgggggaaatttatcacggacatgatgtcggccaaacaagtcacctcgatgtattggccctggacgctgccggcgacatggatggggatggctgcctcttcggccgcgaactcctccacggccccgccaccgccaccctcgcttctctccaattcgatggagacgcgggcgacgcggctgtggtgacggcgatgacaggcgacgcggcggcggtggggggaggagctgcgggcgggcagcgggggaggggcgacggggggaggagcggccgccacccacaaggcgcggccgccacccacaagncgncggggggagaggagctgcgggagtgcggcggcgcgaggtggcgcgcggccggcggcgggtggagcgacgggcggagcggcggcagatgcacccgccgcacaggcctgccggaggaccgggcgacaccgcggggagcgaccagccggcagagcagacaggcagcgggcaggcacgttgcaggagaggaagatggcgccgacgggaagcgggacggggagagcgaggacgacgccgctgtcgtcgtccatggccgcagatctcgcgccagcgccctcaacggtgtggccgacgggagtgtgacggcgacgggagacgctgtggggaggagggccagcaggccggtgcgcgcggccgcgtgcgtcgtcgtcaccgagctcgaccggccatccccattttctcgccaaggaacgcgcaagaggggtggtcgccgttgtcgcggccgtggtgatgacggcagcgggcagcgtcagcacccacacaggaggagctggcggctctagtggcagagagtgcgaggaaccgccgcccgcgcgctgctcctcccaccgccgcctatgcccatcgctcgcgcccagctagccagctgcttccccgccgtccgccgcccgcaccgaccccgcttcgccgccggccgcctctcccttctcaagtcgcagtcgcagccgctgccgccttcttctcctgtgtcgtcctcaccggacctcctccccacccgc

SEQ ID NO: 45442 - DNA, 213 bp, Oryza sativa
  Clone ID: PAT_MRT4530_48407C.1
aaagcttgcatgtagttgtagcccagcgactgagttacggtcacgggctcacggccagttgactcggagcgagaagatgtgtgtaatctgtgtgaggttttgaattacttgaagaaaatttggagatcttgtttgtttaaaaaaaaaaaaaaaaataaaagaattaaaatataaaataatataaaaataattagtttaataaaattaaaatgg

SEQ ID NO: 45443 - DNA, 305 bp, Oryza sativa
  Clone ID: PAT_MRT4530_48408C.1
aatcaaactaaaattttctgaaaaatatcccggtgtactccggcaatagtcaaatactccgtatcatcggttattcagaggagaggaaagcactaacaaaaaaaaattgactagtcaacagtgctgcagtcccaacagcgatctctgccacgtgctctatccgactggcttaactccaaccgacagcagcagagcacgctgcacctccggccgaatttcggggttaatcctgccgtggacgcccggccgtcaggtcattgaggcctgataacgcctccgccagggcccagggaagccagaaggcg

SEQ ID NO: 45444 - DNA, 297 bp, Oryza sativa
  Clone ID: PAT_MRT4530_48409C.1
atgaacaatccaaaggatgagaagcttgccaagctgtacttgtcctccaccgtccatgcccccacgctagagctcgtcagcagtggccacgtcctcctcgttgagcaggtcctccatccacacggcactccagagctcatcgtcgatggttgcgtcctctgcaacgatgacaaccaagccccgtgcagcgccgctgtcctcggctggcgcgggcagctgcgcagtgcgacggtggtgtccgccaccgcgccatcacaccgctacctcgcgcggaatccggttgtctctgcgccgtaa

SEQ ID NO: 45445 - DNA, 269 bp, Oryza sativa
  Clone ID: PAT_MRT4530_4840C.1
tcacatcgaaagctccgccacaatccaggtcctgttcagaacaacaggaggttaaagaattgtgcctccgttcaagttccgtaccatcaaccatcacgtactccgtcgaaatcgtgtcgtgccaggcgaagaagcacaaacgagctactacctccgtccaaaaatggcccgtccttctcatcggcggcgattttgtctactccttgtcgaccggcgagagcatggcgagacgacgtgcccccaaatctgcaatgaccaatgagctttcg

SEQ ID NO: 45446 - DNA, 275 bp, Oryza sativa
  unsure (1)..(275): unsure at all n locations
  Clone ID: PAT_MRT4530_48410C.1
atcctttaccacaattcaaatattatcagttgaagcatagtagtagaatccaacaacaatgaagatcattttcgtatttgctctccttgctattgttgcatgcaatgcctctgcgcggtttgatcctnttagtccaagttataggcaatctcaactacagtcgcatctcctactacagcaacaagtgctnagnccatgcagtgagttcccaagggaacagtatagcctagtggcaanccccttctggcaaccagttacctttcaattgataaaca

SEQ ID NO: 45447 - DNA, 1197 bp, Oryza sativa
  Clone ID: PAT_MRT4530_48411C.1
atggcgccgctctacttcgcgctgggcctcggctacggctccgtgcggtggtggcgcctcttcaccgccgaccagtgcgacgccgtgaaccgcctcgtcgcctgcttcgccgtccccttcttcgccttcgacttcgccgcccgcatcgaccccttcgccctcagctaccgcgtcctcgccgccgacgcgctctccaagctcgccgtcgcgctcgccctcgccgcctgcgccgccgccgcctccacccgctgctgcggctccggcggaggcaagcgcggcggcggcggcgggttctcgtggtgcatcactgggttctcgctggcgacgctgaacaacacgctcgtcgtcggcgtgccgctgctggacgccatgtacgggaagtgggcgcgcgacctcatcgtgcagatctccgtggtgcagaccatcgtctacttcccgctgctgctgctcgcgttcgaggtgaggcgcgccaccacggcggcggcggcgccgccgccgccgccgacggggaccgacgacgacgacgtggaggacggcgccgccgcggcggcgacggcggcggcggcgaggcggtcgctgtggccgctggtgagagcggtgtggctcaaggtggcgcgcaacccgaacgtctacgcgggcgttcttggcgtcgcgtgggcgtgcgtcacaaacaggtggcatgtcgaaacgccaagcatcatagaggggtcagtgctgatcatgtccaagaccggggttggactctccatgtttagcatgggtttgttcatggcgttgcaggacaagatcatcgtctgcggcgccggcctgaccgtgctgggcatggcgctgcggtttgtcgccggcccggccgccaccgccgtcggcgccttcgccctcggcctccgcggcgacctcctgcgtcttgccatcatacaggcatacacacatttacacgaaattcattcgccaagttctttttttcttctttcacctgaaatttgtctgaattcaaacggatgcatgcatgacacaagtcctcacgatgaaactgctcgtgatgaacaggctgcgcttcctcaatccatcacgacgttcgtgttcgcaaaggagtacggcctgcacgccgaaatactcagcacagcggttatattcgggacactggcgtcattaccggtgttgatcgtgtactacattgttctaggcttcatacgatga

SEQ ID NO: 45448 - DNA, 701 bp, Oryza sativa
  Clone ID: PAT_MRT4530_48412C.1
tgataagtgtgtgctttgaaagtacggaggcgaggaggaggctgcgcgcgtaccgcgccgcgctggagcgccatttcggctagtctccggcgttcatcacgtcagcgttcgaggagcaagggcggtgcggcgtcgatgatggctcgctggacgcgaccgtggcgggagtgtgatctctcctcaaggaggccatccatgtcgtcagctgtgcgttcgaggagaggacgagatggggtaaagagattggatggatgtacggcggcggcgtggtgacagggttccggatgcatgcgcgcgggtggtcgtcggcgtactgctcaccggcgaggctggcgtttaggagctacacgcgggccaaccccacggacgtcctcacgagggcgtcgcggtgagcggtggtggccatggggatcctgctgagcaggcggcacagccccgcctgggccggctagggcggtggggactcctgcagcggctgggctacgtgacccgcgtcgcctacccgctcgcctccctcctgctcaccgtctactgcgtgctcccggccgtctgcctcctcaccggtaagtccacgttccccggcgacgtgaactactacgacggcgtcctcctcatcctgctgctcttctccgtggccacgtcggtcgtgctcgagctgaggtggagctgcgtgccgctacgggcatggtggtcggacgaga

SEQ ID NO: 45449 - DNA, 477 bp, Oryza sativa
  Clone ID: PAT_MRT4530_48413C.1
atggatgataggaagcacccgatcgccaccggcacaccacccctcctatatatcctccttccccaactggcggccctattcccttgggcggcgtggactgcgggagacggcgagatcggcagcgtgggagcaagggacggcgggagctcttcaaagacccccactcatgtcctactccaactggtggctttcctcccttggccggatactgacgagctcctctccctctccgtcaagctgctgctgatgcagaccgaggtggttcggagcggggacgacgacgagcttggcggcgctgaacgggaacgaaaacaagcgagctccgctttggcgacgacgcagctcgtgatggtggcctcgctggcgacctccgccgccttgcacgaggttgggagcgcagatgtgtgcgtggcatggaatccccgatgtggatggtcggggccgaacgtcaagcacgcgcactataaatggcattag

SEQ ID NO: 45450 - DNA, 3344 bp, Oryza sativa
  Clone ID: PAT_MRT4530_48414C.1
cggaggcgcgcgcaaccgcaccacgctcgccggcgccaccgcgccacgagttccacggccgcggcgtcgtcgtcgtcgtcgtctacggtccatcaccgcccccgatcgatgcaccccgtgccgccgccggtggccgcgcctcctcccgcgcgccgctaggtctcccgcacgcggcggcgcccgaggccgaggcggccaaggagagcgtcgccgtcgccgtccgcttccgtcccctcagcccgcgggaggttcggcgaggggagaagatcgcgtggtacgcggacggcgaaaccgtagcgcggagcgagcagtccaacctcgcgtatgcctacgatcgagtctttggaccaacaacaacaacacgtcacatatatgatgctgtggctcaatatgttgttaatggtgccatgaagggaataaatggtacaatatttgcatacggggttacaagcagtggaaagacacatacaatgcatggtgatcaaatatccccaggggtaatacctttggctgtgaaggacattttcaatataatacaagagaccccaaatcgagagttcctccttcgtgtatcatacttggaaatatataacgaggttgtcaatgatctactaaatcctgcagggcagaacttacggattagggaggatcttcagggaacaattgttgaagggataaaggaagaagcagtgttatctcctgtacatgctttgtcccttattgcagctggagaagttttttcagagcttagacatgttggatccactaacttcaatctgctaagtagcagaagccatacaattttcacactgacaatagagagtagcccccgtggtcagtctaacgaagcggaagcggttaccttatctcagctgaacctcatcgacctggcaggttctgagagttcaagggttgaaactgcaggagtacaccagaaagaagggtcttatatcaataaaagcctgctgactcttggaaaggtgatatcaaaactgactgatgagaaagctactcacattccatttcgagattcaaaattaacgcggttgctaaagtcatcattgagtggtcaaggacgtgtttctttaatttgcacagttactccagcatcaagcaattctgaagagacacataatacattaaaatttgcccaccgtgcaaagcacattgagatccaagcaacacaaaataagattatggatgcaagatctctaatcaagaaataccaaaatgaaattcgtcaactaaaggaagaacttgaacagctgagaaggagtattcgtactggaacccctatagaagacaccatgcaaaagaaacatcatttgttggaaacaaaagaagattgtaatgtcaagcttcaatctagactggaacaaggagaagaagctaaagctgctttgcttgagaggatagaacatctaacagaactaattctggtttccgcaaaggcaagtcggactactaaatcgtctcactgcccaaggcgaagacattcttttggtgaagaggagcttgcatatctcccatatgaaaggcaagacatcatactggataatgaaagcaatatgttgtttgttcctatcgaaggattcggtgaaaaatttaaaagctcccccaaggaggagacggaaaatcagaaaggacaccttaactggctgaatctacggaagtgtgatgtgtctactaatctgacaagttcggatggtgaaaaccctagttcgaccaaatcattacctgccctttccacacctctggggatcggattttttaatgtcacatcagaacaaaggatgtcagattatatgcttgctgagaatgtaccggctaatctgttatgtgttggccatagagaatttccttctgacagccttcctgtccaggaaacaagtagaaagacttcagatcatgtggacatattgagagagcaattcaatattttatcaggggaggttgcactccatcaaagtgttctaaagcgcctatcagaggaagctggaaaaaatgcaatgaatgaacagattgagatggaaatgaaggtggtcaatgatgaggttaagctcaataagcagaaaatagcatctttagaaaggcggatttctaattcaatgtcaaatagtcgaggcatgcatgataatttagacgttgtgcagccttacattgaaatacctgagcaactcaatgagaaagcgtttcaacttgaggtgaacaaattgctcttttatgcgtctgttctttggcagtgagcttcatgctcctggctggtaacattaaagcattgtgttctcctcttaatggaaagatacatcattctaagttttatcatgaaatgtgttagcatctaatactacctcccttttttaatagatggtgccgttgacttttaacatactgtttgatcatttgtcctattcaaaaattaaatgtaaatatgcaaaaaaaaaaaagtcaagcttaaagtttcttgttggataatgctacttgtattacctagaatggtgctcttatgttacacattttctctccaggcagagattgatgaactgaagcagagggtatctgaactcactgaagccaaatctcaactagattcttgtaaccataagcttctagaggaaagtacatatgccaagggcctcgcctcagtgaccagtgttgagttgaaggcactatcagtaaaagtcaccaaactgatgaagcagaacgagaggcttagcagcgagttggcatcaggaagaaaccaaagaagaggaagccatggtccgaggggagctaggagggaaagccacacgaaacgatatgaaccagctcgcagaggagacatgaatgctctggaggccatgctgaaggagaaggaccaaagacaggcagaacttcatacgaaaattgaggagtcaaaacagaaggaagccttcctggagaaggagcttgccaatatgtggactgtactggcaaacttgaagaaaaccaggggaattgaccaagaagattttgactccaaatacaatggatcatgggcctgaaagcactgaagcaggtcgtggtagaaaaacaatcttccaatcgtctgctcttcagcaatgtataggcagctgtaccagataagcagggtgctttttttgtactccatataagcagctgtacctgggttcttctccagtctgaagtttgctgtctgtatactcctgaaataagcttccagcgtgagtaagtgcttgttgctggaatattcactgctaactgctcccgattgatttacaaattacaaatgtgtgaatatatgtaaagtaatgtaaactattttatttgtccgataaaaaaaaaaaacaaaaaaaaaaaaaaaa

SEQ ID NO: 45451 - DNA, 2289 bp, Oryza sativa
  Clone ID: PAT_MRT4530_48415C.1
atggatcgcccgcgctcctccaagcgcggctaccactacgaccaggactcgccgccgccccgctccaagccacgcttcgaccgccgcggcggccccaaccctaacaacagctaccaccgccgcggcccccccggtggcggcggcggcgaccgccgtggcggcttccagctgccacccgacgccgccccgcccccgcccccacccccgccgccttcctccgcggcggcggggggcggggggcccggcatgaccacctccttccgcatcctgtgcccgcagtccaaggtctacggcttcccgcccagcttcatcgccaaggtgcgggacgacaccaacgcggtcgtcaccatccacctgccctaccctggcgacgcggtccgcgtcatcgagacgtccgacggcgcgcgccgcgaggcggatgggcggccgccctcgttctcgccggcgcaggaggcgctcctcatggtgcaccggcggatcctggagacggaaccagacgacggcgatgaggatggcgagtatgggcccagggccaaggatgccagggaccgaggcaaggtgaccacgcgcctcatcgtgccgcgcctccatgttgggtgcctccttggtaagggtggcaagatcattgagcagatgagggccgagaccaaaacgcacatcaggatcctgccacgcgaccagcacacgccgcggtgtgtatcgttgtcggaggaggttgtacaggttgttggagaggggaattgtgttaaaaaggctgtagcgataatctccgatcgcctaaaggaaagcttacaccgtgaccgtggccccttccgtggacggatgaattcaccagagcatcgatttcctcaagaggatgaatactatggtggtgcacagcagatgcctgcatatgaagaaccttatggtcgacctgatcaaattagaaataatactagcatggagctgccagggtatgagtttgattcaaatggtggcaagatcaatgatcacacagaaattctgttcgatgacatcatatttcgaattctttgcccaagtgacaaggttaacagtttagtcggaacacgtgatggattgttagagatgttacaggaagatgttggtgttgatattaggcttactgattctcttgatggctctgacgaaaggatcataatcatcacatcaagagagggcccagaccatgagctttttccagctcaggaagcattgctgcacctccaaactcatattgtagaccttggtcctgataaagacaacattattacaacaaggttacttgtcccttcaagtgaaattgcttgcttcgagggaagggatggatcattatctgatatacagagacagaccagtgcaaatgtacagatattaccaaggcaagctcttccatcttgtgctctagagtctgatgagcttatacagattgtaggagagattagagctgcacgggatgctcttgtgcaaataactgcaaaattacggagttacttctaccgcgagattcctggtcctaaccaacttggcaatatcactgttcatggctccatttctccagcaaaaggttcacctagaggaccataccagggaagtgatattccaatgccatcctaccaacaagcacagcatgttccagcttcatggaaggatagtggaggtggtgcaaatatgtcgtttgagcaagggagcaacattaatgatgatatgaggcaaagtgctgcaaaacgatttgctgttcctctagtgacaagaagcacattagaagttgtcataccaaagagtgctgttgcaagccttactatgagagctggaagcaagcttgctcaaataagcgagatgtctggtgccactgtcacacttgctgacgaaaggcctgacgccatagaaaaagttgttcgaatatctggtactcctgagcaggctgacaaagctcagagcctgcttcagggatttattcttagcatccaagatgacattccttcaggctaattggagacagtggaggcctacgctgtcatgttcagtagggtgtaatgcatcttgagtttttgtgaggtattttaacctctgctagcatgaggtgtgcctgacttagcattattcgtgggcaaaatgttcatgtataccaccaagttgccaacatgtactgtccaaagtcctaaaacatattatgcggtttctcgcaaatcacccccaccgctttttttttttcctttttctttttcctttttttgagaaacaatcaccctaccggtgatacctcatattatgcggctgagaggccaagtg

SEQ ID NO: 45452 - DNA, 1356 bp, Oryza sativa
  Clone ID: PAT_MRT4530_48416C.1
atggctgctaagccaagcgctgccgaggtagcggtgaccgtgactccggttaccctttctgttgccgcttgctccggcaggcatgttgaatcaactgaaactgctctcggcgcagaggttcacctctgcatcaataaaatcatgattcataggtatcctgcgattcttcaaaatctaaaaatggattactaccgctacttcgtcccgagtgttgtggcaattggcccctaccaccatggtgcacgccaccttcaggaggcggagaagatcaagtggagtgccgtctgcgatttctgcaagaacacagggcactcggcagatgaagtatactggaagatcctccccatcgcaagcggtgcccgaagctgctacgagggcgatgcggtagtaggcgttcgaaaagccgagtttgcagctatgatgatacgcgatggttgtttcttgctgcaatttatggctcatatgtgcgatgtagccgttgacccattgttacaaacttggttcggctccaagcaacctagcatcttgagggacatgtttatgctggagaaccagatcccgtgggttgtgctcgaggccctgatgaccttcatgcccgtacccgtgcccgtggataacttcatctctaatgcaggggcaagtttcaatgtcaggttggatgataacattaatcctttcgacttgaatgaaattagctgcaaaccacatctccttggcctcctccgatactaccaatcaggattgagcaagcttggtgaaagcagctgggtcctcaagcgccctgaaggggtcactactgcactgcgacaatctagcagcgccatcgagcttgcagaaatcggcatcgatgttgtcgccaccgaggcgtcatggttcgcggacatgaaaataagcaaaggcctcctattcggcaagctctccatgccaccgctggtcatggacgacctcaatgcatgctggctcctcaacatggtggcgctcgagtcttacttggcatttactggtaagaatgacgtgcaaacggtcagctcgtacatatccctcctcgcgatgctaatgaaccggaaggaagaagtacacgagctgcggctgaagggtatattgcatggcaaattcagtgacaagtgcacgctcagttttctgaagaaccttgccgggctcattagcctccccccgcaacacgtatgcttgctggcacatcttgaggcctaccagcgaaaaaggtggatgtggattcccatacacaagttcctctacaacaactacaggatcatcgtcaccgtgttctccgtcatcggcgttctcgtcggcatcttcaaaacactcgtctctatcgagcaacagatgcagttatag

SEQ ID NO: 45453 - DNA, 423 bp, Oryza sativa
  Clone ID: PAT_MRT4530_48417C.1
atggcagtggaagcgagaacaagcatcgggagagaagaggagcctactagggtctgtctgccgtcgcccacccgcccgccgccgaggccactcaaccacgttgccggcaagccgccaaaccggtgtcgatttctccgccaaatccgccgccaaggccactcaaccacgaaagttggccaggagaggagggccgccggttggggagatgatgaggagcgctggccgtgggaggagacggggttgccgggtgcaccgccccttcgatccgtgtcggtcaagctcgccgaccacgccacccggagctcgctagccgcctgcctctcgccgaccacgcttggactggtgtcgacattggtggagagaggaggggagggggagaggggcgccgccggcgagatagccgaagccggactgccggtgtag

SEQ ID NO: 45454 - DNA, 462 bp, Oryza sativa
  Clone ID: PAT_MRT4530_48418C.1
atgaacctccttttatactccaaggggttctcacatgcactggggcctatcaaatcatgccggctgacgcaggccgacacggggaggatccccgtcattcaccatttaatggatgtggattctggggtgttagtgcaccgggaatgtcatcccgggaaggctcgtgctcattgtggttcgctgcgctggggccgggcggtggcgcaggtgggtggcagcatcgggtgctgggggcgtgcgatggcgttgggccgagcgatgacgcaggtgggtggtggcattgggcgttgggggttgagcgacgggcctataactgttggtgaagagcgacggacggcgtatggcgcaagcggtgagcggccttggcgggctagcgacttggcgagtggtgatggcgagtgggtgggtggcggcgaagttgtgcgcagaggggagacaaacacggcgcacgctcgtgcatga

SEQ ID NO: 45455 - DNA, 391 bp, Oryza sativa
  Clone ID: PAT_MRT4530_48419C.1
atgtttttgaccggaatgaaatgtcaaaaagcaccaaaacatgatttttggacatattgcagtgtattgggtgcgtccgtggcaaaaaatcacttcgtgattcgcgcggcgaacttatgtccatcgatgccaatattggcttatattggcacacgtgggtgcgatgtttttaaccggaatgaaaaagttcaaaaatcaccaaaacttgatttttgtacatattggagtgtattgggtgtgttcgtggcaaaaaatcacttcaagattcgcgcggcgaacttttgtcaattaacgccaatattggcacacataggtgcaatgtttttcactggaatcaaaaagttcaaaaagcaccaaaacatgatttttggacatactggagtgtattgga

SEQ ID NO: 45456 - DNA, 5046 bp, Oryza sativa
  Clone ID: PAT_MRT4530_4841C.1
atgtcgtactacgtagatccttgtaccaacgtaccccaataccctctatacccggtctacgggtatcacccgtcgatagtggcgcgccaggtagggacacttggtactcaaggttctactactatgtcatccagcttcgtcgacaacaacgtcaacaccagcctcagccaagtactccctgcttcaacaatgctggtatggactcaagttggcgaaatcgtcttcccggtttacaccacgacgctgatctcaaccggtcccccaatgaccggaaacgagaacgcagtggctacgaaccaaggcgactccatgtcgaaaaatcctcccgttgaaacgaagaacggaacatcgacaacatccaagctcgagaaggattctgatacggtcaaaccttgtctttccgacatgaaccgcgagccgacaaagatgacttccgaagccacaaggtcttggtgtcctatccacaaaaccaagaaacacactctgcaagattgctgggttttcctcaacgtctgtgctgaaattcgcgcctgcaaagaacgtggaattcagcgcacttctccaactcgggatgtctattgtcctattcacaagacaaagaatcacgacctctcgagctgcaaagtcttcctcggcgccatgaaagctccatctcctaagtcatatgcccccatcagggataacggcaaggaacaaggagcaactccaacctcagatcgattcgttggggtaatcgatatcgatcctcacaaaccatcggtcttacatcttctcgaggactatgggtcatcgataacgagcgcaccgcgggaggtattggctatcgatgacgttggcacgtcagcgcacgccaacgcagaagcggcaaatcaatcgactacaccagcccaacacatcagggccgttcaagctatactgagggaaactccttacgatcccgttctgaacgatgacctcgagtgttggacagaacgactacgggaatctgtgactaacctcagcaatgcgtttgaagaagccgctaccgcagcacaccaggagcagccaccaactggcgatgccaatgcgtcctcctcatcgtcagacagacatccacgaaagacacacgaccgccgacaacccaccgcccccaacgctgggtgtagggctttcggtcgttccctacgtgatgtccgatggcctgagagattccgacccggagcaatagaaaagtatgatgggagcaccgacccagaggagttccttcaagtctactccacagtactttatgctgccggagcagacgacaacgcgttagcgaactatttaccaaccgcattgaagggttctgcacgttcatggctgatgcatattcctccctactcaatctcttcgtgggcagacctgtggcaacaattcgtcgccaatttccaaggaacatacaagcgccacgcgatcgaagacgacctacacgcgttgacacaaaactcgggtgaatcattgagggaatatgttcgacgtttcaacgagtgcagaaacacaattcctgaaatcaccgacgcttctgtaattcgtgccttcaaatccggcgcaagaacgacatgccgaagaccggggggagtgaagaaaccagccacagacgcatctgagtcaagcaagaagaaaaatcgcaaaaatgggaaaaggaaagctcaagcggaagtcctcgcagcagaatacgcgaaccctcccaagcgcccagacccacaaggcagcgacacaaagaaatcatggtgccccatacacaagacggacagacattctctagaagattgccttgtttttaaaaagtcgctcgagaagcacatggcatttgaaaaaggcaagcgagtacgtgttgtcgagaagaacgaagagacggctcctaatgaatcggattcagcgtatccagactccgacctccacgtctcacacatcttcggcagttctacaacgtactcctccaaacgagaatacaagaaagtggaacgtgaagtctgctccacatggcagggggctgcacccaagatgaagtggtctgagcagaagatagagttctcggaagaagaccaccccaagaccgccgttatcccaggacgatatccaatcatggtcgaacccaccattcggaacatcaaggtagcgcgagttctcatcgacgggggcagctcaatcaatcttctcttcgccagcactttggacgcaacgggaattccgcaaagcgagttgacaccaactgatcaacccttccatggaattactccccaatcatcgtccagacctttgggcaagattacgttgcccgtgactttcggccaagccaacaatttccgaacagagcagattaccttcgatgtcgttgaattcgatacagcttgcaacgccatcatcgggagaactgcacttgtgaagttcatggccgcatttcactacgtgtatcaagtgctcaagatgccgggaccgaagggaacaatcactattcgggggaacgcaaagctagcggtgcagtgtgacaagcggagcctcgacatggtcgagcaaacgcccagcccatccgccacgactgagccacccaagaaaccgtccgacatgccgggggtccccaggaaggtgattgagcacaaactcatggtacgacccgatgccaagctagtaaagcaaagactgcggagatttgcaccagaccgaaaacaagccatacgagaagagcttgacaaacttctcaaagctggcttcatcagagaagtacttcatccaaagtggctagccaatccagtcatggtgcggaaggccaacggaaaatggagaatgtgtgtcgacttcaccgacctcaacaaggcgtgccccaaggatcactttcctctccctcgaatagatcaactggtggattcaacagccggttgcgagctattgagcttcctcaacgcttactctggctaccaccaaatcagcatggcaaaagaggacgaagagaagacagcattcatcacgccgttcggagtattttgctatgttaagatgccgttcggactgataaccgccgggaatactttccagcgcacgatccagggcgcacttagcgaccagcttggcaacaatgtcaaggcttacgtcgacgacatcgttgtcaaaaccaagacaggcgactcattgattgacgatctatgggaaacgttcgacaaccttcgacgatatcgcctcatgctcaatcctgagaagtgcacgttcggagtaccgtcgggcaagctactcggattccttgtctctggcagaggaatagaagcaaatcccgagaagatcaaagcaattgagaacatgaagtcgcccacaagactcaaggaggtacaaaagctaaccggatgcatggcagcgctaagcaggaagctgcgccactactttcaagcccacagtgtcacagttgtctcctcttgcccccttggcgaagttgtgagaaacaaagacgttgtcggccgcattgcgaaatgggtagtcgagctgagccagtttgatgtccactttgtaccacaaacagccatcaagtcccaggtactcgccgacttcgtcgccgattggactatgccagataacaaatcagataaccaaggcgacaacgaaacatggacaatggcgttcgatggcgcactcaacagccaaggagcaggggcaggatttatcttgacgtctcccttcggagatcaattcaaacacgcaatccacctcaacttcagggcaaccaataacactgcagaatacgaaggattactcgccgggatacgagccgcaactgcacttggggccaagcgactaatcgtcaaaggggactccgagctagtcgcgaaccaggtgcacaaagattataaatgctctaaccccgagttatccaagtatctcgcagaagtcaggaagctagagaaaaggttcgatgggatcgaggtccgacacatctaccgcaaggacaatgtcgagccagacgacctagcacgacgcgcgtccagacgagaaccgctcgagcccggtacttttctcgatatcctgacgaagccatcggtggaaaaggttagcgacgaagatagcccgaacacccccgacattggctcggaggtcaccgaggcagaacacgccgttgccgacatcgaaaccacagacgactggcgcatcccactaatcaaattcattagcagcgaggagttgcccgaggacgatacagaggccgagaaaataacccgtaaagcaaagatctactgtatgatcggcaacgatctatacaaaaaagcgccaaacggggtacttctcaaatgcgtctctaccgacgacggcagacacctcctcctcgacatacatgaaggcatatgtgggtcacacgccgctggtcggacattggtcggcaaagcttttcgacaaggctttttctggccaaccgcccttaaagatgcatgcgacatggtccagcgatgcgaagcctgtcaattccacagtaaacacacaaagatacccgcacaagcgctccagactatccctctgacttggcagttctcatgctgggggctagatatactcgggccattcccacgaggacagggcggctacaaattcctattcgtggcgatcgacaaattcacaaaatggatcgaagcagtacccacgggggaaatcaaggccgacaacgccatcaaattcatcaaagggatattctgcagatacggactaccgcaccgcatcataaccgacaacggctcccagttcatcagcgctgatttccaggattactgcatcgccctgggggtcaaaatatgcttcgcctcggtctctcaccctcaaagcaacggacaagtcgagagcgcaaacgacatagtactacaagggatgaaaacccgcgtctacgacaggctcatgtcacacgacaaaaagtgggttgaagaactcccgtcagtactatgggccgtacgcaccacaccgacaacgtccaataaggaaacacccttcttcctcgtgtacggctctgaggccatgctccccggcgagctacgacaccagagtacacgagtatag

SEQ ID NO: 45457 - DNA, 607 bp, Oryza sativa
  Clone ID: PAT_MRT4530_48420C.1
ggctgatgttgagtttaggtgctttgtcggcggcctcgcatgggccaccgatgaccgctccttggagactgccttctccaagtatggtgatgttgttgaatcgaagatcatcaacgaccgtgaaaccggcagatccagggggtttggtttcgttaccttcggtagcgagaaagccatgagggacgcaatcgaggggatgaacggacaggatctcgacggccgtaacatcaccgtcaacgaagcccagtcccgcggaagtggcggcggcggacgtggcggtggaggatatggaggccgccgtgaaggaggaggcggtggaggagggtacaaccgtggctacgaaggtggaggtggcggcggcgcccgtcgtgatggtggatatggaggcggcggtgacagctactcccgtggtggcggtggacagtggtagactagtctgtatcttaggggctagtccggccgtactatgaaattggaatttgtctgttcgttatggatctgctttctggttcgtagctactagtgagtctatggtgtttcgatgttggttaccgctgatggttgtaattagcatatagtgatgccgaatctatcctaactatttagc

SEQ ID NO: 45458 - DNA, 498 bp, Oryza sativa
  Clone ID: PAT_MRT4530_48421C.1
atggccggcatttttggatccacgaggatactgttgggcaccctacgagatacacaagcgagcagcaacaaggactgcaacccgacgcagttgggcacgctactgcctgaatgcagtgtccactgtccaatggaggcgtccgacctgcgcgctagcgatgcgtcgtcgtccttcccatccgcgcggctctcgtccagcgcccgacgccaccgcaaacgccgccgcccgcgccgctcttccacggcgcccgacgcggccatggacgccgccgcccgcgctgttcttcctcggcgcccgatgcggcagtggacgccgccacccacgcccgacgcggccgtggaccttccccggcgcccgacgccgcagtggacgccgccgctcgcgtcgctcttccacgacacctctccaccctttgttcgctctctcttgtccagttgtccccaaagctcacgagctagctcgagcttacaaacgagccgagccgagcttgatttctag

SEQ ID NO: 45459 - DNA, 117 bp, Oryza sativa
  Clone ID: PAT_MRT4530_48422C.1
atggagcgtacaaggtggctttgcgaaaatttcagcgaaagcagatggggcaggggtcaagaaggtaggccgaggaatggagacacctctaggttcaacgccggcgggtctgggtag

SEQ ID NO: 45460 - DNA, 336 bp, Oryza sativa
  Clone ID: PAT_MRT4530_48423C.1
atggggtttgatttgaatgagcttttccctgatcatgtttgtctggacaaccctgtggatcctttcttcactcaggaaatggatactctcattagaattattcctgcagataaagccccaggcccagatggctttaatgagcacggcaaggagaggcgccggaggcgcgggaggtgtgggaaccgccgaaggatgcgggtgcacgccgcgagggagaggatcgccggccgcggcgcccgcacggggagggttcacctgccacagcgtcgatctgctcgccggcaacgcatcctcccgctgtctattcgcgccgccaacctccggcaaaatacataa

SEQ ID NO: 45461 - DNA, 1714 bp, Oryza sativa
  Clone ID: PAT_MRT4530_48424C.1
gatccccgggctgaggaattcggcacgagggagagagagagaaactagtctcgagtttttttttttttttttttttttttttttttgtcgaacatgggcacttcagtattactccaccgaggatgatacagagcagcccataggatggttagtcatcaaacgcaaacggaggcacaaaacttgacaatacaataccctatacaagcatccaaatgaaccaacggaagattgcagaaggggcccgcaataacacccttggggccacaacaagcgcaccgttgttgaagtcggcagaatatcaccgtatcaccaccaaacctactagctagtattcacaagcttatgcatgaccgatgaacacgcctcccgtaaccgtggcgaacgaggggacggggagctagagcaacacgcccgggtgcttccctctggccttccattgctgctcaatgtcgtgagcaattctccgagcatccaccgatgttcccatcagcccgcgccgggtgaacccgaccgagtagagcccgttctcacccttccaaccgtttggaaatgccttccttggcaacccatccttttcggaaaacaactcccggtcctttaaccagaagggaacgttgctcttgtagccggtggcaagcacaatgacatcaaactcctccaaccttgtgtccatgaactctacctgtctccctgatatttgttttatggccggccgtaccttgatgtcaccagacttaatctttgcaaatgtgccgacgtcaagaactggggtcttccctgagagtgacttgagctcgagaggaccgatggtaggacgctttagcccaagctgagcagtatccccaagcatggtctgagctatgagcagtagaattcggtccaccacgtggactgggagccacttgagcagccacattgacagcccaaaggtggactgacccagcatctccctgggcaagatgtgtactacaatatggggatttgcattgtggttgcagaggtctaggcacacctccatgccggagttgccactcccaacaacgagaacacgcttcccagcaaatgcaccgccacttttatatgaactggtgtgcataacagttcccttgaagtcgtctaggccatcaatctctggcagcacaacctcggcgttctcaccggtggccacaaccaaccaccgagacacatactcgacctcctctcccattatgccggtggcccgtgtcctcacccgccataactgaagctgctcatcatattctgcacacaccaccgtccggttgtacgtggggcagatcccaaaccttgcagcgtagctctccaggtaggctacaaactgctgctttgagggataaatagggtagtaggcaggaaaaggcatgaggggaagctcacagaattggcgaggaagatgaaggctgagacgatcgtatgtcttcagctgccaaagggaagctatgcagttggagcgctcgagaacaagactgtcaactcccttctccttgagacatgcagcaacagcgagccctgatggtccagcacccacgatgattggccccagaacccggatgcatcgctcggcgcgagcgacggcagcatctgcgctcctcttcttgcagaaaccatcaacagattggcggcagttttggctgaagtagttttggaagataggatcatgggctctcttgccctcaatttcactccaagggtccat

SEQ ID NO: 45462 - DNA, 207 bp, Oryza sativa
  Clone ID: PAT_MRT4530_48425C.1
atggtcagcccaagtggaccaaatagcaatagaattatagtagtgtcttggtctgtgaaacttacagagatgacatcctcaagactgagtaaagaagaaccccatattagggctttacttttggtgaagattgttgcccggctgacttttgagaacgccgactaccagaccgccgactggacttctgggatgagcttctggaagtag

SEQ ID NO: 45463 - DNA, 305 bp, Oryza sativa
  Clone ID: PAT_MRT4530_48426C.1
gggacgcgtgggttgagcttgctgaacactcatgcctccaaactcgcgcccaaaccgtggttcccgacaccatcttggagttcgcgccaccgagcggagcgatctcttctcattatgctgtcctcgcgagcagaacggcggaccgacgctctggcgtcaccaggcggcgcgggccctgtcgcgagtgagggggaggcgtgtccagggaggtctgctggcagcggctgcgcaagccgttggcaggtaggtagcacaccggagccggggccaggccgagatccagcgtcgagactcgtcggctccct

SEQ ID NO: 45464 - DNA, 896 bp, Oryza sativa
  Clone ID: PAT_MRT4530_48427C.1
atggcgaggcggcgcagctccggagcccttcctcccgccggatctagcggtgggagggcgcctctgggcggccaccgctcctcccgccgctgcagcggaggggccgatccgacctcggccgtcgccactgctgccctcagccgtcgccacgctatcaatccgcggccgtcgcagccgccgccaccgccgccggagggagaagagaggcggcggaggagggagcctccgccgttggatccgcccgccgccgccggatccgcccgcggctgccgccgacgctgccaccgccgccggaggaaggcgagagggggcggagggagccgccaccgctggatcgaccgacgcattaggtggcggcggggaggatggcgaggcggcgcagctccggagcccttcctcccgccggatctagcggtgggagggcgcctctgggcggccaccgctcctcccgccgctgccgcagaggggcggacgcggccatcacctccgataccgcctcccgctgctgctgggcctcaccgtctccacctgccgccgccacccgtcgcccgctgcctcccctcttgcgccgccgcctgccgcctcggctccgagagagaggagagcgagagagaagaccgagaggaggagggcgccgtcagccgggtggagggcgccgtgcgaagggggaggggaagcggcgcactggtgaggggagaggggagggcgtcgctggttgcgacggcagtagagagaaccccgagaaagaggaaaatgaagggaggagagagaggataagggaagtcgggaaaaacgagaagatgaggagacggaaggatcgaggcgccgcttgctccgctcgctctccgcttgctctctcggggataaggattagatctgacgggccttttttttaa

SEQ ID NO: 45465 - DNA, 171 bp, Oryza sativa
  Clone ID: PAT_MRT4530_48428C.1
aaattcaacttatttataaggtatactgttgtcccacaggaaactgttcataaaactaacatatcatacggacttgtggggccataaagccagccccaggtggacataagcaccacaaatccttgccgacctggggctgggaaggacaagttaatgggcggtgcaaccaac

SEQ ID NO: 45466 - DNA, 1480 bp, Oryza sativa
  Clone ID: PAT_MRT4530_48429C.1
gagaagatagttgaaccccacctgaagcatgactacgacgccctatgcaagataaggccggtggcaagagaggagccttcctccttcagttccaggatgtccaatttcttcctaggtttgttctcgcagaaaggataccgtgttagtgctcaggatgtgaagtcggagctccacatcgacaataaaagctccaggctcacaagccacagctctctcacacgagagctcgagtctctctcgtcggcgacaatggcgagcggcggcggcggaggaggggagggggagacggtgctggtcaccggcgcgagcggcttcatcggctcgtgtctcgttcgccgcctcctcgcccgcggctactccgtccacgccgccgtcctcaaccccgatgacaaggccgagacggaccacctccacgcgctcgccgccgccggcggcggcgagggccgccgcctccgcgtgttcccgggcgacctcctcgacggcgccgccctcctcgccgccgcgcggggctgctccggcgtcttccacctcgcctccccctgcatcgtggaccgcgtcctcgacccccaggcgcagctgatggtgccggcggtggaggggacgctgaacgtgctgcgcgcggccaaggacgccggcggagtgcggcgggtggtggtgacctcgtccatctccgccatcgtgcccagccccggctggccggccggcgaggtgcgcgacgagcgctgctggactgaccttgactactgcgagaagaacggggtttggtaccctgcttcaaaaacattggcagagaaggcagcatggaagtttgcagaggagaatggattggatgtggttgtggttaacccaggaactgtcatgggcctggtaatcccaccgacgatcaatgctagcatggccatgcttgttcgcctactcgaaggttgcacagaggagtatgcggatttttacatggggccagtccatgtggaagacgttgctcttgcccatattctgctgtacgagaacccatctgcatccgggaggcacctctgcgtgcagtccattgctcactggagcgatttcgcttccaaagtcgccgagctctaccccgagtacaaagtgccaaaattacccaaggaaacgcagcctgggctggtgagagcagaggctgcgtcgaagaagctgatcgcgctgggtttgcagttcagtcccatggagaagatcatcagggattcagtggaaagcctcaagagcagaggcttcatctcttgatccttctatgcattaatccttctgcctgagtagattactcgtgtgttaatgtgttattatgccattttcagcaagcactctgtgtttatgaataatggaaatgtgcagagacgctatgattgggaatgctccagttgttgagcacttgacaaatatatcatgcaatgcatgcagctacaattcaaaaaaaaaaaaagaaaaggcggccggttcaaaggattccagc

SEQ ID NO: 45467 - DNA, 696 bp, Oryza sativa
  Clone ID: PAT_MRT4530_4842C.1
atgacgatgacgacgaacaccggcggggttcagccgaaggggaggcgatgccaaggacgacgtcgtggctgcgatgccgaaggtggtggaggtgccgccgatcggtgcacgggcgaggagggacgggcggccgaacaactccggcgaggtggatggagaggttcgcgccgatgtgcggcagcttccgggcgaaaccaaggggtggacgaggtggagggctacgtcaccgtgccaagggaggggacggcagcgccggctgacgcatgggcacggcgtaaggggctgccggaggagacgtcgacgaggaggaaggagaggccggcgcgggcgacggcgtttcggcgaaattcgggcgacgccgtggcctggccgggaaagaggacggtgctctggtgccgggagaggtggtggcgacgtcagccggcgcacagggggcgtggcagaggcggccggaggcggaacagtggcggcaacaccactgttgccggcggggatgcacttccggaggtctccgcgggaaacagagggcaggccggcgaagaggaggcggctgcgatgctggaggaggcgatggcacggccggccggcgtgctgacgcggcggcaggggcggctgaagatggccggcggcacgggagagagaggaggacggcggagaggggtggtgaggccacgggagaacgcgggagggggctaa

SEQ ID NO: 45468 - DNA, 279 bp, Oryza sativa
  Clone ID: PAT_MRT4530_48430C.1
ggcacccctggaaggaggggcaaatagttaatttttccttattaacaaaaggggggggaccaaggtccattggctttttggcaaattttttttggtaggaatactggtggacaagcaaatatgtgtgtccggggcttattagggttcaagaatgaaaaaaaagagggggacaggggcaggcttgctcactttgggcggggggaacaggaaacaggggctagacccaaaccaggtgaaatgttaacagggggagaagaaaaaaagggaaaacttaaaacc

SEQ ID NO: 45469 - DNA, 188 bp, Oryza sativa
  Clone ID: PAT_MRT4530_48431C.1
aaattttccaagctttgaaaggccatagcaggagcacggacgcagaaccagaggttagtgagggagaaacaattgagcggtcaacgacggatggacagacaacatgacggatgcggccatggctctgataaaggtcgcctggcaaaagtaccacaaagtccccgtagtccagacgcagagactacgga

SEQ ID NO: 45470 - DNA, 219 bp, Oryza sativa
  Clone ID: PAT_MRT4530_48432C.1
ataatcttcccacgggataaaataaatacaatatccttggaatactctcgggtgaaatgctacaatagcatatccgtgcgcttgcggatgaactctgtaaccataatatactagaagtatttctgcgccattgctgggaattatatttctagtaatgtagttaagaaataccaacgtccacccgagtgtttaaaacggtttccctgggagcaaacaccg

SEQ ID NO: 45471 - DNA, 1749 bp, Oryza sativa
  Clone ID: PAT_MRT4530_48433C.1
atgatgcgggagggcgtcgcgggggaccacttcacctttcccttcgccctcaaggcgctcgcccaggcgcaccaccgttcgccgccgccgtgcgccgccgcaaccgcaacggcaaccacaacgttggggtgcctccacgcgcagatggtcaaatccggccacggcgccaacgtgtacgcggcctccgccctcgtccacgcctacgtctcccgcgccgacgccgcctccgcgcgcgcggtgttcgacgccgctcgccaccggaacgtggtcacctggacggcgatgatcgcggggcacgccgcggccggggaggcacgggaggcggtcgcgcttttcagggaggccgtggcgcgcgggcaggaggtcaatggcatcaccgtggcgcaggtgatgggggcttgcgctcagagccgcgacctcgagagcgggaggtgggttcatgcgacgctccgacgctggggcgtcgagcctatcttgctcgacgtcgctcttgccacggcggtactccatatgtatgcaagctgtggcggtcttgatgctgccttcgaagtgttcgataaaatgcctcgaagaaatgaggtgtcatggaatgcaatggctgaggtatgcagtagacatggaagacaggataaggttctggaggtgtttccgggtatgcattctgttggaatgaagcctgataaggtgacatggctgagcatactccgcgcctgtacatccaagggagctgcgggcttaggccaaggcgtgcacgcctacatggagaagacgattggtcatagacatgtcgcagtttgcacatcgctcatggatatgtactcaaagataggcaatgcacggagtgcactccagatatttcagtgtctcaaaagaaaggatttgatggcatggacaagcatgatcatcggcttagctaagcatggccatggcaaggatgctgtgcaactcttcaaccaaatgcagcatggtggtgttgttccggatcatgttgcatttgtaggtgttcttactgcttgcagccatgctgggatggtagacgaagcaagaaaatactttgactccatgtggaatcattatggcatcaggccaacaatcaaacattatggttgtatgattgatctcttcagtcgtgctggtcgattggcagaggctgagggaatgatgcaaatgatgcctattcaacccagtgtcaccatgtggggaagcatgatgaatggttgcaaggtacatggcagggctgatattgctgagagggtaggaaggcaggttgctgagcttaatcctcagtttggcgcaatatatgtgataatgtccaatatatatgcggagattgttctaccaagtgttcaattgttaactctgtatgttgcgtggaaagaaagaggcactgtggagcctgcaaacgagctgtacagtgggaatggagaacagtacaggaatacacgatacaggagcacaaagagagaactcattgaatacaaaaagggagcttctaataaggtagcagatgccttatctagaaggggaaacgcagggagaccatcagaattaaatcttgttggtgagccacatcactgtcgactgattcctgcaattgctacagacgacggccacagcccattttctacagtgggggcagaagatcactgtgccgatggaatcaaccgtttaccgtgcatagtcactggctttcacagatgggaacaagcagcagccgacaagtcgccggccggtggactagcaacatag

SEQ ID NO: 45472 - DNA, 1009 bp, Oryza sativa
  Clone ID: PAT_MRT4530_48434C.1
atggccagccagggctacccagcttatcctggaagtgagctcctcctcctcatcatcatcagtgaccagaccttggtcccgtctgaccgccgtagaacttgcgaaaggaaatgtcgtggcggtggtactcgagcttgtggctcagttcttttaccttctggtatgctctctctgtgtgaagctgaaaaatgttctgcacatttttcatttttctctgttgctgatgctaacccatttgtcacttcgaaagcgtacggacccaggagagttgctgactcagcagaggctgggctctctcccacgacgaaacgagcggcccacgaaaatttcgccgcgccgcggccgcatcggagccctagcccagccgccggagtccggcgccagcggcggcgaggcggcgaagtgcgggggagggagatgtcggtgcggatcaaggcggtggtggacaggttcgtgaaggagctgcaggaggcgctggacgcggacatccaggaccgcgtcatgaaggagcgggagatgcagagctacatccaggagcgggagcgcgaggtcgccgagcgggaggccgcctggaaggccgagctctcccgccgcgaggctgagattgcgcggcaagaggcaaggctgaagatggaaaaggagaacttagagaaggaaaagagcgtgctcatgggcactgcttcgaatcaggacaaccaagacggtgccctcgagatcactgttagcggtgaaaagtacaggtgccttcgtttctctaaggcaaagaaatgagatatgaacttaggcatcgagaagtagttgtgtaagacagattcatggtaatggtaaaaccttattttgtttcaaattggattcttttgtacagggaattctgaaacgtgcgtaaactcagtaaaatatccatagtagtttggctacatgcctttcatactttcatatttgtatgcattttgggggtagttcccttaacagctgcaatcaggttaagatcatggaagcttgctttgcc

SEQ ID NO: 45473 - DNA, 685 bp, Oryza sativa
  Clone ID: PAT_MRT4530_48435C.1
atggcgcggtggtgcgacggcgctgggaggtgggaggcggcgctaggaggcggaaggctgcgtggggaggcggccgggaagcagcgggaggtggcgcggggaggtaggaggcggacgaggtgggatgcggtggtcgacgacctcgacgacgaccccgacgacgacctcgacgacggcgcccccgatgacgacctcaatgacggcgcccccgacgatgacgacggtggcctcggcagtggggcggaggtgcggcgctggcggaggttgggcaccggcgcggcggaggccggaggggcagcgtggggaggcggccgggaagcggcggggaaaggcgggagacggcgggaggcgtggggaggcgggaggcggacaaggtgggaggcggcgctcgacgacctcgacgacgaccccgacgacgacctcgacgacaacgatggcggccctgacgaccccgacgacgacgacctcgacaacggcgacctcgatgacgacgacggcgacggcgacgacgacgatggcgcccccggcgacgacgacgacggtggcctcggcactggccactgggggcggagggtgggaaaaacgcgtggggcccacgattagagaggcgcttttggcttgccaaagttggccagcgcggggagaagtttggccagctagatggcttggccagccagttagctag

SEQ ID NO: 45474 - DNA, 750 bp, Oryza sativa
  Clone ID: PAT_MRT4530_48436C.1
acccggggatcgcccggtcaatgcacagccgtaaactctgaatgaaatcctctaacctcgtatttaaccccgtggccggattaatgtgcccatgggaaaaaccactgcccaggtgaatatcagaaagatgcaggacttttaacatggcaatgactctccaacaaaaaaagggaagacctctagtcctcccttcatcctatggtaatggcccgctgggggacctaattattcaacgccgggggcaatcagttccctcgtttcaccggggatgaccaccacttggttgtcttcaccaatgtccaccagcgcttggctaccttccttgaggcggccggaaagaatttcttcggctaacacgtcttccaacaggcgcataatggcccgacggaggggacgggcaccgtaggctgggttgaacccttcttccacaatgcgctccttgaacttgtcggtgacctggagagaaatttctttttccaccaaccgggcaaacacatcccgtaggagaatttccgaaatttccttgacttcctccttgttcaattggcggaagacgataatttcatccaaacgattcaagaactcagggcggaagtagtttttcaactcttcattcaccaaggaacgaatgcgattgtactgagactccgcttggtcatcggcaaagtcaaagcccaaaccaccgccacctttttcaattaccttggaaccaatgtggaggtcatatcctcagagtcgacctgcaggcat

SEQ ID NO: 45475 - DNA, 5136 bp, Oryza sativa
  unsure (1)..(5136): unsure at all n locations
  Clone ID: PAT_MRT4530_48437C.1
ctccggtgagcatcgaggaggtagaggccgtccccgacgccaacggcggcggcgaggaagccaatcggccccgcgtggaaggcgacggcgaaggtgtcttgcagagcaacgagtcctccgcgaaggtcgatgagccggtagctacagagaacagtgacgctgctcctgctgaggcatctgtagatgctgtgaacggcaagattcctcctaccaagttgattccccaacatcctctggaaggtgttacattgacagaaagaactgtacgtattactgggaataagaagcagatagaagcggcaaaagatattattaagcaagctatgagtccccacggtcgcggacgcgtgggctagcggaacaaagcagttagatggttcactttgtataaccactacaagaaaatagtgttatggttagtttctagccttttaagatcatgtgacctatcttttgggagttctggtctttttcaccaggccgacaacaaggaagccctgaccaattttattaagatcaagaggagtaaagtattgtttacaacaaacatggttgtttagggatcaccctaacacaggaacacaacttaaaagctcagaattggccctaagtccgggagaggcacagaataccatgcatcacgctaagtccattcttctatgatgcagcagattaccgccgatttgctggcaccgtcaaacacctgagcgttccgttctttccacattaagattagaattactactgcgtcaaatgggatcatgagtcacacctacatgcctgacggcggtgtctagccgtcccatccctcacgggtggttgcctccgcaaagctccgttttgcatccctcgccctcagccaggtggatgtcgccgcccaccttgccagcccaggaggacgcccaccgccagaccctgcccgggtccgtgtgctatgctcgccccacctgagcgccaggactggggtatttgacggaacaacgaccccgagtcgaaggtcgatgagccagtcgctacagagaacagtgacgctgttcctgctgaggcatgtgtagattctgtgaacgtcaagtttcctcttaccaagttgactgcccaacatcctctggatggtgttcaatcgacacaaagatctatacgggttactgggaataagaagcagacagcagcggcagaagatattattaagcaagctctgagtcagggttttggtagaagcaaatggtgtaacacggacataggttttgaataggccaaagcagttgaatgccctctcgtctgcaatgataacgtgttttttgaggtggttcgctgcttatgacgaagatgatggagttaacctattgattgtgaagggagaaggaagagcattttgtgcaggtggagatgttgctgcagttgtccggtctataaataatgatagctggaaatatggtgctcattttttccgaaatgaatttctagttaaactatatcattgcaacatatagcaaacctcaggtttcgcttctaactggaattgtcatgggtggaggtgctggtgtttctatacatggaaggttccgagttgtcacagatagcacggtttttgctatgccagaaacagcgttgggtctctttccagatattggggcttcatattttctatctcgacttcttgggttctatggagagtatgttggtcttactggtgtaaggttggatgctgctgaaatgcttgcttgtggcctagcaactcattttgtaccttcagataggctgtctttgctagaagaatcacttaaaaaggttgatacatctgatccatttgctatatgtggaattatcgatcaatattcgcaacaaccatctctgaaagaaaaaagcgctctgaataggctagaaatcatcaacaaatgcttttccaaaaaaacagtagaagaaatcatagcctctcttgaacaagaggctccaaatgttgctgatgaatggattgcttctgcaatccagtccatgaggaaggcttctcctactagtatgaaaatatccttgagatcgataagagaagggcgaacacaaactgttggtgaatgcttacgtcgagaatatagaatggtttgccatgtgatgcgtggtgacttcagtagagacttctttgagggatgcagggctatattgttggatagagatcgaaacccaaagtggatgcctccaaggttggaagaggtgcacgacgaggtggtcgaaaaatatttttccaaagtcgatgatccagagtgggaagatttggacctacctcctagacgttcccatggaaggaggcttgttcccaagctttgactgaatgaagcctctggtgaaaaactgaagcctttgttggtgcttcttaataacaaacagatcgtccccaatttgagggatatgtggagacaagcgatgaagtttataataaagctgaaacatataatactataggttaacaattttattagtagcaatttagagaagtccatctcatagtctcatgcgatgcttatattggtatcgctattgtgctttttcaaggtgtgaaggtacgcttcaagccaaagcccaactgcataacggcggcccatatgataccggtatcaggctatcctattaggctttgaagctatcttctgcttgtagattctaggtaatcttttatatatattgtataaaagaaattcataagtttgcactgtgttgttttttaagtaaggcctcgaaaaggtagatccctaatatcgagtgtgtcttgtaatgcacttgaactgattgcatttcgttgatgaaatgggaaaggtccactctctttgtccaaaataaaaaaaacgaccatatacttgtcactgcctcacaccatgacatgctcaccagcgttcttggaagcaaggaagaggcgctggcctccattggtattctcagcagagttacccacagcaacgtgcacaagcgccaaacacatatggtagcagataatcttgcaggtatctggcctgaatcaagaagcttcagtgatcatggatacggaccaataccatcacgatggaagggcgtgtgtcaactaggacaggcctgggggccaaccaactgcagcaggaaaatcattggtgcacggtactatgctgcaggtatagaaaaagctgactttaagaagaattacatgtctgcccgggacatgatcgggcatggaacgcatacagcatgccagggtacggtcagccaggtagatggagtcagcgtccatggccaccagcttatgatcagtcgggccagccaccagctcagagtggctatgctgcacctcctgcaaacccacagcctgctgttgcaaagggggtgtcaccgcagcctgctggatatggtggacaatggaccgcttgaggtttgtacctcattattgacagcaatgatctagttgaagactatgttttgcctcatgatgctgccgcttatatgaagtaggcggttgaatccccttgggatgttcattcagtaagcggtagacttttgatatgcctataagggatgtaaccccttgcctctccagttgttataccggatctctgtagtagttagtagtttgttaagatgacataaaacctcctgtttagtttaaaagtgaaccgaattatgtgttattctgcagcatgtcgactgatgtttggatgcttagaactatccctttgcttcacaatcaatggaagcattgttctgtgcatcgaaataacttatggaccaatactaaattttgtcaatactgtcttcgaaaacgtttttagtggtggggcatctggtcttattttcggactgtataccacagatatgcttttgcgcactgaagattgccaaggcataccctgtgttttagtcgatattgatattgggtctcaagttgcaacatacattggtagtcaaagcatgccggttgcaaagattgaaccagcacatagtattacaggaaaagaagtcctggctccaaaggtggcaatattctcatcaagaggcccatccactaggtaccctacagttcttaagccagacatagcagcaccaggggtcaacatcctagcagccaaagaagatggatatgcatttaactcggggacttcaatggcagccccacatgtagcaggtgtcatagcattgctaaaggctctgcatcctgattggtctcatgctgctctaaaatcagccattgttacctcagcggaagctctacctcggaaagttgctgacccattcgactatggaggggggaacataaatcctaatggagctgcagatcccggcctgatttacaacattgatccaatggactacaacaaattcttcgcttgcaagatcaaaaaacatgagatctgcaacattacaactttacctgcctatcacctcaacttgccttctatatcaattcctgaactaaggcatccaatcaaggtgcggcgagcagtcacaaatgtgggggaagtcgatgcagtttatcaatctgctatacagagccccctaggagtcaagatcgatgttgaacctccaaccctagtcttcaatgccacaaagaaagtgaacaccttcaaggtcagcatgagacccttgtggaaagtgcaaggggaatacacatttggaagcctaacttggtacaacgagcatcacacggtaaggatcccaatcgcagtccggatcacaatccgagacttctatgcggatgttgcatagtaatgaacatatttctagacaatgtatactcagtaataaacatgtccaccactcgcgcttgcaataagaacaatttgcttcattgttcataggattgaatagctcctgctttgaccagctgcaattgctgttgatgcggttacctgaatcccatgatggcgacagtaggtntgactcccacactgaagtgatcagtgttaccccaaataagcaacatgaattgctgaccacaaccccccccgatttcctnggactgaactaccaaccacccaataaacttcaataccatcacgatggaagggcgtgtgtcaactaggacaggcctgggggccaaccaaatgtctgcccgggacatgatcgggcatggaacgcatacagcatnnacagnagctggtgcagtggtagatggagtcagcg

SEQ ID NO: 45476 - DNA, 2955 bp, Oryza sativa
  Clone ID: PAT_MRT4530_48438C.1
ctcgtggtcaattatttttttgtgggaatatttgtcatcttccatataattcagtatcttgccttgctgccttttcaatggcaaaatttattccatgtccatgaattttaaggtttttgcattgtcttaaattacaaatgatgcatatgtttagtttcccatgaaaatgttgttcattcatggattaacaatatggaacatggtgtgcatgatcatcaatgttaactatgaatgaagttagaataaatgatttgactctgcaatggatagcttttgaggatttgtgagatatattcacgttgacataaaaagatagtttagtctcggtggcttgatagttcttcatagttcgtctagaagcagaacttaccttcgtgtatgatagtgtggttggacttcagtacttgatcgttaaaaccttggtgctgtcacatgatcaatgaacaattactgtggtactagtttcaatctttagtcggctagtcttttgagttttggtaactgcttactgctagatgagatctgattatgtttcctacataagaagtcagaactgactcatcaaggttcctctcgcttccagtttccatgatttattttgtttgaaggtgccaatttggagttggttgggtatcctaatgcagatacagctaggctttcatcatgggctccacatccttcatccattacatgcacagaagagggatattgaccattatcccttgcccttgcatggtttgtgtagttggtaactggtaaggctgcttattgctgaaatggaaagaaaaaaaaacaatgtggcattgggagactgcaccaaatgtttcattgccatgacaaggatactgcatcaccatgtctaggtttgctgaactaaattgttgccactaatttgcaatagctgaaaaagcagcaagttttctcgcatcacatacgtcagttatttgatgtgttagctttccaactagaatattcaagttggctgacagcctatattgttggagttaaatcatatatgtgagctatgcatgcaattttgctatgtttcttttttttgaattgctgcatgtaatatcaccatggttatgtgatgatgtcataacgtgcaactgtaatcccatttacttcttacttacccattggctctgctaaaggtgatggttctgttgatatatgcattcatcacattgatattttgtgtttgtctattgttcagatcccctggtccttttaaaaattcttgtttagatgtctgaaggaggttgtgaaatgccagtattaattagaatccttttatctaacaatgtttgtgaatgcttaagcataaattatgtttttagtgaatcatggtgccatagcttatatgcaggcttattttgttattgttggtatgctgcaagtatgaagtgaaacactggtcatcctttttaattatcttacaaaaatgcctttattcttctgtgttatatttgtaatttgtaattgtactatttagtattttgtttttgtcatttagtgttcttgttttgtttctaacgttccttcttaaacagacattttcaagacatggggctcaatctggtggatatggtcagcaaaactaccgccctcagggtcatggtgcagcttctcagtggggcccacgttctcaaccccagcctggatatggatatccaccaagagggcctccacctcagaacatgccatactcccaaccttatggtggctacccgcagcagccaccaccaagaggtggcatgggctgggatcagaggcagggccctccaccccatgcttcccaccatggtggcggttacgactactataaacagggttctcaaccatatgaaggccagccaccaaattaccctcctgggcctggaaactacaatagttatgggccatcacagggcccaaattatggacaacctcagtatccgcagtctgcacctccacagaactatgggccgggttatggtgatcctagatacaatgctccagcaccaaaccagcagtactatggacagcctccagcgggtccacagcaaggctaccctccacagcaagatccctacgctaggccttatggtggacctggacaatgggcacccagaggtgcaccagccggagatggcacttaccaggcgccaccacctacatcttatggcccaccatctcagcagcctcctgcttatggtcagacatatgggccaacgactggacctgatgggtattctcagcagagttacccacagcaaggtgcacaagcgccagcaacatatggtcagagtgcaccagcagggccagggtatgctcaacaaggcgcacagcaaggtggctatgcacagtatcctcaatcccaaccagcatatggtgatcaagcagctcaaaacaatgcaaactacggctaccagggtgctccagcagatcccaactatggaaatgcctacccacaggcaggatacggttctactccggctagtggccaggctggatatgctgctgcaccggctgctggccagccagggtacggtcagccaggatacactcagccacctacaaatccaccagcttatgatcagtctgcccagccaccagctcagagtggctatgctgcacctcctgcaaacccacagcctgctgttgcaaagggggtgtcaccgcagcctgctggatatggtggacaatggaccgcttgaggtttgtacctcattattgacagcaatgatctagttgaagactatgttttgcctcatgatgctgccgcttatatgaagtaggcggttgaatccccttgggatgttcattcagtaagcggtagacttttgatatgcctataagggatgtaaccccttgcctctccagttgttataccggatctctgtagtagttagtagtttgttaagatgacataaaacctcctgtttagtttaaaagtgaaccgaattatgtgtt

SEQ ID NO: 45477 - DNA, 1086 bp, Oryza sativa
  Clone ID: PAT_MRT4530_48439C.1
atggagtggggaataatggagaggggtgaaggtatttatagggaagaggggaaagagagagagagaaggaggggggtgatgcgacggcggcgcggggcgcgaggcggcgaggagatgggcgcgcggcgacgagacgggcgacgcgacggcagggcggggctcgaggcggcaaggagacgggcgcgcagcgacgggacgggcgacgcgacggcggggcggggctcgaggcgacggcggcacgcgcggcgcggcagcgggatggcgacggcgacggcgcagcggcggcggcgcgcggctcggagcgacgacgggacgcgacggcgacggtgcgcggtggcatggggcgcgaggcgacgcgacgggcggcagcggcgcggggcgcgaggcgatgggacggtggcgcggcgacgggatggcgacggtgacggcgcggcagcggcggtgacggcgcgcggcagcgacggaagcgacggcgacggcggcgcggggctcggggcggccgggcgcgcgcaacagagatggaggctggctttgttagaagaatcacttaaaaaggttgatacatctgatccctttgctatatgtggaattatcgatcaatattcgcaacaaccatctctgaaagaaaaaagtgctctgaataggctggaaatcatcaacaaatgcttttccaaaagaacagtagaagaaatcatagcctctcttgaacaagaggctccaaatgttgctgatgaatgggttgcttctgcaatccagtccctgaggaaggcttctcctactagtctgaaaatatccctgagatcgataagagaagggcgaacacaaactgttggtgaatgcttacgtcgagaatataggatggtttgccatgtgatgcgtggtgacttcagtagagacttctttgagggatgcagggctatattgttggataaagatcgaaacccaaagtggatgcctccaaggttggaagaggtgcacgacgaggtggtggaaaaatatttttccaaagtcgatgatccagagtgggaagatttggacctacctcctagacgttcccatggaaggaggcttgttcccaagctttga

SEQ ID NO: 45478 - DNA, 420 bp, Oryza sativa
  Clone ID: PAT_MRT4530_4843C.1
atgtgtcaactgaggcaagtggccgacaaacggactccactagacaccatgcgggctgcacacgtggaaaccacgtggctaccgagcgggtacactaacacggtcaccacacgcacacatgaacgactaccgacactggtacacgggtaccggggtcgacaaccgtacaacgggcacggggtgacaccgaaaggacgaggacagggcagcgagaggagggatccttaccaccacgcgacgaggcgcggcacgacgacgacgaacgggcgcggcggagacggctcggggacgacggaggcgaatggcgagggaacgacttcggcagtgatccttggacgaaggcgagacgcggccggcgcaacgcttgacgatgcggagccgaggacgaagacgacgacggggctgcagcggctcgcttga

SEQ ID NO: 45479 - DNA, 2487 bp, Oryza sativa
  Clone ID: PAT_MRT4530_48440C.1
cgccacgggctccggagagccacccttgcccctttttcgtggttccgcggaacgaaatatggcgcgtgccctttcttgtcccagctgatcaaagtcgccgccgcaatcatccgtgatcgcgacgaacaaacggtgatcgagtaatttctttttttttttttttttaacgaacgaaatatggccgtgccctttcttttcccagctgatcaaagtcgccgccgcaatcatccgtgatcgcgacgaacaaacggtgatcgagtaaatacatcatctattcgtttccgctcaacaactcaaggaagcgtaggaaaagagaagactaaaaccaacagtacatcactaactaccactctgtaatctctaagcctatgacataaactaatcgagaagaaagctgcgatcggtgtggatacaactcttgttttctcccttctcgatcggttttcagtcgtcgtagcactgtccaacctttcctcgtgctctgttcggagaatcttatctctgcctcggtcacgccacaagagacgggccggattaggacacctccggagcaggattagccgctggtgggccccgcggcacgtacagcggcgagaggagtaggcatggtggtgattgccacctttgtacgtgtacggtgtaccggccggcctagatcatggcggcaacgagggcggcgacgacgacgagtggtagtagtggtagcgtgagctgcggcgcagcatgggcggcggcggaggaggcggtggagagctgctcggcgccgaggacgaccatcgtgtcgttggtggacggcacgccggccgcctgcgggttctcaccgccggagtacttcccgctggtggtgcttgggcagaaggtgatggcgtagttggtgccggcggtgcaggtgaatgtggaggtggagtcgtcgtacgcgtagctgtaggcgcgagggcacgcgttcttgaagaactgggagtaggtcgacggccggcaggtgttcgggttcccgtacgcgccgctgcagcagtactgcggcgacccgaacgcctcgcacgcgctgcggcaagccacgggccccccgccgggagcggcggcgccggtgccggtgctcgccgccatgaccctcaggtcggccgggcacgcgccgtttaggtcgacgaggcagcccgtggccatgcacttgccgccgctgccgccgccacttccggccggcgctgcggcgcccccgccctgcggcacgatgatcatgggcaggttatacccgtcgacgaggctcacgtcgaagaagtccatgccgccggagccgtcgagcgtgaactccatgagcgtggcgggcggcgccgcgccaccgccgttgcactggatgccacccgagccacagtcccccgtggcgcaggtgaacttgcctgtcgcgtcctcggcgcagagcgtgcgcgcccacatgcgccccgaccagctcgccggcgcgtccaccgtcgccgacgcgccgtgcgccagcgcgaaccctgtcgtcgacagcggcgccgtgccggcacccgacagcagcccaggccacaccgtgtagccgcaattgttggtcatcgtgaacgtcgcggaccacgcagctggaagcaggaagagcagagcaagcaaccggagagcgacatgagttgggcactgtgacattttctcaagctgttctgtgtgcaaacccacaaggcctcaactcaagctctcctactctcactctgctcttgcaaaatactagcccagcgccgcggcggcctcttcggcttcttgagcggcggcgggaaggccggcgacggcgccgcgcaggagcccgtccagtggccgctcacccgcgacgtcgccgccgtcaagctcgacaccgcgcactacttcttctcgctccacgtcccgcacacagatcacgaggatgacgacgccgagggggccgaggcggagaaggacgcggacggggaggcggcgctgagctacgggctcacggtcgccagcaaggggcaggaggcggtcttggcccagctggacaaggtactggaggagtacaccaccttctccgtgaagcaagtggagccggcggcgaaggagaagtcggaggtgatggacacgaaggcggtgacggagatcacgccggaggaggccgttggggacaagaaggaggtggtggaggagcaatcagcggcgttctggacgacgatcgcgccgaacgtggacgactacagctcgtcggtggcgaggctgatcgcgcggggctcggggcagctggtgaggggcatcatctggtgcggggacatcacagcggagggcctccggtgtggggaggcggtggtgaagaagagcgtggggccgagtgggaagccgtcacaggtgaagccgagcactatcaggaggatgaagagggctagaagggttacgaagatgtccaacagggtagcaaattcaatcctctctggtgttctaaagctatatgtttctagaaggtttgaaactttggatctatga

SEQ ID NO: 45480 - DNA, 939 bp, Oryza sativa
  Clone ID: PAT_MRT4530_48441C.1
atggggcgccggcggattgcaggattgggagacggcgtccgtgagagcaacgatacgagcagcgtggaagagcgccgaccgctgctgcttgatggcgcggtcgcacgggcgcaggttgagcggtgcgagccattggtgagcaagggcggggtgtggcgacgcgcgagtgctggcgggaggcggcagcgcaggcggtcggcgcgggagggcaggcggggggcggtggcgtggggagggccggcaacgggcggcatcaaggtgctcggcacgacctccttcgcgagatcctcctccgcttcccttctcaagccgcgttggtgcgtgccacgctcgcgggcagatccttcctctgtgcggcccgcgatgccggcttcctctgccacttccgtgctcaccactagacatctcccccgcacctcctcagcttcctctttgtcgtcctgggccgcatgcctccggtcttcctctccgccacctccgcctctgcctttggcttcgttcctccccgatggcggctgggcctctgccgagtgggagctcctggactgctgcgacaggctcctcctcctgctccgcaaccacgacgccgcgatgaagctagctgtcgccgaccctgcacaccgcccgcccctgcgccgtcgccattcgcctgtccccgtgccgccgcccaccacccgagcccgcgccgccaccccgggcggcggcggcggcggctggatttgggggaaccggcttgcctcagcctctgcccccagccgcgcgagcgagctccacccacctccgccgctggacgcctgtgcgctcgagcgagctccgcccacctccaccgctggccgcccgttggcttggctcctctcccggtctgatgaagaggagagccagcagcggcttagcaacaaggaggggaggcggcggcgatactccaatcctaccacctag

SEQ ID NO: 45481 - DNA, 557 bp, Oryza sativa
  Clone ID: PAT_MRT4530_48442C.1
aaataaaagaggaccctgatgcactatatagattaaggaggccttaaattgggcccaagatctggaggcccaatagacacccgatatatttttccgacggctcaagaaccaacaggttattatgaaaaagtacatttcacattctatatgcatataaatagcattctgaattcttaccctgtataaaatttacaaatttggggggagagtaagctctaatctctattgaaatgcacctatatgttctttcctgttagaagaattggagaattgtaaaggaagctagaattcgagcagctcttggaggatcacctctgggagcgcgccggtgaacttgaggtcactgttgagcgcgctgaccatctgctacaccagcgcggacctgaactcctgggacgcgacctgccagcacacctccttgaagtccagccgctgcagcagatgcaccaacttgaccacctgcacggttcccacattcttggtgatgtccagcgagacagtctggcccgaggatttgatggaaatggaccacggcagggagacaccggccccccccg

SEQ ID NO: 45482 - DNA, 417 bp, Oryza sativa
  Clone ID: PAT_MRT4530_48443C.1
ggggaacctaaaagcagaacattgaatgggatacaatatggaaagatgaaggaaaaagcacgactagacaagcaaaagatgtgatcgtgccagatctgagggctgcaaatgaacattcatcatgtgcgaccatccacatattaataacattaggaaagagagccaaaaaaatacagaatattctacaaagacttgcctgcggttgctaaaattacttgcagtgctctctatatctagttctgtctcccttttagatggccacttacacatagcatttataaacattccaatgctattaccaatatagcaacgggaggtaacattggctgaattcacacatgctgaccatgatcaggagacagttgcctgaatttctaactgctcctgacatttcatcagaaggtgggctagaagtac

SEQ ID NO: 45483 - DNA, 492 bp, Oryza sativa
  Clone ID: PAT_MRT4530_48444C.1
ggtttgaaccagttcagccacctccgctgccacctacgtccctcccatcgcccacaccggtgtcggtgcggcagcgcaacctgcgtctctcccatcgccattgtcggtgaggacccgttgccatcttcctcttccccagatctacggaaaggtcctctctttataactccatctgctttgttggtcttgcgggaactagttcatgagcaagcaaatgacctaaatgaggatgacatggatactactgaagctgggattggtgatgaaaatgaggctttcatggatgacgaaaatgaaaattatatggatttcgagtacattcgtcaccaattgctagcccaaggccagaaacatgttataagaacacaatatgtaaatctaaaaaaatcacgcaaaagagaacatcaaagaatacaaaaaagtaaatctagagaaaatgaattaagaacatgttacactagtgccagggcattggcagaggtagtattttaa

SEQ ID NO: 45484 - DNA, 395 bp, Oryza sativa
  Clone ID: PAT_MRT4530_48445C.1
ctgtctaactggacagctgtattatatggacgaccggggtgaatacttgaatatgagcgactctcatatcgcccctatatgcgcaagagtcaaagggaggaactttgcatacagcggatgtgcaataactgtataactaatagcatgagaatacctgttcctgcatactcttcttgctttaacccctgaaaatgaaattcctcatcttcgttccatactttaagtcagtacagatccttctatcctttactaagaattgaacgcatccttactataacacaaatttctgcaagaatggtattttgcatatcgtcagaattatgccactaaaggactatcctgtggtttgagtgttcctactggagctgcctgccggatgagctttatggactcgg

SEQ ID NO: 45485 - DNA, 429 bp, Oryza sativa
  Clone ID: PAT_MRT4530_48446C.1
ccgggttaaaggtagttttttggctggagaagggtccaccagggcctattttgagtcggatgggcaaggcttttttggggggaccatagtttctggctttctttaccctatagttcaaaattaaaaaatggtaaaagtatccctctcccaacagacatggtaggtttggacttggggtcctcaaactggaggtttggaagttgaaatagtaaagctttacatcgatttcatgattttatctaaaaaaaaaaaaataaataaaaaaataaaataaaaaaaaagataatcaaaaaaaaaaaaactaggggcggccgttttaaaggacccaattttacttcccgggactggcaaggtaaaacttttttattggggccacctaatttcattctacctgcccgtggtttaacaagatacggacgggaaaacccc

SEQ ID NO: 45486 - DNA, 2955 bp, Oryza sativa
  Clone ID: PAT_MRT4530_48447C.1
gcacgaggccttcactcgccggttcgccgcgatctccagcgaggcggcgacccaccggcgaccactcgccggcaccccccgcccacctccggcgagcaggtaggacggagcagcttcccctcgccgcccgcttcgctcgccttctctcctcctccgcctccgccgccgcggagccctggccacgccgcatccgctcgtcttgcccaccaagccacttcgccggagccgcatcccttccccagccgggagaaccgctggtggctcccgctcccgctgctctccatcggcatatctacttgtggaagctcacgcggaggcggaggtccagctctgtggcagtttttgatgggatcctgccccgcgcggcgagggtagacaggatctgtgccgctccaagattagtctcccggtctccagacctgaaccaagttgctgccatggcgtcgtcagctaaggaggaggcaaaaccgaagccgcgcctcattgtccgcctcggggtattcctcgcgtcgcaccacatactcttcagcgctgtgtgttgtacggcgggcataatcgcgctcctcttcctcccttcgcttgccaagaacacgtacctatcagagaacgctcttatacccggctctgcgaatacattattttctactgaggatgtccaggaagcaaacagatttgcgaagggaattgaagctgcaattggggaatcaagaggtggaacaacggagatcccaaaattcatagcacaacaaacaaaaaatctgggagcagaagtgtattaccatgagttcctccctgacagcaaatgttttcatcctctgaagttctttacatccatgacaaataatatggcagccaaacccaatggaacctacaccaactttggcattaacacagttggcattatacgggctccacgaggtgatggcaaagaagcaattgtactggttactccttataattctcagaaagttacaccaaatgaattattatcacttgcacttggattctctgtcttctccctcctaagtcgagctgcatggctatcaaaggatattgtctggctgtctgcagactcacaatttggagagtactctgcggtctcttcatggttaaatcagtatcataatcctatgtttctgagtcacccagtgaatttggataccaagatctatggtgcaaatcaaattttatataaacctgatggcactgcagaaaaggcagaacttatggctttcaaacgtgctggaacaatggctgctgcactcatatttaaagttggagaaaccaggaaatatggtgatagagatagtgtcacgatgtatgcagaggcatctaatggccaaatgccaaacttggaccttctgaatgtggtgcactatttagctgttcatagacaaggttttcgcgtgaatgtcgagacatttaattccttgttgagctcttcatggcttagggttattgctgaagtatttcaaaatcttgggagtttgttgagaaaaataaatcctgactggaagcttgacgtgaccgttcctgattatgtggagggtactgcaaaccttgctagttctatgtataaccaggctcttggagtgcccacaggttctcatggtgctttccgtgactatcaagttgatgcagtttctttagaatttgcaccagcatttcatcttaaaaacgagaatgctaaatcttcatttcttctcaggggtggaaggttaactgaaggggtggtgcgctctgtaaataacctgctcgagaagttccatcaatcgtttttcctgtatttccttacagccccaagcaagttcatttcagttggtgtatatatgattccgtttgcattactcctggcacccctcccaatagttgctgctgctcttgctggtggtagtaaaaccaaggggaaattggaggatgaatgtaaaacaaagggtaatgctgatgacctgcaaatggagggtggatcgtggaaatggcttaaatctgcaagagtactacttatcatccaattttgggcagtacttgtttctttactcccatactacattagccaaattcctggtgctatgccaatacagtatgcagtgatttgggccgttctctccatcactatattgatcatcctgtatgcaatgtttggctctccatcccgtgctggtgtggaatggaagcttctaaaagctacgatgatcacttccatcaccataggaatggggcttatgtcgatcataaattttgctactgctcagcttggggctctgatattgatcccaatgtgcttgttttctcgaccgctgagggcacagctcgagatgaatttcctacctcgcacagtattgttggcctcaaacatacttctcaccgtcttgggtttccctccagctgcatttcttatcatgaaaggtctatccaagggatcatggacagtagacattgttggtgatttctggctgtggatggagttcttgtgggaatggagcagcgcgacatatctgtatgtatttcttgtccatcttccctgctggctcttgtgcatccatgtgttgctgcatccatgctaccagcctgaatcaaagatgaagcaggagtagcgtttgtttggtcacgcattgctttgaggttagagaacactgcaagtctgtaatagatattcctgattttgggtgtgctttggttgccaacatcttgaaagcagcaacttagttttgtatgcaggactagcagcttagaaacatcgatgtatttttgatgtttcttttggaagaagcacggatgggatagtaaagcctgcttatgtatactatagtggtggtgtttgttgtgtcacactactcaaaccactgacatttagtacccataatctataccctttaacgtgtcctttcctgtttcaaaaaactcgagactagttctctctctccctcgtgccgattcctgcagcccgggggatcc

SEQ ID NO: 45487 - DNA, 321 bp, Oryza sativa
  Clone ID: PAT_MRT4530_48448C.1
atggccttccgcgccaccccgcagccaagcccgcccagccccaaggcggtgcgggttgtggtgaagggccgggtgcagggggtctttttccgcgactggacggtggagacggcgcgcgcgctgggcctcaccggctgggtccgcaaccgccgcgacggcaccgtggaggccctcctctccggcgaccccgccagggtcgacgagatggtgtcccgccacctccccgtcggcccccgcgccgccgccgtcaccgccgtcctcccctcccccgccgaccccgtcgaccccgccgagggcttcacccgcaagcccaccgcctga

SEQ ID NO: 45488 - DNA, 292 bp, Oryza sativa
  Clone ID: PAT_MRT4530_48449C.1
atgcagctcaacccaaaagtaagaactcgtcgaaataaaactaaagcaaaaaggactctatccatgcgtggcaatcatcttgaagcacctcaactcaacccgatgtcgtacaccaagtcgtattgttggaatcggctgtatcacctaaccaagtctgactctaacttagccgatccaatcgtagccgatccggacttcagccgattcttactctgtttccgcgacaatcttcatcttcgaccccgcttcaatctaatcttcatctccgatacagatattaccaaatttgatc

SEQ ID NO: 45489 - DNA, 1239 bp, Oryza sativa
  Clone ID: PAT_MRT4530_4844C.1
gacgagcggaaaaaaagatttcgcccccatccgccgggcactcgcgcctcgcgagccgcgtccacctccgcgcgggcgccacgccacgccacgcccacccaaacagcttcgctcgccttcctcctctcggccctcgccgcgtccacccccccccgatcgagccgccctccccctccgcctcccgcctccgcgcgcgtttaggagggggtcgggaggcccgaagctgggccggcgtctccgccccgcagggtccggataggagagatagggagaagggtcctcggctcctcgcgccgcgtgctttggactgggagtagctggtgctagaagtaatttttggaaatggttagtgggaggtcagcaaatggggaattggatgcatgcttcagaagcctcatgctttcgatcggcagcgggagggggcaggctgaaggtggtggtgcaatgccaaccttgtcaggctggaaggaccttcctattgagctgcttctgcggatcatgtcgatagttggagatgaccggatgcttgtcgtggcatccggtgtttgcactggctggcgcgacgcgctgggatgggggcttactaatctttccctctcacggtgccagcagaacatgaataatttaatgatatcacttgctcacaagttcacgaagtttgaagttctcactcttcgccagaacatacctcagcttgaagacagtgcagtagaggccgtttccaactactgtcatgatctacgtgagttagaccttagcagaagttttaggcttagtgaccgttccttgtatgcattagcccgtggctgtcctcagcttacaaaattaaacattagtggatgttccaacttcagtgacactgccttgacctatcttactttccactgtaaaaattttaagtgcttgaatctatgtggttgtgggaaggcagcaaccgacagagctttgcaggccatagcccgtaattgcggccagctgcaatcattgaacttaggttggtgtgaggatgtcacagataagggagtgaccagcttggcatcagggtgtcctgatctcagggctctggacttgtgtggttgtgttcttataacagatgagagtgtgatcgctcttgccactgggtgtccacacctgcgatctttaggcttgtactactggcagaacatcaccgaccgagccatgtactccctcgcatacaggcgggtcaagagcaaacccaggaggtgggacagtgtgagg

SEQ ID NO: 45490 - DNA, 324 bp, Oryza sativa
  Clone ID: PAT_MRT4530_48450C.1
atgcagctcaacccgaaagtaagaactcgtcgaaataaaactaaagcaaaaaggtggcgatgcgccgaaattgtattgaacgtgactctatccatgcgtgacaatcatcttgaagcacctcaacccaacccgatgtcgtacaccaagtcgtattgttggaatcggctgcatcacctaaccaagtctgactccaactcagccgatccaatcgtagccgatccgggcttcagccgattcttactttgtttccgcgacaatcttcatcttcgatcccgcttcaatctaatcttcatctccgatactgatattaccaaatttggtcgt

SEQ ID NO: 45491 - DNA, 315 bp, Oryza sativa
  Clone ID: PAT_MRT4530_48451C.1
atgcagctcaacccgaaagcaagaactcgtcgaaataaaactaaagcaaaaaggtggcgatacgccgaaattgtattgaacgtgactctatccatgcatggcaattatcttgaagcacctcaacccaacccgatgtcgtacaccaagtcatattggctgcatcacctaaccaagtctgactccaattccgccgatccaatcgtagccgatccagacttcagccgattcttactctgtttccgcgacaatcttcatcttcgatcccgcttcaatctaatcttcatctccgatactgatattaccaaatttggtcgt

SEQ ID NO: 45492 - DNA, 478 bp, Oryza sativa
  Clone ID: PAT_MRT4530_48452C.1
gttgacgtaaaacacgaggcctgggagatctgcttaactccagtgcaggtccaaagctcgccttcgggtgtgttagcatgccagttgatttgatcctgcaatcaacaagaaatagaaacaaagagatcgcggttaaatctataaatgatagccgatcggctaaaactctatccatgcatggcaatcatcttgaagcacctcaacccaacccgatgtcgtacaccaagtcgtattgttggaatcggctgcatcacctaaccaagtctgactccaactcagccgatccaatcgtagtcgatccggacttcagccgattcttactctgtttccgcgacaatcttcatcttcgaccccgcttcaatctaatcttcatctccgatactgatattaccaaatttggtcggctggtggctagccgcgcaggagaagccagcaccggtgcgggttgtccctataaccgccgcgctgttagcccccg

SEQ ID NO: 45493 - DNA, 367 bp, Oryza sativa
  Clone ID: PAT_MRT4530_48453C.1
ccttgttatttgggaacagcccctgtgaacctgccacatggacctattaggggtcttgtaatggccagggttgaggatggcaactgcttttacttgcgctagatagtaatacatgaaggaacatgcacaacatacatgcctgatgtataatacttaaagcctgaactgtctacattaattaatcactcacataaactataaactgcttagtggaagcattacaatccatacaccagaattaccaggaacataaacgaaattttcaaggggccatcagagactgaccgtgcatggggctgccttgggtggatcagcagcaccagctagacgggtaccaggatagcggcctccaccggctatggctaag

SEQ ID NO: 45494 - DNA, 423 bp, Oryza sativa
  Clone ID: PAT_MRT4530_48454C.1
atgcccgccctgcagcctccaccggcgtcgtctccggggcgggagcgggagcggggcgacgcggctgcttcctccgccgggcctcgaggtgtaactgagatcacttatcttctgaggtcccacgagctcaagatcagtgagttggagtcaaaagagcagatttactgcaacagcctggttcaactcgaagagagaatcgcatcactagaatattacaaggagaaattgcttacaagactttcatggacagaagaggccaattcgactttgagatctgacaattccaaattgaagaatttggcatacagtcttaaggaaagggtggacgagttagaaaaagacaacttcatgctagggctgaagatgaatgagtttgctcaagagatggaacgatttcagatgcagaaaattgcttctgcttaa

SEQ ID NO: 45495 - DNA, 338 bp, Oryza sativa
  Clone ID: PAT_MRT4530_48455C.1
ggttcggccttaattcggtgttatttttgatggcttgcgtggctagcttcatccatcatctttctagaacgagaagaagctacactgcatgcatgcatgactgatcagtcattgacaattaacatgcattatcaccagttgatccacctaaattaaataatcaaaacaccacattaatccaccattaacttgatcatctcatcgatcgatcgattgattagctagttccatgcttgcatgatgcatcgatgaaccctaataatctgggggttaattaatataataattaattaattacttcattttttggcccagtgagccggccatgcccatcccgg

SEQ ID NO: 45496 - DNA, 409 bp, Oryza sativa
  Clone ID: PAT_MRT4530_48456C.1
acgtcatcaaaggtggccggctcggattggcgacctcgccggagctagggtggtcggccgggattttggagaacacctacgcgtagaggacgacgagacgaacccaacggtactcaccaaagcgtccaacgacgagggacggcggccgacgacgagcttgtgcggcggcggcggttcggtcgacggcggcgacgggtctccggcgaccggcgacagcggggagagggcggccgaggttcctcacctccgtgcgcacctaacggcggcgaggggaagcggcggcgacggcggaatcgacggcgcggcgcggctgggcgtcggccggcgacggcggcggcttgctcggcgtggcggcggcgctacggagcacgagagaactcgggagatggggcaaacgaaagaggaggac

SEQ ID NO: 45497 - DNA, 1224 bp, Oryza sativa
  Clone ID: PAT_MRT4530_48457C.1
atgccgccggagcactggcaacagggggtcaagcatctagtcctcttccacatcgaggagatccacgattacaccgcggtggccgtcgacctccgcaatcctaagtcctgcaggccggtgacacgcactctgccgtcatggcacttgggcgttctggacggtgagcgccccccgccgcgcctctttgaatatttccctcaccatctgccgccgccgctgacctataccttccgccacggccgcgcggaaggcgtggaggacaatgacgctgctctccaacaggaggctcgcgaccaaggaagcagaacagtccgggacgccattgatcgtgatggtgaacgactccatggcgaggaacaccgcgacaggcgccacgacagccgcgataatcgtggcggccaagacaggcgcagaggccgtaacaggagatacaacaacgatcacccagacgatgatctccaccatggcgggcagcgcgacaacgactacgacgacgatcgcgataacaggggacgtgatgtcacatgcgggcgaggtggcatccgcggcctggacgttaacttccggtgcgaacgcacgcgctcaccgcgcgcccgtgaccgtggcgacacaaggcggcgcgacgggcggcgtcatcaggctggctgcggtgacaaggaagacagggacaatgactgcggaaacggcgactccccccaagcggccctcactccgaccgttgcggcatcgtcctcggcacggaatgctcacctgacatcgcccccgttcgacaaggggcctctgctcccgccgcgtcgtccgcacgatggagcggggtatgaagcccggtccgctgcgtccatcccggcggcgcgggttttcgcccgcatcaacgaggccgttgcggcagcctcggcggaaggggcactgcggcagatgctagttacggccggtgtggcggtggcgcttgacaagctcgccgcgccggtggcgctcgacaaacccgccgcaaatgctgcggtgccatcaccgatggtgacagccatggcgtcgctggcgacgatcagttcgactacaaggaagctattgccgatcgcgtccacagaaaagacgctgctgtccctgaacgctgagtgcgctgcggcgccaactcttcaagacgcgcttgcgacgaatggctcgtccccggccaaggacaccgagacagcaccggcgcctgacatcgccgaattcgactccatttag

SEQ ID NO: 45498 - DNA, 195 bp, Oryza sativa
  Clone ID: PAT_MRT4530_48458C.1
atgaccacgataaaaggactagtatatctaaagcgacataggagccttgatagcgcaagccatcgagacaagttacctcttgtcgacagattgcagccgatgtcccgacttgaagcaagaactcgtcgaaaagtaaaacaaaattgtggcgatgcgccgaaagttgtattgattggattgtctcccatattacaa

SEQ ID NO: 45499 - DNA, 595 bp, Oryza sativa
  Clone ID: PAT_MRT4530_48459C.1
tgccacgacagcatccgatggaacctcacagcaaatgggcagtactcggcaaaatcggcctatcgactacaattccttggggctgccaaatctaccttctatcagtcaatctggaaggcatgggtgccgccgaattgcaagttcttctcttggatggtcacgcaaaatagagtatggacaacaaacaggctggaaaaaagaggatggcaaaaccaaaagatttgcccactttgttataatgttgatgaatcggccctgcatctcctggccaaatgcagactcacaaagaggatatgggcagaaatacagagatggaccgggactgaccttcagatggacaactgggaaagctgtcactcagtcgagcaatggtggacactcgtaacggaatctccaaacaccccacgcaaacctctcaggaccctggtgattttaatctcgtgggaaatctggtgcgaaagaaacacaagaatcttccgcaacaatgcatctacgccatcctcaattctagcaaagatcaaggaggaagggagagcatggggtcaaagcaagggcttcaatcctgcaggagttcagaattttgggagatatcact

SEQ ID NO: 45500 - DNA, 6245 bp, Oryza sativa
  Clone ID: PAT_MRT4530_4845C.1
tacatagaatttacgtagttggtcaatgttccacgaatttgctaattcgcgaccgtcgccgtctgcgattttgaatgcgcctggccgcaagacttgtgtgatcgtgtagggtccttcccattttggtgagagtttgttttgccctgcttgggtttgaactcgtcagaggacatagtcgccgatcgaaagtatgcgtgctcggatacgcttctcgtgataacagcggagggcttgttgatagctagctgctcgaacagcaactcgctcacgatgctcctcgagaaggtttacatcaatgtctcgctgttcctcgtcggaatgcttctgtactcgtgtactttgatgtcgtaactcgccagagagcatggcttcagacccgtacacgaggaagaagggtgtttccttgttggatgttgtcggtgtggtgcgtacggccaatagtagggtttttatcccttgtagtactatgccgtttaccctttcgacttgtccattgctttgagggtgagagaccgaggcaaaacatattttgactcccaaaccgatgcagtaatcctggaagtcggcgctgatgaattgagagccgttgtcggttatgatgtggtgcggtagtccgtatctgcagtatatccctctgatgaacttaatggcgttgtcggccttgatttccccagtgggtagtgcttcgatccatttggtgaatttgtcgatcgccacaaataggaatctatagccgccctgtcctcgtgggaatggcccaagtatatctagcccccagcacgagaacggccaagtcagagggattgtctggagcgcttgtgcaggtagctttgtgtgcttgcatgtcgcatgcatctttaagggcggttggccagaaaaacccttgtcgaaaggccttgccgactaatgtccgaccggcggcgtgtgacccgcatatgccttcatgtatgtcgaagaggagttgtctgctgtcgtcggtagagacgcatttgagaagtatcccgtttggcgcttttttgtataaatcgttaccgaccatacagtagatctttgctttacgggttattttctcggcctctgtgtcgtcctcgggcaattcctcgctgctgatgaatttgattaatggggtacgccagtcgtctgtggtttcgatgtcagcaacgtcacgttctgcctcggtgacctccgagctaatgttgggggtgctcgggccagactcaccgttaacttctttcaccgatggcttcgtcaggacgttgagaaaggtgccggggtcgagcggttctcgtctggatgcgcgtcgtgctaggtcgtctggctcgacgttgtccttgcgatagacgtgtcggacctcgatcccgtcgaacctcttctctagcttcctgacctctgcaagatacttggataactcggggttggagcatttgtagtctttgtgcacctggtttgcgactagctcagagtctcctttgacgattagtcgcttggccccaagtgcggctgcagctcgtatcccggcgagtagtccttcgtattctgcagtattattggttgccctgaagttgaggtggattgcgtgcttgaattgatctccggagggagatgtcaagataaatcctgcccctgctccttggctgttgagtgcgccatcaaacgctattgtccatgtctcattgtcgccttggttgtctgacttgttatctggcatggtccaatcggccacgaagtcggcgagtacctgagatttgatggctgttcgcgacacaaagtggatatcaaattggcttagctcgactacccatttcgcgatgcggccgacaacgtctttgtttctcacaacttcgctgaggggaaggaggagacaactgtgactctgtgggcttgaaagtagtggcgtagcttccttgatgtcatgatgactgcgtagagcagtttttgaatctgtgggtatcttgtctttgcatcatggagagcttcgctgacgtaataaactggtcgatgtactttctctctctcgactacaatgacagtgctaacggaatatggcgtagcggcaatataaaggaataattcttcattaggttggggagcaacgagtacaggtgggtttgataggtagcgcttgagtgcaataaatgcctcttcggcttcccgtgtccatacaaatttgtcttgtttcttcaacaaagcgaagaaaggctgtcctcgttctcccatcctagtgacgaatctgcttaatgctgccatgtatccggttagcttttgtacctccttgagtcttgtgggcgacttcatgttctcgattgctttgatcttctcgggatttgcctctattcctctaccagaaacaaggaatccgagtagcttgcccgacggtactccgaatgtgcacttctctgaattgagcatgaggcgatatcgtcggaggttgtcgaacgtttcccgcaggtcgtcaatcaatgagtcacttgtcttggtcttgacaacgatgtcgtcaacgtaagcctcgacattgttgccaagctggttgctaagtgcgccctggaccgtgcgctggaaagtgttcccggcggttattagtccgaaaggcatcttaacgtagcaaaataccccgaacggcgtgatgaacgctgtcttctcctcgtcctcttttgccatgctgatttggtggtagccagagtaagcgtcaaggaagcttaatagctcgcagccggctgttgaatccaccaactgatcaattcgagggagaggaaagtgatccttggggcacgccttgttgaggtctgtgaaatcgacacacattctccattttccgttggccttcctcaccatgactgggttggctagccacgctggatgaagtacttctttgatgaagccagctttgagaagtttgtcgagctcttctcgtatggcttgttttcggtctggtgcaaatctccgcagtctttgctttactagcttggcatcgggtcacaccataagtttgtgctcaatcacctccctggggacccccggcatgtcggacggctgccaagcaaacacgtcggcattatcgcggatgaaggtgatgagcgcgagttcagtcttgtcggggttagcactggagagcggaacgatcttgatggtgccgtccggcttcggcgccttgtttggcttgctcactttctccggtggctcagacgtggcgggtggggtgggcgtttgttcgaccatgtcgaggctccgcctgtcgcactgcaccctgccagctttgcgttcccctaaatagtgattgttcccttcggtcccggcatcttgagcacttgatatgcgtagtgggatgcggccatgaacttcgcaagtgcagttcttccgatgatggcgttgtaagctgtatcgaattcagcgacatcgaaggtgatctgctctgttcggaagttgttggcttggccgaaggtcatgggcaacgtaatcttgcccagaggtctggacgatgattggggagtaattccatggaagggttgatcggttggtgtcaacgcactttgcggaattgccattgcatctagagtgctggcgaagaggagattgatcgagctgccaccgtcgatgagaactcgcgctaccgtgacgttccgaatagtgggttcgaccacaatcggatatcgtcgttgtggagccgccgaagatgtgtgagacgtggaggtcggagtctgggtacgcagaatccgattcgtgagaagatgtctcctcgttcttctcgataacacgtactcgcttgccttttttgaacgccatgtgcttctcgagcgactttttgaaaacaaggcaatcctccagagaatgtctgtccgttttgtgtatggggcatcatgatttctttgtatcgctgccttgtgggtctgggcgcttgggagggttcacgtattctgctgcgaggacttccgcttgagctttccttttcccgtttttgcgatttttcttcttatttgactcagaggcgtctgcggctggtttcttctctcccccagtcttcggcttgtcgttcttgcgtcttagcgcgtcatccacatgggcgcaccgctcaacaatctcgaataatcttcgagtagttgtgatgcgtcttgtcgccaactcctgggtagtgtagcgatctctaccaccggacttgaaggcgcgaattacagaagcgtcgataatttcgggaattgtgtttctgcactcgttaaagcgccaaacgtattccctcaatgattcccccgagttctgtgttagcgtgtgtaagtcgtcgttgatcgcgtggcgcttgtatgttccttggaaattggcgatgaactgttgccacaggtctgcccacgaagagattgagtagggaggaagatgcatcagccatgaacgtgcagaacccttcaacgcagttggtaaatagttcgccaatgcgttgtcatctgctccggcagcataaagcactatcgagtagacttgaaggaattcttcggggtcggtgctcccatcatacttttcaatggccccgggtcggaatctctcaggccatcggacatcacgtagggaacgaccgaaagccctacacccagcgctggggcggtgggttgtcggcggtcgcgtgaccttcgtggatgtctgtctgacgatgaagaggacgcggatgatgacgatgacgatgggtcgcttggctccggcgtacgattacgaggatgatgacctggatcccgagaatcttgttgttgtctctcgttgttatctcggcgccgatctccttcgtcgtcgtcgttgcggcgacggccatgactagtattgtctggcccccgccgttcgcgatcgttgcattctcggtcctcgtttgggcggtttcctcgatcatggcgccatgaagaaacatgacgccgagagcgatttgcgtcgtcccgtgtgcgccgtgcttctcggcgattgttaatttgatctcgaagatcgccagtgccacgaggtggaggggtagcctgtcgaggcaattccctccgctccggatcttcaccattggcgtcgccgattggtggctgatcttggtgtgctgcggtagcagcctctttgaacgcattgctgaggttagtcaccgactcccgtaatcattctgtccaacgctcgaggtcgtcgttcagaacgggatcgtaaggagtttccctcagtatagcttgaatagccctgatgtgctggactagagtagtcgattgattcgccgcttctgcgttggcttgcgctgacgtgccaacgtcatcgataactaatacctcccgcggcgcacttgttgtcgatgacccgtagtcttcgaggggatgtaagaccgatggttcgtgaggatcgagatcgattaccccaacgaatcgatctgaggctggagtcgctccctgttccttgccgttatccctagcggggacgtatgacttaggagacggggttttcatggcgccgaggagaactttgcagctcgagagatcgtgattctttgtcttgtggataggacaatagacatcccgagtcggagaaatacattgaattccacgttctttgcaggcgcgaatttcagcacggacgttgatgaatacccagcaatcttgaagggtatgtttcttggttttgtggataggacaccaagacctgatagcttcggaagtcatctttgtcggcccgtgatttatgtcggtgggacaagacttggccgcatcagaatccttcccgagtttggatgtagtcggtaatccgttctccgtttcaacgggtggatttttcgacatggagccgtcttggtttgtggccactgcgttctcgttttcagtcattggaggaccggttgagattggcatcgtggtgtaaaccgggaagacgatttcaccgacttgagtccataccaacattgttgaagttgagaatgcttggctggagctggtgttgacattgttatcgacgaagcttgatggcatagtagtagaaccttgagtaccaagtccccctacctggcgcgccactgtcgacgggtgatacccgtagaccagatatagagggtattggggtacgctggtacaaggatggctccggcttcgtaggctgtgtggattctgagattcgatgatctatgccctccccggggggtcccttttatatcgcaagtctggtactctccgagtaggactcgaacatatcagacctagcacgatacgtaggtaacccagttcttgtccgaaaaggactttttcccgtatattgat

SEQ ID NO: 45501 - DNA, 4086 bp, Oryza sativa
  Clone ID: PAT_MRT4530_48460C.1
atggtgcatctcagcacatcgatcacgatttcggagacgccgccggagcactggcaaaagggggtcaagcatctagtcctcttccatatcaaggagatccacgattacaccgcggcggccgtcgacctccgcaatacgaagtcctgcaggccggcgacacgcactctgccgccatggcacttgggcgttctggacggtgagcgcctctgccgcgcctctttgaagatttccctcaccatccgccgccgccgcggacctacaccttccgccacggccacgcggaaggcgtggaggacaatgacgttactctccaacgggaggcccgcgaccaaggaagcagaacagtccgggatgccattgatcgtgatggtgaacgacgccatggcgaggaacgccgcgacaggcgccgcgacggccgcgatgatcgtggcggccaagacaggcgcagaggccgtaacaggagatacaacaacgatcacccggacaatgatctccgccgtggcgggcgacgcgacgacgactacgacgacgatcgcgacaacaggggacgcgacgtcgcacgtgggcgaggtggcatccgcggcctggacattaacttccggcgcgaacgcacgcgctcaccgcgcgcccatgaccgtggcgacatggggcggcgcgacggacggcttcatctggctggctgcggtgataaggaagacggccgttgcggcagcctcggtggaaggggcactgcgacagatgctagttgcggccggtgttgcggtggcgctcgacaagctcgctgcgccagtggcgctcgacaaacctgccgcgaacgctgcggcaccatcgccgccggtgatagccttggcatcgctggcgatgatcagttcaactacaagggagctactgccgatcacgtccgcagaaaagacgctgccgtccctgaacgctgagtgcgccgcggcaccaactcttcaagacacgcttgcagcgaacgacttgtccccggtcaaggacaccgagacagcgccgacgcctgacatcgccgatttcgactccgttcaggtgctgatcgacatcgccggagacacgcaggtgctgatcccccccgatgatgcactggaggtcgttccaattccagtggctgctgacatgttgggtgaagggcggcggaggagtccaaggctagcccgacagccggtggccggcctactgatgtcgttgcgggcgcagctcaatctctgccggcgcctgggtacggttccagcggaaggagtcctcaccgacaaggcactcgccgacttcaaagcaatgttcaactcgccgctgccgcaagacgcaatcgacgccctcacgcagctgttcggctttgacaaggaagacgcgaagacggtggacccggctctggcgaattacctgggcctctctgacattggctgccaggaggagattgctgcggcagatatgtttgggcaaaagtctgccacaaagacttatggtatcttagagtttgttagagatagtggtcgtgtccgttttgcttcgacgagttcttgctttcgggttgagctgcatcggtttcgatcttcaacaagagatttaaccacgaattctttgtctctatttcttgttgattacatgatcaaatcaactggcacgctcatacatttgaaggcgagctttggacctgcactggagttaagcagatctcccaggcctcgtgttttctgtcaacagagtgccaagcaaacattcctgagagaactacgggacaccaagccatctgacaattcaaaatggctggtgctcggagacttcaacataatctacaaggcttccgacaaaaacaatgcaaacattaatcgcagacaaatgcgaattttcaaagaaaccctcaacgcttgcgagctcaaggaggttgcacttcagaataggcgatacacctggagtaatgaacaagacaacccaaccctcgtcaaactggaccggtttttttgcaacgctagctggaacacagcattcgagagacatcttttacatgccctatccacctcactctcagaccactgtccgctaatgctaaccggacaaggggaggccccacgatcgagaacttttcggttcgagaacttttggatccacctcccaggcttccacgaggtggtacaagaagcctggatagcaccccaaccccatcatgaacctcaccatagactctttcacaaactgggatgtatggccaaaagactaagatcgtggagcaaaaaattgatttcgcaggggaagcttcatttacacatggcgctcgagattattcttcaatttgatatagcccaagagtcaaggcaactcactcaagccgaactcacgctaagaaggaacctcaaagacagagtgctgggtcttgcagtggtggaaagagcccgtagaacacaagctacacgaatcaccaatctcaaagagggggatgcaaatacgaagttctttcatttgaggatgaatgcaagaaagagaaaaaacttcattcagaggctacgagtgggaaacatgtggaaagtaaaacacgatgaaaaagctgctgttataaaagagcactttcagaccttcatggcacacccagctccacgctcaaaagatcttgactgggacgccctgcagttaccgactttcgacagctccgtaattagtggccccatcacggaagaggaggttcacgtggcacttaaacagtctcccagcgacaaagcgcctggtccggacggcttcacaggtgctttctataaagcctgttgggaaacgataaaagatgacatcatggcggtcattcattccttcgaccggctacgaagtaataacttctcgatcctcaattcagcaaatgtggtgctcatcccgaaaaaggagggagctgaatgcgtaggagactacaggctgatcagtctcatacacggagttgggaagctaatttcaaaggtacttgcactgcgcttgcagcctcacatggggatcttgattagtcatgcccagagtgctttcataaagaaaatatgcacacatgacaactttatgtatgtgaggaatctgacaagaaaattccaccaaacgagaacgccgaatcttctgttgaagctcgacataaccaaagcttttgattcggttagatgggattacttaatcgacctcctccagagaaaaggcttcacatctcggtggactaactgggtctcaaacatcctagcctcatcgacaacaagggtcctcctcaatggatgcccaggatcacctataaagcatggaagaggcctctggcagggtgaccccctctcgccgctgctagttattttagccatcgacccactccaccaccttctagagaaagcaacagaattaggacacatgtcccctcttcgcggaagagctcccagatttcgaaccttcctctatgcagatgatgtggccatattcgtgaacccaagtgtccaagacatgacaaatctcactggcattctaagtgattttgggcaagtgacgggcctccgaacaaacctcaacaaaagccaaattgcgcctatccggtgtgatagcattgatctctccagcatcattgggatcttcccaacaggcctaacaaacttcccaatgaaataccttggcctacccctcgtggttggaaggctcaagaagagtatggacggcagacaggctggaaaaagaggatggcaaaaccaaaagatttgcccactttgctacaatgttgatgaatcggccctgcatctcctggccaaatgcaaactcacaaagaggatatgggcagaaatgcagagatggaccgggactgaccttcagatggacaattgggaaaactatcagtcagtcgagcaatggtggacactcgtaacggaatctccaaacaccccacgcaagcctctcaggaccctggtgattttaatctcgtgggaaatctggtgcaaaagaaacgcaagaatcttccgcaacaatgcatctacgccatcctcagcaaagatcaaggaggaagggagagcatgggtcaaagcaggggcttcaatcctccaggagttcgaaattttgggagatatcacttaa

SEQ ID NO: 45502 - DNA, 189 bp, Oryza sativa
  Clone ID: PAT_MRT4530_48461C.1
aggtagtagctcctttggtctccatctccctggcaactatgcaaacggggacattaccaacttgggtgcttgaagaaaagtttttctccttacgatcgaggaatgtttactttattgtcggttacttctccggacctgattactttggtacaaataatctcaggacatattcgaaggggctgcatatag

SEQ ID NO: 45503 - DNA, 164 bp, Oryza sativa
  Clone ID: PAT_MRT4530_48462C.1
ggagattcccgcccaatcttgattctttccaccccacggttcgccgtctccggggaattttcgcgcaagcccgggttttttttttggatggatctgactgcatttaatcgatttaatcagtgaaatatatatacccgagcattttgcatcaaaaaaaaaaaaaa

SEQ ID NO: 45504 - DNA, 192 bp, Oryza sativa
  Clone ID: PAT_MRT4530_48463C.1
ccggaccggacttcccgggccagacccacccgttttgtttctcgcggacaacaagagagggaggggtatttttaggaccaccggcactgcctcccgaggtaggagcccccccctgctttacctcctctcctccggcgtcgctgaggcagtcagccaagtcgtcccagcaagtggaaggctactagacccggg

SEQ ID NO: 45505 - DNA, 197 bp, Oryza sativa
  Clone ID: PAT_MRT4530_48464C.1
ttcttctctacttgcactatgttaaccattctggaatcttgtgacgtcgcatagctgggttgacaccaggccccacaagatgaaagccagctataaccagatactagagaccactcaccataatgggtacccacacatggagctacaaaaaaagcagcatcaccatcaggctgaagaggaatttcaggttgaccaga

SEQ ID NO: 45506 - DNA, 192 bp, Oryza sativa
  Clone ID: PAT_MRT4530_48465C.1
atggcgcagccgcagccaccacagacagcgctgccgccgccgcatccggtggtgcttcaaccgccgctgctgcccagggcggcttcgctgccccttgcccgtcgcgaccaccgcgcccgcctttgccgcctcttcgagagcccggagacggaggccgcggccggggcaccaccgacgccagatcgagcttag

SEQ ID NO: 45507 - DNA, 436 bp, Oryza sativa
  Clone ID: PAT_MRT4530_48466C.1
tatctttattattcttttttttttttttttatttttttttttctctggacctcaggcgccctggaaacttccaagaaaatcaaagggaatcaaaaaatttgttcattacaaaccaatttgactgatataagataccctttagactcacagaaacaggaccacggggttttatccatactttttggttatgaaaaaactgcaggcaaagtagcaacccaagttggttgactttatacaataataattcgcgaagtgatgtttttatttttttctgaaaggtagagccttgtggtggaccaacattctttttaacaaaagttctttcttgggttggaaaggttattattgccgaatctcctcccatttgcaaggaggatacctcttggtctgttttgaaacctcgggcatgcatatgtagtgggggaaccattctttg

SEQ ID NO: 45508 - DNA, 502 bp, Oryza sativa
  unsure (1)..(502): unsure at all n locations
  Clone ID: PAT_MRT4530_48467C.1
cnntntnatttttttctctttttgtttaggccttggaatgatcctgtttctttgcctgttaattgataggaattcatcttcagacttacacaagacgaaaacatgtaccgggaagtaaaaaaaacaggcagaaggtttcaaaacacaatgttaaagcaccaagagactactgacattattttttttggggactctaaatactagaagataaactggttcagcaagccctgagcaggtctaaaactactaaaaagaggaacttccttctgtcgaaaatgccacatgaccaggaaacaccggtactttgtcaattcctgagctactctgtcctttggagtttgattgagctctcctgtcctagatcatggtatggaacccggcggattgcatcagaacggccttgatttcttcaggcaacagcccagggccgtccttgcattgctcagccttaaaaatatccaacgtaaagccattgaagcaactgattacagcttgctggaca

SEQ ID NO: 45509 - DNA, 168 bp, Oryza sativa
  Clone ID: PAT_MRT4530_48468C.1
tcgctctcgcatttcggcacctgctccaaggactatgaacccccattgcaccccagcactccaaaaccctactgccggatggtgaggggagtcctggcgctcccgggaaatgggatatctactactatgaatgaggtgccgccccacgagagcttcctaatccatcag

SEQ ID NO: 45510 - DNA, 387 bp, Oryza sativa
  Clone ID: PAT_MRT4530_48469C.1
gtcgttcgcgccgcaggcgcctgctgccaaggctcaggtggttggatggccaccaattcgcagctaccgcaagaacacgatggctactaaccagctgaagagcagcaaggaggatgctgaagcgaagcagggccaggggttcctgtacgtcaaggtcagcatggatggtgccccctacctcaggaaggtggacctcaagacctacaagaactacaaggacctgtcaactgcgcttgagaagatgttcattggcttcacaactggtgagatgtctcgggttaccctgcttgcatttctctttgtaattgcatttccttttgatgtggatgctcttacaattacatcgtctaggatgcctgtgactaggaaccaatatatgcttgatct

SEQ ID NO: 45511 - DNA, 451 bp, Oryza sativa
  Clone ID: PAT_MRT4530_4846C.1
aaggaaaaaaaatcaagaacagacgcttaacttttaatccacccacgatcctctgcttccaggcgccacggctcactgggtcacggggaggtccggcggtggcggccggcgatgcgacagccgccgccggtggcgagctccacctctcggcgcagccgtgcagctgcgcacgtttctgacccgcgcgcgcgtggctgtctgacggcgtgggcggcacggatggattcatggatctaatcccgcgccagcacgtaacccccccgccgcatggttagaaacgcgcgcggctgcgccgagaggtggagctcgccgccggcggctgctgtcgcgtcgctggccaccaccgctgaaccttcccgtgacccagtgagccgtggcgcctggaggctagagagaggaggggagagatatggagagaggggagatggaaagggaggaagaagatgagggg

SEQ ID NO: 45512 - DNA, 1887 bp, Oryza sativa
  unsure (1)..(1887): unsure at all n locations
  Clone ID: PAT_MRT4530_48470C.1
aagaggaggaggaggagaggggcnccgctncgngcggngtatgtgatgggaggatgggggaggtngcggcgctgcggcantggntcggcgaggtgatgggggaggtggcggcgctgcggcagctggtcggcgagttatatcggtggtatttactggactttgagcatggttcaatcaaagatgatcattgtagagcaaggactggatacaactcagaattactaaagatcatggaagctaaccaatctcctcctcgcaagcgctcacggagggacaaaaaccgtgagaaagcacccaactcaaactcaactgaagaaatgcaacaggagatttggagtgagttccctggagacctttttgaaaccgttgttgcaagacttccagttgctgcaattttccgatttcgcactgtttgccggaattggtattctatgttgggctcagaaagtttctctcagcagtactcagaagttccacagaggctgccatggttctatacaatcacccatgagaatgccagcaacaatgtagcgatgtatgacccttcgctgaaaaaatggcaccacccatcagttcccctggctcctgcaaagatagtaattccagtggcatctgcaggtggccttgtctgtttattggatcttagccacaggaacttctacatatgcaatccgctaacacaatcactcaaggaaattccgcgcaggtcagtccaggcatggtcaagagtggcagtagggatggtgatgaacggaggaacctctaatgaaggttacaaagtaatgtggttaggaaatgatgggaattatgaagtctatgattctatgaagaatatgtggtcttgtccaggcacttttcctccaagcatcaaacttccgcttgctctaaattttaggtcacagcctgtggcggttggcagcatgctatacttcatgtgtgcagaaccagagggtgttttgtcgtatgatgtaagcactgggatatggagacaattcgtcatcccactgccacttcatctgactgaccacacacttgccgagttccagggaagggttatgctggtgggtctgctctgcaaaaatgcagcgacatgtgtctgcatttgggagttgcagaagatgactctcctctggaaggaggtggacagaatgccaaatatctggtgcttagaattctacggtaagcacatgaagatgacatgcctgggcaacagtggtttgctcatgctctccttgaaggcgaagcggatgaaccgcctcgtgacatacaaccttttgaacaaggagtggcagaaggttcctgattgcatgctcccatgcagccgcaaaaagcagtggatagcatgtggcacagcatttggtccatgcccctctgccttggcctgacagttttttttcactttcttcaccaaaggtggttgagatttcacacattccggatcattggcctatccttagatatttccgtcttaccgtgagaaggttatctgtcatgtacaaaatcatgtaacctgtggttgtttttgtatctcgctgaagcaatcgatatcgtttggtctatcatctagaggaatttggggtcggcactacaccaactggtttaagtcttcttagagatattaaggtccttgccagaaggctggacagaagacatctgtttagtcttggttttttgcttgttttcattatcatgatatcgtctcgtcttcagtgtgtattacttatttctgaatctgcagtcatctgcccaaaaactgagtatgtactctctatagtaataactggggctgaactgatgctcctgggtcttgatgatacttctttatcaatcactagttgcttcaattgttctcggcaaatatgttaattcctgttgctagcaaccatg

SEQ ID NO: 45513 - DNA, 1440 bp, Oryza sativa
  unsure (1)..(1440): unsure at all n locations
  Clone ID: PAT_MRT4530_48471C.1
ccgcccggggctcacacacacacacactctcttctcttgtctcgctgtggctcgctggacacaacacacacccacacccactcccccactctctctccggttcatgtcctgctgctccccatgtcgcccccactcgagctcgactacataggcctctcgccgccggtgcccgccgccgccgatgccgccgccgacaacgacctgaagggcaccgaggctccgcctcggcctgcccggctcccactcgccggaccgctccccgcccgccgccacgctcgaccttctccccgctgccaagggcgccaagcgcgggttctccgacgaggcgcgtccgctgccggcgtccgccgccgccgccgccgccgccgggaagggcaagaaggcggcggccggcgaggaggatgaggatgcggaggaggaggacaagaaggtcgccgccgcgccgcaggcgcctgctgccaaggctcaggtggttggatggccaccaattcgcagctaccgcaagaacacgatggctactaaccagctgaagagcagcaaggaggatgctgaagcgaagcagggccaggggttcctgtacgtcaaggtcagcatggatggtgccccctacctcaggaaggtggacctcaagacctacaagaactacaaggacctgtcaactgcgcttgagaagatgttcattggcttcacaactggcaaggatggcttatctgagagccgcaaggatggtgaatatgtgctgacttatgaagacaaggatggagactggatgcttgttggcgatgttccatgggagatgtttgccaactcttgtcgcagactcaggatcatgaaaggttcagatgcaattggacttgctccaagggcagttgataagtccaaaaaccgcaactagaatggtttctgccccacagtcaaaagcaagatggagatcaaatgactgtagggaattttctgaaaaccaagaagtctaacagttttaagatggagtctgccttatggtctgtactacatggtttgctattgtgaaagttaaaaaaaaaggtgtcttgttatgttagcttcgccaaatctcctagggacataaactctatttgattgtgcccaagtctttgtacgtgtgttaatgctattcgtgtaaatggtttggacaccatgtgctactgctatgattgagcacccctacctactttgcaaaatgttgtcaatgaactgtttgttcgctacataaatgttcaatgaagcttgcaaatgtattgtccaccaaaaaaaaaaaaaaaaaaaaaaaaaagactagcctgcagcccgggggttccactgcttgcatttctctttgtaattgcatttccttttgatgtggatgctcttacaattacatcgtctaagatgcctgtgactaggaaccaatatatgnctgatctgtacaagtaacttttgccg

SEQ ID NO: 45514 - DNA, 217 bp, Oryza sativa
  unsure (1)..(217): unsure at all n locations
  Clone ID: PAT_MRT4530_48472C.1
cggacgggncngngnacgctntggcgnacncatggccgnacgnttggttttctccccaatctcgcaaggcnatcgtcgtcnaatcgaatcctctcgnttcctcaanatgcagatctttgtaaagacattaaccggcaagactatcaccctcgaggtggagtcctctaacaccatcgataatgtcaaggctaagatccaagataaggagggcatcccc

SEQ ID NO: 45515 - DNA, 530 bp, Oryza sativa
  Clone ID: PAT_MRT4530_48473C.1
agagcgcgtggccggtcggcctctcctcgcctccatgtcacgcaggctaataaggagagaaaacaatagccgcccgcgccggcacctccacggcctgtacgcgacttgccgccagcacagccaagggcgcgaaaccgcccgggcgatgcacaccgccgcatcctgtagaacatgctccaccagccctatcttcggcgagggaggcatgccctacttccacaggctcagaacagggacactggcccgacggaagcggctgcgcctatgccgcatcgcgcccgacgagagccgaccccggcgcccgcgaaggcgcccgaatacacggctctcagttcggctagcccaagatgctcgcagaggggatgctgcccccagagaggcccatgcggcggcaggtcaagctgatctccaacgacggaggcacgaagatgagggtcgccgtgggcaccgtcctacttaccgcctaggtacttggccgctaacggtctaggctatctgctgtctatgtcaagagcgagctggattctcta

SEQ ID NO: 45516 - DNA, 829 bp, Oryza sativa
  Clone ID: PAT_MRT4530_48474C.1
ggagctgcaagcaactggaatagaggtaagagacagtttggtctcgacaatttgccatgtcagattctgatcgaattggcacagaaagatgcttagtaaattcatctaacacaaatggtgatgtcctactagaatcatgagctaaacaattagatgctactacacgtgatgataactctcaaggcgcatcattaggctgagcatcagaatcctgttgcttctggtgggtgccattggtgtcgttctgttcattcatataaggtattgaatcactgttcccctctagtttttccttgagtgaagcattgtgtgaaagaagtgcctcgtactcctttttgatccgttcaagctcagccctaagagaggagttttctgcccttaaattgtcagcgcgtacagaaagctcttcacactcagcctgcttgcgcagccgggatctacgtgctgattcccgattagactgcttccttttctgcttcttgagctctctttcatcccattgctctcctcgaactgaaccagacgatgctttgccatgcattgcaggaacaggcgaagaaccagcagcaccccagtagtccattcctatgttcaagtttgttgtgggagcaactcccccgattactacacccgtttgagttggagccatcgacatgttctgatttaatgctgtatgtgatatgccattctgagaactaccatcttcctttacatcattttcctttgaatgtgaatcctggagcaacataaaacagggttgataggattttgaaagttggcgtcccttccattactatcactctcactagcactctcgcagcatgtacaa

SEQ ID NO: 45517 - DNA, 442 bp, Oryza sativa
  Clone ID: PAT_MRT4530_48475C.1
gcacgagggctacaattggaaattttgcaacagctatactgcagctagagtgtgtctagggattcatggacaaacaacagaaccaaaaatatttttcctggttttacttttctgttcttatccaatggttctgcatgactcaagttcttaatttcctcccaaaaatatccttttgaatttctactttctaaaagaaagaatcaaggtcctgaatttacatgctgtttgttctttgcaaaatctaaaaaccataggatatcaatatcatgaatatgggcaatgcatgtttggttgagtgccaacctttgctaaacttgtggcaaccaagtttgaccaactaaggctagcgtttggttcatgccacaagtgagttatgccgcactttctgttagctggtccacttgtcatagagtgaattttttgccacaacttgtcacaattg

SEQ ID NO: 45518 - DNA, 2565 bp, Oryza sativa
  Clone ID: PAT_MRT4530_48476C.1
atggaggcgatgcaggcactgatgaagcgcatgcaattgtcggaggcagagaagaaggggatccggatctgcgaggcggagtctggaagtatgggatcaggggatccgaaggcgatcgggaaggtcctggcggagaaagtggtgaacgcggaggcatccgggaagcggcatgctctggaggatggaccctggatgtttggtaaagatctggtgatcgtcgtggattatgatgaatcaaaggttttggaggagatggtgtttgcctttgttcctatttggatcagggcttcaaagatgcctttatgcatgatgaacaaggccatagggagagcgatcgggggagaggtgggtgaattcatgcgaatggagtcggaaaaggatggcactgctgtggggcagttccttcgtataaaggaaaaagcggacgcccaggggaaatacatggaaaacaacgccatgcagcccatgcacgtcgacggaggggctgctcagggagaggtgccatcgggagtaaaagggccaggaggggtgtatggagaggcacaaagtgatcttagattcaagacatgggacactttgcgaagcttggcgatgaatccagctcagccatggctgatggcgggagattttaatgagatactcgtagctgcagaaaaacagggaggtaggccgaagtgccaagctcagatggacaagttccgggacactttagctgattgtggcctcattgacatcggttttgagggagacatgtttacctggcggaataatagccacacagaagagggctatattagggagcatctggaccgggcggtggcaaatcaggaatggagggtgaagtttccgagctttcgggttgtcaatggggatccgaggcactctgaccatcggccagtgatcattactacatgtgggggaaggaagggggtaatgcagaggggatcatcaagcttcaggtttgaagctgcgtggctggctgaagagaagtgcagggaagtggtgagcgagaattgggagatggcctcaactttggcagaaggatgtgatgaatgcggtgaaggtggtagcttcaggggaaatatctgcaaggagaaggtggtgaaagaaggggtgctgaaatacaaactggagaaactggaggagcagcacccggagcgcctcttaagcaaagtgaagaagaaagtaacagaagagatgaatgaatgcttaatggctgagtttattgtcgaagaaataaagacatcaatagattcaattggagacctgaaggcgccaggaccagatggaatgccggctgtattttacaagaatttctgggatgtggttggaggaaaggtgacctcagaagttcttgatattttgaatggaggtcagatgccattaggttggaacgagacgacaatagttttaataccaaaggtgaagcagccggagcaaatcaaggatctccgcccaataagcctccgtaatgtcttgacagaccagggggtgatgaaaataaacactgatggagcttttgatcctttcaccagaacaggaggctggggttttgctatcagagatcactcaggcaaggttgttaaatcgggagcgggtaaagttcagattctgatgaatgctttccacgctgaagccctagcatgtgcagctggtataagagccgccagtgaatgcgggatgcaaagggtgacggctgaaactgattcaacgatgttgaagtcggctttggagaagaacacttttgcttcgtcagctcttggcgggatcatttgtgagataaagaactttgtaaattttgctttcctgtctttcaatccgcgccgctgcctcctccgctcctcccgcgcccacgtcgtgcctccactctgcgcccaaacctcgcgcccacgtcgccgcccctcccccgttcctcccgcccccacgcgcgcccgagagtcgcgccgctcccgtccgccgttttccgaagcgctgccgccgctcatcccctcccgctccggtcgccgcccctccggtgaggactccctccccctcccttttctccccttcccgcgtccgccgccgcctttggccgtgccgccgctccggtcgtccgccgccgcctccctccgccggtcgtcgccgtcggcagccgcgcgcgccgccgccgctcgccatggccagtcggtcggctttgtgccaagccaagcggtgcctagccgccgcccgcgccgtccgatcggcctcgggccgatccggaccgtcggtcccgtggaccggcggtggaccacgcgcgtggtcccgctcgaccctttcataggcaccggtggcgagggtgggcgtgatggagttgggtcggccggggtgtccggttgtccagctgccggattcaccgcggcgcaagaggggaccgcccactgccttttgagggtgggtagtactcagtcttgctctctgttcccccacaccagagctgaagatctttctagttggagctgtcttgttgaagttggttttgtcgctgccgtcaaggtttgcctgtggagtggagtcgtcccgctgctgaagtcaagcttcccggtttag

SEQ ID NO: 45519 - DNA, 336 bp, Oryza sativa
  Clone ID: PAT_MRT4530_48477C.1
atgggtgacgagtggcagatgtgcttagagctccaccgccatcaccgccgtggacaaccagaagtgagagctccacctcctcgaactaggactaaagttcgtgggacacgtggaccagcaccagtgtcatggtggcacgcgcgaggctttccatggcaccttgaaggaccggtcggggatgtccctatggtgaaggaggtgcttgaatggctagaggggcatgaaccaagggctgaccccgcaaaaggcgttgttgagcacctcgtcatcgcgccactgcccttgtctcggaggtgcagtagcagcgcgatggcaccgatgagggactccccatag

SEQ ID NO: 45520 - DNA, 760 bp, Oryza sativa
  Clone ID: PAT_MRT4530_48478C.1
cgtcacctctctcagctctctctctctctcgctccatctctctccaccacacaacggtggtggcttggtggaggcggaccggcgacagaaagggaggccgcagcagtgggaggggaggcggcggcaacgccctcccctccgctccatccagcgggaggggcggtggaggtggtccgacggcttgggttttgcagcggcaccctcccctatgccagatctggcaggaagggaggtggcggcgccgccatcccgtccgctccatccagcgggaggggatgcggcggcggcccgacaactctggcggcgtcgtcccctctgccagatctggccggaggggatgcggtggcgcctagcaactggaggggtggcggcgagagaggagtctcgcccctcctcctctacatcgggcgacggtggcttccctcggcagcgctcttcatccggcgatggcggcggcggtggagacggttcttgatgtgttcgttcttgatgtcttcttgatgaatatgatgttgatgtgctcttgattaatgatgttctagatgaatgtgatgttgatgtgttcttgatgaatgatgtccttgatgtgctcggatcagcttgattcgagccgagtcggcattatttttttgggatcattagatgtcgtttcgaaaccaacacaggaactggcacctatttaattttcacattagtgccgccttcacggtgccggttgggaaaaccgacaccaatctctttttcggtggtagtgccacgt

SEQ ID NO: 45521 - DNA, 601 bp, Oryza sativa
  Clone ID: PAT_MRT4530_48479C.1
gctgtcacacccataaattcacgaactagaatttccaagcttgtcagcagcgacgaaaccaacttcaacaagacagctcccactaggaagatcttcagctctggtgtgggggaaaagagagtaagactgagtactacccactgtactcagcaagtcataccagaaaaggaggtacgatgcaggatataaccaaaggaggctaaaggttcttttgcataaaactagcatttaaaagcagtagttgaaagtagtaaaaacaattatagtaattagtaaatattaaccactcactgtcaaacgctacaccacgttacaacatacccaaccaaccacctgaacatgatactgcaaagggggaaatcgtgacaagaccctttgcataacccaccgctaaccatccacaccacgctaaggtttcacccccacccctcaaaaggcagtgggaagtcccctcgtgcgtcgcggtgaatccagcagctggacaaccggacaccctggccgacccaactccatcacgcccaccctcgccaccggtgctcccgcttgtggtaagaatggtaagtctcccagggtttcccgtgaaccggtccttaactgccat

SEQ ID NO: 45522 - DNA, 1189 bp, Oryza sativa
  Clone ID: PAT_MRT4530_4847C.1
atggtgcagttgtccaacgcgacccgcatccgcatgcatgcaaccacgacactatcatcaccacaattatgtacacaatttgctctcgatcgtgtcgctcgatcgacgacgacgattccactatccaagtccaagtcgagctctcatcatcccgcggcggcgtgccggcgaagaggaagaagaaagagctctcgctccggactcctcctcctcctcttcttcgccctcgccgtctatctcctcgacctctcggccggccgcggcggcggccggcgcctccggggaggaggaggatcagtggcagcggcggcggctcgctcggcggcgcgacaggccggcatctccggcgacgacgtgttcctcatcgacctggacggcggcgaggccacgctggcggcgcaccgccacgacctctccttcgccggcttcgccaaccggagcggccactggcacgtcttccgcggcgacgagggcgccatcccgaacgcctgcaggcgccgcctcccgttccgcagcacctaccgcgacctcatcggccccagcctgccgctggggagagcggccgcggcggaggccaccgaggcgatcgcgtcgtacgacgcggacgccgccggcgaggaggaggcggcggcggcggcgctcaggcggggcgtggcggcgcctgtcggtgatgctcgtggaagccatatgcggctgaagccgatcggggagacccgtgtcgaacgggtggcgggagagcggcgaggcgcgtgcgtggcggccgccgagcacctgccgtacatcgagcactgggacaccatgtcgttcgaggtcctccggtggaggcgcaccgggaggtgggacggggccgttcaccgagctgctgaggaggcgcgccggcatccgcagcgccggcgaggcgctcgccattgccaccctgggcgcagctgatcctggctcactccaccacctgatgcaaacgtcctgccccgcgccgtgcccccgctggcgggcctcgcccaggacttttcttttgcgggtttcgccaaccggagcggccactggcacgtcctccggtggaggcgcaccgggaggtgggacggggccgttcaccgagctgctgaggaggcgcgccggcatccgcagcgccggcgaggcgctcgccattgccaccttggcgcagctgatcctggctcactccaccacctga

SEQ ID NO: 45523 - DNA, 625 bp, Oryza sativa
  Clone ID: PAT_MRT4530_48480C.1
atggcagttaaggaccggttcacgggaaaccctgggagacttaccgtgcttaccacaagcgggagcaccggtggcgagggtgggcgtgatgaagttgggttggccggggtgtccggttgtccagctgccggattcaccgcggcgcaagaggggaccgcccactgccttttgaggggtgggggtgaaaccttagcgtggtgtggatggttaggggagggttatgcggagggtcttgtcacgatttccccctttgcagtatcatgttcaggtggtttgttgggcctgttgcaacgtggtgtagcgttggatagtgatgggttaatactgattacttactacaattgttttactattttcaactactgcttttaaatgcctactttattgcaaatgaacctttagcctcctttggttatatcctgcatcatacctcctcttccggtatgactcgctgagtacagtgggtagtactcagtcttgctctcttttcccccacaccagagcggaagttcttcccagttggagctgtctcataaaggttggtttcgtcgctgccgtcaagcttagaaattctggttcgtgaatttctgggcgtgacaggatgtcctcatcattcccatcccct

SEQ ID NO: 45524 - DNA, 382 bp, Oryza sativa
  Clone ID: PAT_MRT4530_48481C.1
aaagacagccgaacacgccaatagagtatggaaacttgtattacaagttagtaaacctaacctccagaattatatctggagagctttattttatcttgataattcgtatttttactcttattcctaaacgtagttctaacacctggatcggcctgcttagttctaatcggttcttgggtactctcatagatccattgtctagcctttatccattgttgccgcgtccggaagagataggaggatggtgttcaccgccgggacctggattttgagatagaattcgaagagaccgtgttgatatgcctgaagcaaatacacggccttgatgcttctcctcgccggcgacgagctcgcctccagggccagcgccggcgagcacgca

SEQ ID NO: 45525 - DNA, 1554 bp, Oryza sativa
  Clone ID: PAT_MRT4530_48482C.1
ttaccacttaacaatcatcagcacatcagttcggctcctggccaaaaattcttcgtccgcgtcgctcccgtccatgggcggcacctcatcctcctccgccgccccctccctcctcctctcctctgcctcgcgccgcccgagcggcgcgttggcaaagccggccggcctcaaggacagcggcggcggggccctctcccctcctcgaggaagccagcggcggggacaccagggctgctcgggagcggcggtccacggcgtgggaggtggcaccggggggtcggcgtggcggatctgtctccctcggcagcagatctggcctctccgtgtccaggggccgagcaatggcgagcggcgatcagcggcacgggaagcggcgccgggggtcaccgcggcgaattcgggcacgctggaggtggatccgcctcccccggcggcagatccggcctccccacgtccaggggccgagcgaacagcgagcctcgcggcgacggcggccgaaaggaggtgacggatgcgcgccaccgaggacggatgtggcaacggcggcgaaggcccgggggtgaggccggttctggtcctcccgggggcgacggcagcggcggaggtccacggccctgatggcggcgacggcggcggcggtggtccacggccgcgatggcggcagcggaggactgcagaggcagtggtggcggagggcgacgaggcagcagccacgttggcggtgtcggcggctggagacagcagcggcgatggcggccggcttgcggcggccgtgaatgtggaggcaaggtgacgaccgtggctgcggtgggaggaggcacggtggtgaccaccgtggctgaggtgggaggatgcatggcggcctcggacggctagccgagggagtaggagacgactgtatctggccggcgcgacagcgtttggaggaggggcggagaccggcttggcgcagccgattgtcacgcccagaaattcacgaaccagaatttctaagcttgacggcagcgacgaaaccaactccaacaggacagctcccactaggaagatcttcagctctggtgtgggggaaaagaaagcaagactgagtactacccactgtactcagcaagtcataccggaagaggaggtatgatgcaggatataaccaaaggaggctaaaggttcttgtgcataaagcaggcatttcaaagcagtagttgaaagcagtaaaacagtagtagtaattaagcagtattaaccaattactgtctaacgctacaccacgttgcaacaggcccaaccaaccacctgaacatgatactgcaaagggggaaatcgtgataagaccctccacatatccctcccctaaccatccacaccacgctaaggtttcacccccacccctcaaaagcagtgggcggtcccctcttgcgccgcgatgaatccggcagctggacaaccggacaccccggccgacccaactccatcacgcccaccctcgccaccggtgctcccgcttgtggtaagcacggtaagtctcccagggtttcccgtgaaccggtgcttaactgccat

SEQ ID NO: 45526 - DNA, 183 bp, Oryza sativa
  Clone ID: PAT_MRT4530_48483C.1
atggcgagcgttccggcggggaagacgaagcgtcgcttggatctcggattttttgttaagggtatcggaggtgcaagtgggcctaggcctgaacaccgtgccgccgccgtcgtcggcgccgtcgagctcccgcgcaggaaccccaggaggagcttgctgctggcctccacgtcggaattatag

SEQ ID NO: 45527 - DNA, 271 bp, Oryza sativa
  Clone ID: PAT_MRT4530_48484C.1
atggtgtactggttcggcgacggcgcggctgctacggcgaaaaagattgcgccgaagctgaccagagaaggagaaagaaaggaatggcgtcggcggccggaattggggaagaagaagaggatctcccatcgtggtccacctcgcgtcgattacttcgggattcttgatctgaaggtgttgatgaagctcgtggcgaagtggctcagcttgttacgaactgttgaagccgggcgacaggcaaaggtgaagctgcggcgtccagagcgctacg

SEQ ID NO: 45528 - DNA, 1060 bp, Oryza sativa
  Clone ID: PAT_MRT4530_48485C.1
tcatgaaggggcatcagcagtttccggctttcccgcggagtggggcgggagggaaaggagaggaagtgggatggggtagcggaggcgccaccatccaccaggcgtcggcaaagcggatgtgctcccggcgggaggagaggagcggtgcgcgtgcacgggcggcggctggagaggagaggagtagcgggcgtgcgtggacggcggttggcgagaaaggagcggcgcgcgtgcacgggtggcggctggagaggagaggagtggtgtgcttgcacgaactgcggccgacgagaaaggagcggcgcgcgggcgccagccgacgggaggatgcgcgtgcacgggcagcaattggagatgagaggagcggtgcgcgtgtgggggaggcgtcgccgaccatgcccgggaggagaggttgctgactgtggccatgcgtgcggggggaggcgtcggccatagagcgcgctagtgtcacgcccataaattcacgaaccagaatttttaagcttgacggcggcgatgaaaccaactttgacaagacagctcccactaggaagattttcagttctggtgtggggaaaaagagagcaagactgagtactacccactgtactcagcaagtcataccggaagaggaggtatgatgcaggatataaccaaaggaggctaggggttcatttgcataaagcaggcatttaaaagcagaagttgaaaacagtaaaacaattgtagtaattaatcaacattaaccaatcactgtccaatgctacaccacgttgcaacaagcccaaccaaccacctgaacatgatactgcaaagggggaaatcgtgacaagaccctccgcataaccctcccctaaccatccacaccacgctaaggtttcacccgcacccccaacgggcagtgggcggtcccctcttgcgccgcggtgaatccggcagctggacaactggacaccccggctgacccaactccatcatgcccaccctcaccaccggtgctcccgcttgtggtaagcacgataagtcttctagggtttcccgtgaaccggtccttaattgccat

SEQ ID NO: 45529 - DNA, 1842 bp, Oryza sativa
  Clone ID: PAT_MRT4530_48486C.1
atggcggacgaaagcgagaggggcggtatggtaatcgacgacgtcggcggcggcggactgaatcttgcaattgttgcaggcaagcgtaagcgggagatcacatgggaagagaaggcggcgttgacagttcttgatattcctgccgagcgtgattgcagcctcatagactcggagaaagattactcatctatggctggctgccaggccggagaacacgctagtatatttggcattgacaagaatggggatgattctgatgaaccgtgtgctaaggatgatgccaatcaaagtgatatggctgctctgaaggaggaggaggagaattgggagctggacagtgaaccagagctcacatgggatgagaaggtggttcaagttctaaacatggttcgacaccgagagatcaccgaatataaccccaagcagttttgctcaattcctactcgattttgtgcctacaacatagccttctttgacctggacaaagagtggatacgactggttgacgttgaggaggaggaagaggcgccggccatcgtcgttgttgtcgcgcttgacgtggacggcggcgacgatggtcatgacggcggcggtctgaacctcgtatcgtgtgccccctcggcctccacccctgtttatatggcgcagggtgacaggggcccaccagccaatgggctgggcgccccccgatcagggcacgggtcaaggattcataaggcttcccttaaacccatgccggctacatgttccttgaacacattgggtgagtgtgacaccgtctctgagtacctcgaaagaataaagagccagtttactggttcttcaaagacttatgcgacacagctgataaagcagcttgtgacagagaggtaccatgggggtggtgtaagagaccacattcttaggatgagcaacatggcttccaagttgaagccaatggatttggcaaagcttgcacgtggaccacctatcaagtcgctagctttccctgactactggtgggagatggactctgtcaatgtgattgcaatcaaggtggccgagtctgatgtgggttaccctatcagggtatttggcactgtgctggccagggatgagtatgatttcaggtgtgtctatctgttcaggcgtgacaggaacaatccccagatcatcacctcgccggaggacacactaactctgacaggacctaatcgagcgctgggtgcaacagacaaaatgtatttcgagttcaatttgaagattagagacgatggcgatgtcgacaaagatttctgcaaagtcaaaattaagggggttgtatccacgtttttcactggcaaagtgactgcttggactactggagatgatcagaacaaaatcatcctgtatgacagtgaagtggaaggcagcaacagagttgttggagctgatggatcagtcgatctgactcgctgtttcgtagccgtcaatttggatgatgaactggtgctcaatgtctgtgtttctgaaggagctggctcaatctttgagctcgttcttggacacaatgatgaagaatgtgtccgtgagcaaggtccctatgaactgcagggtgagcgcagagcgccaccagccaccagcgacgccaccaccccgctgccgcgcgccgtcaccaagcgccgacgccgtcccagccgccagggtgccccaccacccccgccgcccgaggtcgacacccccactgcctccaccgccgagcaccacccccaccaccagcatccaccggcatcgttgcccctgagcggcaccatcccaccaccacgccgaggagaaagacgggcgcgccggcactgccggcactggatgagcagtccccaatag

SEQ ID NO: 45530 - DNA, 462 bp, Oryza sativa
  Clone ID: PAT_MRT4530_48487C.1
atggcaattaaggaccggttcacgggaaaccctgggagacttaccgtgcttaccacaagcgggagcaccggtggcgagggtgggcgtgatggagttgggtcggccggggtgtccggttgtccagctaccggattcaccgcggcgcaagaggggaccacccactacccgttgggggtgggggtgaaaccttagcatggtgtggatggttaggggagggttatgtggagggtcttgtcacaatttccccctttgtagtatcatgttcaggtggttggttgggcctgttgcaacgtggtgtagcgttagacagtgattggttaatattgattaattactacaattgttttaccgctttcaactactgtttttaaatgcctgctttattgcaaatgaaccctagcctcctttggttatatcctgcatcatacctcctcttccagtatgattggatgagtacagtgg

SEQ ID NO: 45531 - DNA, 200 bp, Oryza sativa
  Clone ID: PAT_MRT4530_48488C.1
agtgtgacaccgtctctgagtacctcgaaagaataaagagccagtttactggttcttcaaagacttatgcgacacagctgataaagcagcttgtgacagagaggtaccatgggggtggtgtaagagaccacattcttaggatgagcaacatggcttccaagttgaagccaatggatttgggtatcacagatgactttctg

SEQ ID NO: 45532 - DNA, 744 bp, Oryza sativa
  Clone ID: PAT_MRT4530_48489C.1
atggcaattaaggaccggttcacgggaaaccctaggagacttaccgtgcttaccacaagcgggagcaccgatggtgagggtaggcgtgatggagttgggtcggccggggtatccggttgtccagctgccggattcatcgcggcgcaagaggggaccgcccactgcctttttaggggtgggggtgaaaccttagcatggtgtggatggttatgggagggttatgcggagggtcttgtcacaatttccccctttgcagtatcatgttcaggtggttggttgggcccgttgcaacatgtgtagcgttggacagtgattggttaatattgactaattactacaattgttttacatctttcaactactgtttttaaatgtatgctttattgcaaatgaacccttagcctcctttggttatatcctacatcatacctcctcttccggtatgacttgctgagtacagtgagtagtacttagtcttgctctcttttcccccacaccagagttgaagttcttctcagttggagatgtctcgaagaagttggtttcgtcgctgccgtcaagcttagaaattctggttcgtgaatttctaggcgtgacaagttggtatcagagccgaccttgaccgtaggacaagagcagatcggtggagcacgtgccagtgatgtatctaacagcagttcatctccaccgcatgagaacccaacgatcgctcaggtgttggataatcagactcagatgatgaca

SEQ ID NO: 45533 - DNA, 632 bp, Oryza sativa
  Clone ID: PAT_MRT4530_4848C.1
ttttttatctcaagaaataagtgaggtgagtcccttactcgtgaaaagtgagctggagcagcgggagttggaggagtctgcttgggtgaagccgatggtcggacgggccggcggaagtcgacatatcccgcggacggaagcttggtcggagaggagatctaacggtcggaaaacggcaagcgcgagtttctctcggaaatggatatggcaaatccgaaacattaccaaatattccggacttggggggcatgtgttaacgaccaaatttggcaatctgagtatcggaggtaaagattagatcgaagcggaatccatgatgaagatcgttttggaaacaaagcaagaatcggctggagtccaaatcggctacaactagatcggctgagtccgagtcagaaagggttagccgatacagccgattttggcaatatgataagtgtgggcaaaagtctgccgcaaggtcttatggtatcttagagtttgttagagataagagtcgtgtccgacaaggacatattttgatcaaatcaactggcatgctcacgaacctaaaaggcaagattttggacttgcactggagttaagcagatctcccaggcctcgtgtctttaccactacgatacaagattaga

SEQ ID NO: 45534 - DNA, 1488 bp, Oryza sativa
  Clone ID: PAT_MRT4530_48490C.1
ccctaaggctctctcccctccggcggcgacaggacgggttctcgatcagggttgccagcgaacacgtctacgatggcggatgaaagcgagcggagcggtatggtaatcgacgacgtcggcggcggactgaatcttccaataattgttgcaggcaagcgtaagcgggagctcacatgggaagagaaggcgttgacagttcttgatattgtcgggtcccaacagcaccccgcatgccaacctgccgagcgtgattgcagcctcatagactcggagaaagattactcatctatggccggctgccaggccggagaacacgctagtatatttggcattgacaagaatggggatgattctgatgaaccgtgtgctaaggatgatgccaagcaaagtgatgtggctcctctgaaggaggaggagaattgggagctggacagtgaaccagagctcacatgggatgagaaggtggttgaagttctaaacatagttcgacgccgagagatcaccgaatataaccccaagcagttttgctcaattcctactcgattttgtgcctacaacatagccttctttgacctggacaaagagtcaaagcttgcacgtggaccacctatcaagtcactagctttccccgactactggtgggagatggactctgtcaatgtgattgcaatcaaggtggccgagtctgatgtgggttaccctatcagggtatttggcactgtgctggccagggatgagtacgatttcaggtgtgtctatttgttcaggcgtgacaggaacaatccacagatcatcacctcgccggaggacacactaactctgacaggacctaatcgagcgctgggtgcaatagacaaaatgtatttcgagttcaatttgaagattagagacggtgatgtcgacaaagatttctgcaaaggtgtgcgagaacacaatgccatctgctatacaaagcagccgatgactttatcgctagagagctgcctgagtagaattgattttgtgtatagtcctgttcaattagctgtggaagcttctgttgcagtcaaaattaagggggttgtatccaagtttttcactggcaaagtgactgcttggactactggagatgatcagaacaaaatcatcctgtatgacagtgaagtggaaggcaggaacagagttcttggagctgatggatcagtcgatctgactcgctgtttcgtagccgtcaatttggatgatgaactggtgctcaatgtctgtgtttctgaaggagctggctcaatctttgagctcgttcttggacacaatgatgaagaatgtgtccttgagcaaggtccctatgaactgcagtgcggacaaacaggacagtccatttccagttttgacagaaatcaagattcattgtattttccactgaagtcgaaaatgaaaacaccacacttcagagcatgcaagcaaccagagtacaataatgcacatgatatctatgttggcaagaaataa

SEQ ID NO: 45535 - DNA, 708 bp, Oryza sativa
  Clone ID: PAT_MRT4530_48491C.1
atggccggagcaggagatgagctgaagctgctgggcatgtggacgagcccgttcgctctgcgagtgaagcttgcgctcagcttcaagggcctgagctacgagtacgccgaggaggacctcagcaacaagagcgagctgctgctcagctccaacccggtgcacaagaaggtgcccgtgctcatccacaacggcaagcccatctgcgagtcgcaggtcatcgtgcagtacatcgacgaggcgttccccggcgccggcgtgcccctcctcccctccgacccctacgagcgcgccgtcgctcgcttctgggccgcctacatcgacgacaagctgttgaagtcgtggctgcaggcgtcgatgggcaagacggaggaggagaaggcggaggcgttgaaggagacgttcacagcggtggcgaacctggaggcggccttcgaggagtgctccaaggggaagcccttcttcggcggcgacgccgtcgggtacctggacgtcacgctcggcgccctggtcagctgggtgcacgccggcgaggccctgtacgggatgaggctcttcgatgccaccaggagcccgctcctggacgcgtgggtggaccgcttcgccgcactggatgcggccatggcggtcttgccggacgccggcacattagccgagtacgccaagaagaggcaggcggagcgggcagccgccgcggctgcgaacaactga

SEQ ID NO: 45536 - DNA, 988 bp, Oryza sativa
  Clone ID: PAT_MRT4530_48492C.1
atggctccccgcaagtctaccaaggccggatcaactggcgaagatcttggaagccttggcaaaggatggtcgtgcttccttgacaaatcacttgtcaaagaggccgacttggatgaactggtatcatccggttctctcacagagggccaaggatcatgcgggggcgaggccgttgttccctcgcctggggatgggcgaacggttgtcttcgccgcatacttcgctgctggggttcgcttcccatgcgacaacttcttgccttcagtgctttcgatgaccagccagggtacacaaacgacaattgttgacatacagacccacgtcttacaaaaatataaaagattacaaatgcagcgggaaagattaaagcgagctaaaccaggaagcttgacttcagcagcaggcgactccactccacaggcaatccttgacggcagcgacaaaaccaacttcaacaagacagctccaactagaaagatcttcagctctggtgtggggggaaaagagagcaagactgagtactacccactgtactcagcaagtcataccggaagaggaggtatgatgcaggatataaccaaaggaagctaggggttcttttgcataaagcagtcatttcaaagcagtagttgaaagcagtaaaacagctgtagtaattaatcaatattaaccaatcactgtccaacgctacaccacgttgcaacaggcccaaccaaccacctgaacatgatactgcaaagggggaaatcgtgacaagaccctccacataaccctcccctaaccatccacaccacgctaaggtttcacccccacccctcaaaaggcagtgggcggtcccctcttgcgccgcggtgaatccggcagctggacaactgaacacctcggccgacccaactccattacgcccacccttgccaccggtgctcccgcttgtggtaagcacggtaagtctcccagggtttcccgtgaaccggtccttaactgctat

SEQ ID NO: 45537 - DNA, 1738 bp, Oryza sativa
  Clone ID: PAT_MRT4530_48493C.1
atggcggacgaaagcgagaggggcggtatggtaatcgacgacgtcggcggcggcggactgaatcttgcaattgttgcaggcaagcgtaagcgggagatcacatgggaagagaaggcggcgttgacagttcttgatattcctgccgagcgtgattgcagcctcatagactcggagaaagattactcatctatggccggctgccaggccggagaacacgctagtatatttggcattgacaagaatggggatgattctgatgaaccgtgtgctaaggatgatgccaagcaaagtgatgtggctcctctgaaggaggaggagaattgggagctggacagtgaaccagagctcacatgggatgagaaggtggttgaagttctaaacatagttcgacgccgagagatcaccgaatataaccccaagcagttttgctcaattcctactcgattttgtgcctacaacatagccttctttgacctggacaaagagtcaaagcttgcacgtggaccacctatcaagtcactagctttccccgactactggtgggagatggactctgtcaatgtgattgcaatcaaggtggccgagtctgatgtgggttaccctatcagggtatttggcactgtgctggccagggatgagtacgatttcaggtgtgtctatttgttcaggcgtgacaggaacaatccacagatcatcacctcgccggaggacacactaactctgacaggacctaatcgagcgctgggtgcaatagacaaaatgtatttcgagttcaatttgaagattagagacggtgatgtcgacaaagatttctgcaaaggtgtgcgagaacacaatgccatctgctatacaaagcagccgatgactttatcgctagagagctgcctgagtagaattgattttgtgtatagtcctgttcaattagctgtggaagcttctgttgcagtcaaaattaagggggttgtatccaagtttttcactggcaaagtgactgcttggactactggagatgatcagaacaaaatcatcctgtatgacagtgaagtggaaggcaggaacagagttcttggagctgatggatcagtcgatctgactcgctgtttcgtagccgtcaatttggatgatgaactggtgctcaatgtctgtgtttctgaaggagctggctcaatctttgagctcgttcttggacacaatgatgaagaatgtgtccttgagcaaggtccctatgaactgcaggtgaatgttgtttggacagctgccttgaagcatcgacagcgcagaaaattgtttgagcgtatcggtgacttccgcgtgttaaggtgatatgtagtatgaagatttatatgggggaagctgttacatctcaagcagttctttcttgttatatagattataatttttttgttcagctgagttgaactcgtgcttaactgaaaatctgcctgcaagacttatttagttatatgtactggtagactggtaatctataagattactgatgtctagtagggagtatggatctgtctggtagtctgtataaccttttctgaacctaccaaagtttattttgcgttcttggagaagtgtcttgtctgtcattgttacttactgggttgtgagcatcggattgaggtagtttgtagaggtttgagcgccatgtgtgctctactgttgccatttgctgttgagagatgctgagaacctgacgtttatggctatatatatgttgatgttttgt

SEQ ID NO: 45538 - DNA, 283 bp, Oryza sativa
  Clone ID: PAT_MRT4530_48494C.1
atagacgctcataacttggttaacagcgaaccaacaagatacactatttatattacacacaccagagatcagagagcggcagcagcaccagctgatgaactttctttttcactagtacaacgaacagagacacagaattttgccgggcaccagagcctaaaccccttcaaagaggttgttgaagagagcccgccacgggacttggaacgttccgttgaccatctgaccgaactatatcgaccgtgcgctgattgggcggtactggggactgctgggcgtctgg

SEQ ID NO: 45539 - DNA, 561 bp, Oryza sativa
  Clone ID: PAT_MRT4530_48495C.1
atggcagttaaggactggttcacaggaaaccctaggagacttaccgtgcttaccacaagcgggagcaccggtggcgagggtgggcgtgatggagttgggtcggccggggtgtctggttgtccagctgccggattcaccgcggcgtaagagggaccgcccattgcctgttggggtgggggtgaaacctttgcgtggtgtggatggttaggagagagttatgcggagggtcttgacacgatttccccctttgcagtatcatgttcaggtggttggttgggcctgttgcaacgtggtatagcgttggacagtgattggttaatattgcttaattactacaattgttttactgctttcaactgctgcttttaaatgctagctttgtgcaaatgaacccatagcctcctttggttatatcctgcatcatacattctcatccggtatgacttgctgagtacagtgggtagtactcagtcttgctttcttttcccccacaccagagctgaagatcttcctagtgggagctgttctgttgaagttggtttcgtcgatgccgtcaaggat

SEQ ID NO: 45540 - DNA, 489 bp, Oryza sativa
  Clone ID: PAT_MRT4530_48496C.1
ccggccgggagaatatcccatttctcttccctcttttgtggcgtaatagaaagaaaatctcccgtctccttgcgccgccaagacgagtcgcggctgaacagggcggcgatctccatcgggcgagcagagcaggggataggatcatgatgtttgacgatcaagacctgggtttctttgccaatttcctgggaatcttcatatttgttttggtcatggcataccactttgtgatggcagacgtgaagtatgaagggaactagtgtggttgaagcgaaggcatgataaggatccatggatccattttggcacattacttgttagattatgctagagattgctaagcatttgttgaaagtttaccatgaaatctgggagtgtcaactgatttgcactgatggatgtggtacttatagcatttcgacttccgtaattgtttaattagctaccaaaagcatcacaattctgaaaaaaaaaaaaaaaaaagcggcc

SEQ ID NO: 45541 - DNA, 994 bp, Oryza sativa
  Clone ID: PAT_MRT4530_48497C.1
cccccccgccccagtctcaaagcttcgcccaagcagagaagaatggccgccggaggaggaggaggagacgagctgaagctgctcggattgtgggcgagcccgtacgtcctgcgagcgaaattcgcgctcagcttcaagggcctgagctacgagaacgtcgaggaggacctccacaacaagagtgagctgctcctgagctccaacccggtgcacaagaaggtgcccgtgctcatccacaacggcaagcccatctgcgagtcgcagatcatcgtggagtacgtcgacgaggcgttccctgacgccggcgagtcccttctcccctccgacccttacgaccgcgccgtcgctcgcttctgggccgcctacatcaatgacaagttcatgccggcgtggcagaaggcgtcgttgggcctcacggaggaggagaaggcggaggcggtgaagcagatgctcgccgcgatcgagaacctggagacggcgttcaaggagttgtccaaggggaagcccttcttcggcggcgacaccgccgggtacctcgacgtcacgctcggcgccgtggtcggctgggcgcgcgccggcgaggtcctgttcgggaggaagctcttcgacgccactaggagccctctcctggcggcgtggatggagcggttcgtcgcgctggacgctgtcaaggcggtgttgccggacaatgccgagctgatcgagtatggcaagatgaggatggcgcactacgccaagcttgctgccgccttggctgctgcgaacaagaagtgagccggcgaagcaaacctgtagttggtgtgtgtccgttctcgttgctcgtggtctcgtggaggatgaaagctggtgcaccatagtccttccacaccgtgaggttgagttgtgactttttttttttcttccagtgatccgttcgatcggatcgtcatgtgattctggcgcatttaactcaataaaagaaaggaagaagttcaaattaaaaaaaaaaaaaaaa

SEQ ID NO: 45542 - DNA, 1950 bp, Oryza sativa
  Clone ID: PAT_MRT4530_48498C.1
atggctcctccgggccaactgcaccccttggcacgcttgctcctgcccctttccgctcctccgctcgtctccggccggcgacgccgcatcacgtcattggtcctcgggagcgcgctacctccgtctacatctctgtcgcacgccagccccctgctgccatctcctctttcctctgcccctccctcgctactctacacgacgcctcctcgctatacctggcatcatggtgctttgccgggcgcctcagccgagcccagtctcttgtctgcgcacatcttcagctcctatacggggcggctgtccgcggtgcatagcttcaattggcctcgctaagacgccggccccattctgaggattggtatgactatgtcggaattcccggcagacagctggatgcggtcatgcgcggtcggcatttagtgctctgtacagctgagtgatatgtcatctccatctataattagagcacctcacaatcattatgacggacagcgttttaaggctgatggctttactcttcgttcctttcgtattattctgcgatcaatatctgtcgggattgcaatggctggttttcagcttggcaataccattgggactccaggtgaaaatgcacaaatatcagcacatgaactagattatataaccaggggtcagaaattgatatatcatgttaatctgagagaagctgcatggtttagtgcactcccctgggtcatgatggcagttttaggctatgttgctggtgttgtatcagacaggcttatccaaaatggtacaagcatcactttgactcggaagataatgcagacaattggctttgtgggtcctggtgtggctcttcttggactaaatgcagcaaagagtccagtcatcgcttctgcttggcttactatcgctgagattgctccacaatatgctggagtgctacatggaatgtcaaatacagctggaacatttgctgccattttaggaactgttggagcagcgcctaagagaaaatctacagttgctatcctagaatatgatgattggttggagaattatgtgccatcatcttctgcgtttgggatgatgggaagtgaagactacctatgggctatggcacagtggcaggctggtagcatcgagccagaaaagacgatgctacttgacttgtgacgccgcggggcatcaagcaccagccaagggagagagtctactagtttcaaccatgagtttcagtcagatcctgggttctcctggacatccacctatgcagctcgttccccccctaagggggatgcacaagctgttttgctcctcgtcaatccaaaatcaaggaaggacatgtcaagccctcaaacgatggccatgatatttctattagttcaaaatatgtatgacaggcacctatctgaagagttcagaagtgaaatacagacattgtcaaaggttgagcatttaaacttggtgaagtttcttgggtacctagaacatgaggatgaacgcctaattctggttgagtatgtcaacaatggatcacttcgtgaacacttggatggattgcgaggagaaccattggaattttcgcagcgtctcaacatcgctattgacatagttcatgctgtctcgtacttacatggatatacagaccatccaatcatccaccgtgacatcaagtcatccaacattctcctaactgatcaacttagagcaaaggtggccgatttcggcttcgcacggctagcgcctgacaacactgaagcaacgcacgtctcaacaatggtgaagggcactgcaggatacgtagacccagagtacatgcggacgaaccaactcaccgaccgcagcgacgtctactccttcggcgtcctcctcgtggagctcctcaccggccgacgccccatcgagcgcggccgcggccgccaccaacgcctcaccacgcaatgggtaaaaaccacatcctaa

SEQ ID NO: 45543 - DNA, 2101 bp, Oryza sativa
  Clone ID: PAT_MRT4530_48499C.1
gcacgaggcgaatctttcctcctctctcgcctcgccggcgaaaccctagcccagctgcggcggcggcggcgagaccgagagagagaggccggagagatttggtggggaggaggaggattggttgacggtagggcgggggggacatggcgaggtgcttcccgtacacgcggaaccccgtggcggagtcgatgtcttcggcggcggcggcggcggttgagccggggatcgataaggttgaaggtaagcattgttggataattcaaaggggactggttttttatctgttgagtccggattattgattatacgctagaaaaagtatcaatattggtgcattgttttcatgcctctttgcattcccgtcgtctgttctgaattggaactgacgattaatctggtggctgaagctccagaaagaaagggaaatgatgcaaaagaaggaaaagaaggaaaggaagaaagagaaaaggagacaaaagaaagctgcccagctgggtgagaaatatgagacagatgatcatcactctaagcatggccataagaagagaaagcactcaggctgtgaaatagttggcgaggagacaagaaaagtttgtaatgttaccatggagcatttggagaagagcagtctttctgaagagcatgaggctccttcctacagtcaggctttgcgttgtaccccagagagctcactggacagcactaagaggctgaggactgaagtgtcaagtagccctagtcaaaccagaaatggtgttaacattcgtgtaaagtttacacctacaaatcaaagaagagacccagaagcaacaacaggaatgtcaatgaaaccaagagttactgaacaatcaccagtcaaagaaaccggaatggatctgtccatggccaataggaagagagagttccagcctcatgtcaacacagtgtcagtggtgaaacaagttgtctcccaacagaagaacatgtctataaggaatggcaattgtttggatgagtcaagaaaagtcagtcagcagcatgatgcaaagtccatgcaaagagtcaatatggtgcagagagttagaactaagtcaacaccgattgctgcgatgcaaagagttgatccgccttcatctgagaaggcagtgatgcaaagagctaatcctgcgcccacaaaggttatgcaaggggttgaagctgcacctgtgaagtcaatgcagagagctaatcccacgtccacaaaggtgatgcaagaggttgaagctacacctgtgaaagcaatgcaaatagctggccatatcactctttcgaaagtgttcaacagagagagtactcaagttcagttgaggaaagaaacaggaggtcccctacttgggggccagcttaacacagggcgacctactctgctaaacaagcccaaggtgtgtgctgatccacctatcttgttaagcaagccggagatgttgtgtgttgagccacctggcttgttgaacaaaccgaaggcgcatgtcgaaccacctgttgtcaagcagcagcaacagattgtgcccgaagcacaagaagagccttgttctgttggaagtgtcttggcagcagcatccccagtaacagaggcacaacagtccagctctgaccggaaaagccgcaaggctgagaagaaagggaggaagcttgcagatttgtttgtgaactggaaaccatcacccacacagatggaagatacagatgttggtgaccaggactggctcttcagctgccgggcgacccctaaaaataactgcaggaccttcgatggatcagcaaggtgtcagcctaccgagcagctcttctcgctgcagcccagagcagtccatttgcctgaccttcttatgtatcagctgccgtttgttgtgcctttttaggttataagtttagatttagatgagtgacggttgtaagtagcttaatgggcagtggacaacaagaagctgtgaagctttgtgggaactgggagccgtgtttccttgcttcagttttccagcttatatgttctgttgtatgaaaatcattaaatcagtggagataataacaagcgaaaaaaaacttcacacaaaaaaaacggacaagagggcggacgcgtggg

SEQ ID NO: 45544 - DNA, 394 bp, Oryza sativa
  Clone ID: PAT_MRT4530_4849C.1
aaaatattccgggaggggatttttataatagtgcaacttttcccaatctttttttttatcaattccccgaagaaaaaattttcccaaaattccccctaggattttcaaattcccctgggggcccaaaagggtttaaattatttatttattcaattttgttccacttgtttccctttacattttttagaaaaaaaatccaaccttgtttctaaattccccaagtttcgacttttcccaaaaaaaatcttttttccactctaaaacaaaaattttttttaaaaaaaatttctaaaaatttttcggcgtggggggcccccccttttttttctttttggcccgggggaaaaaggttaaataaaccccctttttggaaaagggggggggttccccccca

SEQ ID NO: 45545 - DNA, 327 bp, Oryza sativa
  Clone ID: PAT_MRT4530_484C.1
atgaccaccaacgcatggagtatgacctgcatcgcacatgaacttaccattttgaaaaattttgtagatggtgatgatgctttgcaacttgagctagaagccttggagaatgactttcaagactatggagtgtgcgttgatgttgtcaatgttgtctttgatgtagaggagttacccaactcagatgaggatcaacatgcaaatggaaatgagccaagtcaaccaagagatttgacaaacatacaaaagcgagcaatttatgcaatgttgcttgagaaaagtacaaatggaaaattagaaatagacaccacaagtatagttgcttga

SEQ ID NO: 45546 - DNA, 564 bp, Oryza sativa
  Clone ID: PAT_MRT4530_48500C.1
atcccgggctgcaggaattcggcacgaggataatattgatatcattggtgaaaaattcttatatttctgctgtgcgctgtactatgtcgtgtctgaatttatttgagttgttcctggatcaactgcatgcatgttgacattatatatcaatatcaaactatttgggtcagttttgatttcatgtggtcaggtttgcatgcttgaggttttgggttgactgacctaacatcaacggttctttttccattgaggagttgatataaaattcaacgaaggaatgaaccagacttctagtacacaatatcctgctttctctagggtgctaatcccatataatttgtgtactcatgaccttgatacaccttctgtcaactttttacactttttatgtacacttcttccagtgtacattaaacgtcagtgtgactagacaatatacctaatactttcaactatcaaagtatcaacctattagtatagttttttttttgagagaacctattagtatagtttccatgtgctaatttcagtatttccatacatatctatggatcgcctgcatac

SEQ ID NO: 45547 - DNA, 557 bp, Oryza sativa
  Clone ID: PAT_MRT4530_48501C.1
caaaaaaaccgcccaacaggggaacattaattaatttatttgggccgggggcacggggaaaaccccgggccacccaaaacaacccacaattaaaaccccaaaaaaaaccaagggggggggaaaaaaacccccccaaactaaaaaaaaaccctaaaaagggggccagccacccccccgggagggacaaacaaacaaacagctagcgggtaacgggggggagttttatgggcggccccaaaacgggcggccgaacaaacaaaaggaccgggagctagttcccccaaaaagggttgacctggggccccggggggccgggaaaccggccccggaaaaaaaaaggaggggggtttaaaaacccccccccgtggaaatcctggcccgggggggggcaccttttccccctgggggggcaggggaaaaacggggggaaccccccggggcaggggggggggggggaaaaatcccccccccgccggggggggaaaaaaggacccggggcgggcccccaaaaaaaccccctgaaaaaaaacggccccggaagaggccccggggccccc

SEQ ID NO: 45548 - DNA, 4396 bp, Oryza sativa
  Clone ID: PAT_MRT4530_48502C.1
cccacccctccggtcacctcacctggcgcgccgaagcttctctcctctctctcaactccggcgagaggaggaggcggcggtggggcgttcgtcgggagagagaccagggccggggggctagggttcggccgttcagagaggcggcggctgaggaggaggaggaggaggaggagggggtgaggagagatgtcgacgccggcgaggaagcggctgatgcgggacttcaagcggctgcagcaggacccgcccgccggaatcagcggcgcgccgcacgacaacaacatcatgctctggaacgccgtcatattcggaccggatgacacgccgtgggatggaggcacgttcaagctgacactacaatttacagaagattatcccaacaaaccaccagttgttcggtttgtctcaaggatgtttcacccaaatatttatgcagatggaagtatctgcttggatatcctacaaaatcaatggagccctatatatgatgttgctgcgatattgacctctatccagtccctgctctgtgatccaaacccaaactcccctgcaaactccgaagcagccagactgttcagcgagaacaagcgcgagtacaaccgcaaagtccgcgagattgtggagcagagctggacggccgactaagccaaggacatgattgagttgcagtttctgcaacaagcttctcctaaagatatgcaattctggctttcccggtctgtatcacctactaaaaacataaaaaatcttcagttgttgtaattcctgagcttgatcccctgccttcccctacttgttttcccaatgtagtggctacctatttgatgaatttataaggtattgatgcttatgtaaagaattatactccctagccaagaagttgctgttgctgctaggttgcagaagcctaatgaaaccaccgtgctttctcgctgtaccagcgttcagtcacgagaaggttggtgatgctgtaattggcagcaaccgcagctgtttttataattatcacggaactctgaccgttggtagtagaaactattccagctttaatattgacagaacgatacaggggcttgcacagcacaacattatttgtacgcctaaaaagcacatattattgtacgcctaaagacaaaaaagaaagaaaagaagaaaaaacaaatgaaggcgtttctgagatttaaaggattcagtgagcaaacacgatcaggaaaggggaaggttgtgtgcatcaagacagaagcacaacccggaggatcagttccatcaatatctttcatcttcagcttgcctcctgcctgtctcaaaatttccatcttctgttgcagcctgcagccacactgatccacgagctgacgaatcctcacattctttttcccgcccagacctggtttgctcattctggaatctggaggatttcgtgatccgggacgacgacgacaccattgaaccgtcgctgctccggttatctccttcccagtcgtcctgcacctgtgcagcgaactgcaggttccagaggacgtcctcgatggacggccgctgcacagcctccttggccaggcacctcaggcagatctgcatgatcgtcctcagcgactcgtcagagcatcccttgctcacctcctggtcggcaaagctcctcctcctcaccaaatcctcgtcggcgactgcccatagcatcagttctttcattatctcaacctcatataaggatgtgattggctttccagacacgatctcaagaaggatcaccccgaaatcgaagatgtcggttttatcgttgagcagtgggctttcagtatggtgcttgcctccaggtcctcccttcttggattgacaaacatcataacatttctcagatttcatggcctctcctaggattgggatattgtagctgctgatcttcgcgacatgattctgatcgagaagaatgttgttgatcttcagattgtttccaaacaggccaggcatcatcccagcatgcaagaactgaatgccgttggcgatgccgatggcagctgatattctctgtgcccatgtaagcttccttccttcagttccttgcgaaatcctgctccgtaggttcccgttttgcacgtattcgaacacgaggtacagctgagtgacagtagaatcatcaagatcatactcgaagcagtgcccgagagcgctgaccaagttccggtgtctgagcctagaaattgtttcaatgtggcgactgaagcttagggaagactgattcctcttaaccttcaggctcctgatggccactagtgtgccattgcctagtctccccctgtacatctcgccgaaagaatcttgccccagtagcaaagagttctcaaagttgtcagtggcagcttcaagctcaaccaaagaaaatgttctgtatggtggaattcccagagctcccagcttcactgtctgtgatatgtagcgtgcatcggcgaacatcttggatgggtagccactcgtgcttgaagaattgtcttctcccaacatcgccggtggcctcaccattacgcctttcttgttcttcctcctcacggcgacgacggcgacgacggcgatggccgacgcggcggcgagagccgccattgcaatgccggcgaggaagccggcgtgatgtgtgagcttcttcctcaccttgccgccgtgagttatccccacggccaaggcttggttctggcagaacggcgacgggtgctgcgacgcgtcgccgccggtggcctcgaggcaattggcattgacgagcaccaccgtcgccggcttcttgtccggcctcaggcaggccggctcgctgccggtgaggaggttggaggacaggtcgacgaactggagattgtcgccgcaggcaaccttgtcggagagcacgccggtgaacctgttgccggcgacgttgaggtagcggatggccggcagggacagcagcgccggcatgaacgggccgacgaagcggttccacgacacgtcgagccgctcgagcaggtagaaggaggtgatctcgccggggaggccgccggtgaacctgttccggctgagcaccaccgtgaccaccttccgccccagcgccgggaacgccgggccgagccagttgtcgccgacgtcgatcacctggaggttggtgaggccgctcatgtccggcaggttccccgtcaggttgttcgacgcgagcaccagcgacctcagcgactccatgcgacccacggacgccggcacggcgccgcccagcgagttgttccgcaggctcagcacggccagctgcggcagctcgccgatccacgccgggagctcgccggcgagcaggttgtcgtcgaggatcagcgtctggaggccggtgagctgggacagcccgccggggacgccgccgtagaggtagttgccgctcatgttgacgatctccagcgcggcgaggcggccgatcttgtccggcagggggccccagagcccgagcccggacagcgtgagcaccttgaggtcggggagcctcgacagcgccatgacgagcgcgccgatggagaagttcatcgggagcggcggcgcgccgcggacgccggcgatgtgcagctgcgtcaccgtgtcgccgtagcacaccacggccgccgacggcgccgccgtgccgccgccgccgcagaagtcggtggtccggcgccagtggctcagcaccggcgggtggttcagcatctgctggatcttgaacagcgtccatgtctgcgagtactgcagctgcgagcttcccgggagcaacgcgagcagcgctgccaagaagacgaccaggtgatggcttgcacccgccattggagaagctctcatcaaatgcttcttgatcagcaagaaccagcagagaagcagagcaaatcaatctgtactgcaagaaattaatctctgtactctgatgattccttcaccttctccttctactacgatcaaggacagtgtgtaccagcaacagaggaatcaaggctttgatgtgtgttgatagtaccagaaagtaaccaaatcatctcaggaagaggaagtgatcatcaaagatcacatttcttgccagcttgatccattcttgaactagcttaggcagtcaccgactggaatagcaaagaaaatcttgctcagatgactgacgaactcaagaacagaacggataataaacaacaagagaaccttattacagtactcgggcccctgtcccccagtgcaagtatatatcctctgattctactgtaacttgtactagtacaattgctggcttgccctgcgctgcacatcactcacgggtggctggcagaagcatgaggtagctgcaggcatcaacggacaggtgtgtctcccacgcttcagctggaaacggggagcaggcaaaagaccaaggactagcagtcccagcgttccctcgtgc

SEQ ID NO: 45549 - DNA, 303 bp, Oryza sativa
  Clone ID: PAT_MRT4530_48503C.1
atgggaagcgcgtggaggggatcctcgctggcacacgcttgtgaagggaaggagcggcggtggtgggaaacggatggagggatctgcaccggcgtcggcttgcggaggaagggagcggctgcgccgagcctctgcgacggcggcgacagttcccctgcggtggtggcggcagcatgcagtggagctgcgcgcaccgtcgggagggaggaggccgcggcggcagcggcaggcgcacggaaggagggaggtagcagcggcggtcagcgcgcggagggaagaggaggcgccaccggcatgcactaa

SEQ ID NO: 45550 - DNA, 334 bp, Oryza sativa
  unsure (1)..(334): unsure at all n locations
  Clone ID: PAT_MRT4530_48504C.1
gaaggaagaaaaagtgtaggagttgcggcacatcaccgccgccgctcctacaccgtccgccatagcgattcccttccatctcgcagccatccaaagtgagtccttcttcgccgtctccgatctggaacttcaccgccgccgccgncgccgcatctcctccttcctctcttggcaactgtcggcggcagcaacggttctcttccccccttgttcctcccgctatcgcgagtcaacgggatgctcgattcgttacattttttttaagtactagtattgctaatttgttggagcaagctaactgcantgatcgntcacgtggtactgcttcgatctt

SEQ ID NO: 45551 - DNA, 456 bp, Oryza sativa
  Clone ID: PAT_MRT4530_48505C.1
ttgttttggtattcccatacactttgttccgggggggctttagtgtcgagagaggccgacaggatagagacggagaggagcgctcccaatcatccggagggggagagctctctgttctacctgcaggtccctgatcgatctgcgaccaagtggaccggggcatcatacctacattgccgaggtagttatatcacattgacgcgctcatggggtccagggggggcactcagatgtctagcagcttgcgtcactccctgatgtacgaagctgctacctgctccagcatccgaggacctgcgacctgccggtcgggtcaagaaggtcacggtctgctgcttactccaactgggccaggaagccctcttgatagcccagttggctccctcgatctattagtgcacggactactatgacttctcgggctgggcttgcttacatctatctggctagctgctt

SEQ ID NO: 45552 - DNA, 234 bp, Oryza sativa
  Clone ID: PAT_MRT4530_48506C.1
tcagaacacgttgatcttgctctgatccgtgtccaaggggcgcctaactgcattcctctgggattctccgatgaggctgatttgtctgggaaggaggttgtcgcgattggattcttcggacttgacggcacctccatgtgtattgatccgggaacatcgcgcggccacatactccttggtggtcaccgagtagatggtgttgccctcgaggttctcgaatcccgcggtctccat

SEQ ID NO: 45553 - DNA, 1343 bp, Oryza sativa
  unsure (1)..(1343): unsure at all n locations
  Clone ID: PAT_MRT4530_48507C.1
aatctntctctcacagctgcacaagtggtagctagcttactctaattaaccttggttgtaatccatggcgagctgcagcaagtggctggccgggctgatgctgctggcggcggcgctggcgtgctcgctgccggcggcgagccgggcgcagctgcaggtggggttctacaacacgagctgccccaccgccgaggcgctggtccggcaggccgtcgtggccgccgtcgccaacaactccggcctcgccgccggcctcatccgcctccatttccacgactgcttcgtcagggggtgtgatgcatcagtgctgatcttctcgccgaacggcacggcggagcgcgacgcggcgccgaacaaccccagcctccggggtttcgaggtgatcgacgccgccaaggccgccgtcgaggcggcgtgcccgcgcaccgtctcctgcgccgacatcctcgccttcgccgcccgcgacagcgtcaacctcaccggcaactccttctaccaggtccccgccggccgccgcgacggcaacgtctccatcgacaccgacgccttcacgctccccgggccaaacctcacggcgacgcagctcgtcgacggcttcaagctcaggaacctgaccgccgaggagatggtcatcctctccggctcccacaccatcggccgctcgcactgcgcctccttcctcttcaagaaccgtgaacgtttggcgaatgggacgattagcccggcgtaccaggcgctgctggaggcgctgtgcccgccgacgacggggcggttcacgccgatcacgacggagatcgacgtgagcacgccggcgacgctggacaacaactactacaagctgctgccgctcaacctgggcctccacttctccgacgaccagctcatccgcaacgccacgctcctccccttcgtcgacgccttcgccgccaacgagacgctgtggaaggagaagttcgtcgccgccatgatcaagatgggcaacatcgacgtgctcaccggcgcccggggggagatccggctcaactgcagcgccgtcaacccgtcctcgtcgtcgtcgtcgtcctccgccgggaggatgatcgagaccgtcttccccggcgccggcggtgaggtcgccgcgagctaagctatacccttgctgaccatgtaatatacgtcatatatatgatgataatgtaaaattaataatgcatgacacgcacttgcactgtgtgttgtacggccagggcaagtgtggttggttgatgaaggctttgtttgcacctacttgatgtgtgtagtgactctgccatgaacgatgcacgtatacaagtatataattaagatggccggcagctggtaat

SEQ ID NO: 45554 - DNA, 2757 bp, Oryza sativa
  Clone ID: PAT_MRT4530_48508C.1
ttactgctgtgctaacctcttcaggtgctgaaacatctcctgctttatccaccgacggtcgcgcgcccgaaaggcatgtactcaagcaaacctcagaatttaggtatcaaaatttgaccgctacaatgacacgatatattgtaaaccaacagaatactccaaaaccatagtacattgttacaaaatgtgtacgcacagaaaagaactaataaagggacacaaaaataccacattaagccttgttcatctcaggctccagcgaattaagctgtcacccgatagcaaaatccatggcttctttctttccttcgttgtcgaaacaataatgaacactcatctgaccttgcaaaaatatacagcacaaaactggctgttgctcacatctccagtacgagagttcctctggggtgaaacacctaagctatagagaatacacgatgctgttttggctaggcacagcatccaaaaggttgatatgccaaggctgccaaggggctattatttcaaaagtttgttgcaggcgtcgattaccacagcatgcgagctcaatatagcctgacctgaagagtttccacccatggttttcatgacagcatcaaaaattcctttgcggaagtatgtatcctccactgcttttagaatctcctcaacaacttcaaagctcaagccacacgacaaactcagtcgtgcaacaacttcaccaaacaaggctggagctagaggaaggtcaataccaatatcttccagcagggctgcatacagtaagcatccagttttcaggtcctcagtcttgaaaattttcttggcgtgcagatgctccagcagcctaacaaggggatcaatgaagttgggacccttatccaaagcaagattgatagcttctttcacaatctcagagtagtactcaggacactgaagctcctcgatacattgttgtgcttcacccagaagatgtatgcctagataatcttcaactggtgtaagagtgtgactagccataaggctggaagggcgagatggtggaccaccactgcccaaaagagcactcttaccaattagtgctccacttccatgaggaagaagcctggagttaatagatgatggcttgttaatagatgatggcttattaagcaacggaccctggttacgaagagagtcgcctcttggcattgatttagaacgtggaacttcccagttatcattatctaacccaggcattccaggcatctttcttgatccaggcataccaggtgttccaggcatcccaggcatcatccctcctgttcctggtcgattcattgggaatccaccaggggaaagaggaccacctggtgcattacggccattcctcgtgagtcctgttgcccctggccgtagtccaagtgtcttcatagcctcatcatgaatttcactgattgtcttggccttaatctcttcacgtcgaggcacccaattgtttgaacgaagatcaaccacatcacgaaccataaacctcagacgtggtgccaactgaaggtttgttgttaactccttcatctgaatgaagtaggtatcattaattcgacgagattttgggttctcgtcaagctgtttaccaattgtattgaagaactgacaaatagcctcaacgttttcctcttcagggcaagcctttttatcaggtccagaccccaagagttcctgaacaatgtgatgaactatcttttcaggtaccatcttttgcttaagtagctcaccaattagacggatatttccaagtgttcttagtttgacaatcctttctttgtcccttctctccatctcttggtcagggccagtcaattttgctatttcagcccttaggctctcagcaccttcaaatgcttcctgacaattgttcaacagcacacgcttgaatgtaatctctttgccacctggttcttccgaagggaatgatggtagcttctcattgagatcggaacaaagttgagcatacatcggacagaaggtgggctcaaaaacagccttctcaaatatgagagaaataacatcctttagaatatcagcagtggtaattccagattccattagttggcccttgagtagatcaaatttctccggtgtcagtttgtttagtatacctttcactgttttcaggactctatctttctctgagagattgcctcttctagctgaccaaggtacctcagccttgataagagcaggagtcgggccaacctgagcttttgaagcaaactggtggtttaattgatcctgcctgttaacttgctcttgttgccgaccacttgaagcatgtgctgctttagcttcacgaatgttgtcccaggacttctcttcattagctgccggaggttgaaccgtgcgtgcacgccagtcacggttatctgtctcaccataccgattgtgcggttgcgcctgggtttgtgtctgcacttgcacatctgactcagggcgaccccaaatctgatcttcaccatgaagctctatatcaatctcttgattaattcttaagatggcctcaggtatgtcaacgatctcacgcagttcgagaagttgatctcttgtatagcgaacacgctcgcgcacctcaaaatttggatcaccaatcttggatgcgccgccgacgtgggagcggagcaagtcgccggagccggaggcggcggcggcgaaggcgggggagaagaggcggccggggcgggggccgccgccgccgccgccggggcgcaagctgatgacgggctggtgatccttctccat

SEQ ID NO: 45555 - DNA, 401 bp, Oryza sativa
  unsure (1)..(401): unsure at all n locations
  Clone ID: PAT_MRT4530_48509C.1
ctcgtgccgnacnccgccgaancgcgcctcggcgttcgccaagcgcagccagaacttcatcgaccncggangccgcnccccngcggggcgttcgctcatgtctccggcgacaacnggcgcgccntccattctctcngannggggcncgcccgacagcnaactggacnggggcgtcnntngcgacaanntgcacaagctccccaagtctgcgtctttcgcgttncccggccaatcccccatgccngtggcgacacacnccccggcggnggagnccgacatgtctcgggtnttttctcttgtcaanganaggcacnccncccgcganatattctcncactggccngagcangagcacatngtggcgtgatnttcccaagctcatnncaacctacttaccaaaa

SEQ ID NO: 45556 - DNA, 333 bp, Oryza sativa
  Clone ID: PAT_MRT4530_4850C.1
gggccgcttgcaaaatggccggccccggctggcttttttgcattggggccccttacagccccaacagagggcggcaagggttttcctgcaaaaaaaacctccctccgtcaccgcccgtcccttccccgtttgccacgtcagcttgccgccctggaggtgggcggcagggtcaatttttgtcacacgtcatcctctctcacccctttcttccctaccccctctggccctctctctatccctatcccggcgaaagcaaagcggcgcgaggttgaggaaaggcagcaaggaagtggcaggacaacacatgcatcggccataaaggcaggactccag

SEQ ID NO: 45557 - DNA, 379 bp, Oryza sativa
  Clone ID: PAT_MRT4530_48510C.1
gagattgagaggcagccctctcccatttccaccagtagaaatggaggaacaagacatttcaacaccataacgatctctcaacataatattgagattaggcatcttccgtataatgtctgccaatgttggagggacgcctgatgatagcggtagacgataaccagtaaggtctagcgtatggagcctttccagcttgcttagcgactcaggcagctcagagatgacatgtgaaagtttcagatactgcaaatttactagtcctgtaatagaatctggcagtggcagtctctcgagcctaaagcaacctgacaggtttagatcctccaaatttgttaggttaccaaacaaatgaggtaactgttgaagctcagagcagcca

SEQ ID NO: 45558 - DNA, 486 bp, Oryza sativa
  Clone ID: PAT_MRT4530_48511C.1
atggcgacatcttggaacgtggtgagcaactccacctccgtcatgtgctcgggcacctaccccactaacagcttcgcgatctcctcctctaatccgttcacacctccaccagcagcaacaacggcgatggagacgtctacacctaaggcaggagaatacgagaaggcggctgaggaggggcttggagcgatggctccagatccacctccagctgtggacgcagtggcggcagaggaaaaatcgcgtggcgccgtcccagcggatttggcagtgagctcagggagccatagtgatgtcggcttcgtcatcgtcgtcgcccttggagacgtacctgcgtggcgccccaccgacgcatgtggggatgacgtcaaaggcgggaagcgaggtggtggcggcggcgcaggggcgtggggaggggggcgtggagacgccgttactgctggcgaacatcctcgattggtcgaagatccttggcatggagtatga

SEQ ID NO: 45559 - DNA, 631 bp, Oryza sativa
  unsure (1)..(631): unsure at all n locations
  Clone ID: PAT_MRT4530_48512C.1
ggatcccccgggctgcaggatggttgagtgaaccatatagctcttctctctccatagtccattggagtcttagacctggggggccaaagattgctccattttcttaaagtgggctttatattgaccgcagggagaaatatcactttttntggtgtaggcgtgcatctatctactttgcctacacatgttctattgactattggactcatctgtctttatgttgcataattaaaccatgaaatatctttcatgagatttaactttttgatcacttctctttggactgagactgaaccaccgttacgatactcaaatgggagctgtacggagtgtcacggagtccaagaaaagctacaactttcagtaaggggagtactctttgcttgtggcttggtgcactgaaaagattgtgggggaaggagtatgggaagaaagagtttataaatccaaatggtggaggacctgaagcgatactgcatcccagcgacccagctcaattcacgcatccagttctgttagcctcggaacaatagtactcctacagatagctggctgatactgcacaggctacaggcagcctcagcggacatcagcaaaagatggtggcaatgtactccagattccaaagcct

SEQ ID NO: 45560 - DNA, 189 bp, Oryza sativa
  Clone ID: PAT_MRT4530_48513C.1
atgactccgccgtcgttgtccggcgttgactgccctcgctattggatcaaggctgtcgcccatcgtcgggcgtcatcaactgccaccgccgctcgctggctcgccgcccgatcgagcaggccagcacccatctccagcgcccaccaggtgaaccaggtacagaggatgtactggaggcgtgggggctaa

SEQ ID NO: 45561 - DNA, 376 bp, Oryza sativa
  Clone ID: PAT_MRT4530_48514C.1
caatgggcttgtaactttgtttgggaccctggcccatgtggggcccatgtggggtgcgccccaatctggtggagcacgacccttggaccctcttggaatagggttgatctgcaccggcaagatcagcaacccacggagaggtgtatcgatcgctaaggcgcaacacaacgtctcgtacggcaaggagaagcagtgtctcgtgggaatcaggggtaagggccaaaattcacaagtctacaatggaggacaacaaaggaggccgccagctgaagatgggatgggttgggccagcccatggttcggccgaaccatagggctcggccgaacctcccgtggcgccgatggatgcagggtttggatggatggctgggattga

SEQ ID NO: 45562 - DNA, 585 bp, Oryza sativa
  Clone ID: PAT_MRT4530_48515C.1
cacgaggatcgattcgaacaacattaggtccgcgtggtatggacaaattaatcgtcgacaatcgtggcaaagcaacgatatcgaacgatggtgcaacgattttaaaacttttggaaatcgttcatccagctgctcgaacattggtcgatattgctaaatcacaagatgctgaagtcggcgatggaacaacatctgttgttttattaaccagtgaaatattgaagaatgcaaagagttttattgaagatggcatgcatccgacaattctcattcgagctattcgaaaagcaacggcattagcaacgaaaaaaatcaaagaaattgccgttactgtcaaagcaaatgatgctaatgaacaacgtgctttgctagagaaatgtgctcgaacaacattgagctcgaaattaatcgcgcgtcaacgagaattttttgctaaaatggtagtcgatacagttcttatgttagacgaattacttccattgaatatgattggaattaaaaaggttaccggtggttcattagaagagtctcgtcttgttgccggtgttgcatttaaaaaaacattttcttatgcaggcttcgaaa

SEQ ID NO: 45563 - DNA, 869 bp, Oryza sativa
  Clone ID: PAT_MRT4530_48516C.1
ttgaataatattatattacatattttttttttttagaaatcaacatgaagaaagaagcattcggattagcacattccaatttgcaacctaaatgaaacagtactaataatcaagcaaaaaaaaaggaagtgagaaaccaaatgggatggatggatggagtactgactcggtctggcggatcttgtcgaagaaatgggcgtcgtagacaccggcggcgtcggcgaagtggacgacgccggagaagtagtgcttctcgacgtgggcgagcgcggcgttgcgccgccgccgctcccggccgcccgaccgcgtcgtcgtcaccactatcagcatccacctcgacccgctgccctcctcctcctcgtcgcccacgtccaccaccgcgccgttcccgaccccggccgccttcgccgccgccgcatccggcacaaggctcacctgctggttcacggcgacgtgggacgcggcaagctggtggtgcggctggaataggagaagaacaagtagcgcgaagaaggagaacagcgggcagcgtgacgcggcgacgaggacgacggcgcccaagcccgctcgcccctcgggcgccgcgaagaacttcatggtgccgacgatctccgcggcggcggcaagccaggcgcatcgtcgggaggcacgaatcctacggggacgacggcttcccaatcttcaccgagaccaagtgcacatcggcgccgcgtcgtcgccgccgccgccgccttgctcccctgctctcgcgtcgtcgccgtcgccgccgccgccggccgccggacctcctctcctgtctcgccccgtcggtctcctccccacccgtcggccggcggcgccggcccggccacagcaccagagcctcgtgc

SEQ ID NO: 45564 - DNA, 481 bp, Oryza sativa
  Clone ID: PAT_MRT4530_48517C.1
aaggccaacattaaatccagtttttgaccacttttagtccaccccctacatacaatacatgaatccatatgcaacacaaatttcagccaatatacccagaggggggggggatctgtacagacaattaaacacaccgccccatgcaaattcccagggatgcatgacgaacgacggccaaatcaatacatgaaacggggatgttcaaaaaaaatacatgtgaggggaaagagaaaccttgccgccacaaacggcctcttgagggtttttaacggccccgtcgtagttgacaaagcccataaaccaaaagtcatggttgtcgacaaaaaccacctggatgaacctctctgctgggttttgctggtttgccgtagaagggactgatcttagttgagcaccgggaccaactacccttgaaatagaagataggtttttattatcctggggaacataccccacaggattgtcactgaaaaatgcaatt

SEQ ID NO: 45565 - DNA, 2823 bp, Oryza sativa
  Clone ID: PAT_MRT4530_48518C.1
atgaatccctacgacctccgctacgccgacccttcctcctaccgcgacaggcgcagcgaccttgccggggctcccgtgctcgccgcgtcggcccccgcggccgccaacccctacgccgccgcgtacgcgcccgcgccggctgctcccgtggcccccgctggtggcgacttctcgcgcttcggcgggagaggccgtggtggaggcgcgggcggcggtgggtggggtagaggtggtggtggtggtggtggcgctggcggataccgaggcggcggtgggagaggaggtggaagggacgcgctggactcgctctccttgccgaagcctgacttccggagccttatacccttcgagaagaacttctatgtggagtgccccgccgtgcaggccatgtcagacatggatgtgtcgcagtatcgtcgccagcgtgatatcactgttgaaggccacgacgtgcccaagccggttcgctacttccaggaggccaacttcccagcattatctattcatggtgacaaagctcaagcagaaagggactatgttctggcagagttcaagagtgggaaaagtcctataatggctgccacagatgtagcggcacgtggtcttggtatgtttttcagccccttcgacttgtattagttgtagaacttgaaagtgcatccatgggcagtttttgttcttcggctctggttcaagccatgcgctgacttctatggagatcgacaatcttcagggcaaaagtattatcttgattacatactcatcattttcttgttatttttgcagatgtcaaggatattaagtgtgtgataaattttgattttccaacaactcttgaagattatattcacagaataggtcgaactggccgcgctggtgctagtggaactgcattcacctttttcacacactccaatgcaaaattctccaggaatcttgttaagatcttgagggaagctggccaggttgtgaatccagcgctagaatctatggctaaatctgccagttctatgggaggaggcaatttccggtcaagggggcgtggtgggtttggtaacagatctggctcaaatagcattcccataagaggaagaaggccatactgagggcggcaaaaagattaaaacttttactgtataccgataggtattaaatgcattctttgggaaatttcctttgagattccctcgactgcttgattgacataagtcaattttcattgattggaggtggaacatgtcacacgaatggccaaatatacttatccaacagcgtaggatatgtgttccaagtttagcttcgacttggagaatggtttgtccagtgttattttgactattgaggcaacgtcctcgtgcggtactggttattgtttactattgttgggttacttgaaagaacagtttgctccatttgttatctttttagtatcaaaaactaaagcccgcggccggccagcatcctcacccgccgccgccgccgtcgtccacacgacctcaccgccgcctcctctccgctctccggccgccggtcgctccgccaacccgaccctctccccttcgtggtggagccaaccttaaccatcctactccgcgcggggcgaaggcgtccggcggttgcaggagcccgatggacagtggcggcactgccagtcctgccggcgtcgccggcgacggcgctggtggccggggttcggtcttccgcggagatgacgcgccgaagctgctcgccgcgttgaaggagatgaaagaagggctcgacctcgtcaccggcaaggtcaaggcgctcacccgcaaggtcaagaagaaccagctgccgacggcggatgggattgggtacctggaggcaaagcaccacctgctgctgagctactgccaggacatcgtctactatctcctccgcaaggcgaaggggctctcggtggaaggtcaccccgtcgtgcggagccttgtcgagatcaggctgttcttggagaagattcgtcccatagacaagaagatggagtaccaaatccagaagctcaccaacgccgcggatagcggagctgcccaggagaaggtgctaaatgcagaagcaaagagtaaggatcagcctaaggatgatgaagacctactgaagtatcggccgaaccctgatatgatggactctaagatcgatcctgcggggcaggacaacgatggcatctatcgtccaccaaaatttattgctgctaccatggatgatgaggataagcgccataaacaagcttcaaggaaagacaaaacattagcgcgaatggctacagaaagctcttacttcaaagagattattgatgacgctgctgatagacctgaagagttaaaggaaacagcaggtgatgaaagcagggaatttacaaggtatatgcggcagagagagttgcaagagaaacaagaagaggagctgttcactcgagctccgctgacaaaacgtgataagcagacggagaagtggatgagaaaagagcttcacgggctacggggcctaacagatggattcgatcttggaattaacatgttcgtcgatggagacaaggataatgatgaggtggactactgctcggaggaggtgaggtcggtgacccccaccggcggcttcctcggccgcggcggcgtgcagcagcagcacgtcgtcaaggagacgttccaggagatcgacaggtccggctccggccgccaccaccacaaccacaaccacggcaacgactacctgatggtgcgcgagaccaaggtggaggaggacttcaacacctgcaccggcgagttccgcgagcgcaagcagagcttcctgctcaagtccgactga

SEQ ID NO: 45566 - DNA, 1298 bp, Oryza sativa
  Clone ID: PAT_MRT4530_48519C.1
cccagcgtccgccccgcgtccggcgcgcgtccgctgatctgaagctatcattcctacagcaaatattgaggtcatatctgaacacgaaaagtatcccagactcagtaaacttttatctgatctaatggatggaagcagaatcttgatatttttccaaactaaaaaggggggggagagggggactcgtcaacttagaatggatggatggccagcattatctattcatggtgacaaagctcaagcagaaagggactatgttctggcagagttcaagagtgggaaaagtcctataatggctgccacagatgtagcggcacgtggtcttgatgtcaaggatattaagtgtgtgataaattttgattttccaacaactcttgaagattatattcacagaataggtcgaactggccgcgctggtgctagtggaactgcattcacctttttcacactctccaatgcaaaattctccaggaatcttgttaagatcttgagggaagctggccaggttgtgaatccagcgctagaatctatggctaaatctgccagttctatgggaggaggcaatttccggtcaagggggcgtggtgggtttggtaacagatctggctcaaatagcattcccataaaaggaagaaggccatactgagggcggcaaaaagattaaaacttttactgtataccgataggtggaacatgtcacacgaatggccaaatatacttatccaacagcgtaggatatgtgttccaagtttagcttcgacttggagaatggtttgtccagtgttattttgactatttaggcaacgtcctcgtgcgggactggttattgtttactattgttgggtacttggcccaagccggttcgctacttgcaggaagccaacttcccagattactgtatgcaagccatagccaagagtggattcctagagcccacgcctattcattcacaaagttggccaatggctttgaagggcagggacatgatcggtatcgcacaaactggctctgggaaaacactatcttaccttctccctgggttggttcatgttggtgcacagcctcgactagaacaaagtgatggcccaattgttctgatccttgctcctacaagagaactggctgttcaaatacaacaagaatctggcaaatttggatcatactcaagaactagaagcacttgtatctatggtggagcacctaaaggaccacaaatacgtgaccttaagagaggggttgagattgtcattgcaacacctggtcggttgatcgatatgctggaaggaggtcacactaac

SEQ ID NO: 45567 - DNA, 402 bp, Oryza sativa
  Clone ID: PAT_MRT4530_4851C.1
ccgccggtatcatcccctaatccgaaccctcccccccccccccactcctctgcgcctccctcctccgcggcctccgccatggcctccctcgcctccgcctccgcatccacctccctggtcttctccacctcctcctccaagccgcgcctcggctcctccgtaggattctcctcgtccgcgcggttccggagaacggcggctgcggcggcgtccaggggcacggggcggcgcgcaggggctgctggtagtgcacgcggcgagggggaagttcgagcggaccaagacgaccgtcaacatcggaacaatcaggcaggtctgctacgctaagacgacaccgacggcgcggctcatgatgcggcgcgcccccgtgagcgtgagagaccccatcaagagccgactgat

SEQ ID NO: 45568 - DNA, 1921 bp, Oryza sativa
  Clone ID: PAT_MRT4530_48520C.1
cacgcgtccggtcctataatggctgccacagatgtagcggcacgtggtcttggtatggtgacttgtttgaaaattagaattaggttgtagttccaagtgctcaaggatgataagtcggagggctgtcagctgtttttggttgagtgaactgaacttgtggattgatggtgtatgcaaggtgccatcatgtcagaggtagatcgtcttttctcctgtttatttccctcgagagtaagcgatggcagtgttaccagggcacttcaacctaatgttgacatttagtcttggttaggaattatttgaaaattacttggcttttggtctttcactcttaggggaacttatcttcaggtagaaatatagaatcgatgagagtctatggccattatcattagcactattttttttttcatctgttgacctctaaatttgttttgtatttttatgtttgaaaatttagagctctaggtgctttcgctttcaggcctgttaattttcctgcgctaaaattcatatggttatatgaatctattctctcctcaaggaattactttcttttgcatctttagttatttattattcatgtgttacttagttccctttggcccgacggtcggagccggggcataggcccaaagccctaattaaccatctctcgacctcacctcacgctccctaactaacaatggctcactaccaggaggtggactactgctcggaggaggtgaggtcggtgacccccaccggcggcttcctcggccgcggcggcgtgcagcagcacgtcgtcaaggagacgttccaggagatcgacaggtccggctccggccgccaccaccacgaccacaaccacaaccacaaccacaaccacggcaacgactacctgacggtgcgcgagaccaaggtggaggaggacttcaacacctgcaccggcgagttccgcgagcgcaagcagagcttcctgctcaagtccgactgatcgaacctgctgtgtgtacccgtgtacgtacgtacgtatatgtgtgcccgtacgtagtcgtggtggtcatgtgatggcttagctctacgtgtatatcatgcgtgcgtgtgtacgtgcgtacacggagcttagctaattagcaccttcttctctgtgcgaacggaggaggggtatgaaaaataaattcgtgacctgaatataataaagcctgtcctaattatcaccgtcaaggaattactttctaatgaatatttaattatttattattcatgtgttacttagttccctttttgctgtggacttgtgatctcgtagatctatgtgtggcttaacaacaatttcagctcgcatgcatgcatacatgaaaatgtctactaattattatttgtctaagtcactagtgtaaattcaactaaatttacaaatgaagtaatttagaagtgtggatctcgctgttatgctttcccttgttttccatgaatttttagaagtttatatgctgctattttaaacgtgtgccctggtcttatcactgccaactggtcccaagatgtttgtagagctattgcctactactgtatggctctgcaccgcctggtcggtggtccgctttgctggaaggtggtcacactaacctgcgaagagtaacatacctcgtcctggatgaggctgaccgcatgcttgacatgggttttgagccccagattcgtaaaatagtggcacaggcatggcttgttttagaatgcttatatcagttctggtgttttggctaactctccattttttctattgtgctaaacgtttttgttgttaatagatccggccagataggcaaaccttgtattggagtgccacttggccaagagaagtagaatccttttacaaatgaagtattttaagagtggtggatcttcgctgttatgctttccccttggtttccatgaa

SEQ ID NO: 45569 - DNA, 252 bp, Oryza sativa
  Clone ID: PAT_MRT4530_48521C.1
cgagggaacgagggatctggcatccaatcaagggaacacaatggaaaggataggttccctctgttggtgtgggatggatgctccggacctctagccgatgggcaggaactaggggtgaaaacgagccgagccgaggctcgtgaaagcttggtgcaagggaagctcggcttggcttggctcgctacaaacacgaagggatggatcgatctaagtgcaacactgaggaaaggaaagtgtcacatttacatatga

SEQ ID NO: 45570 - DNA, 457 bp, Oryza sativa
  Clone ID: PAT_MRT4530_48522C.1
ccgaaaccctaattaaccatttctcgctcatcacaacaccacctcacctcactccccaactaaaaaacaatggctcactaccaggaggtggactactgctcggaggaggtgaggtcggtgacccccaccggcggcttcctcggccgcggcggcgtgcagcagcagcacgtcgtcaaggagacgttccaggagatcgacaggtccggctccggccgccaccaccacaaccacaaccacggcaacgactacctgatggtgcgcgagaccaaggtggaggaggacttcaacacctgcaccggcgagttccgcgagcgcaagcagagcttcctgctcaagtccgactgatcgaacctgctgtgtgtacccgtgtacgtacgtacgtatatgtgtgcccgtacgtagtcgtggtggtcatgtggtggcttagctctacgtgtatatcgtgcgtgcgtgtgta

SEQ ID NO: 45571 - DNA, 2084 bp, Oryza sativa
  Clone ID: PAT_MRT4530_48523C.1
ttcataactgcgtagcaggcagatctcgtcggcatcttgttccagtttgacagttacagtacagatcgacgtgtagaataactgggagaaggaagaagacgatggcgactatgaagttgggctccaagccggaaatctttgttctggaaggcctcacatggagatgcatgacggagctggagagtgatgtcgtcgtggaagtaggagaaatgtcattttacctccacaagcagttcccgctgctgagccggagcggtgtgctgcagcggatgatcagcgagtaccaagcgccgcaggaggacggcggcggcggcggaggcatgtgcacgctgcagctggacgacatcccggggggcgccaaggcgttcgagctggcggcgaggttctgctacgacgtcaagatcgagctcaacgcgcacaacgtggtgtgcctccggtgcgccgccgagtacctgcggatgaccgacgactacgccgagggcaacctcatcacgcaggcggagtccttcctcgccgacgtgctcgccaactggaaggactccatcaaggcgctcgagacatgcgagggcgtgctccccaccgccgaggacctccacatcgtctcccgctgcatcaccgcgctcgcctccaaggcctgcgcctccgacgccgccgcgtgttccaccggccacgccgccgcctccgcctccgccgtggccgtggccgccaagaatgccagctacgacgcgctgtggaatggcatcggctcggggggcacgccacggggcgggggcggcgcagcgggcgcggcggcggggtgctccgggatggactggtggtacgaggacgtgtcgttcctgagcctgcccatgttcaagcgactgatccaggcgatggaggggaaggggatgcgccccgagagcatcgccggcgcgatcatgttctacgcggggcggttcctgcccgggctgaagcggaacaccagcttcagcaacgccagcttcggcggcgactgcggcgccggcagccgcagcatcacgccgcgcgccgccaacgtgtcggcgccgtcggagggcgaccagaggtacttcctggaggagatcgtggcgctgctgccggcgaagaagggcgtcgcctccaccaggttcctgctcgggatgctccgcacggcgatgctcctccacgccagcccgctgtgccgggagaacctggaacggcggatcggcgcgcagctggaggacgcctgcctcgacgacctgctcgtcccaaacctcggctacaccgtcgagacgctctacgacatcgactgcgtgcagaggatactggactacttcatgtcgtccacggacgggctcgggaccgggtacacgtcgccggcggtggtggaggagggcagccagcttggggcgctccatgccgggagcccctcgtcgctgtcgccgatcaccatggttgccaagctcatggacgggtaccttgccgaggtggcgcccgacaccaacctcaagctgcccaagttccaggcgctcgccgccgtcgtacccgactacgcgcgccccgtcgacgacggcatctaccgcgccatggacatatacctcaagtcgcacccgtggctgtcggagtcggagagggagcagctgtgcaggctgatgaactgccagaagctgtcgctggaggcgtgcacgcacgcggcgcagaacgagcgcctgccgctgcgggtggtggtgcaggtgctcttcttcgagcagctccgcctccgcacgtccatcgcaggctggttcttcgtgtccggcaacgcggcggcgggcggcgacggcgctccgcagccgcacccggggggcagcgccatcgtgcctaagggcgcggcggcggccgggcagtccgacgccgacgcggaggccgacgaggggaaggggaaggagctccccgccgaggccatcaccgacgtgaaggcgagggtgtcggagctggagaaggagtgcatgagcatgaagcaggagatccggcggctggggaagccgaggagatcgtggagcctcctcaccaggaagtgcaggttcgggaccaaggtgcagcaagcgcagcccaccatgagcagcaaatga

SEQ ID NO: 45572 - DNA, 120 bp, Oryza sativa
  Clone ID: PAT_MRT4530_48524C.1
atctgcctgcaaaatggggacaggggcgagatggccgtccacttgcgtagatatatcttcccaagtggacgacataaggtgccgccttggaagataaatctttgcaagtggagctcctaa

SEQ ID NO: 45573 - DNA, 440 bp, Oryza sativa
  unsure (1)..(440): unsure at all n locations
  Clone ID: PAT_MRT4530_48525C.1
tcttcagcctgtgttggaattggttacagattttcattgggttcatttggatagttatggatactggtatgttattggataactttcagcattgtgagttaaggctgacagatcaatcaccatcatatccacatccaacagttattgatgcccagttcagtttttcagccccttcgacttgtattagttgtagaacttgaaagtgcatccatgggcagtttttgttcttcggctctggttcaagccatgcgctgacttctatggagatcgacaatgttgatatcccagtttggtctgcttgtggtcttcagggcaaaagtattatcttgattacatactcatcattntcttgttatttttgcagatgtcaaggatattaagtgtgtgataaaaatttgatttccaacaactcttgaagattatattcacagaataggtcg

SEQ ID NO: 45574 - DNA, 486 bp, Oryza sativa
  Clone ID: PAT_MRT4530_48526C.1
atgaagagccacgatgacgggacgcctggggggaagactaggtcgctaggaggaggaaggtcaacgtgggtggagaggcaggtggcgggggaaaaagcttgcatggcaacgggctggatccgggccctcccacgccagatcccgctgggagcgacgaagaggtcaccgcggccgatggctgtggacaagaggatgacggcggcgaggctggctcggtcggtggcggtaagaggccacgggtacagagagctggcacggacaatgctccgggtgaccagtggtggcatgaggagacgggcgcgaggcgacagtgatgtgggcgggcggcttgaggcgggggtgccgtgggtcatctggatgaggtggcggcgatggtggtatcgtgagggggggaaactttgtcctggcttcccaagacggggagtggcggcactttcaagtgttattcccttcttgaaggtgttgtctagaagttcctctccttag

SEQ ID NO: 45575 - DNA, 558 bp, Oryza sativa
  Clone ID: PAT_MRT4530_48527C.1
atgtccaccgcctttctcccagaggttgacatgtggacccataagacagtagatctggttagagcttacaacaaagaggtgaaatggcgtgaagaaggttacattcctggaacaattgatgaacacttgcaggtttcagcgaggagtgggatggatgatatagtttcaaaagactgctttgattgggtatgtagtgtgcccaaaatagtacaatcactctgcataattttgaggttatccgatgatcttaagtcatatgagcgtgagagattgactttacatgtagcgtcgacaatagatagctgcatgaaggaacacaacattgacattgaaatggcgtatgagaagatacatctactaatcgaggagtcatggaaagatttcaatggcgagtggttggattctggtaatactcaaccaatacaactaatggaacgaatattcaacctaacaagaacgatggagttcttttataagaaagatgatgcatatacaaatggccacacaatcaaggataatatctactcgttgttcgtagagcctgtaatgatgagctaa

SEQ ID NO: 45576 - DNA, 1383 bp, Oryza sativa
  Clone ID: PAT_MRT4530_48528C.1
atggcgtcggtggcggtgccggagtggctgaacaagggcgacaacgcctggcagatgctctccgccacgctcgtcgccctgcagggcttccccggtctcgccctcttctacgccggcgccgtcacccgcaagtgcgcgctcacctccgcattcatggcgctctacgccatggccgccaccatgccgtgctgggcgctctgggcgcacaacatggccttcggccaccgcctcctgcccttcgtcggccgccccgccccggcgctcgcccagcactacatgctcacccaggcgctgctccccttcaccctccacctccactccaacggcgaggtggagacggccgcggtggcgccgctgtacccgtcggcgagcatggtgttcttccagtgggcctccgccggcgtcaccgtggggctggtcgccggcgccgtgctcgggcgcatgagcgtcaaggcgtggatggcgttcgtgccgctgtggacgacgctgtcctatacggtgggagcgtacagcatttggggcgggggcttcctcttccactggggcgtcatggactactccggcggctacgtcgttcacctcgccgccggcgtctccggctacacggccgcgtactgggtgggacccaggaggaaggaggaggacgaggaggaaatggcaacggcgagtggtggcaacctggtggtgatggtggccggcgcgggcatcctgtggatggggtggaccggcttcaacggcggcgaccccttctccgccaacaccgactcgtcggtggcggtgctcaacacgcacatctgcgccaccaccagcatcgtcgcttgggtttgctgcgacgtcgccgtccgcgggaggccgtcggtggtgggcgcggtgcagggcatgatcaccggcctggtgtgcataactccggcggcagggctggtgcaggggtgggcagctctgctaatgggcgtcgcgtcggggacactgccatgctacaccatgaacgccgccatgtcgttcaaggtagacgacacgctgggcatcctgcacacccacgcggtgtccggtgttctgggcggcgtcctcaccggcgttttcgcgcaccctactctctgtgacatgttccttccggtgaccggctcaaggggcctcgtctacggcgtccgcgccggcggggtgcaggtgttgaagcaggtcgccgccgcattgttcgttgccgcatggaacgtggccgccacgtccatcatcttggtcgtcgtcagggcgttcgtgccgctgaggatgacggaagatgagctgctcgccggagacattgccgtacatggggaacaagcttattatttttcgagtggcaccaattgtagtttaagccatgagaccattgaggtcggaaattcataa

SEQ ID NO: 45577 - DNA, 300 bp, Oryza sativa
  Clone ID: PAT_MRT4530_48529C.1
atgacggccaggtgcagcagcgcgacagaggccacggcggcgtggcgctacagcgtggcggcggccggcagcttgccgtcgtcggcgaaagattattcgtctctgatgtgcgttgaagtcgctattgctatcaagaatcttatcttgcataaggcgattcaagatgtcatctggagaaccaacattattgatatcattggagatggaaatgtgtcgagccactgtcacgacaagtggaggcctctacaccggctggaggagaggactgacctggaggtgctgatcatgaagcaaaaatag

SEQ ID NO: 45578 - DNA, 1732 bp, Oryza sativa
  Clone ID: PAT_MRT4530_4852C.1
agctaaaatcttttcaagaaaaaagtacaatgaggtaggatgaactcaactcagcttttgtctgtctcataccaaaaaaagaaaatgtaacatcagcagaacaatatagaccgatcagtctcattcatagctttgccaaaatcgtttcaaaacttttggcaaaccgtctagcgccaagactgaacgaattggtttctctaaaccaaagtgctttcatcaaaaggagagcaattcatgaaaatttcatctacatacagaatctagtcaaaaggttccatcgaaataaagtcccgacactgcttctaaaattggatattagcaaagcattcggctccatcagctggcaattccttttagaaaccctacaggcttttggttttggaagcagatggcgcgaatgggtatgctcactcttccacacttcaacctcacaaatcctgctcaatggaaagccagggaaagcggaagaagcaaacctgttatcctctctgccgtcgggaccgctccactgcagagtttctatgtatgctgatgatgttgcactctttgtaaagcctacgcagcaggatatcaacaatctcaagaagatcctagagctttttgggaatgtggcaggtttgatcaccaatgtccacaaatcaaaaaactacctattgcatgcgcagcaattgacatcaaccatgttactggacatttcccagggcaagttgcatcctttccaactaattaccttggaatcccacttcatctaaggaaattaaggaagctagattacatccctttgattgataagattgcctcaaagatcccgggttggaaaggaaaatattgcactgcacctggaagagaaaccttgatcaagtcggtactttcctcagtacctatccactttctcactgcactgccggctccaaagtgggtcctaaagaggatcgacaagattagaagagctttccagtggaaaggggaggaaccagaaaatgttaaactgggcgccagcttggtgagttggcacattgtatgcagaccgaaggaactaggtggaagaggaattctggatttggagaaatttacctccgccctaagactaagatggctgtggctaagatggcaggatcaaagtaggccctgggaggcaatggaaagcccctgcaacgaaaaagacatttgcctttcccaggcatgcacacagatctccattggcaatggaaaaaagatttctttttggaaagacaattggttgcagggtccttgccccaaggacatcgcccctacgcttttcggtctggcaaaaaggaaaaacagaaaattggatatagaattaccgaacaacaactggctatactcctttaggcaaattacgaccatcgaagcgatccatgagctggtcaaccttggatccttgctcaatcaaattgagctacacgaaaaccaagaagatgagataacctggacaaggggcaatacagggaggttctctgtgcaaagtgcatatcgtgcacagttcatttgatccatatcagacccggtgttccttgtaaactgtaatgcaaaggcgcttccgacacaaaaattcttgggatggaccctacaccaaaggaccctaacagcggaaaacctgctagtaagacattggagttgtgactggatctgctccttatgccggcaagcctttgaagacaccgatcaccttttctgccattgcacattcatcaaacagacctggcagaga

SEQ ID NO: 45579 - DNA, 254 bp, Oryza sativa
  Clone ID: PAT_MRT4530_48530C.1
tgtctatccgccagcagcggatacttatccagggggactggtgaaagtactctggttctcatcccctagcttcttgtcgcactgtctgactgagtgctcatggtgacatccagcgccagccctaccgaggctgacatggacattgcgcgaacctcacaccttattgagtcgatggcccagccaatgccaaacgttctgttaacatacgactggacattcaacgcacctggccatcgttgtgtgagcaaagatgg

SEQ ID NO: 45580 - DNA, 346 bp, Oryza sativa
  Clone ID: PAT_MRT4530_48531C.1
gaaaaaactttttcaccaaaaaactttggttaaaaggtaaaaaaaaacgggttttaattgggcccattccaaatggggggggtttaacaattgggtggggtttttttttttttttttgggggggtttttcgggggcaaatggacgttaggttttgaccccttcactttggggaaaaaacagttttggggtaccccaaaactttgggaaaaggtaaacgggttaaaatttggttaagtttataaaaacaacaatttttttaacccaagacaaattttttttgaaaatttttttaattttgggtttaaaaaaactaatttgttaatataaaatccgcccccggggggg

SEQ ID NO: 45581 - DNA, 582 bp, Oryza sativa
  Clone ID: PAT_MRT4530_48532C.1
atggccgaggcggggatggcggcgtcgacggcgatggtgctgctgccgacgggcgagctgcgcgagtacccgcgccccgcgacggcggcgcgggtgctggaggatgtcgcggcggcggagggggaggaggaggatgtggggcggcgcttcttcctctgcgacgccgacaagatgggcttcgagggacccgtcgcggccgtcgccgccgccgcggagctccgccccgggcagatctacttcgtgctcccgggcgaggtgcggaggcgcgggatgcgccgcgaggaggtcgcggcgctcgccgtcaaggcatccgccgcgctcgctgccgccagcagcagcagcaccacatccggatgcggcggcggccggcggcggcgcgggtccgtggcgccgctcgtgttcgctccgccggaggaggagtacgagtacgacgcgtctgattactgcaagagcaatgcgtcggcggcggcggcggcggcggggaagcggcggccggtggcggcgcgccgcggcggcgggaaggggaggcagttcgctaccgatctcaccgccattcccgaactcgacatgatcaccgagtga

SEQ ID NO: 45582 - DNA, 1906 bp, Oryza sativa
  Clone ID: PAT_MRT4530_48533C.1
atggcgcgtgggaagaatcacccggacggggaggaggaggaggcgccggcggcggcgggggaggaggaggcgccggtggagatggacgaggagggggagatggaggaggaggaggaggaggagcagggggagggggagggggaggagagagacgaaggggaggaggaggaggagtgggaggatgcggaggaagtggaggggggagaggagagcgagcaggcggcggcggaggaggaggattcgccgctggtggtggtggaggccgaggcggcggcgcctgtggtggatggctccccgccgaagctggcggaggggtactacgagatcgaggacatccgccgccgccgcctccgcaaggggaagctccagtaccttgtcaaatggggttctcaatgggagggtggggcatgggacctcgcagccccggagctgtcaggaaggataagaacagaggactggaaagaccaagaggaaataacttattgtttgcctaaacaagtgcgtgttgatgtggaccatgtggtaaaagtgcccaggttgagaatggctgtggacactcatattgccatatttgggacaatacacctctacgagttcagctatgaagaccaagaacaggattgcgttcagaagaagcagcagtacggcaggcgtggatggccggaaagtgctaacacatgggagcccctagaaaacctgagtgcctgctctgacattattgatgctttcgagatgcggttacaatctccaaggcccggtcggaagcgtaagcggaagataacaactactccagtagcaggctcaaacccatctcatggtaaacggggccgccctcgcttggatgctaagtcccacactcgagctcctgcaccagaacctaagcaactgccctgtcggacaagttgtaggagagcgactaattgtagtagtaagacagttgcagggcttgatgcgtcagggagtgtggtgaggaaccagcttgcacagaacattgtacaggagggtagttccagtgtgatttcaaggacaccatgtcaggagctaccgctctcaattaggttgacggaccaacaaaacgagcatcaccttgtgaatggttcgtctaattctgagaacttagtgaaggtacctccatctcagggtggccaggtaactggtgccaagaagcgtaaatctggaaatgtgaggaggtttgagcagaataaaccaacacaaggacaaggagaatgtggagcattagtggtggctgaggatgttggttccactgaaggagaaactggcgataagaaaaagacagagggctgtcctaaccgagttcatatcaccaagatcatcaagccagtgcgatttgcagcagctgtgaacaacgatgtgcagcaagtttcaattacattcaaagcactcaggtctgatgggcaggaagtcatggtggacgacaaagaattgaaagcaaataatcccttgctgcttattagctactacgagcagtgccttcgttataatccgacttcgtgagagatgaactgaaggaactgggtttagctgcctgtgtatttaattagcatttgtgtgtttagaagcttgtagctctatgggcttgataatttagtctggtcttgcagtaggttgctaaatgcaagaaatgtattgcttggtctccccactgattgcttattcgcgccatcttatgtgtaacattttgaacagtggggagatatgtgtaatctatgcttagggatcttatgtttcttttctctatgtttagttatttgggatcgtcgtgacctgcatgcatcttttctctatgtttagttatttgggatcgtcgtgacctgcatgcatcatagacggtaatgactgagaagctcgtgaatttcgtgtgatgaatgcatatccagtagaactg

SEQ ID NO: 45583 - DNA, 1214 bp, Oryza sativa
  Clone ID: PAT_MRT4530_48534C.1
tttttttttttttttttttttttgttctctcttgaacttgtaaccctgaaagtgaaactactcgtatgatcgttattgctctcgccaataaacaaactcgaatcatcctactaagctacgtttgtccacagctagcaaaattgagctaaacacctactaagtaccctattacagctgatgagtactcgtagcaaaatcaaatcgcaggaagcacgcgggactcgccggcgacggacaggaagccaatgtcgccgccgccgccgccgtgcctctcgacgctctcgccgtcgccgcagtaatcctccttggcgtcgtcgtccgggccctcgacgcgcgcgacgacgggtgcgcggcagacggggcaggtgggcgcgcgcgtgagcagccaccggtcgacgcactccctgtggaactcgtgcccgcacgacggcagcacgcgcacctcgtccccggcggcgtactccgccggccaggcacaccgcgcacacaccgccctcctcgtccgtcgacgacgtctcctcgtcggcgacggcgccgtcgcggggcatctggaccacgtgcgccgggatcccgtcgagcgcgcgcttggtctccttggacggctctggccgcatcatcgatgaccctccgacgccgtctcgccgtcacagaagcaggcgtagggctcggtgagcattgtcgcccccttcaagcgctgccatccccttcgagcgtctccgccgcggcttgctccaagcgctgccttcgctgcctccacacgctctgagcggagccgttgccgctccttctacctcggctgtggcaacagctccctctgcacggccgcccccttcgagcgtcgtcgctgccgccgccatcgctcattctgctccctccatggaaagtggaaaccattgcgccagatgaagttggggataagatgcttttctgggcaacgctcggctccggatctaggaacatcttcaaaagtgtgaagagaacatggcattcttatattctgcatatcgaagcttagaagttacggtcatatagatttttatcaactacggatggagattcacatatagacttcaataattgttttctcgttgtgtgttggctttattatttctgttcttattattgtgtgagcatttgctctctttaagagaattttgtaataagtggatgtagattctttgaagtaaaggccggaatttttattccaccatatt

SEQ ID NO: 45584 - DNA, 258 bp, Oryza sativa
  Clone ID: PAT_MRT4530_48535C.1
ttagtaatggatctgatcgccgtcggcgagctcctcctcgcacatgccgtcggctgtcgatgtcctcctcgcgtgcatctggccactgtcaagcgtcgccagccgctgaggtccaagcacgacgagctcgtcctcgtgcacgccgtcaaccgccaaggtcctttcggcacacgctgccagccagccagcaagggcctcccggcccgcgcctccgggccccacctccgtggctacaacgactacgacaggcaatgctaa

SEQ ID NO: 45585 - DNA, 602 bp, Oryza sativa
  Clone ID: PAT_MRT4530_48536C.1
gttgcgaagcatacaacattttaaggaagtccagtagcctcatattgaatctgttcaacttgatgagaagatcaaataggcgcggacatcactaacgaggaaaatgcaggccttaagcttcaagagaaatttcggcttgatctggaagatgaggaagccatacatttcttccacagatcttatcacgaaagcgtcagcgctttgttccctcagatggttgagacaatccatagatgggctcaatactggcgctaagcaaagtctgtaacaggcatgcttgatgtatatacgtactaacatgctcgcctgcgaccgatttatttacagcaggtttcaggtctgaactctgaatccatttacatttgtcgatagcttagtttgtgaatataccacgcatgcgcctggttagaaagctgttgacttgaatgtagtcagaagtgtaataaggctagcagtattaaaaaaaagaatctttagcggcaaatataatgatgttttatgtgcctcaaccctgacattttatgcttctttttgtaagtttggagaatatgaacgtagaaaataaaataaactatttattagaaaaaaaaaaaaaaaaaaaa

SEQ ID NO: 45586 - DNA, 1242 bp, Oryza sativa
  Clone ID: PAT_MRT4530_48537C.1
atgggtccgacagtgatgaagctgacgagggagattcatatttgtccaagcccgaaatggcggacgaaagatgatggtgaagaagacgacgaagactacgtccttcgcaagaaagtggaaatggggccacaaagatctagatggcatccgaaaaaagccgcccaactcgatgaagtcccaactacgacctccaactccaagaagaaagcaaagtccaaagagcttaccaaaaagagaaagggcaagaggagcgtgaatagaatagacgatgggttgtacgttgtcacccacataagtccaaatggtgagccgctcgcgccctccactgcacgcgcaaagttcagctttcagtgtagcgcaatagggaaggcaccatttaagaaatatgggaaaataacgctgaaccaatgggacaaatttgtaaagttcaagacctcgccggaagaaatggccaagagtaaaaggttgtctgacttggccaagcgaaaaaaatgcaccatcgactgggctccggtggaggatgaggaaatgaagaaggcgggggttccggtgccaatggaagaatggaacatacaatccaatcattgggtaaaagaaaggaccccgaagatcacatcggaagggaaagtgttatttgaagaccccgagctgcagggagttgccgacaagatagaagatttatctagcaaggaaaagaaaggagaatttatcccacagagggagaaagatgtgcttagccaggcgttgggaaatcgggagcacgggggtcgggttcgaggagtgtcctctaagctgagttggaaagaagggttcaaacaggacgcctcctcgtataagagacgtgacgcctataaggaaagcttgagggacgaagggggtaagaaatttgaaaaacaaatgatggggttttgcataagacattttctactgcctaagacagaagaagagacccaacaaccggaaccaaattatccctttgatgacttggaggagactacaccctgtaggttgcatgtaccgagtggacgagctggtaggagacttgaggctacgaccgaaattgctatccctggtagaacgtaccatgacagatttattgattctggatatgcgaaagtgcaatcgcaaggggtgaataaagggtttaagtcgtacgacctagatatcccaactcctgatggtataaccgtacttggggatgcggtcggccttatcatattctatggcacaaaaaggatataa

SEQ ID NO: 45587 - DNA, 201 bp, Oryza sativa
  Clone ID: PAT_MRT4530_48538C.1
atgaacgccggcacgtacgagagggcgaaacgtgtcgcgaggtactcgtaccacagtgtgtcctcatcccctctgctcctgtccaggaagagacgaacactgtctggggtttctcctcgacatgaagtcatctattttgcacttggatttggatatggtgcactcggtagtgtgattaactatggcaataataattgttga

SEQ ID NO: 45588 - DNA, 891 bp, Oryza sativa
  Clone ID: PAT_MRT4530_48539C.1
atgggtccgacagtgatgaagctgacgagggagattcatattggtccaagcccgaaatggcggacgaaagatgatggtgaagaagacgacgaagactacgtccttcgcaagaaagtggaaatggggccacaaagatctagatggcatccgaaaaaagccgcccaactcgatgaagtcccaactacgacctccaactccaagaagaaagcaaagtccaaagagcttaccaaaaagagaaagggcaagaggagcgtgaatagaatagacgatgggttgtacgttgtcacccacataagtccaaatggtgagccgctcgcgccctccactgcacgcgcaaagttcagctttcagtgtagcgcaataaaggggaaggcaccatttaagaaatatgggaaaataacgctgaaccaatgggacaaatttgtaaagttcaagacctcgccggaagaaatggccaagagtaaaaggttgtctgacttggccaagcgaaaaaaatggcaccatcgactgggctccggtgggtacgcacgtaagattgcactgtggaataaagaggatgaggaaatgaagaaggcgggggttccggtgccaatggaagaatggaacatacaatccaagcattgggtaaaagaaaggaccccgaagatcacatcggaagggaaagtgttatttgaagaccccgagctgcagggagttgccgacaagatagaagatttatctagcaaggaaaagaaaggagaatttatcccacagagggagaaagatgtgcttagccaggcgttgggaaatcgggagcacgggggtcgggttcgaggagtgtcctttaagctgagttggaaaagagggttcaaacaagacgccttctcgtataagagacgtgacgcctattag

SEQ ID NO: 45589 - DNA, 887 bp, Oryza sativa
  Clone ID: PAT_MRT4530_4853C.1
ccctaggaagaaggaaacccatagacgtgcaggatgttatcacccacctcattctttgcaaacgttgttgttgctattgttgccatcgtgacaggttgacttgctggcaggatgaagttggtccagaaaagagggtccgcagaaggatcagcagggttccaggtatttttcatttgtgcagtaacagaggccaacgtgtatggagctctttgcacaagcaacccattcacgttcatgttcactgcagttgtgtcatgtccagttgcaggtactggggtaactgtctttccttcatccatttctttgctaaaagtacattcttcagatagtttggtagatttttctgagaagcttttgaaggcatcagactgagttaagatatcacatgctgataggaccacggaagagggctttgagttagaatgtaggccatgggaaggaaacttataaggctcagtccgttgcattgagctttcaatagcacggatttcatcagtaacctcttccattttagatgtatctgactgccgtgtcttttttgggagccaccaccttatgtaatttgtcagatcaattttcctctctaagccaaaggttcctgcaaatttcccatccagcgtgatgtccttccctaaataagcaaatacataatgaacataagcaggaaagtttatttgtgtcccagctccccagtatttcaatgcagcaaggtcataagctcttgctgcagcctcttcatcatcatatgcaccttgtttcccttttttgttctgattctgattccatgtgcttttatcccagaggtgagcttcatatcggcctgtccacctatgccgggtgacgccgcggtagatggagctgcgcttcccggcggcgcagggcggcat

SEQ ID NO: 45590 - DNA, 185 bp, Oryza sativa
  Clone ID: PAT_MRT4530_48540C.1
gttcgtgccggccgtggcttcagcttggacgaaatccagggggctgggctcagtgcaaagttcgcccagaccattggcattgctgttgactacaggcgtcacaacaagtctgttgaatcactacaacagaatgttcagcgtttgaaggagtacaagtccaagctcattctcttccccatccgagc

SEQ ID NO: 45591 - DNA, 391 bp, Oryza sativa
  Clone ID: PAT_MRT4530_48541C.1
aaacaagaaaagggtcttttaggaaaacaagcaggggcctgggaaatttgaaacccccagttttaccccaaaaattcaccgggggaacaaactaaagccaaaatttgggaaaaacgggggcaaccaaattataacttggacaaacacccccacacttggccttttgggccaggtcaaccaccacgggggggggtttgggggctagtagcctataggcgccacggggggcccagggggagcccaaaacttggcagggttttttaaaccccttgacggggcaggggtcaccgggcaaccccgggggggggcgcccatttccatttttcacggccaaggccgagggggggttgttccccccccccactattgccggggatttttttttgttttt

SEQ ID NO: 45592 - DNA, 323 bp, Oryza sativa
  Clone ID: PAT_MRT4530_48542C.1
atcggtacatgatccatacgagaaagagaggagcagggatgccgcgcgggaagaaccacccggacagccaggaggaggaggcgccggctgccgcgggggcggaggagagcccaagggaaacggacaaggagggggaaataaaggagagtgcacaacactgcaagcgacagaattggaaagtggcgagacacggccggaaagtcccaggaaatgggcaacaaatcgcgcctcagagaaaattgctgaacaagacggcggccaatacgagatggacagaaatgccacacaatgcagcaacttaaagagcgacgtgccgaaccgca

SEQ ID NO: 45593 - DNA, 456 bp, Oryza sativa
  unsure (1)..(456): unsure at all n locations
  Clone ID: PAT_MRT4530_48543C.1
gggcgacatngcccacgtgttacgccgaccccgacgaaggcgctgaaggtgctgcagtggaagtgcactcacaccatngaacaggccgtcaccgatggcgtgcgttggcaaaccaacaacccttncggcttcaaanccgcgccggccgcggctnccgcccggtgctnccccccgcgccggccagcaagtaacctattncgctcgtgattggtgtggctttggaacaaacgcaagggngcccccccggcgggttaaaccagttnaactgncgcgccaagtgacttctgtctnttcantatctttctgtttgcttctcccctcccgcccttgttcgtggacttnttgctgaagtaaaccctcacttncaccgctgttcttttcctgctgctgcttctcgggtgtttcgtgcgaaatcgttttctcaaaactctcggcaaaaaaaaaaaaaaaaaaaaa

SEQ ID NO: 45594 - DNA, 339 bp, Oryza sativa
  Clone ID: PAT_MRT4530_48544C.1
ctgcccatttgtttgtggggtgcaccccccctctggggacggacagttgaaaattctaggggtagcaaccaaccctatcattcagacggcagtgcggggcaatcctgacaacgtttctggtcattgacgtaacaagcatggtgagccgacataccgacgctataatacatgaacggatcatcccggcccctctcgccggggctggcatcactgcgacggcagaaaatcccggcacccaatcctaaagatcacaccttgctcaagtattgcctcgctactgcagcatcctacgcccacaaccgcgccgccagcgtcagcgcaaacccgaggggccgcgga

SEQ ID NO: 45595 - DNA, 1005 bp, Oryza sativa
  Clone ID: PAT_MRT4530_48545C.1
atgtcgttctgcgagagggacatgaacaaggagagcatgtaccaagaacgggacgacatggcggggatacggttcgcgacgccgccgctgcctcagcagcagcagcagcagcagctggtggagtgcttctccgacgaggtggacagccgcgggagtggcggcgagatgaaggatgccgtggggagcgggagtgggcagctggtcgttgttggtggcggggatggggcgagcatcgaggtggcgaagaagaggagggggaggccgccggggtccaagaacaagccgaagccgcccgtggtgatcacgcgggaggcggagccggcggcggcgatgcggccgcacgtgatcgagatccccggcgggcgggacgtcgcggaggcgctcgcgcggttctcgagccgtcggaacctcgggatctgcgtgctcgccggcaccggcgcggtcgccaacgtgtcgctccgccacccgtcacccggggtcccgggctcagctccggctgcgatcgtgttccacggccggtacgagatcctctccctgtcggccacgttcctgcctccggccatgtcctccgtggcgccccaggccgcggtcgccgccgcgggcctctccatctcgctcgccggcccgcacggccagatcgtcggcggggccgtggcaggcccgctctacgccgcgaccaccgtcgtggtcgtcgccgccgccttcaccaaccccaccttccaccgcctccccgccgacgacgacgcgtcggtgtccgtctcggtgtcactctccggcagcggcgacgcggacgaacaccggggccaccagcacaaacctgagccgcaagaaccgcgccaacttcgacggccgccaccgcacctgtcagcagccgccgccgtctcagcagcacagccggtggagccatgcggcgcgcccatgtacgcctgccaccctcagccacaggaggtgatgtggccgccgccggctcgtacgccgcacccgccgccgccgccgccgtactaa

SEQ ID NO: 45596 - DNA, 1037 bp, Oryza sativa
  Clone ID: PAT_MRT4530_48546C.1
accaagtgtaaccagagcttacacaaaaaaaaggcaccacctttgctcggtgctcgtgggggagagagagagagagacagatggcgacgcggatggctgcggcggtggcggccatggtggcggctgtggcgatctcgctggcggcgggcggggcggcgcagtcgtcgccgagcacgccgagctgcgcgtcgaagctggtgccgtgcgcgcagtacatgaacgggacggacacgccgccggcggcgtgctgcgacccgctcaaggaggcggtgaagaacgagctcaagtgcctctgcgacctctacgcctcgccggagatcttcaaggccttcaacatcaacatctccgacgccctccgcctctccacgcggtgcggcatcagccagaccaccagcatgtgccccgggaattcccctacgaactctcctccagcctctccatcaggtggcaaaaacgctggtcatcgcactatgtcagttggtcttccaggattgatgagcttgttcctagcgttgtggtctgtattggcataagaattttggttccatatcagagatgttatcgcttatgccacagtagaggatttacatgtgacggtgtttgttgattggctgtatcatcattctgtacttggatcagaattcgttttgctgtgtatcaatgtcgcaagtcagaagacttacattgtgttgtacttagacctgtgctgatcggcggcggcgacggcgaggtctagactctggagacgtgtggctgtcgaaatgaatcaactgagtgcctccgcaatgctctcccgcgcagcctctctccgccgcgccgcggcggcggccttctccaccgccgcggcgaggccggagaccgggctgtacggcttcgatgtgctgcgcacggccaagggcttccgccgcttcgtcgacgacgccatcgagaggtcggacgagctcgtggcctacatcgggcagctgccgccgtccgcggagattgtccgcgccatggatgagatatcgaacactgtagcctacttcctcttctgctaa

SEQ ID NO: 45597 - DNA, 582 bp, Oryza sativa
  Clone ID: PAT_MRT4530_48547C.1
ttcctcctgtcgccaacagctgctctcccccatcctccccacagcatcctcacgcgtgcgctcaatgcgtcgtctccggctaggtggtggatttgggatttggtttccaattgtgtgcttctcactcccgtcgttgggttggtcgttgctgctgctgttgatccgtcctcttctccctcgctactgctggatcgagctgcagattggggcgacctcgcccctcctagcctggatccagccaccgtcacggccatctccatcgccggctcctctgccgccctgccggccccttggagcttgagtccgcagggtctggtcgtcatcttcttggcggtgactgtggcatcatcctcggaatcatcggtggagagctggagggtcgcgcagcgcatggcagaggctcgggatcacctagaatggccggttctcctggatccggtcacttccttttcttccttgtcgctgcacagcttccgtggtgtatccgtgtgaggggttagaggaggagcacactgtccatctgctccatgttgttgttgaggagtccgatcgagagggggcgtttgaagcttgaaatcgagc

SEQ ID NO: 45598 - DNA, 1182 bp, Oryza sativa
  Clone ID: PAT_MRT4530_48548C.1
atggttttgttcttcaaggtgctcttcggcccggccgccgtgttcctctcggcgctcgtcgtcctctcctgcttcaagagcgtgccgtacctgagcaggatgagctcctccgagctcccctcctacatgtcctactttgagtcgccgatctccaagtgcgacatcttccagggggagtgggtgcccgacgagagctcgccgcagtacaccaacctgacctgctcctacatccaggagcaccagaactgcatgatgtatggccgccccgacctggagttcctcaagtggcggtggaagccggccggctgcgacctcccgcggttcgacccggacaagttcctccggctcgtcggcaacaagacgctcgctttcgtcggggactcgctggcgaggaaccacatgcagtctctcctctgcctcctgtccaaggttgcgacgccgaaggacgtgtcggtgacggggaagacggacccggacaagatactgtactacgaggggtacaacttcaccatacacatcttctggtcgccgttcctggtgaggacggaggagtcggcggagagccccggcgtgttcaagctgtacctcgacgagcccgactgcaagtggttcgcccgcgtggcgcggttcgactacgtcatcttctcgggggccaactggttcacgcggccgtccctgttctacgagaacgggaggctcgtcggcggcagctacgtggcgctcaacatcaccagcgacctgacgctgcggcactcccaccggatggcgttccggacggcgctccgggccatcaacgacatcaggttcagggggaaggcgatcgtgcggacgctgtcgccgatgtcgcacttcgagggcggcgcgtgggacaagggcggcgactgccggcggacgcggccgtacagggggaacgagacggccatgggaggcatggacctggaattctacacgtcgcaggtggaggagttcagggaggcgcagagggaggcggcggcgaacggggtggacatggtgctcatggaccccaccgccgcgatgctgctccggccggacggccacccgagccggtacggccactggccggacgagaagcgggtgctgtacaatgactgcatccactggtgcctgccggggccggtcgatgcctggaacgacatgctgctccacatgctctcagattga

SEQ ID NO: 45599 - DNA, 1638 bp, Oryza sativa
  Clone ID: PAT_MRT4530_48549C.1
atgtcgagcgaggtgacgtcggttccgccgacgccgacgccgccgccggtgtcgaccccgccgtcgcagatacagtcaccggcggcgccggcgagcagccgggcgtcgccgctgcgggggatggggacgccgaacatcgccagccccgtgaggaaggcggtggcgagcgtgagtggctacctgggtgaggtcggccaaatgacgcggctcgccgacccgcgcgaagcctggctgcccatcaccgagtcccgcagcggcaacgcctactacgccgcgttccacagcctcagctccggcatcggcttccaggcgctcgtgctccccgtcgccttctcccttctcggatggacatgggcgatcatctgcctgaccgtggcgttcgcgtggcagctctacacgctgtggctgctcgtcaagctccacgagcccgtcgctggtggcacccggtacagccgatacatgtacctcgccaccaccgtcttcggcgagaaatgggggaagatactggcgttgctcccggtcatgtacctgtcggcgggcacctgcacggcgctcatcatcgtcggcggcggcagcatgaagctgctgttcaacatcgcgtgcggggaggtgtgcctggcccggccgctgacgaccgtggagtggtacctcgtgttcgtctgcgtcgccgcgctgctgtcccagctcccgaacctcaactccatcgccggcgtgtcgctcgtcggcgccaccgcggccgtcgcgtactgcaccatgatctgggtcgtgtccgtggccaaggggagggtggccggcgtgtcctacgacccggtcaggaccaccgacgaggaggacggcgcgattggtatcctgaatggcctcggcatcattgcgttcgcgtttagggggcacaatcttgtgctcgagattcaggtcaagtctctctctcactctttccgtctccactcagccactgacaacgatggaaaagataaggtcactgatgagtgtatgtttgccatcaactcgcaggccacaatgccatcaactctgaaacatccttctcacgtgccgatgtggaagggcgtcaaagctgcctacgtcatcatcgcactctgcttgtaccctgtggccgttggtggcttctgggcttacggcgaccagataccaccaaatgggatcctgagcgcgctgtacaagttccacagccaggacgtgtccagggtggtgctggggactgcgacgctgctggtgatcgtcaactgcctgaccacgtatcagatctacgcgatgccggtgttcgacaacatggagaccgggtacgtccacaagaagaaccggccgtgcccgtggtggatgcgcgccggcttccgcgccctcttcggcgccatcaacctcctcatcgccgtcgcgctgccgttcctgtcggaactcgccggcctcctcggggggatctcgctgccggtcacgctggcgtacccgtgcttcatgtgggtggcgatcatgaggccggccaagggcaccgccatgtggtacaccaactgggggctgggaagccttggcatgggtctgagcttcgtgctcatagttgggaatctctggggccttgtggagaaaggcctgcatgtgaagttcttcaagcctgcggatttccagtga

SEQ ID NO: 45600 - DNA, 2571 bp, Oryza sativa
  Clone ID: PAT_MRT4530_4854C.1
atgagaggcgccgccacgccggcgtccatgccttcttgcccgccgtcctcgccccggggcttcccgtccgccgcgtccccggcatcgttcggcgccactgccaccctcgccggcttcttccgcttcgggattaggggagtcggcgccggcggagggaggaggggacagccggcgccactcggccccgaggacgccgccgccacaggacccgctacctcgccatgcgcgcagccgtcccaccgtcgagctaaggcagaaattttgaccatctcagcattttcgagagtgacgggccaagtggtggactgcttatgttatgtgcaagatgtctctgaatatttcattgatgtaattgttgatgatggaagggaatggagacttactggaatttatggtgagtcgcgttgggagcacaaaggcaaaacatgggaggccttgagatatcttcatgggatgatggataggccatggatggagttaggagatttcaatgagattcttttccatcatgagaaggagggagggagaccgagagaacaacgtcttttgcaagcttttagtgattctttggctgattgtgctctctcggatatgggctatagtggtgacatttttacttggcaaagggggagaataagagaaaggcttgatcgaggtgtctcaaacgcgcagtggaatgctcttttccctactgcacgactggagaatggtggtatgctcaattcggaccatagtccgctgattgttgaaactgttgtgcgggcagattctgatgccaatacaaggcgaggtcctaaatgcttcgaagcacgttggctcaaggaagagacggagcttgatgaatcagttttggattcagttaaggtcaaggtcacgcctgaaatgaatcggagccttttagctccatttacagctgaagaggtcaaaaaggcactttttgatattggagatctgaaagctcccgggccagacggtttgcacgccattttctttaaacggttttggtcaatgctaggagatgatctgataaaggaagttttaacagcggtaaatactgcaacaattcctgagggctggaatgataccactattattatgataccaaaggtgtctaacccagatatggtggctcaattccgccctatcagtctttgcaatgtggtgtataaagttatttcaaaaatgctctctcgcaggatgaagagcatccttcctgaggttataagtgatcagtgcttttgttccaggtgggtgtctcttattatgtcctgtgtgacttctgtaagatatactgctcggtttaattcaatggaaacagaaacttttacacctacaagaggaatcaggcaaggggatcccctatccccttacctatttctctttgttgcagaaggcctatcaagtatgatccaacaagtggaggagaatggagcattggaagggattagagtatgcagagatgccccaatggtttcccatctttcatttgctgatgactccttaattcttatgcatgctgataaaaagaatgcggactgcctgaggaacttattagacagatattgcagaactcaggaatacaaagccggatatgaagttggagtgggagcagatagaagcgattgttttcgacatcttattgatagaattgttcagagagttagtggatggaaggagaaattgttaagcatgggtggtaaggaggttttaatcaaatccattgcccaagccgtgccaacttatgcgatgatggtgtttaaaatccccaaaaaaatctgcaaagggatgacagatgctatatcacattattggtggggtgacgacgatgaaaaaagaaggattcattggcaagcttggtggaaactctgtgtaccgaagggtaaaggtggcatgggttttagggacttccacagtttcaatttggctttgctcgcaaaacaagtttggagactcttatgtgagctaaattctctctgcgcaaggattttgagagcaaaatactaccctgatgggaaattgctccaggccaagatgagaagtgggagctcatttacatggcaaagtgtgttagccggcttagattgcttcaaaaagggatttatatggcgagtgggagatggcacacagataaatatttgggacgataactggatcccaagcagccccaacatgaaagtattgactccgagaggtaatattctagttattaatccagttgatggtcgatgggatgaagctttgataagatcacttttctggtctgtggatgcgaaccgaatcctccaaatcccgattgctcctcagcgggaggatctgatcgcttggcacctcaaccgaaacggtttgttctcagtcaaatctgcctatcactgtcaatggagtcacagctttaggagctttatccagcaacccggggcaactgccccccctggcagcatcagtatggagacagctttggaggctatcgataccgagcaaaatcaaaatttttggatggcgcgtgcttcatggttgcattccttgcttcgttacgttggcaaacaagcatattatgtgcaaaacagaagctga

SEQ ID NO: 45601 - DNA, 1428 bp, Oryza sativa
  Clone ID: PAT_MRT4530_48550C.1
agtgaaatggattccattatttttaatgaaacttgagatatcacttatcgtccttgtgggtgtaaacctatgggttgtaagtgagcattcaagaaaaaaaacttaagcttaatggtacaattgaaaagtataacacatgggtcgtggtcaagggttatacccaaaaagaagcgaacatttctttgatactaattcacttaccactagattgacctcaattcgattactattgtcattggttgcctcacacgatcttctcatttattagatggacgttaagaagctttccttaatggagagttggaagaggaaatttacatggaacaactagatggatttgtagtaaaatgtcaagaagggaaggtgtgtaagttgtttaaatctttgcatagtctgaaacaagcacctaagtagtgagatgagaaatttgacatatgtaggttttattgtgaatgaagctgatatatgtgtgttttatccttatggtaggggcgaaggagtttttctatgtttgtatgtggatgacatactgatctttggtgcgaatctcaatgtgattgagaaagtcaaaagatttttatctcaaaactgtgagatgaaagatttgggaatagctaatgttatctagaacatcaaattagaaggaatgatgatggtgggattactccgatacaatctcactatgtggaaaatattttgagtcgctttggctacaatgattgtaaatcccatccaacaccatatgatccaaatgtgttattcctagatcattggtttgctcatgtatttagttagcgcaacgaggcctgacatttcatttgctgtgagcaaactcaaccgatttggctcaaatcctagagatgatcattggcaagctcttgaaagagtaatacactatctagaaggcacgatgagctatggaattcactatattggatatccaaggtactatagggttatagtgattcaaattggatttctgatactaatgagattaaagccacaagtggatatgtattcactcttggaggtggcgctgttccatgaaagtcttgctagtagaccatgttaatggggtcaacaatggagacaaaacacacaacattagacacaactatcgttaaggctgattggcttcaagagcttttgatggacctaccggtggttgagaaacgatacctgctattatgatcaaatgtgataattaaacgatatttgttaaggtgaacaattctaaagataaaatgaagtcatcaagacatgtaaaaaaaaaaggagaagattgaaatatgttaggaagatgtaaacctccagagtaatagctttgattacattcaaattgcgagaaacctgacaaacccattcacaaggggtctatcatgaaatgtgatagaaaatgtatcaagggagataggattaagatccaac

SEQ ID NO: 45602 - DNA, 325 bp, Oryza sativa
  Clone ID: PAT_MRT4530_48551C.1
acggggtggtggaagaaaacttctatattcaaattgaaccagttgtagaaagagcccatattaaggaggggtacagagttcagtcgcatcacataaagaaaaccaatagggggagaaccatgtgaaaactgatcataagaactacaaaaatagcatatttggttgacaaactggaagcctcccttcttgagctcttctatggtggcaaccggcaggatggtttttgagacctgggcaagggaactagatctcatcaggcgacccaccctccaggaaggcacccaacacacttgcacgggcatgagccagcgggacccgaacttgg

SEQ ID NO: 45603 - DNA, 1011 bp, Oryza sativa
  Clone ID: PAT_MRT4530_48552C.1
atggcgggcggcggcggcggcggagggtggtggtgggtggagcggtacgggccgtgcgtggggatggtgatggtgcagtggttctacgcggcggtggacatggcgctcaaggcggcgtacgggatggggatgcgccccatcgtcttcgtcgcctaccgccaggggatcgccgccgccacgctcctcctcgcctcgctcgccgccagggggtgggacctccgccgccacatggccgtcggcgccccggcgttcgccctcctcttcgccgcctccctcgccaggttggagaaggtggatttgaggagttcgaggagcttggccaagatcgccggcaccgtcgtctgcctcgccggagcgatggccatggcgttcttcaaggggcccaagctactcggcgcggttctcgtcgcggcgaccaccgatgatgactgggtgaaaggaggcatctacctcatcggaaatgctttctgcgtctccatttggtacatcttgcaggtgccggtttgcagatcgtaccttgatccactgtctctggcaacatggatgtgcttcttagcgaccttgcaatgcgccgtgatggcattcttcctagaatcaaactacttacagatttggaaactagcttcgatttgggagctcccctgcattttatatggaggtgtttttgcctctggcgcaaacttctttctccaatcctggtgcatatcagtgaaaggccccctttatagcgcaatctttacaccactgagtgctgtgattacaacaatattatctaccatcttccttcatgaggaacttcatataggaagcatattaggtgcaattgcaatcatcattgggttgtacgttgtgctatggggcaaagcagatgatgcaaagagtgaggggctgaccatcctgtcaaatgattccaaaaggataactgaacctgaatgtacaggcgtcaaagttgaatgtggaaccaatctttcagtaccactgttatctggtaatgcaaatgctaatacttag

SEQ ID NO: 45604 - DNA, 496 bp, Oryza sativa
  Clone ID: PAT_MRT4530_48553C.1
gcccggaacttccggtgttctaagacaggaacttccgggtaacagaacagagatgaaatttaaatttcgaaacaagagactaagccaatcttcacaagatggtgcacaggttgctctacttggaaagcctctagaatctcagcacaagaacttcactaacttacctcgttccctttcggaggagaggaaatccttcacaaacttacccgggacatccacaatatgcaacggattctcgcgggcgacacctaaccgtctaggagatcatctccaagagtaataagcaccgagatgacagcccacgagatattccaaaattaggctctagattgagtggagaaggcaagaaacacttgggagaggctagcaatagctctaggtttgaaaaaccggaacttccggacctggaagacaggaagttccggacttgcatttttggacagatggagtatttgcaaaaaaggactcctagggaaacttgacacttggttcacac

SEQ ID NO: 45605 - DNA, 627 bp, Oryza sativa
  unsure (1)..(627): unsure at all n locations
  Clone ID: PAT_MRT4530_48554C.1
cttggtaccccctgcaggttaccggtcgaatttccgggtcgaaccccaccgcttccgggaaggagttggacggccttgggtgcccccgccgcggcggcggcgcgggcggcgtccatcgtggagacgctgaggaggctgtacctgcagcagctggcggccgggcgcgtcgtgcgggaccaacagccccaaacaacggctgccccccgtaggatcgtgacacgtggcgcaatccgggccgtccatgtgtagcatgcatgcatgcatgcaaccattctccgggttgatgatttttttttttcttaggcctctgactgaccttttggggatcagaattcagaatattctttgattgattttctttgtgatttttgcccacattttaagtgaagtatatggtggggatgacaatatctacacgaagaataaaccacaactgtatacactataatacaccagacaccaccacgtatatatagggactatggttttgaataaaaagttatgtaggattaattaagtaatcttacaaacttatgtaattcgatgagcttatgtacatcaagtaaatggtngtttaattatactcgtttcctccccgatgacccccaaaaaaaaaaaaaaaaaaaa

SEQ ID NO: 45606 - DNA, 1459 bp, Oryza sativa
  Clone ID: PAT_MRT4530_48555C.1
ataaaactatgtatcaaaccgacgcatatactgatcagggctcaaaatcaattttaataagagtgaggttttctgtctgggggcagcaacacaaaaacaggatttgtacagccaaatttttacttgcaacagtggggggtttcccatgagatatttgggttttccaattgatcaaaaacgacttttgaataaagattggaaacaggctgaagaaaaaagttggatgttggcaaggaaatcttcagtcgattgggggaagggtgactttaatcaatgcttgtcttagtagcactcctttatacatgttatccttctttagagttcctataggggtaagggagaagatggactttttaagaagaagatttttatggcaggaggatcaagggattagaaagtatcatctagttaattggaacactatttgctcccctagagaaatagggggtttgggcattctagatttagaggctatgaatattgctttattgggaaaatggatatggaatcttgagactagtgatggcatgtggcagcagctgattagacaaaaatatctattcaaaaacatcttggctgctactaaattaagaccaggggcatctcatttctggcaagggattatggatgtgaaaaacagttttttcaaattctgtacaaagaaacctggggatggaaaaaacactttattttgggaagataattggttaggtggcaaacctctggctgagcaatttccttttttgtatagaataactcacaaaccacatatcactttggctaaggtgaaagagataggttggactgaaatgactttcagaagaaacttagtaggagatagactagcagattggaacagaattaaggcttcttgcaatcagttgactttaaatgataaaaaagatgtggttgtgtggaatctgacaaaaaatggattgttcagtgttaaatccttttatagagctctgaaacttcaggaaacatcctccatgacagggggtatacataagaaaatctggaaaatcaagattcctttaaaagttaggattttcatgtggttgatgttaaaagagagtattctaacaaaagacaatttgataaaaagggggtggaaaaaaggaaacaacttatgccagttctgtgaacaaaaagagacaatccaacatttatttttcgaatgtccagaaaagcgaagaaagttacagtggggagctcaattgctaaagcaaatagcaagtgaagtcttcaagtctcaatttggatggtgcctggctaggtttaggcagctccacaactccactccagacccaattcctggagttaaatttaggagttggagctgtaccaaacaggcccgaaatcttgtgttgtgatcgatggtctttttggcttgctctacgtagcagttgaggggggtttcctgtaaaaaacagtttgttgtttcgggcatttcatgctg

SEQ ID NO: 45607 - DNA, 742 bp, Oryza sativa
  Clone ID: PAT_MRT4530_48556C.1
aatgaaaagaaatagaaacctatggacatatagagacttatgatgcatatgaccagccaacaatcaacattacataacaatggtcaatatacatcacaagaaagggataaaaaccaaatatcctaccatggagcgatataccttttggtccacacatttaccattatcgtcgaggtctaggtggcctcatcaccttgcggccttgggccatgaagcatgagtagtggtaggagtcgtcgtcgtcatcaccggaacttccggtgttctaggacaggaacttccgggtaacaaaacaaaggatgaaattcaaatttcgaaacaggagactaagccaatcttcacaagatggtgcacatgttgctctacttggaaagcctctagaatctcagcacaagaacttcattaacttacctcgttccctttcggaggagaggagatccttcacaaacttacccgggacatccacaatatgcaacggattctcgcggacaacacctaaccgtctaggagatcatctccaagagtaataagcaccgagatgacagcccacgagatattccaaaattaggctctagattgagtggagaaggcaagaaacacttgggagaggctagcaacagctctaggttcgaaaaaccggaacttccggacctggaagacaggaagttccggacttgcacttttggacagatggagtatttgcaaaaatgactcctagggaaacttgacacttggttcacac

SEQ ID NO: 45608 - DNA, 1561 bp, Oryza sativa
  Clone ID: PAT_MRT4530_48557C.1
aaaaacaatccaacagagcatttgggtgacatttcatggtacacatctcacgggctaatgaaatactcgagaaaatccgtatccaatctttgcgaaaagaaaacaaagatgttcttgacatgtcatcgtgagatttgctagatagctagagaactacaaagtacaaacacagacaggctaagagaagtattctttgaagggaacgagcaaatgctggccagcactgtccgtggctgttgttattattctttggaatagaagactgtggcatggtctggtcctcatcatagaatgtgttcaaacattcggaggaggccagatcttcccgaagagttcctccactcggcgtgcttggttcacatatccttccaacccagaagcaagtagttcttccgcagctggccccattgcagctgctagactcaattggtcccacttcacaagctcctcttcagtgaagttgtacgttttgccaagagcaggagtcagccttgggacataaccatacttcacgtcagtatcagtgacagattcttccaaagactgcaatatcttcagaggtgcaatgatgtagtcaatccccaggaggctaaacacatcttgcttgttgcgtatggcagcagccatcaactttgttttatacccatttttgtgaatgtaggcatacactttcttcgccaaagcaagcccagcatcttctcctttcttcaaagcttcatcaatctctgggtcgccagagtgagtccttgcccaatcccgaacacgtcccacaaagatctgtacaacagatgcaccggcttgtgctgcagctgctgcttgggcaaaactgtacacaaatgttaaatgtgtttgaatcccttcagattcaagcaacctcgaggcctctataccttgccatgtagccggaattttgaacagcaggcgttcagataagacatcatgatcactgtatagcttcaaaagctcatgcaccctctggataattccttgggtatcataagccaaccgagcatctatttcagtcgacacccgaccagggactagatgagccatttcagctccaacatttgccagggccttggttaggaaacaggacatccggtcctcgggcttctccattgtgttacattcaccgtctgccaacgctgtatctatagcactcttgaactttgtatccgggaggccagcgataccgagcagcagcgacgagctcaccgtggcggcggtcggcgcaaacttctcgaagtcatcgaacacgacggtatccggcacgatctcgctgaagctggccacggcatcgagctcagtgaccacctcgtccacggaggaagacggtgcgttgccgccggcggctacacgggccgcaagaaccggcctccggaggctaaaggccacaggcctggccgacatcgccgccgacgagctccacctgccgacctggagggaggccggcaggagggaggaggaggtcggcggcgtggagatggagagcgccattggtggaggtggggatcggaggaatggcgagatgctaaccctgcggcccggggatccactagtt

SEQ ID NO: 45609 - DNA, 898 bp, Oryza sativa
  Clone ID: PAT_MRT4530_48558C.1
gccaggataggcgtgaagagggagaggtatggcaagcctcgccgacgccattgatgctttacaagcgttggtgagaggccaggagaggcgtggagagggagagttatgagcgcaaggacattacgacaagatcgttattcctaatgggtgagataggcataaacgattacaaccaccacttcttccagaacagatccttcacagctgagatcaaacccttagtgccactagtgattttaaagattgaaaatgccaccaaggttttgatcgaccttggtgccaagaccatactggttccagggatcccgccaatgggctgcattccgaggtttctcaacttgctccctagcaagaaccacaatgactatgacaagcttggatgtctgaagtggctgaacgacttctctcagtaccacaatcgtgctctcaaacaaatgttacagaggattcatcatgatcctaccgtcaccctaatctatgccgactactatggagcaatgttgaagatagttcgaagccctcagaacaatgggttcacgaaggagagcgttctgagggcgtgctgtggggtgggtggggcctacaacgccgactcgctggtgtgcaacggcaacgccacgacgtcgaacctgtgcacggagccgtccaggtacatctcctgggacggcctgcatctcaccgaggccgcctaccactacatcgcccgcggcgtgctgcatgggccgtacaccgagcctgccatacccaccagatgcacagcctgatcatacccacacattacaccttgtttatcccagatgtataaccagaaatacttaaatttaaaacggatgcaaaattagtaaattacctttatactccctttgctaaaaaaaaaaaaaaaaaaaaaaaaaaaaaa

SEQ ID NO: 45610 - DNA, 536 bp, Oryza sativa
  Clone ID: PAT_MRT4530_48559C.1
cttgcatacctgaagatgctatgttaaaagatccaaggaggctttatgcaccaggtcggatatatcacattgtagagagaaaaatgttcaggtgtggaagataccccccagtggtgaaaacagctgtgcctgtggatggtagatttgagcatatagttctttcctgcaatgccacaatggaccatgccattatttggatcgagagggaagcacaaaaggcgttggatttgatgcttgagaaggagaagacaatggaggtgccatcggagcagaggatggagaggaacgagagcctgcagagggagcacgtagaggagcacaaggcagctctgcgcagggctgtgacgctctcggtgccggacgctcggtcgccgtcggcttacggcaccttcggcgagcagccggagagaagcgagagcttcccgccggtgtcagcgatggccaggcagcgtatgagctggaacgacctcatcgagcgggtcttcgacagggacgagtcaggccacattgtgctgcgcagctcaccttctccctag

SEQ ID NO: 45611 - DNA, 486 bp, Oryza sativa
  Clone ID: PAT_MRT4530_4855C.1
ctattcattttgggccaaattcccttcaattaacccaatcagcacaagtctacatgcctccttcctccctcttgggctgtcagcccagccgagccgagccgagccggcccaaatcggcccatggccgagccgctccctcctcctgtgggcgcacttggcgcacgcacagggcgccgccgtcgccgccgtctcgccacttcccgatgccgcccgccgttttgcgccgccgccgtcgtcttgccgtccacgcgaacgatccgtcaccaacgtcagctggcgccgtcctccacttctccacgccgccgtcgctgagttctccttatcttcctcctccgcaaccgccttacgccaccgcctctcgccgccgccaccaccaccttctcttatcggccggtctgagcttttgctaccgccgttccggccatctccctctctccctccgccttccaccactttccccgggtgcgcgttgctcgggaacaccat

SEQ ID NO: 45612 - DNA, 786 bp, Oryza sativa
  Clone ID: PAT_MRT4530_48560C.1
atgggtgactgttggttcgatgcttcgggtgaaaccaattcccagggtgtgatgggcggtgtgtacaaggcccgtttgtaccgaccgtttcagtcggtatatgtagccgacgttggtggaaatggaaatgagccgaccaaactgagggaggaggccctcagtctctccgtcgccctcatctccatcgtcggccaccgagaagacgaaggttgccaacaccatggagccgcgcggttaaacaggaatgcaaccgcgcactcggacgctctggagcgcactccaccgcatccccatcaccgtttctggcggccgtggacagttgcaggccaaaccaccgcgccatcttcatcacctcgacctcctttccgttacccctcaatagccccatcgggagatgcaaagaatggggagatcgttctctttcttgttggaaatttggagcagtcgcgcttgaagcactacccgtgcaagtttctgctcccgtgcaagcgcaggcgctacccgtgcaagttcctgctcccgtgcaagcgctacctgtgcaagttctcaagcaggaactcgaagtgcaagagtcggaagaacatctcaattctccgtgtttattaccacccaggcaccgccaccgccaccaagctatctcggatgaaccggataatttttggtcaaaagccagtgaatcagaggcttctgaacaggtgctacgggtgccacctcagatctggctgcttcgtgagtggtgggggtggagtcttggaggagcagcaatcgaagggaacaaggaggtag

SEQ ID NO: 45613 - DNA, 740 bp, Oryza sativa
  Clone ID: PAT_MRT4530_48561C.1
ggaattcggcacgaggctcccgtaacaggttgcttgagatattcagtacctggagaggccggtcaggtgatgacgagttcagctcctgcaattctccatccaggcggttgaagctgacatcaaggacgacaatgctgctgaatatcagctctgatggaagctcactggagagtagctcgtgggacaggttgagtcgcgacaagctggtgagctcgctcagggatgaggagatgcacccttgtaggcctcttgaggccagtaatagctcagttactgcaccatcttctccacagatgatcccttcccaggtgcaacaatctggactattctgccatgacgcggcgaggccaccatcctgcgatagcccggcgaggaaccggaggagggagcgcctctcccgctcggtgcatgaaccgacaggtgagatgaaggtcagcagcagcaacacaagagcagggccaaagaaatttatgcaaaacctgctggttttgttgctgcgccaagactgcggtattggcttcatggtttgtatctgttggaagctgtgacagagtagcgagcttgattcacctaggtaggctggtattgtgtgcaaaaccacagttcctgagctatattggcaaagcatcgaagagttataagctgatggagtgttgacctatgagtttagttgcttctacctcactggcttggtactgtgcttaggtttgggaattccgtctttctgttttcttttccca

SEQ ID NO: 45614 - DNA, 478 bp, Oryza sativa
  Clone ID: PAT_MRT4530_48562C.1
cggtggcttttttttttgaactgtgctcccgacgaaccacggttgcagcagtgacgcgcccttgatcctcgacccgtcgttggaggccgtcctcaggagcatgtcgtgcacgatgttgccgccggcgctgtcacctgcgatgaacaggacgtacacgtcgccttgctacgcgagccagccatcttgcgctgacaccggccacagttgaccggcccaggaatagctgcaagccgtcggaaggggcagctcctgggcgaggcggtagtctacagtcactacgaccacacctgccgtggcggaagaaggggcatgacgtaccttgtggaacgtggaggagtaggccgactcgatgaggaagccgactccgtggatgaagaccaggacggtgagcttctaggatggctcttggatcttggggaggtagaggctcacggagaggccggtgccctcgtgaatgacgacctccttggaggcaacg

SEQ ID NO: 45615 - DNA, 636 bp, Oryza sativa
  Clone ID: PAT_MRT4530_48563C.1
atggctcctccggctgcgacggcgcgggagaggccggcggtgagggcgcggagagggaggaggcggagaggccggcggcgagggcgtatgaggaggaaggcgccgtccgcggtttgctgctgctttcccttcaacgtcgtcgagctcgtcgtcctcgcggccgtccgcgttcccgccacactctgccgctacgccgtccgaggtggacgccgccgctgcgtccgctccgcgaagcggaaggccgccaaggccaggaaggtggcgtcgtcggcgcagtacatcgtgatgtggcagctggcgcccagcatgtggatcgtcgattattttgccgattattccattgtgccgattattttgttattttggtgctcgtcgtcgggatgccgattatctccattcctgatggcgccgtcgttcttggcgaggcccagcgggaggctcgtcgtgctccggccgggaagttgcctacgaaggagacggcgactagcagcagcaccagccattggcctcgtcgccggcgacaacctcaccgtcccgctccgctgcgcctgcccctcgctgccacagttcgccgtggtggtggccgcggcgctcgacgctcgtcacgacatggcctgcacaagaggagagaagtga

SEQ ID NO: 45616 - DNA, 585 bp, Oryza sativa
  Clone ID: PAT_MRT4530_48564C.1
atggagctcatggcctccctcatcaacatcttggcgctgatctccgaggcatgccgcagcgcggagaagctgccggcggcgctgatcactggcggcgtcgtggaggccgcggcggcgatcttcgtcgccttcttcaagccgcccggtggcgtatttcagcaccacggcaaggcaccattctacctgtattacggcattataggaggcgtggccatcttcggcttcgcggaggcgtgggccgggttctgggtctccggcgacctgaacggccggcgcgccgtcggaaagacgatactgtgggtgtcgattttgcctcttgtcttggtagctgcgctcggaggggcggctggcgggtggggaggaggtccggcagccagcggcggcgcgtgcgacctcggggtcggaccgtcggagaggcccgggaggcggctgcggcggcggcggcgacgcttgagaagggagaggcggccggtggcgccggcgcgggaagaagctgtcttcggcgtcgtgcccgctctgccctccaccgcctgcttcgcccgccgctgccccgcgctcacacactcccgccggcgacgccgctga

SEQ ID NO: 45617 - DNA, 629 bp, Oryza sativa
  unsure (1)..(629): unsure at all n locations
  Clone ID: PAT_MRT4530_48565C.1
gggcgannattgggtaccccctcgagnggccggccgggacaaccctaactcattccttgtcacaccttcttccttctactctctcttgccccttcgccgtcgccgaagcggagtatcaacatactgcgagcgacacgggagcggtgctgaaagacacagcatgactactgcgtacttcatgcgatggcaattcattgctgaagagacaggaggcatggcaccgactgactacagcgtccagcagtatggctgaccaacacacgataagaacaaccgccgctcatctaaggaccggttttttgccagatttacagacctagcatatccaagtgaaattgtctatgctaccattgaccgctgatatagaagatgactgatggctactcctatgagctggctctctatgggcttgaagttcttcttaccatctatgctgacacttactgcactgacttgcttgtggctcgccgagagctcacactcagtgcttcgaaccactatgacgagggcagtgctgaggccactggggaggactactatgctgcaccagctgatgaaaggatgacattgcgcgctctcttgcatggtagccttactatgacaaccactgtaaaccgcgtgtttggtgc

SEQ ID NO: 45618 - DNA, 361 bp, Oryza sativa
  Clone ID: PAT_MRT4530_48566C.1
cttatctatgaacaagctgcaaggaacactacagggggcgtttttaactggatctgggggtactgtaagaaggagtacaagcctattcaaaacatgcttgttgatttgccggctttcagctgtgatgactgagggttgcagaatgatgctgcttatgagtggagaattacccaatgcctgatcaatggagattcgttggacttcaaggtttatgaccaaaatcgtaaaccacactgtaccctatatttagttgctgccacaattgacgccactcgtagggtacaatgggccaagaaaggattgataatcttcactgcacttgacgtaccatagatggctaaatcatctgagcaagtcactg

SEQ ID NO: 45619 - DNA, 1209 bp, Oryza sativa
  Clone ID: PAT_MRT4530_48567C.1
atgaagcgcaaggcatcaccctccagtttttccggtgatccaccgccggccgcatcgcccacaaccgtcgactcgttctgcgacgatgtcatcgcggagttcctcgtgcggctgccgtcagtcccgtcgctggctcgcgccgcctgcgctgtgaagcggtggcgccgggtggcctcgtcccccgccttcctccgccgcttccacgccctccaccccggccaagcccaacctctcctcggccactactactacactgaatgctcttcgcggccggtgttccaaccagcgcagcccaccttctccgaccccgaactatccgcggtcgtccgacatggcgatttcttcctcactcccgtcacgtccatgggccgccttgaagttgaagactgccaccaaggccgcctcctactgaggaattgcgacaccaacgagagctcaccgttttcgaccctcttcttgatccctggccgcgtcggcgatcaggcagcgtcgtcgtcgtcgttccgtgtggtcaccatgcagagatgtagtacgacagtaatatacgcctcgggaggagatcaacggctggacatggagcgactggctgtgtacgactcctccacgggtgcgtggagcgctcgcccgtggaccaacaccagcgacatcgacatgccgctgcctctcaaagtgaaacgttattcagccatgcacgcgccaggtcgcatctgctggaagaggctacgcggcggctctcctaacagtcttgtctccctggacgccgaaaccatggggttccccgaagtcgtgcctccgcccggggtcctcctgggcccgtcgtacgccgtcggcgacaccgacgacggctccatgtgcttggtcaacatggaggagagaggaacgatgaggctggtcatgttgtctaagaaaaaatggcacctcagagtttggcttcttggaaagtctggatgcggcggccgcgcgtgggtgctggaccaagaacaggaaacatcgctgacgacgtcgaccgaagacgctgctgatatgctatgggattatgatcgagcgtgccgcgttgtcgccgtaaacgccggcgtcgtgctgatatcatcactgctgtccaaggagcttgactccaagggcatctcattaatgccagcaagaaacctagctattgttgaggtctccgtcaccaccgatggcaagacggagaagaagaccaatcaatag

SEQ ID NO: 45620 - DNA, 223 bp, Oryza sativa
  unsure (1)..(223): unsure at all n locations
  Clone ID: PAT_MRT4530_48568C.1
gcgttcggaccgagagggagattgattgaaaaaaaaaaaaaaaaaaaaaaaaaaaaaaaaaaaccacaacataaaaaaaaatacatcnatctatcgagggcgtgggtgttcatataccagctccccttctccttcctccngcgtcccacgtcattagatatccaaaccttaaatccaattactatggccccggcttcgccctcatcttctcatgcatgggtgc

SEQ ID NO: 45621 - DNA, 440 bp, Oryza sativa
  Clone ID: PAT_MRT4530_48569C.1
gtgctgtcaggaacaacccctaccgccgggtgcctgcagcaccgcctcctggtcgcaccagctcgccacgagccccctccccttcgtcgcctccgtgaactcccgcggcagcgccgcctccgcggcggtggcggcggcggtcctcgtcacgacgtccggcctgacgatccagaggaagtcgtggccgctgccggcgagcccccacgcgaactcctccagctcgtggccgctcatcaccgtcacgctcccgtagttcacgtacaccaccgaccggggattcctcccgtcgagccaccggaggcaggcgtcgtcttccctccacaggctggggctaatgtcgtcgaggggcccgaccggcgggatctgctccgtgaggaacgcgagcgggccgacggtgtagatggccggggtgatggcgcgcatggcgtccagcgccggcc

SEQ ID NO: 45622 - DNA, 1040 bp, Oryza sativa
  unsure (1)..(1040): unsure at all n locations
  Clone ID: PAT_MRT4530_4856C.1
agcccagccgagccgagccaagccggcccatggccgagccgctccctcctcctgtgccgccgacgtcagccgccgaatcgaaccgccatcaccaaccaatcaacgaacagagctggcgccgtgctccacttctccacgccgccgtcgctgagttctccttatcttcctcctccgcaaccgccttacgccaccgcctctcgccgcttcctcaagctctctttctctctttctctcccatgtccggccattagtaccactggccgatctccctcaccggagcttcgcaagacaaaccctcgcgccaccaactccgcctcgtcgaggtgattccatttttttcctttcccctctccctccaccttaagataaaccgccaccaccaccttctcttatcggccggtctgagcttttgctaccgccgttccggccatctccctctctccctccgccttccaccactttccccgggtgcgcgttgctcgggaacaccatctcccaccggcgttcctacctcccggccaccggagagctggcacctcgctcgccgcttacagtggtcggagcctcactactccctcaacctccacagaagaggtagaagaaacacatgacaagcgggccccaccttttataaaaccgtacaacaagttctatcggcatccaaggagctgacgtggacccagatgntacgctgaagccgcaggaaatcttaaggcgcaagttaaactaacaagaaatctggaaggcagcgagatctacggcaacgacaagtttttcttctaggctaatctacactcgagcttttgcctgtggagttctttgaagttctttggagtttattggttgtagtttattggttgtagttttagtngttttagtngttgaagagctttggattttcttgtatttcaaataaggatatattagtttgaatctttttaccctttaacagttgtataattagtttgtatgaacaaacttgtgtaaataattgaaagctgttctgtaaaaaaaaaaaaaaaaaaaaaaaaaaaaaaaaa

SEQ ID NO: 45623 - DNA, 1106 bp, Oryza sativa
  Clone ID: PAT_MRT4530_48570C.1
gcccaccctcaagtggggatcgctatcacgcgcccacagaaactgcagattaagcggcagagattgtagatagcgcgaggttattaaggccagcagtctgaccgcgcgcggcatgcccttctgctgctgcaaccgaccaaatggctcctgcggttgcctcctccccgtcactcgtgctctccgccgccgccgccaccgcctccaacaagcgcccggccgattccgatgcctcgccgccgcaccagggagatcgcacggggcagcaggagaagaagcagcagcagctggagtgcccgcgctgccgatccaccaacaccaagttctgctactacaacaactacagcacgtcgcagccgcgccacttctgccgcgcctgccgccgctactggacgcacgggggcacgctccgcgacgtgccggtgggcggcgcctctcgccgcggcggcggcggcaagcgccgcagggtctccgccgacgccgacccttcctcggcgtcgccgccgccacccacgacttccaccacggacgcgtacgccgacctcccagccggcttcccgttcctcagtgacggcgccttcctgccgcagttcggcctcgccggcgttgcgccggccgcgttctcttgggcatcggctgtccctgacttgtacaactgcgggatcgcgccgtgggacgatggaacggcggtcaccggcgcggcgtgggacaacttcgccgacatcgccggccttgatctcagctggccgccgccgggtaactgacgaacagtacacagctggtcgctcgtgttttggggggctccggttttagcaaagcagcctcaagtagtgcgttcttcgatcggtatgcaggtagtgtgttcttcgatcggtatgaagtatattttgctgagctagggattatgatataattattgggaatgtaattaagcagctcaattatccaacgtggtgtttgcagttttcttctctcaccaatttcatacgcttgcacaatgatgtggtgattatcattgggatcagtgaatcgtgatctgtagctggaagatgtgtttacgtatgtgcagtgttaatgacaataataagagtttgttgccatcaaaaaaa

SEQ ID NO: 45624 - DNA, 275 bp, Oryza sativa
  Clone ID: PAT_MRT4530_48571C.1
acgctgacgcgtgggcggacacctgggttatcaaatgctgtattatatgcacagaacattgctataaacgtgcatgatacatgtctccctggttgcacattacatgatggccatgggcctaatggcacaccttatgaactcaaactgggaaagatcaacaacatttgtgctaggtaaagattgcttcaaccacttgacctcggcgaggccgtacgggtctgctcgcgtggccgacgacgcgatctagtggtggtagcggtctccggaggggcggt

SEQ ID NO: 45625 - DNA, 1533 bp, Oryza sativa
  Clone ID: PAT_MRT4530_48572C.1
atggccaatggtcagttagacgaaatcgcaagtttagcaccctgtcgaacggaggcagttcgaaagggcagttcgacagacctagacctcgcaggcggaggcggaggcggaggcggaggcggcggcggcggcggcggcggcagaggtatggcacctgtctctacgggacccagatttaggcggaggaagtctaatgcaccgagggcaacaagtcgaaagccggacagcggggtgcctgtcgctgccgatgccgatgctgcgaaagagggcgatgcgccggggtcggggtcgacgacgagggtgacccgttcgagggcagcaaggtgccggccggggtcgcaggagccccttccaccaccatcggagcgatcccgatcccggaggacgacgctggccactgatacggcagtgagagagcgcaaaaggattcgggccaatctcattgaggaggaaaaaccgctgacgaagatggaggaggtagggggggaggagatctcgtccgcaccgagctctcccctctgtgagccctacttgcctgatgaccaagagattgatttcgacaccattgatctttacaagaagaaatcaaaagaattccataaaaaaagagatggaaatcccttagcacgctgctctggatttctgattgattggaatgaaacaacgaaagttggtgttgttattacatctgctgatattatttgctcagcatcatccttagaccgttggtctggtgatgatgaatattcttattctgctaaggtctttgtgcacctactggacgacaccacggtggaggggcgcttgatttatgctcagacacactacaatcttgctttgttcgagattatagtggaatccccagttcagatacctaattttactttcaacctgaattatgctcaacaaatatttgtgttaggaagggatgagaacttgtgtctaagtataagtcatggcaaagtacaatactgcaatccgtttttgtgtggtcggcatcactacatgtatgttgatactgccacccctaagtgtgccttgggagggctagtcattgactttgaggggagcacgaggtgtatcccccgccctcaacttggggtcaagctttcagccattaaatttctggaccttcctcatatagagatgatattacgcaagatccatatttgcgatgggctcattgtcgaagaagtgtcatcagggtctactattgagaaactgggagtcagagtcggcgatatcattcagcatttaaatggagaatgggtttctgatacaattcagttagaagaaatgttgctgagactttctgaggatcattttgacaaaggaaatggtctcaattccacattggacattaaagttggtttgtttcacatacgcaatggagctcgaaacaccataaatttgacgacagttgtctcagaaaatggagaagttgttaagaggggttcattcgctgtttctgtccctactcgggaggagatttctgctatgtacgcacttcaggaagcaactacaggcatgtga

SEQ ID NO: 45626 - DNA, 145 bp, Oryza sativa
  Clone ID: PAT_MRT4530_48573C.1
gcatgccgcgtaccttcttgatcctctatttggccgccttattttttttttgacacaaaaaataactcggatatcccaagacttaccaaattcccttcatttcaatccttcttctactcccttaaatctacaagtaaaccctgca

SEQ ID NO: 45627 - DNA, 440 bp, Oryza sativa
  unsure (1)..(440): unsure at all n locations
  Clone ID: PAT_MRT4530_48574C.1
cctgcatgtaagccgcacctagatttattctacttcatttaaaatcttagtaatttctgcggtgctatacgcaaatgagagatgagttataggcttgcaacatgtgtatgattagaagattggcttaaccttgtggtcaacttccatatggtgtactaatccaattccgtgaagctcacagccgttgagatctctntaatcttaattgttttagataaatgccacgatgccctagaaatcgaactgctggagtgaagttacttggaggacttattatggcattatctgtgacactcttggcgaatttttgtcattgaatcactctagtgataccatatttccggaaacaccgtatttgacttaattattcagtgttacaaatttcattattattctagatgtaaaagaccctgaagtgtgtgtgacgggcagagtctaat

SEQ ID NO: 45628 - DNA, 357 bp, Oryza sativa
  Clone ID: PAT_MRT4530_48575C.1
atgacagccgcaactccggaagaccacaccgctgactgctgcttgggaggagaggagaaggaggcggcgcggcggcgtgggaggcgaggaggcgcggcggcatcggagaggagaaggaggcgtggcggcggcgaaccgggaggatcgacggctgaggcggagtgggaggaagcagcggagaagacgatggaggagaaagagaggagaagacgggttgctgaagcaaaatttggcaagatagactcagatttggagttggatatcgaagcggaatcgaaggagattgaatcttgccgaaacggactgcgcatcggctgggcagcgtatcggttggaagcagagtcagaattcaattga

SEQ ID NO: 45629 - DNA, 389 bp, Oryza sativa
  Clone ID: PAT_MRT4530_48576C.1
gatgggctgttgatatttctgcctatgatgacgatggaaaatgcacacatattcttctttgctcaaacccatcctcatatcaggctgttccaccaaaggttatctatgtacgcccatacataacattcacaaacagggctggacaagatttttacataaaacttagtgctgaagatgagccaaaggtgctacatgcacatgactggagggtttcttttatgcactcagaaggaggaactgaaaaattgcagcttagatttggttatgcaaaccactgttatttgaaaatgtgtggctgtatgtttggtatgcaaaacatcatttatgttgaaaagaagatagcatgcaaatatcaagatgagtgcctgcaaaactcaggaaaaaggagg

SEQ ID NO: 45630 - DNA, 257 bp, Oryza sativa
  Clone ID: PAT_MRT4530_48577C.1
caccccatgcaaatgggaattggatttataaaactgacaaaaccgggaaaaactggcccatagatgcaagtttcagggccctgcaacaggttgtctaacccaccaaggtctaattaccaaccgggggggggaggggcccctttttacccgctaagacaacggcccaggaaaagaccgggcgtcccagggggcgggggaaattcccttggggccattggccaagtaagccccggccctggggcctttccccccatttg

SEQ ID NO: 45631 - DNA, 3240 bp, Oryza sativa
  Clone ID: PAT_MRT4530_48578C.1
atggcgtcacctaccctcctccctgactcagctcgcgcggccctcgacgacgccgttcaagccgtcgccgacgccgtccgcacatcctttactccacgtgaaggcaacaccgtcgaccccaccaccgggacctcggtctccaatttcgctgccaaccgtgcgtccaaggccgctcatgccgccctctctgatgccctcaccgcgttcgtcctcaccaccaacatcgatggaacgccgctctctacctcctcctcggcgtctccctccgacacggtgctccctctctcgacgtcatcttcttcctcggcgtcggctccaacttcttcctcggctccttccgccccggccgcaccgcctccggcttcatcacctccggaccctgtggtgtcactccctccggccctggaagccatcctcagctcagcgcggttccctggcgcccctcaacaacctctacggcgcccacctgctgcgccggccctcggtcccgacgccctcgcggctctccacgcgcaggtcgtctccgtcctcaacatcaaggccctggttcccatcaccctcgacgtcgctgccgccaacttcacgcgctggcgcggcctcttcctcgtcgccctcagcaagtacgcgctgacggatcacgtcctctccgacgaccaccgccccgacctcgccaagtggttccagatggattgtgtagtccttgcctggctatacggctccatctcggctgatcttcttcaagaggtgatgtcacacgacgccactgcttgttcggtttggcgcgccctcgagctccagttcctcggcaactgcgagcagcgttctctcaaccttaccaccgaattccggacatttcatcaaggcgacctctccgtcaacgactactgccggcgcatgaaaacaatggcggactcccttagcgacctcggcgacccactgtccgaccgcgcactcgtcctcgccaccctcaatgcgtccgtttccgtcgatcgccgacgttcgctcgtagctcttgctggaagagctttcaaaggccggccgcccctctggatagagcactgtcctcctcgccggtgcaacaagcaacaagccgtcatcctcgcccaatcccacgcatgcgacaggttacggtgccggccaggccaggccaggctggctggccctcacctgcaaacccctgggctggcaccatccacgtgtggcctggcccagcgggacgcggcatgctcgggccaaggcctgtcggggcccccttcgctggcgcaatcctcaacgggccgccggtcggcccagtcgtctgctaataacagtgctactgatcttgagttcttggaagacttctcttctccagtgcagctgccaatcggacgacccaccacatcagacgcgactgcctccagacgcttggcacacccccctccgccagccgggccaccggcctctccatcagtcgcacctgggccggcccaggagacttccccgacattccctgcgccacacacgccaccggcccactcccctggagcgtcacaaggcagctcccctgcctcccctttgcgccaggcttcaccggcccactcacctgggccggcccacggcatccaccccccctcagcagaggcgccatggatgctgcctcccctaccgccggtacccacacggccacgctcggtgaggaatcccactgcccctcatcagccgactgctcttggcgagtccccggtcatcaacgagcatgtcatgaccacacgcggcaaaaccggtgtgcacaaacccgttcagcgcctcaatcttcatgcggccgccctctcactcgtgccacgcacgtatcgggcggcccttgctgatccgcaatggcgcactgtgatgcaagatgagtttgacgccctcctctccaatcgcacatgggatcttgtgccacgaccacacaaggccaacatcgtcatcggcaaatggctgttcaagcacaagttcaagtccgacggctccctcgaccgctacaaggcacgctgggttcttcgtggcttcacccagcgaccccgcatcgacttcgacaagatgttcagtccagttgtcaagcccgccacagagactgtctactgcatccagccgcccgggtttgtcgatcctgcacatcccgacaaggtctatcgtctcaacaagtcgctctatggtctcaagcaggccccacgagcttggtacagcagattcgcctccttccttctctcaatgggattcatcgaggcaaaatccgacacctccctattcatctatcgccgaggacaggatactatttaccttttgctgtatgttgacgacatcgtgctcacaacatcgactgacaagcttctacattggaccatctcctccctacagtccgagttctccatgaaggaccttggctcacttcaccacttcttgagggtcacagttgacaggctcccctcaagcctacttctccaccagcggcagtacagtcttgacatcctcgaccgtgtaggcatggccgactgcaaaccgtgtagcacgcctgttgacacctcttccaagatgtcagccacagttggtgcaccagttgctgacccaactgacttccggagcttagcaggtgccctacagtacctcaccttcacgcgaccagatattgcttatgccgttcagcaagtgtctcttcacatgcacgaccctcgtgagcctcatctcactgcgctcaagaggatattgcggtatgtttggggcacgttggattatggattgcacattcagaagtctcctgtcactgacctagttgtctactctgatgctgattgggctggctgtcctgacactcgcaagtcaacctccggttatgcagtttttctcggtgataaccttgtttcttggtcctccaagcgccagaacacggtgtcccgctccagtgcagaggccgagtatcgtgcagtggcaaatgctgtcgccgaagctacctggctacgacaactacttcaggaactacacacaccgctggcaaaagcaaccgttgtctattgtgataaccatcagcgcactaaacatgtggagattgatctacatttcgttcgcgacaaggttgctgttggtgctattcgtgtgctgcatgttcctacttcctcccagtacgccgacatcttcaccaaagggcttccaacgccggtcttcctcgagttccggttcagtctcaccgttcgttctcatgacgatgcgactgcggggaggtgttag

SEQ ID NO: 45632 - DNA, 435 bp, Oryza sativa
  Clone ID: PAT_MRT4530_48579C.1
atggaggaggggcgcgagcgtgccaggcatggaggcggaggtaagagcggcgcgattgggggcgagcgcgcccggcatggaggtggaggcgagagcagcacgaccggcggcgagggtggcgagcgcacctggcatggagatggaggcgagagcggcgcgactggcagcatgaccggcggcgagggcgacgacggggcggtcgaagatgaagttgtggcggtggagacagccatgtgcggagcggggtggcgtccgctgtgctcgtcccccacccccgcctcattctcccgcgtcggctcaccgctgccgccgacgttatcgagcggcgggagccacattggccggatctggctgttaatgaagagctcgcttccaccaccacgccatcgccgccggggaagggggcgtcgcgggcggggttggatagtgcgctaa

SEQ ID NO: 45633 - DNA, 276 bp, Oryza sativa
  unsure (1)..(276): unsure at all n locations
  Clone ID: PAT_MRT4530_4857C.1
acgcgnttccggcaaaatttgatttgtgagagagagatggnntagggttgattggttggnnattcaagaagttgccacatattgtccctctatgtgctagantagtcatgggccgttggatagaatatatggtttttggtgtcttgcttggctaatgaaatagcctacgtgggatgtgattcaaagatgctccacaactatattggcccttgtttcttgattgagacacatcctnnntgcaaatcctgatctatactgatgtgaattgagaaatga

SEQ ID NO: 45634 - DNA, 102 bp, Oryza sativa
  Clone ID: PAT_MRT4530_48580C.1
atggatcctgaggggctcttgaagagtttgtcagttggggctagaggcaagccgcccgggagaattgggattgtgaagggcttctacggcaactccccttaa

SEQ ID NO: 45635 - DNA, 1071 bp, Oryza sativa
  Clone ID: PAT_MRT4530_48581C.1
gtgttcgagtacactgatccaatatagttagtggcattaaccatcacaaagtatttactacaaattacagtggcaacaacacatttattagtgagcgcattggttactacggaaccatcacactgcagttgttatcgcagtaacatttcttcgatgcttactgcctgcaaagcatttttctaacttctatagacattgttcactctggaatattgaatggctggatgcaaagcactaagcagcatcacttatgtcttaatatggtgttaatcctactaagtactactaacacacacacctcagcattccagagcagtgcccttttgcatagttacacaggcttcaaccgcttcacctactgtcaaaaatatccagtctcctcctacctggtcaaccacacctgccaatttcatcttctggatcgcttgccatcctgggccggcaatggccatctgtatgctaagagatgccagctccttgtgtatctcttccaaggccgaaatccctgaagtgtcaatgtttaccacatttgacatgtcaaggacaacagattgcaccctctccctggccttctcatcagacgtctcgacttcttctcgtatccattcgatgatcctttctttgatgaaagtggagttgataaagcacaggaatgatgtatcaatccgaattgtcaatacactcggaatccggcaagcaacagggtactgtctgatgctgcagaagatgtttgtcccctgaagcctaccaagaacctctacttgaggccggattgactgtatgatgatcttggcaaaggagatggcgagcgctacggcgaggccgatctcgactgatccgaagagcacgccgacgaacgcgccgaggcatgtgaggaaatccatcttgtcgaccttccagatgctgagagcctccttgatgtcgatcaggcctggaagtgccgacaaaatgatggaggccagcacggctatgggtgtgtagtagagcgacttcatgagcagctccagcgcgatgaacaccgtgatggacatgacgatgttggacacggttgacctcgcgccggcgaagaag

SEQ ID NO: 45636 - DNA, 384 bp, Oryza sativa
  Clone ID: PAT_MRT4530_48582C.1
atgacccccgatggtgaattccccgttgccatctcctcaaccgttctagccggtggtgaaataactctcgtatgcatatatagtggaggttatattaacaaaaatcctaatgtcctcacaggaaatttatttccatttttctgggaaatgctacaggacggtatcccattcggatggaacgatacctctaagggatttgatttctccagctcacagtttacggtgcaggctgcagccactgcccaaatgaaggttgcatgggaggtatcaggaaaagagatcccatattactctataatctatgtcttgagtaaatcatatcagaatttcactctgtttaacgatgatatcgtgaatgagccactccagggaatccgcacataa

SEQ ID NO: 45637 - DNA, 586 bp, Oryza sativa
  unsure (1)..(586): unsure at all n locations
  Clone ID: PAT_MRT4530_48583C.1
gtgttgtggtttattcatctatctagccatggccatggngcttttgtgtgctaaattctttgtgatttgtaaaaaaaaaaaaaaaaaaaaaaaaaaaaaaaaaaaaaaaaaaaaaaaaaaaaaaaaaaaaaaaaaaaaaaaaaaaaaaaaaaaaaaaaaaaaaaaaaaaaaaaaaaaaaaaaaaaaaaaaaaaaaaaaaaaaaaagggggggccgtttttagaagaaccaaatttaacttcccgggtgcttgcaaaggtaaaacttttttttatagggccccttaaattaaaattaatgggccgtgttttaaaaacgtgggaatggaaaaaaccttgggtttcccaaattaaatccttttgaaaaaaatccctttttcccaagttgggttaaaagaaaaaaggccccaaccattcgcctttccaaaaatttgccaaccttaattggaaaatggaacccccctttaaggggccaataacccgcggggggtgtggtgtttcccccaagtttaaccttaaaattgcaagccccttaacccccgtttctttgtttttttcctttctttttcgcacctttccccggttttc

SEQ ID NO: 45638 - DNA, 536 bp, Oryza sativa
  Clone ID: PAT_MRT4530_48584C.1
gggggggggggggtggccacgtcaccctcgggcccgacccccccccgagggggtcaggccacgtgggtgagcgcggctgcccaagcctctagtcacgatactcccggtcccatgtcaccgacaggggctttgagagatggtttaatgctggtccaaagattgggaattaatagggtaatatttcagtcagattgtttgcaggttgtcgataccatgttgaatggaggttatgcggcaacagcctcaacagctatttacgaagaatgtaatctaatatggagaggttttgatagcacatctattgaacattgtaatagagaagcaaacaaagttgctcatgcattagccatggtagcttttagtaggaaagagtcgtgtatttggataaaaggtgtgggtgacttattatttttctcactggccagatgttctcaaaaatgtctcggttaacgatgtgcggtgcaaagtgagcggtttggaaaaatgaggaatcaatagtatcttaattgaaagtttaagtagaaacaattttaaac

SEQ ID NO: 45639 - DNA, 1428 bp, Oryza sativa
  Clone ID: PAT_MRT4530_48585C.1
atgaagccccgcgagctcctggagcgcatcgcacggccgttcagctcgtcgtcctcccgccgcggcgggggcgcggagcggcggcggcgggaggaggaggaggcggacctggaggcgatcgcggcgagggagcagcgcgcgttccggtacgaggccctgagcgccgcgacgcgggggttctccgagcggcagaagctcgggcagggcgggttcggccccgtctaccgcggccgcctcgccgacggccgggaggtcgccgtcaagcgcctcggcgccgggtcccgccagggcgcccgcgagttccgcaacgaggccaccctcctctcccgcgtccagcaccgcaacgtcgtcaacctcatcggctactgcgcccacggccccgacgacaagctcctcgtctacgagtacgtccccaacgagagcctcgacaagatcctcttctcctcccctccgccgccgccccgaaacttccactggctgcatacggtgggcgggctgcctggcggctggatccgtgggtcaacagctgaaaaggctgcaccgggcagcagcagcgacggcgagaggcggcggcggcgggaggagctgacgtgggcgcggcggcacgaggtggtggtgggcgtggcgcgcgggctgctgtacctgcacgaggacgcgcacacgcccatcatccaccgcgacatcaaggccagcaacatcctcctcgacgaccgctgggtccccaagatcgccgacttcggcatggcccgcctcttcccggaggccggcgacggccgctcccacgtccagacccgcgtcgccggcaccaacggctacatggcccccgagtacctcatgcacggcgccctctccgccaaggccgacgtcttcagcttcggcgtcgtcgtcctcgagatcgtctccggccacaagaactcctccttcgtccctccccccgactccgacgccgacaacctcctcgatcacgcgtggaggctgtacaagaaggggaggagcatcgagctgctcgacccggcggtgaagtcggcggcggcgacggagcaggtggagctgctggtgcggatcgggctgctgtgcgtgcaggccgacccgcggatgaggccggacatgaagcgggtggtgatcatcctgtccaagaagcagagcacgctggaggagccgacgcggccgggcgtccccgggtcgcggtaccggcggaggtcgtacggcacgcgcggcggcggcggcggctcccacttctccgtcgggtccacgtccgggaccagctcgccgtcgacgtccaccaccgcgtcgcacgccaccacgtcggccgcgtccaacgccatgacgacgacgacgtcgagcacccacaccatgcggagccaggggctccccttgcaccgggaagagagaggagtggaattgaagaaagatgatgaaagcggctga

SEQ ID NO: 45640 - DNA, 2506 bp, Oryza sativa
  Clone ID: PAT_MRT4530_48586C.1
acgaggctacaaccctgccggtcagctctgctttccccaacgcgttctcaaccctactccatcccacttcgttgtcatctctgatgaatcttttctctcctgctgcaggctgcgtgtgcgcggaggaaaggaatctttatggagccaaaatttcgcagagataggaatggaatccttacgaagccaaaatttcgcagagaggaggatatctgtttgaggaaaaaaaggacggggtctcccttcctgcaacagaaccgcgtgatgatgttaccgtttgatgtgacgtaccttagtttgtacgcgagattcaacaagatgaaggggccggtgggcaaggcgtcacttatttgcggaggaaaggaaacccatgatgccaaaattttgcagataggagatggaggagattcagttcattgtggatgtcgagtctttttcggttcggccgccggagatggacgctgtgccgtgcgctgaccgccggcggcagcaagcaagccgaggataactcaggtgtttttcgagatcccggcgagcgtggattcagcacaaggcccaatctttctttggaacagttgagtgttggccctggggacactgcggacttactgcggaaagtacttccaggcattcgtgatgcaagtaagacctttgctatccctgcgttgaagcaagtgtttgaggacagcattcgtccactacttgtttcaaagtgtttactcattcaccagcctcttgataaatccatgaaaactttcaaccaaagaacaaataacctgttgaagaagtctccacgctacctcagtgccctagatgtgaccacagaaaaggaaatcctgctggaagatgaatggactttgttccttgagcacatctttaaacatagggtcattgttgtagatgattggacaaagtgctacgggaccgttcagaccttcctccactcgagtgatgctgaatcatgcagtgattctttcaagggggagtgtgatgcttcattctgtgagcaaactggaaaggcaaaacttgcctttgtcatctttaaagagggtaaacttgtctgggctgaggttttccatgaggtaccttgcaagagtgttgtggaggcagaggctttggcagtcatagctctcctcttcaagcttattgaccttaacttgttaagagggactgtttggaccgacaacaaggtctgttataatgtgctgaatggtgaatatgagataaaggttgatgatcccaacaggtcgctgtttctgtttctgaggagtttgagaggtcgctttgagtccttgaccccggtctggaaacccagagaactactgctgatcccagatcgtctggttagtatggttgatgaccccctgatatcaaggaatagattggtactcagtatactggaaaaaacagttccaattcttagtcagccgcagttcaggatatcatggagcagctatctgcgaacaatttttgacaaacgtgatggtggaaaacaaatttctaacacaacaaatgaaattaaggaatcagatgaatccgaggattcaatctgttgggttaaggctgatgatgaagaagctgaaattgcttcctttcttgaaattatgaaaactttttcagcccatcgcttgcttattgtggttgacaactttgaagacaaatctcctcattatcaaaagttaattaaggatctctctcaaaagttttacacgtgttggatgagtaaagaaggcagtgtcacaattgtggagtatgactctcctaacactgaagagaaagagaccaaaagattggtggttatgtttggtgggacaatggcactggatgaatatatccaccaaaaaaatctctgtacagttgttttggtgaagacatctgagattaagctgctaagagatgctggaatcgaagaaataagtgctaagacacttctgagttttcgcaacatcaaagcaaaaccagttgtgccaaagaaacctcgggaggatgaggatctagagaagggggggggagggcaggtggtgaataggatgaggagagggcaggtgtgaagataaggtggacaactcactgaacttcagtcttttgcatgattccttgcgacggcagattccttcggtcttttacatgtttgatactttgatgcatcgttgagacagttttttttgtacctgaatcatgatgttcatgtcacaaccgtacgtgatgctcaagtaatcttatctgacaatgtagcttagctaactaaaacatatgaagataaaggtggacaactcactgaacttcagtcttttgcatgattccttgcgacggcagattccttcagtcttttacatgtttgatacttgatgcatcgttgagacagttttttgtacctgaatgaatcatgatgttcatgtcccacccgtaaaaaaaaaaaaaaaaaaaaaaaaaaaaaaaaaaaaaaaaaaaaataaaaaaaaaaagaaaataataaaaaaaaaaaaaaaaaaataaatattttataaaa

SEQ ID NO: 45641 - DNA, 154 bp, Oryza sativa
  Clone ID: PAT_MRT4530_48587C.1
gacattttgcattatataatattggaaggtaaagatataattatttatccctcatttcttctgctatggcgatacatgctccatgtagattatcattcctctaatccctttactagtctgcccgatcagcactgaacactaaatccaatatgtt

SEQ ID NO: 45642 - DNA, 1488 bp, Oryza sativa
  Clone ID: PAT_MRT4530_48588C.1
atggggcctcacccacctagtagttattcagataaaaaaacttgccaaaatgtcccaccagaaaaacccagctccacgagtttctgccatccacaatttccgcagcacttactttcacatccagcatatgcaatgaatttccctttcccgccgtttcctcactatcctccatactcgcaaaatttccaatatgctgttccaccacaatatgctccatactcattaccgccacctgatggagctatgccatcaccatatgtaccagctacagttatgccatccaaggcaccctctgatcaaggcaccccacattcagtaactggtccaggacaacaagatgatgacgatgctgaacctgagaggactgctaggcgactagcatggacagaagaggaagacattagattgataagcacttggttgattaactacaagactgacaagtactgggataaggttgcagcagaatacaacagtgcaacccccggagctcggagaagggaagtgaagcatttgaagaaccgctggcagaggatgatcaataaggtggcacatttcaatgattgttggtgccgggtcatggcaaaatatcctagtggccagtcagagggcatgcaacagatggacaaaacttggctgatgtataataaggaagcacatgtgatgtatctcgaagaagcgaagcataagttcacctttggccattgctggaacgctgtttgggaccaacccaagtggaaagaatacatctcttctttctccgcaaaaagagtgatgcgatctgagtccggtggttacgtgtcatcttcggaagactctgaagatatgcaagaaggaaaatgcttagtggatcctctggacatgcttcccaagaaccatgaagatatgacagaagtccagccgtctgtctcaaatcaaaagaagcaattagaactattgacagctgatgcgtcgtggcctattgaatttcagcttgggaggcaccaattgatgactggaacatcaaaattgaacgaacatcagcagggggtggcagtgagggatgaaatgcttgaaaaagaatcgggcccacaagattttgaggtgctagacaatgagagagtggcaagggaagatgaacctaaaaaagaaacacagcctcatcaaggtttcaaggcgcgaaaggtcaatcggaaacgtaaaggcaaggcatcatcttcttcatgtgaggtgcaggaagacatcaaacatgcattatatcttcagaccatgcttaacaatgatcgtgagaaaatgtcagaggtacagctccgcctctcgaaagagcagcttgaattggccagaataaagcaggatgaagcgaatgtaaagaaagaaacagcactttacatgaaatacacagagctgttgctggcagacacttcaaggtttgatgagtttcagaaggcagagtatgagaaagcattgaagcatataggagggatactatttagcaaggatgtcaattag

SEQ ID NO: 45643 - DNA, 498 bp, Oryza sativa
  Clone ID: PAT_MRT4530_48589C.1
ccgggctgcaggaattcggcacgagggtaagtattctctctgtcccaaatatataggcttatatatagcaagatatctacttattttgagacggaggtaatacttttatataatacatcaacaattgttttcttttcattaatatttacttatcattcttatgaaaatttcttattttcactcatcgagagtatgaacttacacatgcatagcctaactcatagaatatgtagtcatacttcaagcacattttagtggagttttcttacctgtttagtttcattcattttcttaccatgctgttatgtttagcttttaatttgtatgagtttacaagatcactatatattttatgcttataatatgttagtttaatttgaaccaattaatgaagaaaacaaattgaatttaataaaagaactctactgttttaccttggatataattccaactgtattggaatttggtccctcaactatgaaagtgatcactattggt

SEQ ID NO: 45644 - DNA, 639 bp, Oryza sativa
  Clone ID: PAT_MRT4530_4858C.1
acaaggaggagaagccgtcaacaccgtcgcctgcccccgccgccgaggagataaaggccgccaccgcgggcgacaaggcgggggaggaggacggggagacggagaggcacgagttgaacggcggcaagaaggccggcgtcgtggtcggcgccttctcggccgccgcggtggtgggtctagccgccgtcgtgtggaagaagcggcaggccaacatccggcggtccaggtacgccgactactccgcccgcctcgagctcgtctgatcgttcgccggagctcctcaccggagtagtacactacatctacatctacagtagcatcagcagtacaaccccaccatatacgttcgtcgtctcagtgcagcagctccgcagatacacagattcgatgcatgccttccatggccgcgcttcaaattgctcctgtgatccgcgagatgttagattcttcatttcattcttgtgttaattattcttggtgttgaaaccattaaaattctttttctgtgaaaaaaaaagaggaataacgtaatggagtgatatggagatggataccaccgcagttttgtatacctagtagaatgatatactgctactcctaataattttgattagaacccaaaaaaaaaaaaaaaaaaaa

SEQ ID NO: 45645 - DNA, 432 bp, Oryza sativa
  Clone ID: PAT_MRT4530_48590C.1
aagggccggacttcagcatgaaaaccatacagaaatcagagaactaatcgtcatgggtacagaagatcagcacagccggggatctaataaacatgagatgacctaattaggactaatcatgcatgcatgaactgggtcagcacgtaaaggaattttcgatctaccagaaaaaataaagggaaaaaccccctggctggaccaaggatggatcaacgccagcgcctaaaaatcaccatgaatcgatcagctcatgcgagggcgtcccaacttgaaagggcctgccgaccgaccgacgccgttgaggtagaagccagcttgccaatgatgtttctgaggcctgaggacgattaccccgccgggccggccgttgtggggggggaccatggcccatgggcgtccctgtgaattgccccaccagcccatgcttgatgc

SEQ ID NO: 45646 - DNA, 421 bp, Oryza sativa
  Clone ID: PAT_MRT4530_48591C.1
gccctagtctgctcctctggactcccaatctataagcatctattccggcggaggaaacggacgcactcttgtaactctcgttgcacagatacatcccaagcttcattttgatgagtgacttccacatctcatgcatgctattaatgtacataccaatattctaattctagaactaacttgtacctctatctaaaactgttatcaatcatagatccactgcttaacaacaagcctcttagagaaattctcaaactatttgtagtcactgtcagaaattattgttttgtaccatgccttaccagcagccttgatcttagaagacatctgcggactgagcttgttcctctttgagtcaagcttataagtcctggctttgacacgcgcagccttagcgagagcttgtcatcttgcgctcagtgcc

SEQ ID NO: 45647 - DNA, 198 bp, Oryza sativa
  unsure (1)..(198): unsure at all n locations
  Clone ID: PAT_MRT4530_48592C.1
ctgcagcaagcaaaatttacgccaaacatggtagatgcagtcatctgtatgcatcttacatcagtatcatatctaattagacattagatcacctcaaagatgatgacgcacacccatcttccatctccatcaaaaggcatgcgtccatggataaccagccgattcagtatcctnncagctccgccgccgcacgaagga

SEQ ID NO: 45648 - DNA, 321 bp, Oryza sativa
  Clone ID: PAT_MRT4530_48593C.1
atgacggaggcggaaagaaggggagccggtggatccgccgcttcacggtgccgcgaaggttatcgtctcgcggccgaggggagccgacggcgaacgaaggcggcgtcccggtcgtcgtcgtcgaggagggcagccgccggcgtaggcggggagaagggcacccgccgccgaaggtggggaggaggcggaccacataaggttccgcctgcaaaaatcatatttttccaggcggaccacttaagaggtccgcctgcgaaaataaagctcaaggcgcagaagatcccattaatctctgatgacttaagcttgacgattgcatga

SEQ ID NO: 45649 - DNA, 1287 bp, Oryza sativa
  Clone ID: PAT_MRT4530_48594C.1
ctatgacactgctaaatcatcagcaaccaggtacatgatttgtgccggagtaggagccaaaacaggggcctccgccggatcgcagacactacccatagctgccagttcatgagctactctgttatatagccgaggtacatgactaacactccaggaaatgaaattcaggcgcagtaaggattgaagctctgccaccaggaacgacacgtcgctcagctcgaaatcgtttgtgtagaccgcttggatcacagccgtcgcgtctgtctcaatttactgccacattttcaagtgttgataataaaagcattcaaaatggacagctccagtgttttcccatacatcccatcattacaacacgcggaaggccacaacaaaaagaacacatttcgaacacgtatagaagctagtgagtgtatcgtctcaaatggctccgaagcacacagccgcgaaggatctgaaacaggagacactcagaagcgaaggaatcgatcgcggaaatagagatgcccccccaggattgctacacaggatcaggatgactctcgactgaaacttctgctttggtatctacggttgcatctcgcgggcactattcatggcttcttggaggctacacacggctttgtcatacatcagaaaacccatgaaccagaactcgtggccttcaactgaaacaacctgaatatacttttcagcagggtttactttgctcactgaaggattagccgctcttagctggtgcagaggaatgaccaccttgtagtaactccattcagcaaaagtttgcctgaatattttttcatagccaccttctgctaagactttagttccttgagcaagccgtcccatagcagcttcagtaaaactaggtcctgtcttgaagtgctgccacgtgtcccggctgaggctctcgaccatcttggtcgtctcccccaccgacttcccccacctggacagcgtctccttcatggcctccaccgcgcccttggaggacgaggaggcggggccgcgggagacgtactggctggactcggcggcctcggcggtggcggccgccacataggtgggcgactccgacgtcagcttctcgctccacgtgacggtcttctgcccctgcggctgcgcggggggaggcggatcggcggtggcggcggccacggcgacggggggcggcggcggcggaggggaggaggggtcggaggcggcgggggggtcgtcggatctgggcaccgcgggcgcctcggcggcggcggcggcggccggcggaatctcggcgggcgtctgcat

SEQ ID NO: 45650 - DNA, 909 bp, Oryza sativa
  Clone ID: PAT_MRT4530_48595C.1
caagtgttgataataaaagcattcaaaatggacagctccagtgttttcccatacttcccatcattacaacacgcggaaggccacaacaaaaagaacacttttcgaacacgtatagaagctagtgagtgtatcgtctcaaatggctccgaagcacacagccgcgaaggatctgaaacaggagacactcagaagcgaaggaatcgatcgcggaaatagagatgcccccccaggattgctacacaggatcaggatgactctcgactgaaacttctgctttggtatctacggttgcatctcgcgggcactattcatggcttcttggaggctacacacggctttgtcatacatcagaaaacccatgaaccagaactcgtggccttcaactgaaacaacctgaatatacttttcagcagggtttactttgctcactgaaggattagccgctcttagctggtgcagaggaatgaccaccttgtagtaactccattcagttttatttccagctttgtaagagagaggattgtcgctgcagaatgcaattttagctgtagaaatgtacatgactcccatgacaggaccagcagatgttgatagatagcatgcataagatattttcagctgctcctcaggaagaacctcaaaagtttgcctgaatattttttcatagccaccttctgctaagactttagttccttgagcaagccgtcccatagcagcttcagtaaaactaggtcctgtcttgaagtgctgccacgtgtcccggctgaggctctcgaccatcttggtcgtctcccccaccgacttcccccacctggacagcgtctccttcatggcctccaccgcgcccttggaggacgaggaggcggggccgcgggagacgtactggctggactcggcggcctcggcggt

SEQ ID NO: 45651 - DNA, 387 bp, Oryza sativa
  Clone ID: PAT_MRT4530_48596C.1
atgggtcataccaacctccactccgccggaagcaggtgcaacgtggaagcacggttgtttgctgatgacgtgaccggcgtcagaccagtcacaaaccggagagacgaaagtgctatctttgatctcgccgagcacgaattcgaggtggaaggctatcctgttgtcgactacgagtcagatcgtcagaccgccatgcaaccgcgccttgccgttgcgaaacggcttcgaccgctggtggacgaggaagctgttgctcatgggacggtggttgccactgtcgccgacgccgcgatgttcgactcgaaagcgcggcttgaggccctcctcgacttccacttcaatgtccgggaggtcaagatggggacctaccgtccctttgtcctctag

SEQ ID NO: 45652 - DNA, 299 bp, Oryza sativa
  Clone ID: PAT_MRT4530_48597C.1
aatgacaggcgatttttggacgggggaagcatcgagtgctgagaatgtgttcatggcgaagaccgtcgagcgggctgagcgacgccaggaaatggcaccaccaatggcaacagcgccgaagaccactgaggcatgtgagctcaccgctgctgcggcggccctgcttgctgtggctcaacgagcgtgattggtgctccacgggcacatcggaggagcacctctggtattgaagataagggggacagccgagggactgaggcatatggagcttaaacaactgggccccacatatcgggtgt

SEQ ID NO: 45653 - DNA, 2307 bp, Oryza sativa
  Clone ID: PAT_MRT4530_48598C.1
atgtgtgtttgtgtgtgcgtcggtcgccgcgctgatcgctggggtttggtgtggtgtggtgtggtgggcctggcagatgcggtgcaggagcgggtgcggtcgtggctgtcgcgggcgaggggcgccatcgccgacgcggcgaacgcggcgcgggagaaggggaggagcaaggaggaggcggaggggaggaagaagcggcggaaggaggcgctcgaggagtattcagtaggcgcggcgcaggagatcaccgtcgtacggcgggtcgttcgtgtctagagatcactctgatttgtagtcacgttcaaagaagtttgcattttaaatgggtttatttataactatgcttgcgtgggattatccatatggtgaagaagatgactcaggatcttcactagataactgttcgattctgggaagacttgttgtatgagatgcctttgttctgattgcccttgctgtggaaagtatagctcattcctaaacggatcattatcgcttaagcgcccttgtcgggtccgatatggtgatttctatagaaatatggacaacataccttactattctattctgggaagatttgtgggagaagatgcctttgaccgaattgcaccttttgtggcatgtgcaactgatatttaaacggctcattatctcttcagggcccttgtcggttctgaaaaacactgcgtggcctggacacttaaccttgaccaacaaggacactctattttgaggccattggactgacaagtaccaataaaccattgaagcttgaccttacagatcgtaattcaaggggtgagaaggcaaaggttggaccatttggatccagattgttcgactctgccgtatctgtttcatactggttcagtgtcaaatgagtggacattggagtttgttgattttggtggagagatgagacgagatgtatggctcgcattcattagtgaaatcatttctgtgtataggttcattaatgaatatggaccaagggatgatgatccagcaactgcatcatgtatatggtgcccacaggggcaagcattggagtttgttgattttggtggagagatgagacgagatgtatggctcgcattcattagtgaaatcatttctgtgtataggttcattaatgaatatggaccaagggatgatgatccagcaattcatcatgtatatggtgcccacagaggcaagaaaagagctactttagcggttaagttctggggcgggccacttgttacgaactccaaagcagcaagtcaaagagcatctcagtggcatagaccttcagaagactcatctagcgcccatgctcatatttttgacatagatggtagtgtatacttgcgcaagtggatgacatctcccagttggacatccagccactcggccaacttttggagaaactcctcagttaagcatggtgtaatattgagcaaatctttagttgtagctgataaaaatcttgtagaaaaggctatggttgcctgtaaagagaagagcaaaatagttgaaaggacacaggccacaattgttgccgctactattgaaggtattccaagcaacattgacctcttcaaggagcttatacttccttttgcaatagtgagtgaaaaattctacaagctcaaacgctgggaaaattctcgtacaaccgcttgttttctacttgtggtttatactattatcttcaggaacatgctttcttatgttcttccattttccttgatgatgttggctctttccatgcttgccctgaaagggctgaaagaacaaggtcggttgggtagatcttttggcaaagtgacaataaaagatcaaccaccttcaaacacaatccaaaagattatagctcttaaagaggcaatggcttcagtggagaattatcttcagaacctgaatctctctcttcttaaaatacgcacaatctttttagcaggccaacctgaggtaacgactcaggttgctcttgttcttctagcatcatctgctgttcttcttgtggttcctttcaaatatgttcttgcattttttatgtttgatcaattcacgagggaactagaattccggagggagatggtcaaggcgttcatgagcttcatgaaggaacggtgggaatctatacatgctgctcctgtggtcgtgttaccatatgaggacggtggcgaacaacataacaagacactcccaccaaaatctacgcagcaaacacaatctggtagtgtacaatctactgatacgtatatgaatttaagcaatggaacttacactcttgatatttgaagttgtgagcgctttgctggt

SEQ ID NO: 45654 - DNA, 837 bp, Oryza sativa
  Clone ID: PAT_MRT4530_48599C.1
atggcgactcggacggtggtgaggcagaggcggtggtggttgtttcgcatcctagtcgcccctgaggcgggagggccgcggcggctgcgtcgggggcggccggcgccgggcgggaggccgcggccggcgccgccagcggtgggcggcgcggccggtagtgggcagcgtggcaagcggcaggcaaggggcactgctggcggtgctatcaacggtgggcttccccgcgcatcgacggaggcttcgatagctgatctggcaactgcggcgaatgcaggcgccggcaacggaaaaggcggcaactccctcggcccttccacgcgcggatcgagcgacgggctcgagcgggaggccgggagcggctctcccctgcccttccccatgcggatccggcggtgggctcaagcgggaggatcaaaaggctcagatacccctcatgctgtcccgcaccgcccccacctccgtatcacaccgtccgcccgcatcacaccgcctgcccttggacgcccccgttacctcctccttcatgccacttggcgctgcctccgtggcgcccccgtttttcccgtcgatatgggcttggacccgagctcccggtcctatataaaggaccccctagtcgtcctctacctatcccctcaaatcccgtcttccgccgtcgccggaaacgctctccccgcgctcgccttctctctccacctccggccgctgctccagccgccgtgcgccgtcgctgtggtcgtcgccttcggtcgccactgccgccattgggttcacgaggaggagaagaagatcgtcctccacttccccgaagccgaaatccacctgatgaggacataa

SEQ ID NO: 45655 - DNA, 278 bp, Oryza sativa
  unsure (1)..(278): unsure at all n locations
  Clone ID: PAT_MRT4530_4859C.1
cccgcgtccggaaacacgcaccaagaaaccaggagtgagggagaagaagataagggaagagagagcgagagagagagagagaggggggtagnaaagcaactaagnctagnctncgctacgcatggcgaggagccntccttgcctcgccgtcgctgcgcnnnnccttggagnggcggcggcggcgattggagcctttgctgatgaagaagcggcgagcggncggggactagggnatggcgnccgtnccctagnaggcgaggccgcgctgcgnatgagaa

SEQ ID NO: 45656 - DNA, 336 bp, Oryza sativa
  unsure (1)..(336): unsure at all n locations
  Clone ID: PAT_MRT4530_485C.1
aaaaaaaaaaaaaaaaaaaaaaaaaaaaaaaaaaaaaaaaaaaaaaaaaaaaaaaaaaaaaaaaaaaaaaaaaaaaaaaaaaaaaaaaaaggggcggcccccctaaaagaacccaacctaaccaacccctccatccaacaaaaaagggggttgttgggggcaccaaaataaaatccactggccgccntttaacaacgccggaactggaaaaaccctgccgtaacccaacnaaancccctggcaacacatccccctttccccagctggcttaataccaaaaaggccccaaccaagcgccttttcaactttttttttttttttttttttttttacccc

SEQ ID NO: 45657 - DNA, 1606 bp, Oryza sativa
  Clone ID: PAT_MRT4530_48600C.1
ccggccgggaaaaaaaaaaactctcgatctctcccaccaccatggctgctgcacctgcacggctcgtcgtccttgtcctcgtggcggtcgtcgtcgtcgtcggcggcgacggcgacgccggcgtcatccggcaggtgacggacggcgggtactggccgccggggctgctcccggaggcccagttcgcggcgttcgtgcggcggcacgggcgggagtactccgggccggaggagtacgcgcggcggctgcgcgtgttcgccgccaacctcgcccgcgccgcggcgcaccaggcgctcgacccgaccgcgcgccacggcgtcaccccgttctccgacctcacccgggaggagttcgaggcgcgcttgacgggcctcgccgccgacgttggcgacgacgtccggaggcggccgatgccgtccgccgcgccggccacggaggaggaggtgtccggcctccccgccagcttcgactggcgtgacaggggcgccgtgaccgacgtcaagatgcagggcgcgtgcggctcctgctgggccttcagcaccaccggcgccgtcgagggcgccaacttcctcgccaccggcaacctcctcgacctcagcgagcagcagctcgtcgactgcgaccacacgtgcgacgcggagaagaagacggagtgcgacagcgggtgcggcggcgggctgatgacgaacgcctacgcctacctgatgagctcgggggggctgatggagcagagcgcgtacccatacacgggcgcgcaggggacgtgccggttcgacgccaaccgggtcgccgtccgcgtcgccaacttcaccgtcgtcgcgccgccgggcggcaacgacggcgacggcgacgcgcagatgcgggcggcgctggtgcggcacggcccgctagccgtgggtctgaacgcggcgtacatgcagacgtacgtgggcggggtgtcgtgcccgctggtgtgcccgcgcgcgtgggtgaaccacggcgtgctcctcgtcggctacggcgagcgtgggttcgcggcgctgcggctgggccaccgcccctactggatcatcaagaactcgtgggggaaggcgtggggggagcagggctactaccggctctgccgcggccgcaacgtctgcggcgtcgacaccatggtctccgccgtcgctgtcgccccgccgccgccgtgatcgattgatcgatatcgatcggccgccggcgatctcacgttaccgatgtgttatgtgaagtacggagtactactgtatactggatgtgcttgattaaagctttgcttggttagcggtgggagacgtggcggtagtaggtgcttagtactacgttttacaaatggttttacatagttgggttgtatgtcgatctactactagtgaatacagaataacaaaaagttatggacgtgtacagattaagctagggtatattgaagtcatcttcaagggctttattattaaaccaaaaaaaaaaaaactcgagcactcgagtgccgacccctcacccacttcgccctagagtgtgtcctttgctaccaaaaaaaaaaaaaaaaaaaaactcgagggggggcccggtacccaattcgccctatagtgagtcgtatacaatt

SEQ ID NO: 45658 - DNA, 657 bp, Oryza sativa
  Clone ID: PAT_MRT4530_48601C.1
cgcacatcgcgtttctcctcgaggccgcgaagagagaagggggagggaggactgaggcagcggcggcggtagcagtgaaggcacacggcgcatggtggcggtggtggcggctgcctcctctcgcacagcaagggcgccgggcggaggtctgggcggcgctgggcggaggtcagggcagcgcacggcggttggatttggcgctgagacctcatggcggcggcacttggcggcgggagcggctccccacagcgaggaggcgcacggcaggagctgggcgacgccggtggcatagcagatctggtgcaaggagcaaggacataccaggctgcaccaaatttattaagactggcttgcaaaatgaagagctacttgagaagatgtttgaagatatccgcaataccggtgctaaccattggtctttggggcaaggcaccataccaacagccatggatgcatttcgtgattacctagccggtcgtattgcaggttgatggacatatatcgtattttgtgttgttttgcggtcttatgctctatctttcgatgataatggtactagttattattactaaatatatgtcatgcaacaactttaatttttactttattttggagtaccaatcatataatgattgattgaatgtgttcccccctccc

SEQ ID NO: 45659 - DNA, 243 bp, Oryza sativa
  Clone ID: PAT_MRT4530_48602C.1
gaagatgatggttatttttttgcagggttgaaaatgattgtgtttttatcccagggttctcatcaccagcgactacccaccatggtatgcaccacctttttactacagcccctggaaccaacgttggactaaccacgcccaccggaacacatctttgagatcaccggcgccatcttgctcatgttttgcatccgcatgcccatcttaataatttgctgctgcccgagcccaatccaaataact

SEQ ID NO: 45660 - DNA, 380 bp, Oryza sativa
  Clone ID: PAT_MRT4530_48603C.1
ggaaaccatggtttatctaaagaaggcccattacagccaattaacattacctaagggaattacaaaccatcccatttggaacttggtaacaacgcaaaccgtattctatacacatcaatcagattgaaccccttggaagctttacattgggcactgagaaaacggatctgctcttacatcaaaaggaataaaatctacacacatttatcctctaactcctagaccaatatgaaggaactctttttagctggaacaaaatataacacctgctatctaaccatgccggaacgcattctacttttccattgtattgaacctgtgccggaccatgggaccacctaacttgtagggttacaatggcttgaggtgacaagctaagc

SEQ ID NO: 45661 - DNA, 1045 bp, Oryza sativa
  Clone ID: PAT_MRT4530_48604C.1
accaattatcatgtacatgaagtgatcaaatctcacccacaagcatatctctcgcaccattccaccctatagaaacgagataacaagacgctgtttgcactagctatttgacagccgacaagaaccagttaggtaaaactcagtaggatgcaggtttgaatggctgaatgccaacctctgcaactgcaagaaggcaagaaactgcaagagctgcagccatacgatggctgcaatccttcagtgtacagaggcccaattctgctgccccggcaggccaactcggcgccgccggccgtgccgccggagatgtcgtcctcgtcggggtcagggagaagcgcgacggaggcgagagcgttgaagatccacagcgaggctgaacggcggcggcgagagaggatcaatgctcatctgacaacactgaggagaatgatccctgatactaagcagatggacaaggccaccttgttagccagagtggtggaccaagtgaaggatctgaagaggaaagcaagtgagatcacacaaagaacacctctccctccagagaccaacgaagtctccatcgaatgcttcaccggagacgctgccaccgccgccaccactgtcgccggcaaccacaagaccttgtacatcaaggcttccatcagctgcgacgaccggccggacctcatcgccgggatcacccacgcattccatggcctgaggctgaggacggtcagagcagagatgacatcactgggaggaagggtgcagcatgtgttcatattgtgcagggaggaaggcattgcaggtggtgtgagcctcaagtctctgaaggaggctgtcaggcaggcactagccaaggttgcctctcctgaattggtatatggcagcagtcactttcagagcaagaggcagaggatcctggagtcacattgctcaattatgtccatatagatttgttcctcttctggggattttgattttatttttctactagctgagaatatgtatgaaataagagagagaatcttcttcttctgagagctaaaaaaaaaaaaaaaaa

SEQ ID NO: 45662 - DNA, 480 bp, Oryza sativa
  Clone ID: PAT_MRT4530_48605C.1
ttaatatcaggagttacagattgttacagaaactggagttgtagcatctttgctgggatttcaccaggccctcagtatcagccaccacagttaggtaggatgaaccttttgggttgcagatcattgccatcaatctatatgtctcagctccgaaaacggagatgaagaaagatccaagatacagtaccggatattctacagcaagtcaccgctgttagctgttcttgatggatttcctcatgccacattcaataagtctatttatatgtgcttacataattgtgttcatcatatttgcagctgaaaatattttggtgaattcagtaagacgggggagaagatacttaacttcaacattctttgttaaaggcattacccacagatcatatagcttagatagcacttcaggattaactttgcacctcactgttacctgcattgccttcttgcttgtcagcattgttcttcaaagtgacattt

SEQ ID NO: 45663 - DNA, 309 bp, Oryza sativa
  Clone ID: PAT_MRT4530_48606C.1
tcactgcctctgcctctgcctctgcctttgcctctcccgctgttgccaactccagagttgccaaggaaaggccatcttcatcaactgctggtgaaggtgaaccacaggaaacggtgctaaagcttccaagcatcccaacacttcaaggtgaccaacaagcacactgagggaaggcgccctgtctacgccattgtcttcaatttcctcgatgttcgctactacgacatcttcgccaccgcctgtggccctcgtgtaagatttcttacgaggcgccatattgatcttactagggaagtagtagcgcttcat

SEQ ID NO: 45664 - DNA, 330 bp, Oryza sativa
  Clone ID: PAT_MRT4530_48607C.1
gtcgtcagtgcctgccctgttacctgttcgatcctcctctcgattcccttgagagaagccaaggaggagcaggagagcggccggccatggagggagaggggattgggaggagaggccttccttcactgctcggttcctcttccagcgaaagcggcggaatcgggcaagaacacattgcctctgacatcacgcagctcataggatggacgccactggtcgagctgaagcgaatcgccagcaaggacggaatagatgcccggatcgtcggcaaggtcgaggcctatcagcccctctgctccgtcaaggatcgcagcgctttgagaatgatcg

SEQ ID NO: 45665 - DNA, 1528 bp, Oryza sativa
  Clone ID: PAT_MRT4530_48608C.1
ccggccagaccccgcccgccgccgctccctattcctatttaatcccatctctcttcctcatcaccgctctcctctctccaggcaagaggaagtacgcaacctcaagccggacaagacgtgagcaaagatgggccccactagtaggaaccataaatcatctcaaaaagatgtggcaccgaatgaagccaaaccaccccgatatccacagcgcaaccgctccatcactgcctctgcctctgcctctgcctttgcctctcccgctgttgccaactccagagttgccaaggaaaggccatcttcatcaactgctggtgaaggtgaaccacaggaaacggtgctaaagcttccaagcatcccaacacttcctgcacggatggcaaagttggtgccattagaggggttgggatgcgaggcagcggtgggatcgctaacaccgagtcgggagcgagaatacaaggtgaccaacaagcacactgagggaaggcgccctgtctacgccattgtcttcaatttcctcgatgttcgctactacgacatcttcgccaccgcctgtggccctcgtctttcaacctaccgctgcctcatgaatggcaaatttgctcttctgcaaagctatcttgatgacgatatgaatgagtcattcttcactgtgagctgggcttgcgacattgatggcaatccattgttagtagctgcaggaagcactggaatcattcgagtcatcaactgtgccactgagaagatatataagagtcttgttggccatggtggttcagtaaacgaaataaagtctcaaccatcgaatccttcactcatcatttctgcaagcaaggatgaatctattaagctgtggaatgtgcagacagggatcttaattttggtttttggtggagtaggaggtcaccgacacgaagtacttggtgttgacttccacacatctgatatctaccgctttttaagttgtggaatggacaacactgtgagaatctggtcaatgaaagaattctgggaatatgttgagaaatcctattcatggactgatgctacatcaaaatttccaacaaaatttgtccaatttccggtcctgtgtgctgaaatacattctaactatgtagactgtactaaatggcttggggactttgtcctgtcaaagagtgttgaaaatgaaatcttgctgtgggaatcgatcacaaaagaagaaaaccctggcgagggtcacattgatgttcttcagaagtaccctgtgccagaatgtaacatctggttcatgaaattctcatgtgattttcaccacaatcagttggcaataggaaaccgtgatggtaaagtctatgtctggaaagtacagaccagccctcctgttctaattgctcggctcaataatccacaagtgaaatcagccataaggcagactgcagtgtcctttgatggaagcacaatccttgcctgcacagaggatggcaacatatggcgttgggatgaagtggatcacccaaccgccccagtcccaagcaagaaacaaaagtga

SEQ ID NO: 45666 - DNA, 429 bp, Oryza sativa
  Clone ID: PAT_MRT4530_48609C.1
atgatgacggtggaggggacggattcgacggtgacggtgctcgggaccgctagatccgccttcacaatagtgaagaaaagggtggtcgaggtaaaagaggtggatccggcggccgctgccacgacgacagcggctgctaccatgacgaccaccgagcctcaagaaggttctagtggctccaaccccctcccctcttctagatccggcaggcagtggctcggagctcgggtggtggatccagaggctcgggatggtggggtcgccacaggtggtggagctcggtcacaggaggcgggtggcggattcggtgatggctcaggcacggcggcgcatccgaaggcggagctcaagcgtgggtggcggatttgggttttttttttttgctcgaaaataatttttcctggtggtcagcttaacctagctacttaa

SEQ ID NO: 45667 - DNA, 702 bp, Oryza sativa
  Clone ID: PAT_MRT4530_4860C.1
atggagcccgagagcgccgcgccggtttccttcccctccggccgccctctcccccttccaaccctatataaaccctccccgcgcctccctcgcccgtttccgcccttgccgcaccgtctcctcgccggaatcgagctcgcgccattgccctctctctcctccgtcgccgacgacctccggccggccttctccgctcgccgggaccgtctcccgccccggcgtcgcctcctccggcttcgccgcactgccgtcgaccccgtccaacccctcgtcgagcccgcggaccgccggaacgccgtcgacccagacgacccgagccgcgccgccgccttcctccgctccggccgcctttttcgtcgtcgccgtcgacctaaggtgagccgcggaccgccgcctcttttcccccttcccttcccctctctcggccgccgctccgccgtgcctatggccgccgccggcgaccataggggcgcgggcgccgcctcccgccggccacgccgagtggccgccacgtggggcccggccgtcagccgccagggccctcgggtgcggctgacgcgtggggcccacggcgccggccggtgcgagcccgggtgcgcccggtccaccgtggaccacgttgcagcttcggaagatccgctctttgtggaggttgaagccgacgtttgggaaagtgagcgaggcaagtcacatcatccttga

SEQ ID NO: 45668 - DNA, 1108 bp, Oryza sativa
  Clone ID: PAT_MRT4530_48610C.1
atgccggagaagccggggccgtccgatctaatggatgtgggcggcggcggcgccctccccgagcgtctgcggtggcggccttccccagcgcggacagcagcggtgacccttcgccccatcctctcgctcttctctccctcggatccgcaccggcggcggctccctccaccccgtatcgcctccctcgccccctcctctccctctcgcctcgtggtagccggcggtgaccatgactgcggtgggaggaggcatggcggcctcggacggctagccgagggtgtggcagacggctgcgtctggccggcgtgacagcgtttggaggaggggtcagagactggcttggcacagctaggcgcagcggaggctagctcagcgcgagaggcgcgggcggcggagatggaagccggcttagcacgagaggcgcggccgatggagggaggcctgattggcgcgagaggcgcgtccggtggaggaggctggcttggcacgagaggcgcggccggcggtggaggaggcgacctcggtgcgaggtggagctgtcggtgggtgtggcgcggtcttcggcgcacgaaggttggccggcggggggcgctggtgcagggtcccacatgtcggcagaggttgagtggtggtggagcatcggtgtgtcagccgtggattcgcaggtggtgagcggcgggtgaaaacccagcccggccttggccggaccgacaacgatggtcattccccctcctgagagcgttgtcgtgctgtctcacccctcaagggtggttgccgggcgaaagcccgctcttggctcttttgagccccaacggacggcggcggcggttttccgtcgtttctcttcttgaagacgtcattttggcataccctaggtggggcgatctcgtctgtgttcctttgttggtctagcggcggccggtctggtgctagccttctcccgggcttgtgtgttagcgttgtcgatgtgtgggtggtggtatattttttttcctttttcctggttacgattctccagggttgtaatcttgtaatttttttcctactctatcaatagaacttcgcactgtctcgtgcaagttgtccaaaaaaaaaaaaaaaagcggcc

SEQ ID NO: 45669 - DNA, 1355 bp, Oryza sativa
  Clone ID: PAT_MRT4530_48611C.1
tcctcctcctcctcctcctctctcccctcgtcgccgccgtagccggggggcgccgcggcgaagccgccgatgcggccgggtccagccgcggacgccgccttcgtcgatccacgccgcgccgttggtaggaagaacatgctatgtgtttgagcaaagattttctgaattagtcgtctcctgcagcaggctattaggttattagtgcaagacaacttcctagttcattttgtaaattgtaactcttcgcacaaacagtcaaatagtctccactctccagtggctattgaccaatcaccatggagaccccgacaaatctcaccaacacaatatctgcagttcacctgttaaaaatcaatggatattcagtaaccagagcacttggttgttcagagtatatctcgtcgaggagattggctgcaggtggatatgattgggaagttctttactatccacgctattatgagcatggtgtgtactggatagcacttcgacttatgtttatgagcaaggaatgtaagcatgaggtgaaggcagctcttaaatgtcagttagtacatgaggcacaaatttatctgccatccggaagtaaaagtgtatcctctaaatatacagggcaacgagattgcgggccagcgctcctgcttgtaaaacaagatgatttgccaggatccaattatttcatcggggattcctttgttgtggagtgcaccatcactgtgttaagagagccacaggaagctgtgactaatgtttctccaaatgtttccaatccatgctgtgacttgcaaatgcaccttggtgaactcttgctgagtgaaaagggggcagatgtcacgtttgttgttgcaggtgaatctttcttggcacacaagatcatcctcgctgctagatcccctgtcttcatggctgagttctttggacccatgaaggagagtagctcacagtgtgtggagatcaaggacatagaggcatcagtcttcaaggccatgcttcatttcatttacactggtacatcaccggagcttgatcagcagcatgtcgtcagtgactcggagcaggacatcacaacaatgacacagcatttgcttgttgctgcagacaggtatggattggacaggctcaaactgatctgccaagataggctccacgatgacatcaatgtggagactgttgcgacaactttggctttcgcagagcagcatagctgtacacagctgaaggacaggtgcatcgagttcatcatctcttctcgtgcaaatcttgatgctgttatggcaacagagggttataagcttgtgatagcaagctgcccgtcggttctaagtacccttctgagggcagcggttgggagatag

SEQ ID NO: 45670 - DNA, 169 bp, Oryza sativa
  unsure (1)..(169): unsure at all n locations
  Clone ID: PAT_MRT4530_48612C.1
cccggaaaatatactcattggggccttatactcccaaaattttcttccttatcgacccntggaaaaagattccaccaanagccagacccaactccacctattgggttttacgtcaacnatacgtagagtaactccccatataggagtaaaaaccagacgtaataaaaaa

SEQ ID NO: 45671 - DNA, 322 bp, Oryza sativa
  Clone ID: PAT_MRT4530_48613C.1
ctccaaggaaggtatttcaattcattccgagggagagcaccttgcaactcacgcaccgtaaccaaagcaaactcaatacatgggatcattacggccaaacaacccctaacactgtatggagggatcgagggcttatcgactcaagagagccactgtgcacaatgccggctgatgtcgctagtaacttgctctagccacgggtgggtgaggctgactcggcgccaacgaccataccaacgcggttggggaggaagtccatggtcaccggcgttcacaccggaaccacgtcgatttcggcgtcgggcatgttcttgaggatcat

SEQ ID NO: 45672 - DNA, 149 bp, Oryza sativa
  Clone ID: PAT_MRT4530_48614C.1
ttattttcagcacgccaacccagcaacacggggaggacagttaattgccatggaggccaccaaaccatataactaacgatcgggaacgaagcatacgcaatcacaccaagatcacagttatgcgaacccactgctacagcccctaagat

SEQ ID NO: 45673 - DNA, 554 bp, Oryza sativa
  unsure (1)..(554): unsure at all n locations
  Clone ID: PAT_MRT4530_48615C.1
aaacaagaagatctactttgagaagtagatcaaaagagaaaaataaataaggttttggaagcatacatgcatataaggaaattaataaaagcctgaaatcacgaaagattacaagatgccacctaataaacctcgtgcaagagacaaaagtgtcttagatgccactaattatttcttgacgtacgattgaataaaacagacaaaagcttgatagattgtggatttgtggtaggcggccgtcctgaagatggcttcctccacgaaatgcctgttgaaaaagtaattttgcgtctacgccgtgtcatggtgtagatcgacaacatgtttgaattgccaaagaaattaagggcggtgaaggaaaaagcaggctgaattaaggaagcagtcatcaaattgattggagtagcgagtagcgactgtcgtgttgatgttggtaccttgagttttggtagcatccatcaaattgagatggctgcnagtagcttgntcgatctccatctccatggtgacctccaggtgggattcttggagtngattgaataagatttgcttga

SEQ ID NO: 45674 - DNA, 423 bp, Oryza sativa
  Clone ID: PAT_MRT4530_48616C.1
atggtgtgttgcgtgctaggagcaagtgggcacaggggttgttttggtggggcccggttgtccagaggggttacagatacaggtgcgagcaactgggaggcgccggcggcgggcgcgggggcggccggcggagccgccgaggtcgccgtgaggcaccaccgcgccttgcccaccggtgcgccgacgaaggactccgggctcctctccgcgtgcttcttctgtgctaagattttcgtagcttcaaaggaacatttctcgtataaaactcataatgacatctgctgcacaagtgaaaatgggcatggtgatgttaccaaggtattcacagacaatggccttgaggttcttggctggcctgttctttttaatgtatcagtggatgcaatcaagggaagccacagtacagtctcctgtatggcgcag

SEQ ID NO: 45675 - DNA, 127 bp, Oryza sativa
  Clone ID: PAT_MRT4530_48617C.1
ctcctgcttgctgtgactgcctgacattgacacatgctgccatgctgtgcatcctgaccttcacatgcaccactgctgcgtcccatcacatggacccacccatcctgctgccattctgtgcctgctg

SEQ ID NO: 45676 - DNA, 747 bp, Oryza sativa
  Clone ID: PAT_MRT4530_48618C.1
atggccatggcgaagctgttcatcaccgggctgagcacaacgatcacctgctccttcgcggtggtgttcaagggcgccgtcatggccgtcatgctcctgctcaggctggtccagttcccgggctacctcggctgcctcctcctccgctccatcagagctgccgtcgagggggccgtgacggccgccaccggggacgccgttgtggcagcggccgccatagggaggcccaaggcgctgctcgccgagatgctcgccatcttcggcctcgtcgccttgctttcgtgcagaccatcgtcccggcgcgcgcggagggtgtctgggtggtcggcggcggcgacacggatagcggcgtcgaagaaggcggcgacaaagaatgcacagatcgatgaggggccagccacctccttcctcggtggtggactccacgctgccccgtccattgaggggccagccagtaggcgggcggcggctgggcagttggtcgcgccgaggtggactatggcgatggtgatggtggaggccggcaatggcaggaggtcgacggacgcaaggattagcgcctgctggcctgggacagctatgaggactgtcgacgagacgacgacacgacttcatcggtggcgctctagagcgaaagcagaggagagaaaagggattgaggattcatggattcatcgattcaggaggagaggacctgcgcctgggcagtgggcgacggcgcacaacgcactgcggaaggggatctga

SEQ ID NO: 45677 - DNA, 188 bp, Oryza sativa
  Clone ID: PAT_MRT4530_48619C.1
tacctttggtcaatgtagatgcgaaacaatgccggggcatgctagatagtgcttgctgagtggcatgctcgcaaagcgagatatggtgagacgaccgcacgacatgcagtgcgtgtgtgccatgggtagtatataggcgggaaagcgcaatatgaggtatgtttgccaccgattcccgggacggaagc

SEQ ID NO: 45678 - DNA, 6232 bp, Oryza sativa
  Clone ID: PAT_MRT4530_4861C.1
tacatagaatttacgtagttggttaatgttccatgagtttgccaactcgtggccatcgctgtctgcaattttgaatgcgcctggtcgcaagacttgtgtgatcgtgtatggtccttcctatttgggtgagagcttgtttcgccctgcttggctttgaaccctttggaggacgtagtcgccgatcgaaagtatgcgtgctcgaatgcgcttctcgtggtagcggcgaagggcttgttggtaggcggctgctcgaacggcaactcgttcgcgatgttcctcgagtagattcacatcgtcgtttcgctgctcctcctgttcctcatcggaatacttctgtgctcgtgtactctgatgtcgtagctcgctggggagcatggcttcggagccatacacgaggaagaagggtgtttccttgttggacgttgtcggtgtggtgtgtatggcccatagtagggtcttgatcccttgtagtactatgctgtttgccctcttgacttgtccgttgctttgaggatgggaaaccgaagcgaagcatattttgactcccagcccgatgcagtaatcctggaagtcggcactgatgaactgggagccgttgtctgtaatgatgcgatgcggtagtccgtatctgcaaaatatccccttgatgaacttgatggcgttggcggccttgatttcccccgtgggtaccgcttcggtccatttagtgaatttgtcgatcgccacgaataggaacttgtagccgccctgtccttgtgggaatggcccgagtatatatagcccccagcacgagaacggccaagtaagagggatggtcttgagcgcttgtgcaggtagctttgtgtgcttgcatgtcacatgcgtctttgagggcggttggtcagaaaaacccttgtcgaaaggctttcccgaccaatgtgcgaccggcggcatgtgacccacagatgcgttcatgtatatcgaggaggaggtgtctgccatcgtcggacgagacatatttgagaagtactccgtttggcgctttcttgtatagatcgttgccgatcgtgcagtagatttttgctttacgggttattttctcagcctctgcgtcgtcctcgggcaactcttcgctgttgatgaatttgatcagtggggtgtgccaatcgtctgtggtctcgatattggcaatggcgcgttccgcctctgtggcctccgagctgatgtcgggggcggctgtgttgatctcgccgattgcctctttcactgatggcttcgtcgggatgtccagaaaggtgccaggctcgagtggttctcgtttggacgcacgtcgcgctaggtcatctggcttgatgttgtccttgcggtatacgtgtcggacctcgatcccatcgaaccttttctccagcttcctgacttctacgaggtacttagataactcggggttagagcatttataatctttgtgtacctggttcgcgactagctcggagtcccctttcacgatcagtcgtttgaccccaagtgcggctgctgctcttatcccggcgagtagtccttcgtactcggctgtgttattggtcgccctgaagttgaggtggattgcgtgcttgaattgatctatggaaggagatgtcaagatgaatcctgcccctgctccttggctgttgagtgcaccgtcgaacgccattatccacgttgtcgatctggttgtttgattgattatcaggcatggtccagtcagctacaaaatcggcgagtacttgggacttgatggctgttcgtggtacaaagtggacatcaaactgacttagctcgactacccatttcgcaatgcggccgacaatgtctttgtttctcacgacttcaccgagggggaaggaggagacaactgtgactctgtgggcttggaagtaatgtcgtagctttcttgatgtcatgattactgcgtagagcagttttttggatatgtggatatctggtctttgcgtcgtggagagcttcgctgacatagtatactggtcgttggactttctctctctcgacgacaattacagtgctgacggagtatggcgtggcagcaatataaaggaataattcttcattaggttggggagcaacgagtacagggagatttgataggtagcgcttgagtgcaataaatgcctcttcggcttcctgtgtccatacaaatttatcttgcttcttcagagagcgaagaagggttgtcctcattctcccatcctagcgacgaatctgcttagtgctgccgtgcatccggttagcttctgtacatccttgagtcttgtgggcgacttcatgttctcgattgccttgatcttctcgggattcgcttctattcctctgccagagacgaggaagccgagcagcttgcccgacggtactctgaaggtgcacttctctggattgatcatgaggcgatatcgtcggaggttgtcgaacgtttcccgtaggtcgttaatcaatgagtcgcttttcttggtcttgacaacaatgtcgtcgacgtatgcctcgacgttgttgccgagctggtcgctaagtgcgccctggaccgtgcgctggaaagtgttcccagcggttatgagtccaaatggcatcttaacgtagcaaaataccccgaacgacgtgatgaatgctgtcttctcttcgtcctctctcgccatgctgatttggtggtagccggagtaagcgtcgaggaagctcagcagctcacaaccggctgttgagtccactagttggtctattcgaggaagagggaagtgatccttggggcacgccttgttgaggtcggtgaagtcgacacacattctccatttcccgttggccttccgcaccatgactgggttggctagccactctggctgaagtacttctctgataaagccagctttgagaagtttgtcgagctcttctcgtatggcttgtcttcggtctggtgcaaatctctgtagtctttgctttactggcttggcatcgggtcgcaccatgagttcgtgctcgatcacctccctggggacccccggcatgtcagacggctgccaagcgaacgcgtcagcattgtcgcggaggaaggtgatgagcgcgagttcggtcttgtcagggttggcactagagagaggaacggtcttgattgcgccatccggtttcggcgtcttgtttgtcttgctcattttcttgggtggctcggttgtggcgggtggacttagcgtttgttcgaccatgtcgaggctccgcttgtcacattgtaccgccagctttgcgttcccttggatggtgattgttcccttcggccctggcatcttgagcacttgatacgcgtagtgagatgcggccatgaacttcgcaagtgcagttctcccgatgatggcgttatacgctgtatcgaattcagcgacatcaaaggtgatttgctctgtccggaagttgtttgcttggccgaaagtcacatgcagcgtgattttgcccattggtttggacgaagactggggagtaattccatggaagggttgatcggtgggtgtcaactcgcttcgtggtattcccatggcgtccaatgtgctggcgaagaggaggttaattgagctgccaccgtcgatgagaacccgcgcgaccttgatattccgaatagtgggttcgaccacgatcggatagcgtcctgggataacggcggtaatgtgtgagacgtggaggtcagagtttggatacgctgggtccgactcctgagcggtcatctccgtatccttctcgaccacgcgtactcgtttgccttgttctgatgtcatgtgcttctcgagcgttttttttgaaaacaaggcagtcttccaaagaatgtctgttcgacttgtgtatgggacaccatgctttccttgcgtcactaccttgtgggtctggacgcttgggagggttagcatattctgctgcgaatacttctgcttgagctttccttttcgcgttcttgcgatttttctttttgcttgactcaggtgtgtccgtggctgatttcttctcgcccccggtcttcggcttgtcgttcttgcgtctaagtgcatcgtcaacgtgggcgcatcgctcaacaatcccgaacagtctctgagtagttgtgatgcgtctcgttgctaactcctgggtagtgtagcgatctctgacactggacttgaaggcgcgaattacaaaagcgtcggtgatttcggtattgtatttctgcactcattaaagcgccggacatattccctcaaggattcacccgagctctatatcaatgcgtgtaagtcgtcttcgatcgcgtggcgtttgtaggttccctggaagttggcgacgaactgctgccataggtctgcccacgaagaaatcgagtagggcggaaggtgcatcaaccatgaacgcgcagagccttttaacgcagttggcaaataattcgccaacgcgttgtcgtccgctccggcagcatagagtattgtggagtagacttgaagaaattcttctgggtcagtgctccaatcgtacttctctattgctcccggccgaaacctctcaggccatcggacatcgtgcaacgaacgaccgaaagccctacacccagcactgggggcagtgggttgtctgacgatgaggaggaggaagaagatgaggacgtcgatgggtcgcttggttccggtgtaggattacgagaacgccgaccgggttctcgaaaatactgtcgtcgccctccgttgttgtctcggcgccgttctctgccgtcttcgtcatgatggcggcgtcctcgactggtatcacccggcgtccgtcgctcacgatcgtcgcgaatatgacggttgtggcggtgatcaccattgtcgtgatgtcgtgaagaaacgtgatgccgggaacggttctcgttttcccgtgtgcgacgagcttctcggcgaccgtttaggtgatcgcggagattgctgatgccgcgaggtggagggctggctcgatggggtgattcctgctgttcggggttttcgccgttggcaccagcagttggttgctattccgggtgggttgcagcggcagcctcttcgaacgcgttgctgaggttggtcactgactctcgtaaccgctccgtccattgtgcgaggtcatcgtgtagaacggggtcataaggggtctccctcagtattgcgttgagggtcctgatgtgctgagccagtgtagacgtttgattttccgccccggtgttagcgcgtgccgatgtgcctgtcccgtcgatagccaatacctcacgtggcgtacttgttgacgaggagttgtagtcctcgagtagatgtagaattgacgattcggaagaaccgatgtcgataacaccaacgaaacgatttggggtcagtgtcgttcctcattctttgtcttcgtctctaagggtcttgcctggctgctggaccttgggagatgacgtctttgtgacgctgagaaaaactttacagcttgagaggtcgtggttctttgtcttgtgaataggacaatggacaccacgagttggagaaacacgctgaattccacgctccttgcaggcgcgaatctcagcgcgggcgttgagaaaaacccagcaggcttgcaaagtatgtttcctggatttgtgaatagggcaccaggaccctgtcgcttcggaagttattctcgtcggcttgtgtttctggtcggaacgacaaggtttggccgcattagaattcttctcgagttcggatgtcgtcgatgttcctttctccacttcggcgggaggacctttcgacgtggagccgtcttgggttacagccactgcgttctcgtttctggtcatcgatggcccagctgagatcggcatcgtggtgtaaaccggaaagacgatttcgccgacttgagtccacgctagcatcgttgaggcaggaagcccgtagttgaggttggtgttgacgatgttgtcgacgaggctggatgacatagtagtagaaccttgagcacaaagtccccctacctggcgcgccactgtcgacgggtgatacccgtagaccggatatagagagtattggggtacgctggtacaagggtttcgtaggctgtggtggtgatgttggccatcagattcctcctcttaggtcctcctaggggggtcccttttatatcgcaggtcaagcggttttcaagtagaacttggagacatcgaaccctgcacgatgcactgacgacccagtcttgtctgagtaggactctttccatctgtgaactgcatgat

SEQ ID NO: 45679 - DNA, 408 bp, Oryza sativa
  Clone ID: PAT_MRT4530_48620C.1
atggagtatagggattccacttaccgctgcttcatcgttaaactccagtctccgctggccttccgaggagtcgcggtggcggcgcggccggacagcaggagatccggtgccggcgctaggctgatgcgggtcgacggaaaccagacggcgagggatcgacggtggccggactgcgtgggatcgacggcgagcggggatccggcaacggcgcgaggcggcgagggagagccagcggggtggtgctggaagggcagcggcggagcgggcgcggggaggacagcgctggcgcacggcgttgagaggacggcgcgctgcgcgggcgcggagtgcagcggcggaggaagcgggcgcgggtatggcatcgccggcgcgcggtgtggggagaagcagcggagtggagagagatga

SEQ ID NO: 45680 - DNA, 431 bp, Oryza sativa
  unsure (1)..(431): unsure at all n locations
  Clone ID: PAT_MRT4530_48621C.1
ccgcggtgatcaggcgagccgccggaanttgactcaaaagataattaaaagaaagtgttttaagtggattgggattgggattanacanaggaaatganggactcgagaaaggcggcgatgaaaaccgtggttggggggaccctggcctgnactgaacgacaaccaagcagcancanaaagatggtgcaattgcatcnggtggcatgtcatgtgtgtgtntantggcatgtncatantacatggtgattgaatccggtatncagggggctngcttnccngttcctgtttctccnttggttaattattactccccattaataaggtctccttccngggttgctaaccttaattaattaatttaattaacccnctgggttgaaantgtttagtccaaaattcctccnngtccnaaaactgggaattaatacnat

SEQ ID NO: 45681 - DNA, 186 bp, Oryza sativa
  Clone ID: PAT_MRT4530_48622C.1
gttctttgcgatcgtagggatttagccagcggctcacgggacctacgcgaacggggccagtctgggcatgagctacaggtactgcgcgggccagagaccggcgaactcggcgcaggcggagacacttgcgggcatcagctacccggtcggccagacgccggataacgcggcgcaggcggaggcact

SEQ ID NO: 45682 - DNA, 303 bp, Oryza sativa
  unsure (1)..(303): unsure at all n locations
  Clone ID: PAT_MRT4530_48623C.1
ggccccagggaaggaaaatcatggcgtacggatgaagggcaaggggcgcggggagggcatanaacccagtgnttnttttngggncccccttttntngggctccnagcacggcccaggattcaaangaaaccngaaaaaannntgttgntnttttttnctanacgnccggcangcncnntggagntcgttggtcntnttttcactngcggaaatgggaatcggnaatttnnttttaancacttncccgggccgaccaaaantnaacttttgcccccgtgttnaaaaaaaaaaaaaaaaaaaaaa

SEQ ID NO: 45683 - DNA, 504 bp, Oryza sativa
  Clone ID: PAT_MRT4530_48624C.1
tgccgttcaccttatcatcgccaacggcatcatcgccggctttgggagttacatcgtgctgcactgttactactgggcaaggatcgcttacctcaaggcgagtaaagtgctcgactagcgccggaaccaggacgctgcttcctcggccggcgaggccagcggaatcacggcgaccaccgcgacagctgctgtggcagacgaggtgtgacacgttgaaaacgcttgggttgttagctgttggtcagctgcacgtagtagactactagtcagttgttagtctctgtacttgcgttgttgccagatccctgatgaatttggacagggcataattctgtgcttggaaaaagaaatgggaacgggctctggccgattcttgatatgtagtaatgagatgtctgtactttgaccatcatatcaaagttcccatttgattcccctagctagcacgtttatttgcctgacacataatagtgcaacgcggtgttacttctcaagccgaaaata

SEQ ID NO: 45684 - DNA, 558 bp, Oryza sativa
  Clone ID: PAT_MRT4530_48625C.1
atggagcttgacttccatatggcaataggtgaagcagaggcaaactatgccaacaactctaggcttcagcgaaaggctttgattaagaccaagccggtacttgagaaggttatgagacaggtgtacatggctctcctacctccaactatggtggttgctgacctaggctgctctgtcggcatcaatactctcctcttcgtctccaaggtgaccagcacagtagctgatgctcagtgtcacaatgagcttgggtgtcatatcatggagctccagttcttcctgaatgatcttcctagaaatgacttcaaccaggtgttccagtcgcttcaacagtttacgaagtcgattgcagcaggtcatcccaagggagttgcgttacctccattctatatctctgggctgccaggctcctactacaataggcttttcccttgccaaagtgttcaccttttccactcttcgtactgcctccattggcagtctcaggtacgcatctctatggagccattgatggcatgcactgttaatgcactagggacctttgtatctattaagtaa

SEQ ID NO: 45685 - DNA, 947 bp, Oryza sativa
  Clone ID: PAT_MRT4530_48626C.1
gactagttctcgcagcagcaaccagcaaggtaattaaccaacaccgagcatcaagcgcagtagccaagtcagctgagctcagctagctagcatcctctggatcgatcgagatggcccgtgcacagttggtgttggtcgccgtggtggcagctctgctcctcgccgccccgcacgccgccgtggccatcacctgcggccaggtgaactcagccgttggcccctgcctcacctacgcccgcggcggcggcgccggcccttccgcggcctgctgcaacggcgtgaggagcctcaagtccgctgccagaaccaccgctgaccggcgcaccgcctgcaactgcctcaagaacgccgcccgtggcatcaaggggctcaacgccggcaacgccgccagcatcccctccaagtgcggcgtcagcgtcccctacaccatcagcgcttccatcgactgctctagggtgaggtgatcgagctatatcgatcggatcgatgatcatatatatacagcagcgcgccggttgcccacctgggtcgatgtgtgtggagccgaattctgtatccaatactactagtagtatctgtattctggaataaaagatgagctagctaggtccatcgatcaccatgcatgcatgtgtgtatggttattgatcggcccggtcagtccagctagcttcctgttatgtgtgttcgtctcgtttaatttgctcctttttgaggtgtacgtaccagtgagagctagagattgagtttatacccatctacatgcatgtgcgtgctactagctccttgtactacgtgcttgtttggattattacacatacatgtagctctttttggtacacatatgctccttgtagctccatctatctctgcggcctccacctgtacgtgtgcatcttccataagccattttctcgatacataaaaaaaaaataaaaaaacaaaac

SEQ ID NO: 45686 - DNA, 741 bp, Oryza sativa
  Clone ID: PAT_MRT4530_48627C.1
atggaggagcctctgcgcgttgcttctgacttcttcagctgttgggccacacatgaggcagctggtgggtgcggaggcgaccacgggcgggtggcggtcgaggagtcgaggccggcgacaggcgggggtggagaaggcagcgggtggcgggtgggcgtgaggctggcgacaggcgggggcggaggtggcagcgagcggcgggcaagcgcggcgaggagccaaggccggaggtggcggcatacggcggaagcaaggctcgacgttgatgccggggaggctgctccgccttgccgcctgcacgaacgaggtccacatccgtcgcgctcttcctcccgcccttgggcccggttcgctgtgctggcggcggcgcatcgccggtggacgaggataacgtgcgacagacggggaacgaggcgcggcgcgacggctctattaacaaccaaatttggctcggaggaggagccgcggcccctgcgctcctacgacgagaaggaggagcccgccgcccacagcgcttgcccgctcgcccggtcgtcctccgcctccgtcgccggccgctgtcgtcctcacctcaccgccgccacgctcctccaccacctccgactccgtctccgcgccaacgtccacgctgtccgcgccgtcctcgccgaccacccgtccccgcgccgtcctcgccgaccgcccgcgcccaccgcccgtggccccgtcctcgccgtgcgcgctgtgcgaaagagagaatag

SEQ ID NO: 45687 - DNA, 362 bp, Oryza sativa
  Clone ID: PAT_MRT4530_48628C.1
gccaaacaaattgttggttgacgcctgggatgctggcacaggcattggcaggctgacggcatgcttgtgactgcagctgcatggtgagttaacaccacatgatgctggggatgaatcagggatgaccacgtgagaagtgacatcatgggttatgccccattgcctgcctgccttggggtggattggtgaatgtgcacctgtggtgaatgcggttttggcgtcaaaataatgcagagtaattgcgttgttgttgcatgtacaagatgtaacacgtggtgctgtgctgggttggactggttcacattgcaattggtgtatgatcaactggcttgttgtcttttgaaaaaaaaaaaaaaaaaaaa

SEQ ID NO: 45688 - DNA, 1584 bp, Oryza sativa
  Clone ID: PAT_MRT4530_48629C.1
atgccgctccgcgacctccactctcacctctcgccacggccaaggccggttaactgggaccctggtggccctgcgtccttcagcgtgaggctgttccgcctcagcttgagctccggctcgccgcaagcgccgtcgagggaccacctccgcgtggaccatggcgtcacctccgcgtccgcgcgcggctctgtcgcttccgtggccacgcgtgactcctctgctgtcgacgttgctacctcgtacggctcgccgccgccgccgccacgtgcgactccgccggtcgcgcgcagctacgtcgcctccccgcccagggctattgttcaccacgtgtttgagtgcatgtctctgagactgatgagaatgtccaacaagtgtatgagaccaacagcactagaggccagcacctatgactttatcagcagcctccctgatgagttgctccaacatatcctctctttcatgactgcaagggaggctgtacagacatgcgtgctgtccagtaggtggcgccatatttggaaatctttgcagtgcctcaacatcaaaggatctgaattcaccagcgaggcggcatatgtgaatttcatggacaatttagtactgcgccgtggttgcgtgcctctagatagccttctcttgtgtaactcatatggtagagtttccttgaaccatgacagagctaacctgtggtttggctatgctttgaggagcaatgtccgtgagattaatatccaagagaagcattttgaatattctaatctagaccattcttccttcatatcgtcccatctaaaaatactctgcctcaattatgtttccatcagtgacctcttcattgagaatctcttttctggctgtccagcattacaagatcttgtgatggtagactgttgcgtatatgcaaccagattttcctcttcctctttgaagaatttaacctttacctcacatagccctgacaatggtgatcttgttcacgacgatttcaaagatcttgtgatagataccccgagccttgtttccctccacctggagtaccttccctttttagctccttgccttttgaatgcatcgtccgtggaaaaagcttactttcgccttgatgatatgtccttcccatgttttcatatgaaatacaacatcctcagtgctttgtcaaatgttaaaaatctgaagttgctaataggacaattcaatgatgatgcttttcagttaatgcaaaatgaggtactaaaaagggatctctggaggtgccggacattcaacagcctaaaaaaactgtctgtcagtgattggtgtgtggatggagagttgcacactttgatccacttgcttcgatgctcaccaatcttggagaaacttactctgcatcttggagtgattggaggtttggcttgggaacagtggatgagttacccacaatcagagatgccagacatgtcgtttatttgtgagcatcttaagaaggtcaaaatcacctgtgcgaacgacgacaaaagggtgcccgctatagttaatgctatacttgtcaatgccaactctctgccagaaattgttatcaaaccatacacgcgtttggactag

SEQ ID NO: 45689 - DNA, 159 bp, Oryza sativa
  Clone ID: PAT_MRT4530_4862C.1
atggacaacgatgaggcagcaaggaagacgatagaattgagttcaatgcagaagaagacgcagatcaaacttgagtcggagaagaagaaggcaagaaggttctacggtctggatagtttgcaagtgcaaaaggcgagtagactggtggcaacaggctaa

SEQ ID NO: 45690 - DNA, 1135 bp, Oryza sativa
  Clone ID: PAT_MRT4530_48630C.1
aaaggcacgggaaacccgttcccgtcgagaaagcgaagcgggtccacgccgtcttcgtagacgccgggtacaccatcaccggcatcggcgccgccgcctgcaccgccgccgccacctccaactccacggcggcggcggccaccaagccgacggcgctggccaacgccaccaccaactgcagccgccgccccaccaccttcaatccctgccaccaccaccaccaactgccggctgccgccgccacctcacgccgaccctccgccggtggcctccccaccagatccggcccctccaccgccgacgggagagggagacgaagatgacgaagccccgccgccgccgtccttgcggccaccgccaactccacgtcggcggcggccgccaagccgacggcgctggccaccgccacggtggcctcccggtagaaccgcttccccaccaccgaccccgtcatgaacgacatcggcatcgccaccgacgtctcgtcccgcgtcgttaccgccgccgccgccgccggcttcttcaggtagatctcatctccccctcccccgcccgcctcttccctccctcccggagaggaggacgcctccgccgccgtccccagcagccgccacctcccccccgccgccgccgcccctcacgctttcgcaaccaccaccgcgtccgtgatcccatccacctccatcgccgccgccgccgcgtatgcgccgccggtgaccgggatccatggcggagccggacctactcgcgcccttcgccgacctccccttcccccccggcgacgatttccccgacttcccgaccctcggggatgacgccttcgcggccaccatcgccgacctcaccgccaggatctcctgcgtcacggccgagaacgccgccctcaagcagcaattgggtggcgccgccggtgctggtgccgccgcgccaccgccgccaatgcccatgtaccctgcggtgccgcttgtgccgataccccggctcaagacgcagcagcctgcgtccacaccggagccaccggccaagaaggcccggaagaccaagaaggttgcaggagactagcttagcaatccctggctatgtagctccgttagaagctggagaagtcatggattctgctaaaggaatgaatgaa

SEQ ID NO: 45691 - DNA, 3189 bp, Oryza sativa
  Clone ID: PAT_MRT4530_48631C.1
tttttttttttttttgaaccaaaatagtgtattcctttgatcacaaaataaccatcacaaaactgtcagcaattttgagcatatatttgcaatttgagctctgaaggtaatgagtagtggaaagcatgtacaatttgatcacaaggtctctcatcttgatctatttatcgttatccctttcttttaccaactcatttgtaccaaaagaatcaatcatatggcaactaaaaccccatatgaaaaaaaaaatcctgtcgctcacatccatgtagatcacctgacataatctgcaccgtcaagaaaatgagcatactgtgtcccattcagtttgttgctcacatcatcccagttcctgacaaggcctggaagaggactagtgtgaattttcacctgcctgctgaccagctttctcaccggaactccgaggaattcttgtacctggaacaatgcatttctgttgcggacaatatcctcgtagtagaggatcatgtgccgtgtggtgttgaagtggtccaagcaatctctgatgtatttctcggcatttctgatgtttggaatcagatttgacacatccagcaccggcttgaatttcgctaatatctcagcctcttcttttgagtgtacatgggatttgtgggttccattcagctgcttcgcatctctgtcgtaatcattagccaaaacagagataagcctgcgcaatgtatttctcctgaagagaaatatcacggaaacacccttcttgtttaaataactagctatatcatcatgatggtccataaacccctgatttagcatccacttcaatccaaatgcagccgtgcactcattctttgctgcactggtgaaccaatccaaattatacaatttgtcaagggtctgtaagatagatgagatattctctcttctatccaccctgttaaatatttcaccatttgagctgatgttagggtggctgttcagcaaagtctcaaaccatccacttcccgaccgttgcatagatacaagcacaaaggatcgaaccagattgcaggaacactctcccctgctataactctcaggtttcggaaagtgcacataacgcagctcctcatgaggaagatgaggctttcggcaatgaatttctgcctgcacttctccactgttctcctcagatctattctctagtgttatctggttaaaggagatgtagcatacatagaatccaaatattgcaatgaggaagacaagaatcggtcgcggtggaaacggtgctcccttggaacttttaagtgaatatggatgaagtgggcccgaagtaggtgggacccacatgtcagtgacacctactgcaggtgcggtccagcagacgatttgcatccgggccaggagcgctgctatttcttccaataatctgaccgacaacagagtgttccatccagcaaaaacatttacactatctataagaacgacaacgaagatgcgggacagagaatttgaggagatcctcccctcaccatccctatcgctcgcttcccttggatcagccaggacagagactacaacggacgaaactggcttacgaccagcatggctctgactatggttcttggggggtgctttgaaatgatccgtgtcattggatgtcgaacctcgtaaagggatggcttctgagtacgaaatccttctgttcttcaccttctgaacagggccagaaggaagattttcagtataattttgtgacgtgttagtcactgacccagagtagacaggcacaatgccatttgcatcagctgttgttggagataaatcaaattggaatacttcagtgcacatcccggagttcaacatgggacctgacattgcttcactaaaccactgcggcagcatcccatcatcctccctgtatatgcttccatctccaggagccagagccatcagttcattcattcctttagcagaatccatgacttctccagcttctaacggagctacatagccagggattgctaagctagtctcctcctttccttggtttccagaacccttctcgccatagttagacaaacgggaagaggctttctcactcgcaacaatggacttaataaccagatttccattgatcttcacatgcttcccattcctcggcaaatataacaaagctggcagcgtttcgcttccattctgaggtaccttcggatcaacaccatttgagacactattttgtggcccttcaacagccagaattctcccatgatgtgacggaacaatcgcagcgccttccccagtgtacgctgcaccatacatccgatttaccgcaggaaccaaacacccgcagaccatcatcaagaacagcaatccaagcaggctaacacctgcaaccttcttggtcttccgggccttcttggccggtggctccggtgtggacgcaggctgctgcgtcttgagccggggtatcggcacaagcggcacctgcgagccacgcattgcgtaggctgggtggatccatggcatcggcaatgggtaaaccgcagggtacatgggcattggcggcggtggcgcggcggcaccagcaccggcggcgccacccaattgctgcttgagggcggcgttctcggccgtgacgcaggagatcctggcggtgaggtcggcgatggtggcctgcatcaccttcaccttcccctccagctcctccacgtactgcttcttcctctgccgcgactggtgcgcgctctcccggttgcgcaccagccgcgcgcgccgcttcgcctcatcatccttcccatccttgccgccgccgccgtcactcccgctcctcgacggcgacgacgaatccgcggactcctcgttcttggaacccccgtcgccggccgacgacgtccccgcttccggcgatccggcggccgaggacgacgacgacgtcgtcaccggcggcggcgcatccggcgggaagagatccacatcgaagtcgaagtccagatcgtcgagatcgaaatcctccagcgcgaaggcgtcatccccgagggtcgggaagtcggggaaatcgtcgccgggggggaaggggaggtcggcgaagggcgcgagtaggtccggctccgccatggatcccggtcaccggcggcgcatacgcggcggcggcggcgatggaggtggatgggatcacggacgcggtggtggttgcggaagcgtgagggctctgcaatggaaaag

SEQ ID NO: 45692 - DNA, 1482 bp, Oryza sativa
  Clone ID: PAT_MRT4530_48632C.1
atggcggccgcggcggagggcgatgaggacccgcgctggaggaggtgcaacaccgactgcgtctacttcctcgcctcccccttcacctgcaccaaggggtccaagtgcgagtaccgccatgccgatggcgcccggttcaaccgccggaattgctggtactggttcaagggcaactgcgtcaacccgagctgcacatttcgtcaccccccactggaaaacttaaacaaaaccaaatctttagcagacccactctcattgtgttctacttctgtcaaggcagctaacccttgttatttctactataactcgcactgttcaaaaggtgacaattgcccctacctccatgagcctctaacttctaatgatgctgtgggaacttcttgtaaagctaccacttccaatcctgctgtaagtaaaagttatgttggagatgagatggttgaagaatcgaaagacactatcacaaatccctgtcaagatacctcttgccatataaaagaagttcctgtgtcaatcaatcctgaatttggtgaagctgaagctgtttccggtgcacttgaaacatcaactgatatagatgaatacatgaaatgttccgcagtctcagatcttaattcaggagattcaactatggaccacacagaacaagatgagcgtgattcctctcctggatttgatgtgcttgtggatgattgcctctctaacaagagtgatcttgaacatcaattgactacagagagtgataataaggtgcttcatgcagaatatggtattagagatccagttctttatgatatgtattaccatgatccagagtactataactatgaaccagaattttgtggtcttgatgatcggcaaggttacctttatctttgccagcctaacggagctcatgagcatgaaagtgagatcactttggggcatttactaccacaaaatactgaggtcacttctgatgaatatgacagaaggttcttcaatcccagaaacttcaccagctcagtggcagatactaactttgttcatcagcacacccagattagacacatctcaaaaagaagacctgagaatagaaaaggtgcaaagggaaagaaggattgcattaagagaagccgttgccttgaacccaagaatagtactcaacagattgaatcaatgccaactcgtcaaaggaaagattatttgatgggagagtgtcctcaacctgctaaccatgctactttcaggggacggaggaagaaaaatagaggaaagcaacagcatgttctttctgctaaatcttctgaacatcctactgcagattttactgggccgaagacccttgctcagataaaagaagagaaatgtaaatccaactcaagttttagccactccactgcttgcacgcctaatgtgagatccttctcagatgattttgaggggcccaaatctctgaccgagcttctcatgactaagagtaggagttctgttggcaagtga

SEQ ID NO: 45693 - DNA, 2931 bp, Oryza sativa
  Clone ID: PAT_MRT4530_48633C.1
gtagaatctcacttgtacatggtagtataaatttcttattaatttttgtcacataaaaaataccgctgtttccattagaatttctgaatgccatacatgtgtgattggttgggctaaccatatcacaatttaatcaatgtcgtcagttagcccttccaaaagtaactgaaaagattgtttgtacaattgcacatctcaaaattgctttcttttcctgtaaatggacgcttaatgacaaatcgatcgtgtataacttccatcaaaagacgaatctatgaaatttcaaaatgggaaagtccctgttaaccggatatgctcaagggtgcgctttagaccatactgaagaacagctcggttgccagctctaaaaccatcgccataggccattgaggtatctgactcaatttggtgcttgaaaaaatcaccaagctttcgctcaaactgagatcttcccccctttttcgatgatgtggatgctgatgaggatgaagacgttgaagcaccattactgcctgatcctgcaatgatctctgactcaatccacatgtgagcaagaacttggcatatgccctcttctacgtctggactaagtgtgcgatatcctttaagtcgcaaccacgcatgcatcatctcatgagctaaaattgaacctgtcaacaatcttgggagaccataaagaatgagaattgcagtcacttcacatcgacgagtcaacctatatggctccgttatcatttccataactttatttccagccattcttggtctcctcaatatcgtgctgacagtttgctcttctgataagcataaacctcttgtttctggaagatggtggtgaccagtcttctctccttccatggcttcatttaaagcctgtctttctacaagaagcaagggaacttgttgttccactttcatatttaggccttcataaaattcctgtatttcaagataaagaggttggcactcgctcgtatccataactgcagaatcaaggcactccaggcagagtttgcgaccatcgtccagcaatacatatcttgattcccttggctccattctttcacaactacagcatcttggagtaccgtccacctcatgtgatggacagtatttttgtaaccagaaaggatgtgctctatattcaatcaggccattcatatttgtaggaataaattgcttgcagacatcacattttgggtgaaagcgctccttgtagcatgttttatggtatggatggtttcccgacatggagaactcatagtcatatattggttgattacaagcatgacagcgaaaacattctggatgccaaacagctcccatgcaactaaggaaacgcccatgaccaatctcactgtgacatccggcacaagtcctgaatccagaagaaaacataaatggcagtggttgatacatattgccaccattggcgttgccattttcacgagcacgaggaggcgattcaacattcaaactttcctggatagctcttgcaagttgttcatcctcctccaaatgcatgtccttttctattgcctttgcctttctttgttcctcctctaatagagagagtgatatagcacgagcggtctcttcattgtcaaattctgacgggacatccaaatcacaacaatctacatcgtcaatgacaagttgacggagatcagtagccaacaatagcaagtcgagttgaccaaatgtggactctagtgggtacaccatcgtcacaactgcggaattagagggtccattccatatcgtctcctccgcgggtttgctgtggtattgcccttccgagattttgtgggttgaacctctaaaaaatttggtcaaccaacccatagagctccaaatggcaatgttggaagggacacttttatgtggttgcttgtacaagactaattcctgctcaagctccgtcctggcatcacccaccgtcacccagacctcggagattttctcaacggcgccttcaaagagatcaacaatggtgaacgcccgcgatgtcggaaccatcagtcctgttaatccttcgagcccagtcttttcgcttgtggagattgcaggctgcctgcttgattgcgcatgattcactctaggcacaacggcgccgttcagatatatagtccggttagctccaaaggcaatcatcttccgaaggcctctcccgtaggcgaggctcttgtgcatgtgaccgaacacgaccagcggtatcgaaactccggtttctctttgcagatcagatatggcttgctccagatctggatcaccatgatcaccaccaccagcaacccaatcccgcccacaaatatcctccattcttgagcctagacctgttggcccattgtgtgccagtaatatgacagcatgctcctttggtgcatttgtagcagcatcatatatcctctttgcactttcagccatatcattgacaccataccactgtagctcgatttcactgcatgttactacacagcagaagtagtatgcaataagaaaccaacccggtgaagcaactaagaatgacagcaaccattttgacagaagctttggtctaaatatcctattacccccgcaggaaaatggtcgtccaccaacaacactcagctttattgttggaaaatccaaacatttgtacccaacatgctgctcaccaaggctctctagctgaagctggacacgatctaccttcttctctgaaaactgatacgtgtgccaacagtcatgattcccaagaatagctgctttggggagctgaagatctgaaatgcttttaacaagttgaacattctcgttgccataatcacctgtaaaaagtaccaaatctggctggagaaaatgtagggcttttgagtcttcctcaagggtccaatcattatgcgagaatcgcaaggccacaccagcacccatgtctggcctatcccccat

SEQ ID NO: 45694 - DNA, 1008 bp, Oryza sativa
  Clone ID: PAT_MRT4530_48634C.1
atgccgatgttccccggcgacgtcggcccggtcatgctcgcgccgccgccgccgctcccgttcttcccgatcgccgccgtccaatctggattgggcttcatgcacatgtcggcgccgccggagatcgtcaccgcccggtctaagctcaactccgacgcccccagcttctcgccgcggtcgcccgccgcctccgccgccgccgacgaggtggaggtgcgggacgtgtgggcggcgaacctggaggaggagttgcgcagcatcggggcgctcctgccgacctaccccgtcgtgtccatggacacggagttccccggcacggtgcacgacgtcgccacgccgcgccacctccgcacgccgcgggagagctacgccgtcgtgaagcgcaacgtcgacgagctccacctgctccagctcggcctcgccctgtcgggccccgccggccggtgccccgtcgcgtggcagttcaacttcgccggcttcgacgcccgccgcgacccgcactcggggagctcggtcgccatgctcgccgcgcacggcgtcgacttcaccgccctccgccgccacggcatcgaccacggcgacttcgcccgcgcgttcggccgctccaagctcgcctgcggccgcctgacgtgggcggcgttctcgggctcctacgacttcgcctacctcgtcaaggtgctcaccggcggccggccgctgccgagcaccctggaagggttcatggcgaaggtcagcaagatattcgggccggcggtgctcgacgtgaagcacctcgccaagttctgcggcggcggcggcggcatccgcggcggcctggagcacgtcgcggcggcgctcggcgtgcaccgcgccgccggccgcgcgcacaacgccggctccgacagcctgctcacctccgacgtgctgcacgccatggtggaccgcttcttccccaactccggcgtcctcaaccacgccggcgccattgatggcctcgtaaagtgtagcaacttgtactataagtactaa

SEQ ID NO: 45695 - DNA, 924 bp, Oryza sativa
  Clone ID: PAT_MRT4530_48635C.1
ctaccccggccacccgttcctttgcgccaaaccccgctggaagtcgccgtcaccgcgaaggccgaatcgtcgccatgttttgatctccggcgaagctttgccgcttctcctgtggtcgccgaacctcgccgtttcctccgtgggcatcgcagcgccaagccgaaggccgtccaccccttctctgccggtattcgccgtaaagtcgccgccaccatcctccccatctcgtcgccggccgctgttttcatcgcccgtcatcgtgtaagtgccggtaaggaccgtgctgatcttctcttcgcgttggtgtcctcagtgtccaccgtcgtgccgctgtttgccgtggtcgtcgccatccaactgagaagcggcgaaaagtccgtgggggtcgctggggagtccatgcctctggttattgagggggtgattatgatacaggaacggtgcactgtgtggtacacctctggccagagtaaaactattcgaatagccgtgcccgtggttatgggcgggtcgctggtgaagcagtcggcctacagggcgagcgccatccgccgccgctcccaccgccaccgccgctccagcttccgccgctttggcccccacccgccgccgctccagcccgacgagactccttcagccgccgccgccgccatcgtccatcacggccacgccctgcgcccgtcgccaacgccgctccggcgctccctcgccccgcgcccgtcgccggcgccacctcctcgccccgcgcccgtcgccggcgccacctcctcaccccgtgttcatcgtcggcgccgcttcctcaccctgcacctatcgccggagccgcctcctcttcctgtgtccatcatcgaggaggtggaccgcgccgcggaaagcgtgaggcacggctcggctcaccgggtcgactgggccaccctcctctag

SEQ ID NO: 45696 - DNA, 315 bp, Oryza sativa
  Clone ID: PAT_MRT4530_48636C.1
atggcggcggcgacggcgcccagagatggatgcggcgttgagacggcggtgggagatggatgcagcggcgacagcgtccggagatggatgcggcgatggcggcggagacaacgcctggagatggatgcggcggtcggcgtccggagatggatgcggcggcgacagtgtctagagatggatgcagcagcaggagatggatgcggcggcgatggcgacggcatccggagatggatgcgacggcgacgggagatggatgcggcggcgacgacggcgggagatggatgcagtggcgatggtagggccatgctgttgtga

SEQ ID NO: 45697 - DNA, 291 bp, Oryza sativa
  Clone ID: PAT_MRT4530_48637C.1
atggcgggcagtgaccttggcgaggtgctcgccccccgcccgctgttggtccgcccactgcccctctgttccagctgccgcccctgcttcgcccaccacccatctgctccactcgccacccctctgatccggccgctgccgctcgcccttctccttgcagtgcatgggagcgacgatgacctcggctggcgacggatctggcgacggcgccgacaacggctggcgacggcatcgacgacggctggtgatggtgcggcgtccggcaatgacgacctcggagatgacggttga

SEQ ID NO: 45698 - DNA, 423 bp, Oryza sativa
  Clone ID: PAT_MRT4530_48638C.1
atggagggaggagggaggaggaggaagagggggaaggtggagctgcggcggatagaggaccggacgagccggcaggtgcgattctcgaagcggcggagcgggctgttcaagaaggcgtacgagctgtccgtgctctgcgacgcccaggtcgccctcctcgtcttctcccccgccggccgcctctacgagttcgcctcttccacctccagcattgatacaatttttggtcggtattgggaccttctggacacaacaattgatctcaatattgaagcaagggaatctcgggttgattgcaatatacaggtctggatacggagacaaatcgtccacggagggctagctcctttgttggttggagatgcagctcctccatttaggggtgttggtgtgggctcctcgcctagccctttgtatttatga

SEQ ID NO: 45699 - DNA, 224 bp, Oryza sativa
  Clone ID: PAT_MRT4530_48639C.1
ctcaattacactttttctcggacgtttatgccccgggcccggggtcaacatgctgaatctctctacctcttgctgcttcgagacttcggttgcttgaggaccgaggcgtgaggagaaagtgaagcggcgacgctggtgccgcccaccactggcggcgttgcgccgccttttcccgttaccccaccatgccggcaggttgaacggctttcttcccaacaaccccg

SEQ ID NO: 45700 - DNA, 1983 bp, Oryza sativa
  Clone ID: PAT_MRT4530_4863C.1
atggatgaagtcgggggtcgatggacattctccagggcaaatgaaggctacacgagctgcggcccggtagtcgagatgtcgtggcacagggttggtgccctgctgctagggggctcagtcccgcctgcctgtcccggaggttccggccgtagggggattgggtcggtactcttgtctatggctaggatgggttggaaactatgtcacgtcttccgtctgtataccgtggtgatgtttaacagagaaaaaggaaagaatgtcagcgggtatgcctccagtaactcaagttttcaactcaatccaccactagcctcaagagagttaacaagggcacacccttggtccattccaagcatgctgcttagtccacagctaccattggttggaagtcaagaccaaaatcagtatgtgtttgatcgagcatttgccacccaggtcgatgagcttccaataccagaagaggatgtccccttttgtcacgattgtagagagcaaggacactatgccctgaattgtccatgggtatatgccaaagaagctccttcccttggtttaacagtgcagacatcgctaaaccagcctcttcgcaccaagtcaagcttgcagcctagtgtgcaaagcagagagcccaatgaagagaatccattgaatcccgggaattgctttcctcctagcccttcgtaccacgtggggtcacgtactaagcaagccaaaggcaagaagagtaagaatcagaggagaaaagcaccgatgcgaactgaagaagaagtacgtaagatgaccattaccagcacagaatggcctccaccaggaatgacaaaacgtcagagaagaaataccttccggggtgcaccacagttgacagagcatcttttagctaatggaggtagagtgtctgatagtgaagattcagatcaagtctcatcagatgatgaagatcagaagtctccccaaggtttcaaccagaacaaaatggaacgtaaggcatgctctcgttgtggagaaatcggtcatgttgccagctcgtgtgccactacatgcgttcattgtgaggaagaccatccacccgacaggtgtccaatgagcaggatcacttgtttcttttgtcaaggaactgatcatgtaccaaaagattgtcaattcagttttctgctgacgaagaggatggccagccaacccgccagttccaacggagagcagcatcaaggcaacacaaatcctcgccaagattacagtttcagcctaacttcagtgccaggacagaggaatcaaaatgaggaaagaaaatgccgagtccgagaagatatctgttgcttcaattgtcaaggaatgggtcatttcgccgacaagtggccaaaaccgagaaacatagctgccggcacgtcagtccacgcaactccctgcaatcagaagcttgctcctcagcgaattgtcatccatgcatcccgaagcagtcctatagcccccgttgcaacagctccaactccagcgagtacattaccacaaggtgtcaatgctcaatttcagccccagccaccagttgacaagacagcggcattgtacctttggatgttccagcacagcagccaaaaaaaaaatcaagtacaagatgaagaacccgagccaataataccttcagcaccaaccattctctgcgccgacagcctcagcagagaattgtcgtcgatggaagaagttgtttctctccccgacctactccaggccgagcaaagggcaatcaacctccggagggcgataccaagcagaagaccgtcctccgcttcaaacagcaatcagacggaagcttctcctgtgaatgatagcattatgcagtcctatcacatcatcacagaaccaatcaaggatgcagtcactagaacaatgccagctatatctctccagagtcaaaatgagcagccatgtttgtggttttcagttcgctacttatcattgcgtaatcgaaagtttgcagcaatcatgtaa

SEQ ID NO: 45701 - DNA, 1070 bp, Oryza sativa
  Clone ID: PAT_MRT4530_48640C.1
atggagctgagttggtggtgctattgcactgtgtggtggggtgcatatagcaagatggcaacgtgcatgcaggtcgggccagtatggctagatgggcaggccgctgcagtcagtggcgccaccggcagctacgatcccaaggcattctgctccaagacgacagacgtagcgtcgtgcctcagggtgtacccaacactcccggacgacgtcgccaagtcgcaggataacgagcagctctacacacggctgtacgactactgtggagtcaagatctacgaggcctcatcgctcgcagaatccatgattgcaaccaccaccgccgccgaccccgtgatcatcgccaccttcttcccgcagtggaaaggggacgaggcgataacgacaaaaacacatcccggcaagtgcctcttgagctgcaacaagaccatcggcgacgttgacgccatccagacctgcggaaacacctacatggaagacaggccccctatgatccaccagaatctcaccgtcttgttccacggcggccacccgctgccgctctgcaagagtggatgctcggagaggtcgtcttcggagggcgaggccatcctcgccacaaagttcaagtatatatggaccttgttggatctcctggaagctgtcctcccggaatatctttctgagactgggactgcggcggcgacagttccatctcccaacgtcgctgcgccggcggccccggcgccatgagcatctacatgcatgcagttccttcgattcgatcgaccagaccgcaacagtgcagtgcacttggaatccctatatacacgcatatgctatgtatctaagaaataattaagatttcacagagagcatttaagaataaagtttccctaattgttgcagtatatagtagcccatttaatttcatccatcagttagagtctcaccatgttacggtccgttttgtgccttttattctctccaaaatatagtgttctaattcttacagtgaaattgaatgttcacccctcaagtgcatgcaagaacatgcttccatatcactcaaatagtaacaaaataatatacac

SEQ ID NO: 45702 - DNA, 402 bp, Oryza sativa
  Clone ID: PAT_MRT4530_48641C.1
atggagcccagtgagaaaagagagctactagaagcacatcgcttttcctcagagttggacgacaagacggcgacggcgacggcggcggtgctggacctcaggccgacgcagccgggggagaagccgcgcgtggtggtgctcaggacggggtgggcggtgtgcaggttcctcaaggacgtggacacgagcgcctacgacgacatgcaggttccaccaccgccgccgtcgccggcggccaactggaagcgggacgtgcaggatactgcgtcaatgaaatcagctatctatagtgctacaggatctaacttcgatgattttgttaagataggggatgaagatttcagatattatggtatagggatatcaattaaagccgacgaaaagataagggaaggcatataa

SEQ ID NO: 45703 - DNA, 1911 bp, Oryza sativa
  Clone ID: PAT_MRT4530_48642C.1
atgccccttaaatacaacttgcaagtagagatctttgatgtatgcgggattgacttcacgggacctttccctaagtctcaaaaatgtgagtatatcctagtggtagtcgactacgtgtctaaatgggtggaagcaatgacatgcagagctgcagacgccaagcatgcgaaaaggatgttcacggaaatcatatttccgcgattcagcaccccaatgatgattataagtgatgggggatcgcactttattgacaggaccttccgagaactcctacgcaagatgaacgccaagcacaacatcgctacaccctaccaccctcagaccaatggccaagcagaaatgtcgaataagcaaatcaagaacattctgcagaaaacggtccacgagatgggaacaggatggaaggacaaccgcgccagccgccctaactgccgccccgtagctatcatcgtccccgccgtcgtcaccgtcacgtcaccgtttaatgccagcatctcgtttctgatcgaagtcagttttttatccttctatcatttcttcgatggaacagcttatcgttatcatcccagccgttcagcaggaggcactaccagttcttttagttcagcttcaagggagaatggttctacttttggtcgcatgaggactatgatgggagcgcttgataagatgcacgcggatcttcaccgagcctcgaagacgctgaacgacaagaagctcattcaaatagctcgtttgcaagatgaggttgatcgtctcaaggtcgagaatacaatactccaggatggtgacaacgaggactacccgttctggaagcaatgtcaattaggaacaaccgacaactggctctatgggttttgctcaaaggacatagcaccaaacctcttcaagctggcaaagagaaagaaccgaaatgttggaactgagctcacaaatgatgaatggttacactctctaagacaaattacaagcttcgaagagatccaggagctcattcaactaggaggactcttgagccgggcaatagcaagacagactcagatgatgacagccatgatgaatcagatgcaacagcagtatcagcagatgatgcagcatatggtgcaacaacagcaacagaatcaacagcagcaaaaccagcagcacaatggtccccctcagtctaaattgccagagtttctacatgttcgtccaccgactttctcaagcacaactaacccaatggaggctaacgattggttgtacgccattgagaagagacttaacctacttcagtgcattgatcaggagaaggaaagcccaggccgtattagccaggaaatttcagccaaggcaattgtggaaaccagaacaaccgtaatcccgttccgcgcccgccaatggcacagtctcaagcttcgcagccccaacagccaaagaaggagtcaggatgaaagcccctcacatgtttcaattgtggagaacccagacattttgcagataagtgtcctaagccaaagcgcaatggacccaagattgttcaagctcgtgttaatcacgtgtctacggaagaagttcaagcagcaccagaagtggttttgggttcaaggggaggatggtcgtattttcgaagatgagagtgacgacgaggtcggcttgaccggtcagaccgggcgccaggccgatcagaccaccgacacacctccggtcagatcagcacaggatgtctggttagaccggctagggtcgtcgggttacgattctgttcatgctgatcgggatggtcctccagaggctacaacttcgaccagtgagggtacaaaacgtgaaacaactttagaagtcgccactcctttgcatattcaacgacaacatctgctgaaagaaatcattggtaatataggtgaggggactacaaggtctatgaattga

SEQ ID NO: 45704 - DNA, 228 bp, Oryza sativa
  Clone ID: PAT_MRT4530_48643C.1
tctacacgatgtaagtagaacacattaattacacacgtaaactagacttcagtctacttccttcgtcgcgttatccatgcgagaaacacgtgctagactcgcatgccactatgtgctatgtggtacgtatcatgtgaatgtgccaaagcgagcagattacgtacgtagttgcgacaagatccgttagttcatagcgtctatacgcgagcatgactgtgttgtatattg

SEQ ID NO: 45705 - DNA, 1641 bp, Oryza sativa
  Clone ID: PAT_MRT4530_48644C.1
atgatgaatcagatgcaacagcagtatcatcagatgatgcagcatatggtgcaacaacagcaacagaatcaacagcagcaaaaccagcagcacaatggtccccctcagtctaaattgccagagtttctagatgttcgtccaccgactttctcaagcacaactaacccaatggaggctaacgattggttgtacgccattgagaagagacttaacctacttcagtgcactgaccaggagaagccggaacagaggttacttgggatgagttttgtcgtgttttcaggaaagcccaggttcccaatggaattgttgcatagaagaagccgtattagccaggaaatttcagccaaggcaattgtggaaaccagaacaaccgtaatccctttccgcgcccgccaatggcacagtctcaagcttcgcagccccaacagccaaagaaggagtcaggatgaaagcccctcacatgtttcaattgtggagaacccagacattttgcagataagtgtcctaagccaaagcgcaatggacccaagattgttcaagctcgtgttaatcacgtgtctatggaagaagctcaagcagcgccagaagtggttttggtctccattaactcagaagaaaggagtaagtttgaatcatgtggaaagtgaacaacaggataaggtcatgaaagatgttccgaatttggaggacattcccgtagtctataagtttgaagcacgctctaccgatggaatgtttcttggttaccccgcacattctcgtggctatcgcgtacttgttttggaaactaacaaaattattgagacttgtgaagttacttttgatgaggctagtccaggtactagaccagaaactgcaggtacattgtcacaggttcaaggggaggatggtcgtattttcgaagatgagagcgacgacgaggtcggcttggccggtcagaccgggcgccaggccgatcagaccaccgacacacctccggtcagatcagcacaggatgtctggttagaccggccagggtcgtcgggttacgattatgttcatgctgatcgggatggtcctccagaggctacaacttcgaccagtgaggaacttgaaaattttgagagaaacaaagtttggactttagttgaaccaccttctagacataatattattggaaccaagaaggttttcaaaaataaaccagatgaggatggtttaattgtgagaaataaagctagacttgttgctcaaggttttactcaggtggaaggtttggattttaatgaaacttttgctcctgttgatagaattgaggccattagacttttgttagcttgtactgcttcaaaaggttttaaattgtatcaaatggatgtgaaaagtgcttttctaaatggttttatacaggagaaagtttatgtcaaacaaccaccaggttttgaaaatcctgatttttgtaaccatattttaaaattgtctaaagctttgtctgacttgaaacaagcacctagagcatggtatgataggctcaagaactttttacttgtgaaaggttttcaaatgggaaagatttataaagcgctttttgttcttaagcatgctgataatcaactttttgttcagatttatgtggatgatatcatctttggttgttaa

SEQ ID NO: 45706 - DNA, 179 bp, Oryza sativa
  Clone ID: PAT_MRT4530_48645C.1
tgtctggccgctcgcgtatctagaaccttgcggtggatacctagggggcccagagcacgaggtaagggcgttagcaagcgacgtaaatgctttcggggaggttgaaaataagcataggatccggagatttccccaaatagggtcaaccttttttgaactgccctgcttgaaatccatga

SEQ ID NO: 45707 - DNA, 288 bp, Oryza sativa
  unsure (1)..(288): unsure at all n locations
  Clone ID: PAT_MRT4530_48646C.1
ctcgctcgcatttgcttgcgattcccaaatcccgatgcctcctcttggcaactagccccctcctcctccngctcctccgcctacgactgccaaatcccctcctccacccgcctccgcatctccgccatgtcgtcgtcggcctcctccacccctcgcgccggcggcggtgtgcagctgtgcgggagccagcacacgccgccactgcccccggcgccgcatgggaacgggcatggtggcggcggcggaggaggaggaggaggaggaggcgcgcacgttcgggtcaatgtn

SEQ ID NO: 45708 - DNA, 313 bp, Oryza sativa
  Clone ID: PAT_MRT4530_48647C.1
aatccaaagaaaaggagaaggggatccttgttggaagcagagccatcgccattgccatggcgctgaaccgattcacccaatggctgaggccagtgagcatggtgcatgtggcgacgatggacgagctctcgagtaccctaggagccagcgctggcgagcgcagctgtggaacgccgggaacagccactgccaccatggaagcagtcgtgcggacgcccacccccaagagcggctgcacggtcttcgtgcggtgctactgttgggatgcccgaggcaaggggccagcgggctgaacggcaacaccagcgatggg

SEQ ID NO: 45709 - DNA, 258 bp, Oryza sativa
  Clone ID: PAT_MRT4530_48648C.1
atggcgaacggcggcaagcggccatggcagtgctcaccggcgcacggggcggagagggttccggcggtggattccgacggaggagaggtggacgggacggcccgcacgacggcgaacgcgacggcgtggctcggcacggcggctagcggtgttatatataattttgagataccggtcacgccgacgccgtcttctccctacttcacccgcaggtactgcttcattgcttccgctcccaccttcctcttctctttttga

SEQ ID NO: 45710 - DNA, 201 bp, Oryza sativa
  Clone ID: PAT_MRT4530_48649C.1
taacctggaaccaggtagtcaaggttctaccagccacttggtatttgttggactgcctgcagccccttggtggccctcttggcatgtttggttgttacgccttgtagacccgtaagatcaatgtaattacattgttagctcccatttaatttacggcatttcaggatgccgtctcacggttaaaaaaaaaaaaaaaaaaaa

SEQ ID NO: 45711 - DNA, 288 bp, Oryza sativa
  Clone ID: PAT_MRT4530_4864C.1
atggccatggcctccttgctcgacaagtaccgaagagaatgcggcgccgctggcctgtttgcaattggcagacaccataacagcaaggaggattattgttcatctactaatgaagatacgagtaaatcggtggagttttacgacttcctccaggtgaatgcgagctcgagcgacaccaagtgcggctcgagcattgaggagcaagaggataaccgggatgatgatcaagctgaagggcaggtgcagctcatagatttcatggaggttgggactacttctcgtcaatga

SEQ ID NO: 45712 - DNA, 489 bp, Oryza sativa
  unsure (1)..(489): unsure at all n locations
  Clone ID: PAT_MRT4530_48650C.1
tggccagagccaccacaactctgagaaattgggatngccttgttatacagaaattcacatgggttggagacaatcaggtttgaggccattgctcgacaagaccganctgtgccgcttgtcgaaccgttttcataaggttgcatcaaggcctcaaccttcaccaagaaggaacaatcctgccgtctacggaagaaggctggggttcngccgtcccaacttgccgaacgaataaccctcttgccagggtgagctacccaacttcatagcggagctagactgagaaaatgacatcctagaagaagaattgacagctacatccccctttttttccccactacgatctggtggcatgatacacattctgtaaattggcgtgtacatcctagtgtaaaagagcgatgatatttgttgtaccgtacccccattgatttgttcggtgttgttacacggttaggcaatagaaagagtttggttttaaaaaaaaaaaaa

SEQ ID NO: 45713 - DNA, 2310 bp, Oryza sativa
  Clone ID: PAT_MRT4530_48651C.1
atgtggccggtcagaccgtgctactctgcaacggctagaaaattagccgttgtagtgctgtcagagggccccatcggcctggccggtcagaccgaggttgagtggccggtcagaccggccttggctcggtcagaccgccatcggctcggtctgaccgactacggctcagtcggctttgtatcggccatcccgagcagcaccatcccggcctccacggggccggctgaacgcctgaacacactgatatactttgcactaggatcacctaggttagatttagtcgggtggttctatttgggattgatgaacgacattgtagatgaaagggagaggggtttagataccgaccggttgaggtgttcgtggaggaagaagcgccggacatcgtcgttgtcgtcgcagcttgacgtggacggcggcgacggtgtgcttgacggcggcggttgtcgttgcagcggtggtcgtgggcaatcccggcgaggtcgtggcgcggcgtgtgacggggacccaccagccattaggctgggcgcccccgatcagggcgcggtcaaggtccgttgtgccgttgggcccgacgggtgggagatctatctaacacacatcaacaaagaaaacgaggacagtcgggacagacagacaatcgacgcgtgcacactgtccgtcaagcctacagctgcgtgcgttctccccagccacgcacgacacgaggttcgcaagtccaacccacgcgccgacgcgagacctactcgaaacacctggacggcccggatcccccgcccgcgcccggtcacggacgccaagacgccatctcgtctcgtccattccaacccctccaaacccaaaccccccaattctgaccgcgcgaaccgcgactcgcgccaccaccagaccagacgacacgacacgctgcgccccaagtcatataccgcccgccgcgacctcgtccaacaaacgcaacgcaaacactcgctcgatcgccacatgccgacgcctcgtcctcgccaccgccaccatgcgctcccgctcgcgctcgcgctcgccgcgccgctgctgctgctagccgcggcggacgggcagccgaacgagtcgagggacaagaacaacggcggcgggggaggtgggttcatggcgcccagcggcggaggcggcggcatgggctctcagtcgccgagcttcagcgcgcccatggtggtgctcctcgtggcgctcatcgcggccttcttcttcatcgggttcttctccatctatatccggcggtgcggcggcgaggcctccacggggccgaccatcccggccgcggcgctggcggcgctgtcgcggcaggagcagcggagccggcggcagcgcgggctcgaccccgccgtggtcgagtcgttccccaccatgaagtacgccgaggcgagggagctccgcgacggcggcaaggacgccgtgctcgagtgcgccgtctgcctcagcgagttcgacgacgacgaggagctccggttgctgcccaagtgcagccacgccttccacccggactgcatcggggagtggctcgccggccacgtcacctgccctgtctgtcggtgcaaccttgcgcccgacgcggcggcggcggaagcgaacgtcgtctccggcgaggtggatggggagcagcaggaggaggaggtggtggtggccatcgacgtggaccgcgagggcgaggaggaggacgaggagaggcggagggaggcgatggagctcgagaggatcggcagccagcgccgcgcggtgcggtcgaggtcggggcggccgctgccgctgccgcggtcgcactcgacgggccactccctcgccacgacgcggctcggcgacgccggcgacctcgagcggttcacgctgcgcctgccggagcacgtgcgcagggagatggtcgccgccgccggcgaggagagcctgcgccgcaccgccgtccgggaaggccgcgtcggcggcggcgcccggagcgcgcggatcgggcggtccgaccggtggccgtcgttcatcgcgaggaccttctcctcgaggatcccgttctggtctgcgtcgaggagggtactcgacgccgcggaggccggagctgacgccgccgccaccaccaccaccacgacgccaacgtcaacggcgaggaccaagcgtgacaagacggccgccgccgcagatggctccgtgagctcagccaagggcagcgtccgcttcgactgtctcggcggcggcggcggcggcggcggcccgagcaacagagtcgtcgccttcgccaacgacgacgaggaggatgacgacgagaagccaatcgcccggcaagtttga

SEQ ID NO: 45714 - DNA, 2793 bp, Oryza sativa
  Clone ID: PAT_MRT4530_48652C.1
atggcgcgtccaggggacctagccaaccggctggacagcattcagcgctgcataccgtggtcgactgcggtccgtgaggaggagggcttactgtccaggtctgcggctgtggtccggatcacaggcatcctcgatgagggttgcctggtccaggatcttgaggagccaaagacggagaccaagaccgcctgcctgtgtgcttggatttggtccgaggatcctgatgccatcccgaaggcggttcacttccagctggaggagccgcttctgcagaactctcctgactccttctggcttgaggacctgggggagtcagggctggaacgcagacggactgtctcgtcgaagcttctcacttatcaggtgctgatccaccttgaccaagtgcttgactccagtcctcctccgatggagccagtctggggctacagccctagtagccagggcagtggcatgatctcttcggcctcagtgactgaagaggtgccaaagcggcacgatatcatttggagcttaggagtcaaggatggacagcgcgcccctcgcgaacatgtggcggcgaggctgggaccaggacgcaaccgctctcactcatgctcccgctctccgccggcgcatgagcatcgccggccttcgggttgggatgttccccctgctcgcacgacggctccaaccaggcgctcctcctccaggccaccagaccacaggggtggttcctatggtggctatcagcgggcggcgacgtctccggttagaagggagcgcaccaggtcccctcgcaacaggcagtcccctccgccagcccctcgcccgctggtaccccagacagcctccccccctcccccgccgtcagaggggctgacggagtttcgcccacaggaatcgcagattgtgccttttccactgactactccttttgcgactgtgctacaagttgaccagctagctaactccatcgccggcttcgatgctccaatgatggcgatccccctgtcggtcgacccaatgttggaggaggttggccttggcaacatcgctccgccgccagagcagtccctggaacagccgcaggcccagccgccggaacaggtgatgatagggaggctgtttgctcccttgtaccctgctagccccatcttaagcataatgatgctactaatgaagaaactaaaagtgtcttccactgcctcctttgtactgattgatcctgcactccactacatgttcagttgtccaggttctgctgtacaggaaacaaaattagatttcatcgaccaggcaaatttcaataggttattagggccaacattctcagaaaacttttgttttccttctacctcaggtacaaggggaggtgtcttactggcggcaaatgacaacaaatatgagttaaaggatgcacacacaggggacttcaacctgatcgtgcatgacagggataaaaacaatgcaaatctcaataggggcatgatgcaagccttcagggctgccctaaatcatctggaagttctagaaatcaaattaaatggtcagcgttacacatggtccagtgaaacggagtccccaactttaacgaagattgacagggtgttttgctcacagggatgggaggagagattcccaaattgcctcctagcagccatctctaccttggtctcagaccactgccctctattactcactgcaaatccctccagaccaaagagtaacatcttccgttttgaaaagtactggttgcgcctcccagatttcctagatacagtccaacaagcttggaacaagacagtacacacgacagatgcaatcaagcgcctccacacaaaactttctaggacggcaaaggccttaagtgtttggaacaagagcagggtccgtggaattaaattgagaacagacattgcgagcgaattgattttcaggctcgacctagctcaggaggaacgcagtgaaagtagatcccgttccacagcaatcaactacagcttcctacaggaacagagtcaagacctaactgacctagaggatcccttcacagaagatgaaataaaacaagtgatcttccaagctagatcagataatgccccaggtcctgatggcttcacaggtgccttcttcaacaaatgttgggagatcatacaggaagacgttgttctggcgataaatcaggtggcaaaccatgacactcaaagcctttggttactaaactcggcctacattgccctcttgcctaagaggaccgaagcactacagactcagatacctggggtttggagacaggtggattggatggatcatttctatcctatctacatcctcatcaaagatccccctaaacgggaaagcaggtcgtcctacaagaagaaacagatgacacgattacatggcggtggtctccaaatggaacctactcggcaaacaccgcatataggatacaattcgtcggaggcatccaggataacaggaagatcctcactgccgacaagctccatctccgtggttgggacaacagtcacatctgccctctttgaggtgtggaaccggagacagccactcacctcctcatggactgctcctttgcaaagcaaatctggagattcatctggcagaaggagagagatggcgaaagaacagagaaggaactttgatggcctcttcatctacacaacctggggcatttggcttcaaagaaatgctaggatctttaacggggcttacagcacagtaatgcaagttgtcgagtcaataatcgccatgtgtaaagcctatgatggagcacacaacatagatgagtag

SEQ ID NO: 45715 - DNA, 3039 bp, Oryza sativa
  Clone ID: PAT_MRT4530_48653C.1
atgtcggtcgactacgccaactacaccgtcctcatgccgcccaccccggacaaccagccgtccgggggtgccccgcccgcggcgccgtccgccggtggcgctaggccgggcgatctgccgctcccgccctatggctcgtcgtcctcctccaggctcgtcaaccggcgcggtggcggcgacgacggcgccaagatggaccggcggctgtcgacggcgcgcgtcccggcgccgtccagcaacaagtcgctgctggtgcgcagccagaccggtgacttcgaccacaaccggtggctgttcgagaccaagggcacgtacggcatcgggaacgcctactggccccaggacaacgtgtacggcgacgacggcggcggcggcgccgtcaagatggaggacctcgtcgagaagccgtggaagccgctgagccgcaaggtgcccatccctccgggcatcctcagcccctacaggctgctggtgttggtgcggttcgtggcgctcttcctcttcttggtgtggcgcgtcaccaaccctaacatggacgcgctctggctgtgggggatctccatcgtgtgcgagttttggttcgccttctcctggctgctcgaccagatgcccaagctgaacccgatcaaccgcgccgccgacctcgccgcgctcaaggagaagttcgagtcgccgtcgccgacgaacccgacggggcgctccgacctgccggggcttgacgtcttcatctccaccgccgacccctacaaggagccgacgctggtgacggccaacacgctcctctccatcctcgccaccgagtaccccgtggagaagctgttcgtctacatctccgacgacggcggcgcgctgctgaccttcgagtccatggcggaggcgtgcgcgttcgccaaggtgtgggtgcccttctgccgcaagcacagcatcgagccgcgcaacccggattcctacttcacgcagaagggcgacccgaccaagggcaagaagcggccggacttcgtcaaggaccgccgctggatcaagcgcgagtacgacgagttcaagatccgcgtgaacagcctccccgacctcatccgccgccgcgccaacgccctgaacgcccgcgagcgcaagctggcgcgcgacaagcaggccgccggcgacgccgacgcactcgcctccgtgaaggccgccacctggatggccgacggcacgcactggccgggcacctggctggacccgtcccccgaccacgccaagggcgaccacgccagcatcgtgcaggtgatgatcaagaacccgcaccacgacgtggtgtacggcgaggccggcgaccacccgtacctggacatgaccgacgtggacatgcgcatcccgatgttcgcctacctgtcgcgggagaagcgcgccgggtacgaccacaacaagaaggccggcgccatgaacgccatggtgcgcgcgtcggcgatcctctccaatggccccttcatgctcaacttcgactgcgaccactacatctacaactgccaggccatccgcgaggccatgtgctacatgctcgaccgcggcggcgaccgcatctgctacatccagttcccgcagcggttcgaggggatcgacccctccgaccgctacgccaaccacaacaccgtcttcttcgacggcaacatgcgcgcgctcgacggcctccagggccccatgtacgtcggcacgggctgcctcttccgccgctacgccatctacggcttcaacccgccgcgcgccatcgagtaccgcggcacctacggccagaccaaggtgcccatcgacccgcgacaaggcagcgaagccatgcccggcgccggcggcggccgcagcggcggcggcagcgtgggcggcgaccacgagctgcaggcgctgtcgacggcgcacccggaccacgaggcgccgcagaagttcggcaagtccaagatgttcatcgagtccatcgcggtggccgagtaccaggggcggccgctgcaggaccacccgtccgtcctgaacggtcgcccccccggcgcgctgctgatgccgcggccgcctctggacgcggcgacggtggcggagtcggtgtcggtgatctcgtgctggtacgaggacaacacggagtgggggcagcgcgtggggtggatctacgggtcggtgacggaggacgtggtgaccgggtaccggatgcacaaccgcgggtggcggtcggtgtactgcatcacccggcgcgacgcgttccgcgggacggcgccgatcaacctgacggacaggctgcaccaggtgctccggtgggcgacggggtcggtggagatcttcttctccaagaacaacgcggtgctggcgtccaggcggctcaagttcctgcagcggatggcgtacctcaacgttgggatctaccccttcacgtcgctcttcctcatcatgtactgcctcctcccggcgctgtcgctcttctcggggcagttcatcgtggcgacgctggacccgacgttcctctcctacctgctgctcatcaccatcaccctcatgctgctctgcctgctggaggtgaagtggtccgggatcgggctggaggagtggtggcggaacgagcagttctgggtgatcggcggcacgtcggcgcacctggcggcggtgctgcagggcctgctcaaggtggtggccgggatcgagatctccttcacgctcacggccaaggcggcggcggaggacgacgacgaccccttcgccgagctctacctcatcaagtggacgtcgctcttcatcccgccgctcgccgtcatcgggatcaacatcatcgcgctcgtcgtcggcgtgtcgcggacggtgtacgcggagatcccgcagtacagcaagctgctcggcggcggcttcttcagcttctgggtgctcgcgcactactacccgttcgccaagggcctcatgggccgccgcggccggacgcccaccatcgtctacgtctgggccggcctcatctccatcaccgtctctctcctctggatcaccattagccccccggatgatagcgtcgcgcagggcggcatcgacgtgtga

SEQ ID NO: 45716 - DNA, 602 bp, Oryza sativa
  Clone ID: PAT_MRT4530_48654C.1
gcacgaggtctctctcttctctcattctcgttcccttcttctatacgacgccgctgtgctatgaagctcaagcatagctgggcagcttaggcatggcagcgtgttcctgatcggtcaacaaagtagggctccggtgaggcggcgaggtcaatggtgaggtggagcagctaagccgtggctagtacaggttgcaggtctagtatctatgggtggtatggtgcttgtgggcatcagatctaccctagtactaggtctggtgcataggtatctggcaatggttctcgtgcctcatcggtgatgagcagagaagtggctgccgcatgcatccactaacccggagcacacggccaaggaacgatgtcgatgcatcaggggttgtggacgtagagagggaggcacatggcggtggtggctgccgcacgacggtaatggccaccctagcaatgcacacggatattggcccaaccttatagcccaatgtgataagaagcgaagcggtgatggctgatgggccaaaatccgtcgcagttggcagcaggttctattcagaagatttgtcacaaagtgaagccgaagttccgaagatgagtttgaaacagtga

SEQ ID NO: 45717 - DNA, 458 bp, Oryza sativa
  Clone ID: PAT_MRT4530_48655C.1
tttaatcctttagcgccgccggcgcccgctcgccccgccgtcttcgcctccgctttccggtcgcgccgccgccgctcacgccctatccagcctctccatgaactatgcccaccgccaccgcatccgcgccgccagacccacctccgtatcgcgccgccgttgagacaactgcggactccgacgcacgccgacgtcttcgactacgtctcacggcggcgatggcccctagcgccacacgagttcgcctacccatcgagcacgcgaggccaccggcgccgacgcggcagagtgcagctaggccgcggaggctacgtccaccgccgtcaggcgcggtcgagttcaccttctccatcctcattggttgcactcgctgatctaattgtctcttctcccataaggtcctggctatctgctggagctgggaactcaagccatcttcgaggccgcgggggaaccct

SEQ ID NO: 45718 - DNA, 536 bp, Oryza sativa
  unsure (1)..(536): unsure at all n locations
  Clone ID: PAT_MRT4530_48656C.1
acaaaaagctggtgataaagtactatatatgattttgtgcgttctggacaaaataaaaaagataaaaaaaaaaaaaaaaaaaaaaaaaaataaaaaaaaaaaaaaaaaaaaaaaaaataaaaaaaaaaaaaaaaaaaaaaaaattaataaaaaaaaaaaaaaaattaaaaaaaaaaaaaaaaaaaaaaaaaaaggggcggcccgttttaggggaccaaagtttacttacgcgtgcttgcaacgtaatagtttttttttggggcccccaaaattaaattaattggccgtgttttaaaaacgtcgggactggaaaaaccttgggtttcccaaactaaatcgctttgaagaaaatccccttttcgccagttggttttttgccaaaaaggcccaaaccgttcgcctttccaacctgttgcccnccctgacgggcaattggaaccccccctgttgcggccctttaaccccggcgggtgggggggttcttttttttgtgaccgntacatttgccaggtcctttgcgcccgttcttttggttt

SEQ ID NO: 45719 - DNA, 1206 bp, Oryza sativa
  Clone ID: PAT_MRT4530_48657C.1
atggtcatgagtgaatttaaattgaagtccgagaaactgccgcgcgtaacggacccagaaatttccggcggccatctctcccctttccttggaattcgcaccgtcaaaggtctgagcagcgaagccgtggagcgctgtgtcagccagatgatgatcagtggcccgacaatggcaagaacgtccctgttcccctttgcgagaagggggcagccgaacgcgaagctaccatcaatagcggcgcaggcaaaggcggcgcaagacgggtctggaggaacctccagcgcgtctcctgctgtggcctcgacagacgtcgtggccgtgcccaggagctgcgaagcgacgcctagtggaccggccagtgatcttgcggctggtcggggtccgccggctgccgtcctcacctgggaggagctccaggtcgagatggggcgcctcctcggggctggtgctcgcggcattagttgtgagatcgcggaggcgagggcggcggtggcgtcgtcggcgaatgagcgcgccgatcggctggcgcgtgatctggcagaggttcgcgaggacctccagaagatgagagaactggtggccggcaacgagcgacaacggcaggggctcgagcaccgcatgtcggagcttgagaacagcttgtcggaaatccgtggctcgttgcaggtcacctatactggtctgcaccagcttgccggggagtgcggtatcaagtccaccatcccggcgaatcccgatgagttctcgctgacgtcttctcttgcggagctggtgacggcgatggaggaaattccctccaagcatgcggccaggatcggagaagagacgtctaacgggatctacaccggggcgtgccacgtccttgcgtgtgtgaggctggcgcaccctgaactcgatctgtggaagatcttggatcagggggtggctagcgacgcgcacaaggatgtgatggaggagctcgaaggcatcggtcaacgtctcgacgaggccttgaagcaggagtgtcgtcgctcaagccgatatgctgaggggcacgtgttggcctgcatacgagatcatcatccgcagctgcaccttgagttcctccgcgaagggttttcacgttctcggaggaaccctgcggagatagatggcctggcgaagttgatggcgccgctagtggagaaggtcttccagtcgatggactggcgttggccttcctggtag

SEQ ID NO: 45720 - DNA, 2217 bp, Oryza sativa
  Clone ID: PAT_MRT4530_48658C.1
atgtcgcggcgcgcgccgccgacgatgctggcgctgccggcgccgccgcggctggggtggggagggaggacggtggtggtcggtgtacgggacgacgcggaggggagggagctgctcacctgggcgctcgccatggtcgccttcgccggcgaccgcgtcgtcgcgctccacgtcgccacccccgccgccgcggccggcgccgatcaagaaggcgccatgagaatggcggcgaggaggatcagagccacggaatcgctcgccgcattgctccgcgcgtacgacggcttctgcgatctcaaccagatcagcctggagctcagaatctgccatggatcatccatcaagaaggctctcgtgaacgaggcgagctcctatggcgcggcgcacctcatcctcggcgtcacaaacaactcccggagccatctccggccatcttcgtcgccgtcgtcctcctccgccgccgtcgcgaagtactgcgcgaagagagtgcctccgagctgctcggtcctcgccgtcggcaatggcagggtcgtgtacaggcgagacgccgcgcagcagcaactcaaccagtgcatcagcccactggtggagacgccgaggaggatttaccggaagatttaccggaagctcgtcagagcggcgacgacgatcacccgcgagaaatcccaggacgacgcggcgatcgccggcggcggccggcaccttcgccggaacatctcgacgccgacgagcgcccccgtctcgccggtcgtagcgttcacgccacgtcaggcggaggtcgccgccggctggccgctcctctcgccggacctgaagtccgccttgccagagtggacggagatgtcggtggcgcggtgggcaatgcagctgccgagccggtgtccggcgccatcgccgctaaatccacgcaacaactccggcgaccaagcgacctcaccggccatcaccgcatcggaaactccatctccggcgaccgatgaagcggcggagcaggttgcacaagagcttgcctcgctgagaaacaagtactcatccaagtacaccatgttcagctacagcgagcttgcaagaatcacttccaacttctcaccagatcggataatcggcaaaggcggggcgagcgaggtgtacaagggttgctgtgatgatggcaaggaggttgcagtgaaggtgctgaaatcttcagacaaggtgatggaggagctcgtctcggagatggagatcgtcagctccgtccgccacggcaacgccatgccgctcaccgggttctgcctcgacggcggcggcggcgccgccaagatcatgctggtctacgactacatggcgagaggcagcctcgaggagatcttgcacggtgaaaaggagggaaaagatctgtttggttggccggagaggttcaaggtggccgccggagtagcacgagcgctcgtgtacctccacggcggcgacggcgacggccggccggtgatccacagggacgtcaagtcgtccaacatcctcgtctctgaagatttccaaccaaagctgtgtgacttcggcctcgcgctctgggcggcggaggcggcgtctccggtcaccggcgacgatgtcgccggcacattcgggtttgtagctgcagctgcttcttctcatcttcttgaagaattcaagtacttggctccagagtacttcatgcacggcaaggtcagcgacaagatcgacgtgtacgccttcggcgtcgtcctcctcgagctcgtctccgggaggaagccggtgagctccggcggcggcaagggcaaggagagcctcgtcatgtgggcgaacaccatcatacaaggaggaaagctcactgacctcgtcgaccccagcctgccgacggacggcagcggcgtcgccggcgaggtcgagaggatgaccctcgccgccgccctctgcatccggcgatcgccgcaacgccggcctagcattgcaaatgttctgaaactgctcgacggcgatggcgacgctgtcaggtgggtgaggtcgcaggccggtctgtccgccggcgacgacaccgacgacggcgatggcgcttcgccggagaagaaggacatccagtcgtacatcaaccttgcgctgctcgacgtcgtcgacgactcggcgtccgtcagcagcggcggcggcgacttcacggcggcgaacgtgtcgctggaggagtacacgaaggggagatggagccggtcatcgagcttcgactga

SEQ ID NO: 45721 - DNA, 376 bp, Oryza sativa
  Clone ID: PAT_MRT4530_48659C.1
tggttttttttttttttttctttttttttttttttttttaggtcagacccaaccaaaatgattattaacgcatatggaaaccggaatacaaatctgatcggtccataggagcggaatacggggggaaagaaaaggaaacagaaacaattacaaggtcgaacacccaccaggattcaggtagaggggactacttaaaaccgcacgaggaatcaactgagaagggggtcggggaaccccctggggcctaatatacgtggccattaaatataaaggggatgctgccgcccctagaaggtacaagagggccaagaagggcttcttttttggtggtgttcctgaaactaagctagaatcgccagcgtccatggaaggggcc

SEQ ID NO: 45722 - DNA, 1248 bp, Oryza sativa
  Clone ID: PAT_MRT4530_4865C.1
atggccgccttccatggccgccgggcgccttttccgccgccgttccctgctcctcccatgctcggctcgcttccctccgctataaaacggaacccccttgctccattctctcgttttagccccctcctgcgccctccccgtggctgcaccacctctccccgcctcctccttctctttcctcggtgccggccaccctccagccgcccctaccgccttgcccgagcgccggtcggccatgccggcgcctcctccagcgtcgcagccgcctcctctgcgccggcctgccctctgttgcccgtggagacctccggaagtgcatccccgccggcaacagtggcgttaccgccactgttccgtcttcggccagctgctgttcatcgctggtacgccgaccgacgtcgccatctcctccgtcgacgtcgcagccgcctcctctcccccggtcagccctccgtttcgcggggaaaccaccggagacgtgtcctcgccggcaaaacagtggcgttgccgccactgtaccgcctccagccgcctgtgccgccttgccggtgcagcgactgtcgtcatcgccatcttccctcgacgtcgccgcgtcgccctccaccccggcctgccctcggtttcgccggaacgccgtcgcccgcatcggtcttgccctccgcctcgccggagttccttcggcaaccccttccgccgtgcctgtgcgccggccgacgtcgccatctcctcctccggcatcgcagcgtcaaggttgccctcggcctcgcctcccctccatccaaaccccgccggtgttcgttatcgtcggctccgttcgtcctcgttgacgactcctccggtcggtcgttcgtcctcgccggatcatcgtctcgctgcgccgccaccctcgtcgtcatcgtagcggagtgttccacgccgtcctcgtctccgtgcagctgctgccggctgcctcatcacctccttgccggttcttgtcgtcgtcctctcgtcgttcccggtcgtcgtggcgttcgtccctctgtcaagccgttctcgtccgtcgtccgcgtccgtcaagtgtgccgctgcagccccgtcgtcgtcttcgtcctcgcctccgcttctccaagcattgcgccggctacgtctcgccttcgtccagggatcgccgccgaagtcgtcccctcgcctttcgtctccgtcattcccggccatctccgccgcgcccgttcgttgttgtcgttccctcgcctcgtcacgtggtggtaa

SEQ ID NO: 45723 - DNA, 329 bp, Oryza sativa
  Clone ID: PAT_MRT4530_48660C.1
cagaaagattttaaacattaaactgcttcccattttaatatatccaactttaacaagggcggttgtagaatatttactacacatgattctacatcactctttatttttgcttttttttttctaacacattttaaattatgcacctgaaactgaacaaacacttttttactactacaagggatccagccccaaaaagctctaatttttccccctttttttttcactttttatccccagtgaataaaagccaagagactaaactttaaaatctccaaggttttacactacacaacaaaacgatcgggctcaccactcacccatggctcttt

SEQ ID NO: 45724 - DNA, 385 bp, Oryza sativa
  unsure (1)..(385): unsure at all n locations
  Clone ID: PAT_MRT4530_48661C.1
cgtagtcccgggggggtttttaaaaaatttttttttggggggttttgtnncgnnnnaaattccgcttttttcctttccatttttcttatccccttccccgcctgattggttgggctgcccctcctccattttatttttttctttccttaacccttaagatcagctaagaaaatttcctatataaccccnncccaaatnnctttcttttccttccattggaccctccttctcttccccctcntttttcccttccctcccattaccaatctattaaattccctcttggaaaancccctttaaacccnctctgctcaagggcgcgctttacccccttctgaaaaacagccccgttgccccccctntncccctccccttgggccctggg

SEQ ID NO: 45725 - DNA, 192 bp, Oryza sativa
  Clone ID: PAT_MRT4530_48662C.1
atgggaccaaacgggcgccaccctggtttggcagaaccagacgagtgtggccacgttgtgtttggctgcgatgtctcccaggaggtctcgaatggttttgtcgataaagttgtatgtgaggggcattgcatcgcgagcagtgattcctccttgcctctggcagcttgggcatcttctgacgagttcctttga

SEQ ID NO: 45726 - DNA, 461 bp, Oryza sativa
  Clone ID: PAT_MRT4530_48663C.1
cgcaagcaaagccgccggaggaaggagcaatcgcgagtactcgccaccatgtaccgggcggcggcggcggcggcgtcgtcgatttcgaggtcctcgtcggcgctgcggaagcagctgtcgcgcggcggttgcggggagcagcggctgtgggcgcgggggtatgcggcgaaggaggtggcgttcggcgtcggagcccgggccgccttgctgcagggcgtgaacgacctcgccgacgccgtcaaggtcaccatgggccccaaggggcgcaatgtgattatcgagagatcccatagagctcccaaagtcacaaaggatggagtcacggttgcaaaaagcattgagtttgaggacagtgctaagaatgttggtgcaaacctggtgaagcaagttgctgaagctactaataaggtcgcaggagatggtaccacttgtgcaactgtacttacacaggctattcttac

SEQ ID NO: 45727 - DNA, 448 bp, Oryza sativa
  Clone ID: PAT_MRT4530_48664C.1
caagaatcgtaggcctcttctcatcattgctgaggatgttgagggagaagctctatcaatgcttgttctgaacaagcatcgtgctggattaaagatatgtgctgtcaaagctcctggatttggtgaaaacagaagagccaatctggatgacgtggctgtgttgacaggaggagaggttgtcagcgaggaccaaggtcttgatcttggtaaagtcgaactacaaatgcttggcactgctaaaaaggttactgtatcccttgatgatactatcattctagatggtggaggcgacaaacagcagatagaggagaggtgtcaacagcttagagaatcaatggacaaaagcactgctgtatttgacaaagaaaaggctcaagaacgtctatcaaagttatctggtggtgttgctgtcctcaagattgggggagctagtgaagttgaagttggt

SEQ ID NO: 45728 - DNA, 2344 bp, Oryza sativa
  Clone ID: PAT_MRT4530_48665C.1
atggaccgtacgtggagccgaagcttccggaacccaaaacccttcttccctagcaaaaccctctctctctcttctcgaatcgaaattgcgaagccgcaagcaaagccgccggaggaaggagcaatcgcgagtactcgccaccatgtaccgggcggcggcggcggcggcgtcgtcgatttcgaggtcctcgtcggcgctgcggaagcaggtaaccggcgcgctacctccgcctcctcctccttcccacctgacgcatctcttccgggcgacgctaacggacggggactcttgcttgcgaggcagctgtcgcgaggcaggagcgaggagcagctgctgtgaacgcgggagtatgaggccaaggaggtggcgttcggcgtcggagcccgggccgccttgctgcagggcgtgaacgacctcgccgacgccgtcaaggtcaccatgggccccaaggggcgcaatgtgattatcgagagatcccatagagctcccaaagtcacaaaggatggagtcacggttgcaaaaagcattgagtttgaggacagtgctaagaatgttggtgcaaacctggtgaagcaagttgctgaagctactaataaggtcgcaggagatggtaccacttgtgcaactgtacttacacaggctattcttacggaaggctgcaaggctgtggcagcaggggtcaatgttatggacttacgtaatggcataaacaaggccataagttctatcactacacacctcaaaagtaaagcatggattatcaactcctcagaagaaataaatcaggtagcaactatttctgcaaatggagaaaaggaaataggagatttgatatcaaaggcgatggaaaaggttggaaaggatggagttattactattactgatggcaagacattagacaatgagcttgaagcggtacagggaatgaaactttccagaggctacatatctccttactttgtgactgatcagaagactcagaagtgtgagatggaaaatcctcttattctaattcatgacaagaaaatctcaacgatgaattcacttcttccagttttagaaatgtctatcaagaatcgtaggcctcttctcatcattgctgaggatgttgagggagaagctctatcaatgcttgttctgaacaagcatcgtgctggattaaagttaaagtgcaagcttcttaccttcttcaagctagagctatggatcgttgatattctgatatgtgctgtcaaagctcctggatttggtgaaaacagaagagccaatctggatgacgtggctgtgttgacaggaggagaggttgtcagcgaggaccaaggtcttgatcttggtaaagtcgaactacaaatgcttggcactgctaaaaaggttactgtatcccttgatgatactatcattctagatggtggaggcgacaaacagcagatagaggagaggtgtcaacagcttagagaatcaatggacaaaagcactgctgtatttgacaaagaaaaggctcaagaacgtctatcaaagttatctggtggtgttgctgtcctcaagattgggggagctagtgaagttgaagttggtgagaaaaaagatagggtaacagacgctttacatgcagcaagggctgctgtggaggagggcattgtaccaggtggtggagttgcccttctgtatgccaccaaggagcttgacaagattatcacagcaaatgaggatgaaaagattggagttcaaattatcaagaatgctttgaaggctcctttgatgactatagctgcaaatgctggcattgatggtggtgtggtcattgggaagctaattgaacaagataatcttaatatgggctatgatgcagcaagaggggagtatgttgacatgattaaggctgggatcatcgaccctgtgaaagtcatccgaacagcgctacaagatgcatcaagtgtttctttgctgatgacaacgacagaggcagctgttgctgagcccccagcagcaaaggccagaatggctagtcggatgccgcagatgagcgggatggatttttgagagcaagtaacatgatttatgatatgtcttctcctgatgtaaggcagtgcccctcaaatgaaaggggtgattttttgaaagctatatgacgtgattttgtcttttcgtggtgaaaggcagtagtagtacttaatatttctacagaatttcacggcccgggagaaagacgttacagatataatttattttaaacttgggaattgggaatccgtctgatgtaaactgaactaatgtggagcagcacctcattttgtagattactacatatgtgaaattgatactgtgaaagctgcaatattttact

SEQ ID NO: 45729 - DNA, 4049 bp, Oryza sativa
  Clone ID: PAT_MRT4530_48666C.1
ttttttttttttttttttttttttttttttttttttttttttttttttggattctttgcaaaataatactgatgtaggggaaatgatgtataaatagaaatcacactcgagtagtaaacacaccagttggctcaacaatctacagtagagggttcacaaaattttggccctaggggttgggaaaaaggaatttgggtcgacaatacagaaagctcagttgtcagttgaactcacacttgggatggagttgtactcacacttcacacagcaactggagtcttttctcaggaataacttttgcttgcatttcctttggcaaattgacataatagttcacattggggaacttcatggggaggggctgaaaaggttacattgccatggtcatgtttcgggcattagcttctctggaaattaatcatcttgatggatatggcgtaaattgaaaagaagaaaaccgaaaacgcaacgaggacggcaaccgtggcgcctgtcatcccctgttcaaatcccaggttttgctggaggaattcatgcaccgtcccgtcgaaaccagggcccattatccttgtttccagggagcctaattttgaagtaatgactcctcgcaggctccgtggaacttggcagatagaataaaaacagattcaccatcctggatcactagactgtgggattctgaactcagaaagaagattccctaatgagtaaaatgctgaggatacaacagatgccatatgttgaatagtcgtcaagcgtactgccacaattccataaaacatgaagtaggtaaaagcaaggtacgcatatataacaaacaagtacatgtcctgggtattcctgtcaaccattggtgcaaagcctatcgtgaggcatactattagtgtctgaactgcaatatatgggatctccacaagaccgtggtaaacctgagctgcagcatatgggaatgacgagtacatgttagctgctctttctctataggaacactggaagtcgagaaatattcatgccagataaagattcccaattttgttcatcaacaggatgtaatcttgtccggagaaacagtgtggaagtaatatatcttctgtggattctctcttcatcccgacgttccaaaatattgaaccaaatattatagcagcaactgatgtgaaaaataaccgcacaacattatactctggacttctccagtaaacaagactttgcttgcgcaggcacaccatgaattgagtaaggcgattctgtgaaaactccgatgagaaaatcacatgctcttgctcaatccaccagtgtcagcaatgttgcttgctcgactgtggattcctttgatcactgctgctgctgcctgctaatgctcgaagagaagggaggtgcagaccacaggcttgtgttgtaacttcaagcatccaggttgctgggttgtagccttcagtgataggaacgaccttccctctgatttgggtcacgggtgcaggtgagcttgccgtgtgctcaatgattccctagccacctctgatttgggtcacaggtgccaaggtgagctcgaagatctgattcatatatcacacctggccaccgcctagttgcattgtcatccgccatatcgcactaggcacttgccgcaaatgccttgacgccatcttatccataccgcctaggcaccgatgttgactgccttccataaaaatgatggaaggatttgcaacaagctcaacagctatagtaagacgtttcctttgctctgtcgataagcctgttaaaccctgttttccaactaatgcataccgaatttgatcgagctctaccaatgccataacttcttcaacaaatgcttgtggcgagtgtatgtcattttgttcaacatatcctgctatcctggcaaatgttcgctgttcttttttatggccagaaatcctgatatcaccttctatgtagccaccagtttttctgccagctaaaacatccataagtgtcgtcttcccagaaccacttgcaccaaccaatgctgtcaggacacgtggcctaaatatcccactaacttcagacagcaactgtagtcttttctcaggaacaccttttgcttgcatttcctttggcatattgacataatagttcacattgtggaacgtcatggtgagtggctgaaaaggtagtatcattccctttttacttttgcactccgtctgcccttcaaatccatcattgttctcgaatatttctccaatcgtatttttgttggagtcagtatttatatgcacatctcttccatccccagcatcagaaggaaccattgactgtggctttcgaaggggattaaggaacgccaacgcaagagtaaacataatattgaaaaatatggaataggctaataaaacgccaactccaatccagaaccaatgatcgtctgttgggagactgtgtgaaataagaatattggttccaactgtcatgttccctgaaactgataccgtgtagtatactacacatgaccatacgacagcttcaataaaggaatatggaattcttagtatccaatttggaagtgagaaagcccatgcgggatgaaagaaattatctctctgtttatagaacactggaagtcgagaaatagtcatggtcatctcatactgggattctttgaatacagctgccatttctgatgcagaaacaaagatgtgttgtttggactgatcagaccaatactgagcttgatctttctttgaagtcacctcctggagaaaatctgcaattcccttccgaggtggcaatgaaaatcccaatgatttaaaatagtccacgacatgcttgataggaccttgataaatgatctttccttctgacaacagaattagatcatcaaataattcaaatgtctcaggtgcgggctgaagaagtgacatcagcacagtagcttccatctcatgaacaaagttcctcatgcagttaacaatttgaaaggttgttgagctgtcaagacctgtcgatatttcatccatgagaagggtttttcttggtccaataatcatttcacctgttgtaactcgttttttctggccaccagagacacctctttccatgtcactgccaacaggggtatcagcacatatatccaacccaagcactctcaatacatagtctgagacaagattgtgtttttctcttcggaatgatgcagtcttcataaaagcatctatctcaggacttggccttatgcccctttccttttcaagattgaccaattcttttaggcactcttgccaattttcactagcgccctggcattttgccgcaaaatctaaagtttctcgtactgtcaattctccaatgtggttatctgtctggctgatataagcagaagttctctgtacacaaaattgatctagagccattccattgtaggccacttctccacttttttttagctgagaatccagtttatcagcaagagccaacaaaagagttgacttcccagatgcaggaggtcccaacaacaacgtcattctcccaggtttgataactccactaacgtcgtccaaaataaccagcttgtgcttgtcaggacgtaaaagatggctgctaataagaattctctccgcaatgtcgtggacgtagttgacaagagtgggcagtgctcgccggccgacatggacatctgttgatacggtcaggttctggaacctcacctccacccgcggcacctccaatcccaccgcgtcgaagcgggccttgatgccgtggaggaggttggcgttgtcgagttcggaggtggcgagcgcgtggcggagcacgcgctggagcccgggccggtcgagcttccgcacgtccaccaactggccttctcctcttccgccgccgtcgccgccgcctaggccgtcgggatcggggaggacgacggcgtggctccgccgcttcgcggaggggagccgctcgaaggccgcccagagcaggtccgcttcctccgccaccgccctcctcctgctttcctcctccccctccacatccaccgccacgtggtggtcgatgccgcccgcagcgaacgccat

SEQ ID NO: 45730 - DNA, 795 bp, Oryza sativa
  Clone ID: PAT_MRT4530_48667C.1
atgtccggctacgggcagcagccgacgggcgatcgtcttgagtcggcgacgttggtgcagtccatggagtcgaccaaggatacgatcgtccggcgcatcaccgagtcggcggccaccgtcgacagcgccgacgtgcaggcggccgcggccaagctgacggcggctgtggagtacaggttcgacgttgccaaagctgacgttgatcggatcatggccgggagaggacgcgacgaggtggatcagcgcgacggcggtccacgggggtggcgcagcgaggaggaccacggcgacgacgtggcaggacgcggcaaggaggaccaggacggcgacggagcggcaggacatggcgaggaggtccacggcagcggcggtcctcggcggtggctgtgtgtcggcggcggtccccggtggtggctgtggctcgggcggcgatccccagctgtggctgcgcggcaagggcgcagcgagaaggaccatggcggcgacgcgacaggacgcggcgaggatgaccagggtggcggcggtccacgggggtggcgcggcaagggtgcggcgaggaggaccacggcggcgacacggcaggacgcggcgaggaggactagggtggtggcggtgcggcaagacgtggtgacgaggaccacggcagcgacgcgacaggacgcggtgaggaggtccacggcggcggcggtgtggcagggcacggcgaggtggtccacggcggtggtggcacggcagggcttggcaaggatgtccacggcggcgcggctgtcgcaggatgtggcgcgggggccatag

SEQ ID NO: 45731 - DNA, 1135 bp, Oryza sativa
  Clone ID: PAT_MRT4530_48668C.1
gatgtaggtgaaatgatgtataaatagaaatcacactcgagtagtaaacacaccagttggctcaacaatctacagtagagtgttcacaaaattttggccctagtggttgggagaaaggaattagggtcgacaatacagagagctcagttgtcagttgaactcacacttgtgatggagttgtactcacacttcacacagcaactgtagtcttttctcaggaataacttttgcttgcatttcctttggcaaattgacataatagttcacattgtggaacttcatggtgagtggctgaaaaggttacattgccatggtcatgtctcgtgcaatagctcccattatcctgaaaaggcccaatgccatttgatatatagagaataacagcaacatgaaacaaaagaatctgcacatggtatgttagatcaacatgaacaaatacaaaagatgtagctagttaggcatattgatcaaaagggtacatgtcctgggtatacctgtcaaccattggtgcaaagcctaccgggttgtatacaacacatgaccatacaacagcttcaataaaggaatatggaaatcttagtatccaatttggaagggaaagcccatgcaggatgaaaaaaattgtctccctgtttatagaacactggaagtcgaaaaatattcatgccaaataaagattcccattttgttcatcaacaggatgtaatgttgtccggaaaaacagtgggatgtaatgatcccaacaaaagcaacctgggaagaacctgaggagaattttttttaccacacgaactacttagattggcctccaaatatgtaccatactgggattttttgaatacagcagccatttctgatgcagaaataaagatgtgttgttttgactgatcagaccagtgccgagcttgatatttctttgaaatcacatgctcttgctcaatccaccagtgtcagcaatgttgcttgctcgactgtggattcctttgatcactgctgctgctgcctgctaatgctcgaagagaagggaggtgcagacctccggggagaagatatgggcagaggcgaaccccaccggcgcagatcaagttgccgtgtgctcaatgattccctctgatttgggtcacgggtgcaggtg

SEQ ID NO: 45732 - DNA, 1348 bp, Oryza sativa
  Clone ID: PAT_MRT4530_48669C.1
cccacgcgtccggttctagatcgcgagtggccgccctttttttttttttttttgatcgagaaatcctgatcgtttcctcaagagttatatgatcattctctacaattggcatgcctctaaaatcagtaacaagaaacaaatcatgatttgaaaaatatcagtttatgtcaaaaatgtttttatttgaatttgatagacgaggatttgaacccgggtagttgggttgtgcttgtgcaccgctcccctctgacccggagtgctccgtgcactcgatcttgctcgtccgcaccctcctcctcctcacgtgcaggcgcgacgcggcccacgacacgacgcgcctgtacagcgtcccggcgaggccgtgcgcgtcgccgcggcggcgggggcggcgcggccagccggcgctctcgagggcggcgtggagctcggcgaccacgtcggacatcgccggccggcgttccacggcctccgacacgcagcgcgcggccacggcgagcacgcgcgccaccgcgcgctcctccctggcgcggcgcggcgcgggaagcctcccgtcgaacacctcgcgcgccatgccggcggcgaccagcggcacggcccaggcgacgatggacgacggcgaggcgctcacgtccatcaccttgcggccgctgacgagctcgaggaggacgacgccgaagctgaacacgtcgctctccgggccgaggcggctgggctccgtgtagcacgggtccaggtacccgatcgtgcccgccggcgcaggccccgccgccgccgcggtggcgccgcctcctccgggggcggcggggaccttgaccgcgaggctgaagtcggcgaggcgggcgcggccgtcgcgccccagcaggatgttcgccgacttgacgtcgcggtggatcacgcgtggctcgccgccgtgcagcgcccgcacggcctccgccacgtcgagcgcgatctccacgcgccgcggccacggcggcggcggctgcctcgccgtcgtcggccggtgcagcaggtcgtgcagcgacccgtcggccatgtactccatcacgagcatcctctccccctccctcctccccgccgccacgccgacgaggttgaccacccccgccacctcccccgccgccgcgagcacggcgatctcgttcgcgagcttcgcctcccccagcgcgtgcgacgccctcttgacggcgacgaccaccaccttcttcttcctcaccctcccgccaccgccatcgccgccgcacacaagcctggccacgtagacgttgccatggctgcccttcccgacgaggttcttggctgcgaatccccccgtcgccgcctccacctcctcgaacgagaactccctcat

SEQ ID NO: 45733 - DNA, 380 bp, Oryza sativa
  Clone ID: PAT_MRT4530_4866C.1
acacaaagcaacgtctgaagagagcagaggattggactatatgtggtcgaagcctacgaacgcgtgcgggccattggaactgtttaagatactacaccatatcaagcacacaatgtgcatgattgcacagacgaagtgactggctgatcatggcagtgcccaagctgatgaatcaacaaggaccatctatggaggccacgtaactggtgcgaactgagaggagctcgcatcaaagtctgatgcagatggtcatcttgaagggggagcgtgactcacgccggaacgcatcaacatcatcaactgcggcaccgggtactcccactaagacctttacactattcagcttccgagcggcaagatgtctgaagaggatcacacct

SEQ ID NO: 45734 - DNA, 300 bp, Oryza sativa
  Clone ID: PAT_MRT4530_48670C.1
atggcgttcaggaggtacagggcgctgccgcaaggggaggtgacggtggaggagttcagggcgtggctggggcagttcgacgcggacggcgacgggaggatcagccgggacgagctgcagcgcgcgctgcggagcctcaacctgtggttcgcgtggtggaaggcgcgcgccggggtgcgcgccgccgacgccaaccgcgacggcgccgtcgccggcgacgacgaggtcgccacgctcttcgccttcgcgcagaggcacctcaacgtcaagatcgccgagctcggcgcctcctactactga

SEQ ID NO: 45735 - DNA, 514 bp, Oryza sativa
  Clone ID: PAT_MRT4530_48671C.1
tgatggaggcgcacgcgtcgttcggtgtgctccggcggcaaggtgctcaacgtgggattcgggatggggctcgtggacacggcgatccagaggtacgagcccgaggagcacaccatcgtcgaggcccacccggaggtgtacgcccggatgctcaagctcggctggggcgagaagaagaatgtcaaggtcgtgttcggacggtggcaggacgtgctcccgcagctcggctcttatgatggtatattcttcgacacctatggagaatactcaggatatgagagagttccaccaacatcttcctaagctattgaagcctggcagggatctactcgtatttcaatggcctctgtggcgataatgccttcttcaacgttgtgtattgccagctcgtagcgttagagttggcaaatcttggctactcgacacagttcatcccgctcccagtcaaagattgtctttcagaggaaatatgattgcgctgaaagcagaaatactggcaattggatacttacca

SEQ ID NO: 45736 - DNA, 1566 bp, Oryza sativa
  Clone ID: PAT_MRT4530_48672C.1
tttatatcgcgagcgccgccctttttttttttggttgtttcgcatacctaacaaaaggggaacatcactgccaagaaaacaaagtttcggtgaaagttctctttcattggctacaggccacagccgataagcatctacaggagtagattagtagtcgattgcagtggaaacgtcacatgcccgatggaagttccagctccggagatggtgtatggaattcagaaacacgcttgaacaaacgtagcagcagccaaagcagccagccattgacgcttagcacaatttgctggccattgacgcttagcacaatttgctgacaatccattggattattgctccggttctgattctgcttggcaaactgggaggtggtaagtatccaattgccagtatttctgcttcaccccattccatatttcctctgaaagacaatctttgactgggagcgggatgaactgtgtcgagtagccaagatttgccaactctaacgctacgagctggcaatacacaacgtggaagaaggcattatcgccacagaggccattgaaatacgagtagatccctccaggcttcaatagcttaggaagatgttggtggaactctctcatatcctcgtagtattctccataggtgtcgaagaatataccatgctgttttgtaatgaaataaacatgaacaaacatttttggatagtaatgaataaggaggactgaattatccaatgcaatgattttattgagtatagcatcatatttatcactggctgcagaaatctgagacgaatccaaaaggtagaaatcctgctttgcaatcccttcaaaacaagagaccgacaactcatcataagagccgagctgcgggagcacgtcctgccaccgtccgaacacgaccttgacattcttcttctcgccccagccgagcttgagcatccgggcgtacacctccgggtgggcctcgacgatggtgtgctcctcgggctcgtacctctggatcgccgtgtccacgagccccatcccgaatcccacgttgagcaccttgccgccggagcacaccgcccgcgcgtgcgcctccatcagcggccgctcccactccatcatcacggccttgctatccgcgtccatcaccctctcctcgctgaatgaaaccctggattcgaggtagctctcggcgggggagtccgcgggccccgcttggcggcgagcgacggtgccgaggacgagctcggagcggagggcgtggtcgaggaggaggtcgaaggtggcggaatcggaggcgaggtctcccgcggagatccccgtgggggagagcgcgttccatggcgcgccggcgtcgaggagaagctgcacgacggcggcgtggccaccggtggccgcgtgcatcagcggggtcaacccggaggcatcgaagtgggtcgggtcggcgccttcggcgaggagcccggtgatggcctccgcgtcaccggactccgccgccgcgcagaggagctcctccggcgatttccccgccttgctctccgccgccgccgccattttcgccggccgcccggggatccactagtttagacgc

SEQ ID NO: 45737 - DNA, 181 bp, Oryza sativa
  Clone ID: PAT_MRT4530_48673C.1
atggagatcgatagtccactaggctggaaacgtgcacgcatcctgaccgtctatggatgctttgatcggttcttcccaccgagaattgtccggcaactaggtggggcagggcttcgccggccggccttccacgtgcaaagctacggccacagaaaagttggcaccaaggatcggaggccag

SEQ ID NO: 45738 - DNA, 2082 bp, Oryza sativa
  Clone ID: PAT_MRT4530_48674C.1
atgtcatcctccgccagcccatctgccgcaccatcagccgagtatgctgagccatccctcgagaaaacttctcccgagaaaagttggatcacatggtttaagcgcatatcggctagcaagagagttcattgggatgagatcagaatcggccaggcacttgatctcaccatagccaattcagctaaggatgagcccctaatggcagctgcttcctatttttggtccaacaccatcaatgccttcttgttcaaccaagggccgatgaccccaactctcatagaaattgtcatgatcacgggcctggacgtcacctcatcggctaaccctatgagcttgaacataaagaaccaatatgacttcaagaccaagagcataggcggttggtcaggctatgtagcagcatacatgggccagggttcagtcaccccccgagaacatgtggctttcttgttaatgtggttagaaaaatttctcttctgtggatcaagctgtggccctacaaccaactggcaatttgtagccgaagccctagaaacaaaaagacaatttcccttgggcaaaatcctccttggctatctataccaaatgttgatcaatgcatcggccaagatagctgtcggctcaatggttggagcaggcggaccatggtggttgctgcagacttggctaaacctgatagtcatgaaagttgtcaatcggccatctgtgttagaagccgaattcccaagactagagccgattgtagaagatgatgaagaagagcgcactcatcatagatgtatgtcatatggagaatatgcatccgcatcagccgatgctggagcaaaactatcggctgagctactcaaggattggttctgcagctcctatgagggctttcagaaagatgctcgaggaagaaacatccaagcttcttatgaattctatcatccaatgagctcggctagacaacttggaatgggccaactcccaattggcttattctttgctgacaagatcctataccgaggagaaatttcatcaaccttgatgatggatcggctgctcaaccttcaagggcctcctctgggcagtattgaaaatatagaactggcaatgttcagaagcaaaaactttgacagatggtggggtgaatggaagctgtatctattccaccaaccagcctcaatgtatatgacagacctctttccagatgtagtccctcaaacaacagaatcctctcctcctcgtcaaagcaacagtggcaaagatatcatatatgccccaggtttaattcctaatggaggtggactatctccccccgttatcggctaccatgcccccaagacttcaactctccttcacggtctaaccagggaaccagccgacacaggccaaaagaggaaaaccagatcatcggccgtgagtaccctggctttagctcccaagaaaaaggccaaattcaagaaaactaagccaactgataagccgattgatgatctgcccgccttggatccaactattgaacaagctttagatgaagaagacattggtgaagatgttgaccaggctgtagccgaaatgagtgacacagaaagaacaccatcggcttcacccaagcaaacgcctccaactccttctgccccgttcattttacaagaagattatcttgatgaagcagaagaagacacctcaagcaaagccttagccccgttatccgatgatgtgaagaaaattctggaagatatttctcattggctagaggcatcactagacaacttggtgaccaactgtggctcaatccgggcaaggttcacagacatccaagctctactcccagatgaactagccgatgcccttactccagccgtttaccttgagcaacaccgattcaagctggagaaggctaggcaaaggttaactgatcaccgggagtgccaaaatattgaagctacaatccagcacaatcagcagcttgtgcacgtagagaaatctaaacttgatcaactatctgaggacctgatcaactcaaatattgatcggcttgaagctcgtaagattgatctcatggcacaactccaagaatggagcacaaaaagctag

SEQ ID NO: 45739 - DNA, 381 bp, Oryza sativa
  Clone ID: PAT_MRT4530_48675C.1
atgaacgtggagaagctacggctgctgacgaaggcggggacgacggtgctcctgtcggcagcggagcgcgccgggctgtcactgtcggcggtggagtggctgggtttgctctacaaggcggaagagctggaggtgctatcggcggcgaccgaccacgggacacccggcgcgctgctcggcgtcgcgctgctgctgctcgccgccggccccgccgttgtctacctcgtcacggaggagtacccaagggaggtcgccgtccaggccgtggtcgccctcgcctgcgtcgttggtggctccgccaccttcgccatgtccagcatcgtgtccaagctcccgagctctccagctgaagcgattagagatgctcattgccttgcgtga

SEQ ID NO: 45740 - DNA, 175 bp, Oryza sativa
  unsure (1)..(175): unsure at all n locations
  Clone ID: PAT_MRT4530_48676C.1
tgcctgccggctggggattggggggggtatngcttgataatacccgaatacttgagtgtgtcccatagtgaaaacatccgactgggcctctctttattggctcaatctgcngcctgcacaatgtctgatcgaactggctgaagatggtcgcgggaggaccttgttgaccaatagn

SEQ ID NO: 45741 - DNA, 231 bp, Oryza sativa
  Clone ID: PAT_MRT4530_48677C.1
atgaccttgtcaatctcagtgggaatggtggaagctgaactccttgtggacaccacacttgcaggtattttggtgcgtcaaaatgtgcaagcagagcatgtgaattcgttcttctttctttcgatttcatattatgctaaggacgaaaatggactggggagaggaggctttaccggcgtgatcgtcttctacccatctccactgaggaggacggcctcgccggtggtgtag

SEQ ID NO: 45742 - DNA, 435 bp, Oryza sativa
  Clone ID: PAT_MRT4530_48678C.1
atggttgggcctatacaacaggcggtgaaggatgtaggtgggaagcacatgcaagaagaggtggtgtcaacgacgagtcacgcacgcgtgtgcggcaccaagaaagcccatgccgccgcctgcctctatgaaaactcttcaaaagcgcggcgttttaggccctcctccacgactgctgcgctcggcgagaaacgagcactaccggtggtcgagaatccgggacgagttcccaaacaaaaaaggtacgccgtcgttcgctgtgctcgtcgcctcgcgctggtccagtacattgcggcgctgtgctggccggcggcggtagctcgtcctttgtatttttcccggtgtctccactctccggccatcttcttctccgtctacttcctgttcttgtctcgacttaatttggctactcaaattcgaatgaacgctttcaga

SEQ ID NO: 45743 - DNA, 1563 bp, Oryza sativa
  Clone ID: PAT_MRT4530_48679C.1
atggcagaaggagaggagaagaggggcaccggtggcagaggagacaagaaggagaaggtccccctcgggttccggttcgagccgaaggaggagctcgtcgagcacccctcgccgcagcccgggccccaagcaatcgccagcatcgcctcttccgatggagaattctcctcgccgcagcccgggccggcaatgggaaccagcgaagaggcgtcgggcaataagaggcctgcggaggagcacgccgccgtggcgcagaggccgcatcagcagcggaagctgaccatgggaggagcgccgccgccaccgcccgcgtcgtacatcggcggcgccggcggcatgcaaatgccgctgagaacggccgtgcacgacaatcgagccgggcacccgatggcacgtccggccggccacgcaacggcgcctcctcctcggcagcacgcgacggtcaatggcccgatgcgaatgccgaacgggcaggtggtatacggcgaccagatgatgatgcgacggcaaatggcgacggccgcaaacaacagacggcaaatgatgtttctgcaacagctggcggcacgcaatggccagcaggggatggtggtggcagacaacgggcaggcctcgtcctcgcaacggccgccgccggcgtgcaacggccagcaggcgcttgttgttcagggatcgcaggtggcaagcaacggacagatgtcgccggtacaacgacagcgggcggcaatggcagcggcgtacaacaactaccagtatcaccagatgcttctgcaacagcagcagcagcagcaggcggcaatggcgtacaacctccaggcgcagcatctacaggggagagaggtggtggcacacacgacgtcggcacaacagccgcaagcgatgatgccagcgcagggggcggaggtggaacaaaacggagagacgaagtcgtcggcgcaacgggcgccggcggcatgcaactgcccggcgcatgtgcagcggccgcaggcgcggccattcaacaacgtccctccgacgccattgcgtcctcgcccggcaacggcagcgcctactaactccggcaactcctttgatcggacactggtgatgcgacgaccgccgtcgccgtccgtcgtccagccacggcccgcgcaggagacgcccgagatgcacgcgaggcgtgtgctttggcagctcgtgaaggagctcttccgccaacgacgtatcgatcaggctcaagccgctgctgcagctgagcaagaacggctgatgatgacgccgccggcgcaggcgccgcagcagccgtgctccgacgcagtacggtgcaacgatgatggcgagaagcgttccgcggaggtggcaactacggaggtggcgccggatgggagcgcgtccgcagaaggcaacgatcgtcaacttgttgctaaaattgaagttgggatggaggtggaggctgcggcggcggtgatggtgaaggggacggatccagtggcggcggtgctcgatggtgacttcaaggataacaatggttgccaccaccacgacggcggcggcggctgcggcggccacgatggccgggcttaa

SEQ ID NO: 45744 - DNA, 1289 bp, Oryza sativa
  Clone ID: PAT_MRT4530_4867C.1
cccccttgaatggcgcccccaatcgccgggaacggacgcgccaagtccggccgctttccatggccgtcggcgtcattcccgtcgccgttccgccctctcccgtgcccggctccctcccccatcctataaaatagaaccccctctttgcgttctaccgttttagtctcctcccgagctctcccgtggtccctagccacctccccgccgtcgtcccctctctcccgtgccgccggccgtcttcagccgcccctgccgccgcgttagcacgtcggccggccgtgccgtcgcctcctccagcatcgcagccgcctcctcttcgccggcttgccctccgtttcccgcggagacccccggagctacgttcccgccgtcgcccttctctttccttcgcgccggccgcctccagccgcctctccctcctcgccctagcgccgcccggccgcgccgtcttctccctcggcctcacagccgcctcctctccctcggtcagccctccgtttcgcagggaaaccaccggagacgcgccctcgccggcaaaacagtggcgttgccgccactgtaccgccttcagtcgccccggtcgccgcgccagagcgtcggccgacgtcgccgtctcctccctcggcgtcgccgcatcgccctccaccccggcctgccctcggtttcgccggaacgtcgccgcgaacctctccgtccgcctcaccggagttgttcggccacccgtccctcctcacccgtgcaccggtcggccgcacctccaccaccttcggcatcgcagccgcgacgtcgtcctcggcatcgcttccccttcggccgaacaccgccgcggcgtgttcctcgccatcctcgcctccgtgcagccgctgccggctgccctcgtcgtctcctcgccggccccggtcgtcgtagtcgtcgtcctcccgtcgttcccggtcgtcgtggcgttcgtccctccgtcaagccgttctcgtccgtcgtccgcgttcgtccagtgtgccgctgcagcccccgtcgtcgtcttcgtcctcggctccgtgtcgtcaagcctcgtgccggccgcgtctcgcctacgtccaaggatcgccgccgaagtcgttccctcgccgtccgtctccgccgcgccagttcgtcgttgtcgttccctcgcctcgtcgcgtggtggtaaggatctctcctctcgctgccccgtcctcgtcctttcggtgtcgccccgtacccgttgtgcggtcgtcgaccccgcccgcgtggtgtctagtggagtccgtttgtcagctactcgcctcggttga

SEQ ID NO: 45745 - DNA, 1463 bp, Oryza sativa
  Clone ID: PAT_MRT4530_48680C.1
ctacgcttccacatcggggtaccgcaacgcactttccgctggtgtcccgtgattgagcacgacgatgtggatggggttgttgcccatgggcaggtcgacgagcagaggggagaggtgggcatagcggccggcgcggacgcagagcgtgatctggccggcgtcgcagttctggcccaagcgctcggccatcgtcagccgcaggtgcgtcaggttgttggtgttcaccctcaccggcgcccactcctgctcgccgtacctcccggcgttgtcggctcggacgtaccggatcacccgcgacaggtcggattccaccggcggattcgtgcggtgcatcagctgtgagacgacgtcatcgttccacctaggatgaggacgtggtatcctccgatttcctacagcgctaaatataaaagggaggctgacccaagactcaatctccccgacaaccaaaccctgggccggtaggtcgacgagggaagggcgagaggccatggggggcacgacctccaccctccactgcatcatcgtgctggcgttgtcgccggcgacggagacgtccttgtgccacctgcggaacctgccgttggcgcggaggtaccggccggcgccgttgcggaggacgaaggagtcgcgccggcggaacgcctgccacaggtaccccggcggcgttgggcggacgccgaggtcgcgctgctcggcgacgaccccgtcggatggccccctcccggcgccgtagttggtcgccacgaggtaccggccgtacgcgccgcggaggcggactgggatctggttggtgggccgcgttggggacaaagcgagttgggtgtgaggtgacggtgaggtggtgaccgtgacggtggtgggaggaggcatggcggcctcggacggcttgccgagggtgtggcagacgactgcatcggccggcgcagcatcgtttggaggaggggtcggagaccggctggacgcagagtggcgtagccgatggcagcggaggccggttcggcgcgagaggcgcgggcggtggagatggaggccggcttggcacgagaggcgcagccgatggaaggaggccggattggcgcgagaggcgtggccggcggtggaagaggcgacctcggtgcgtggtggagctgccggtgggtgtggcgcagtcttcggcacacgaaggctggccggcgggggcgtcggtgcaggggccccacatgtcggcagagtttgagtggtggtggagcattactgtagggcgatctcgtctgtgttcctttgttggtctagcggcggccggtctggtgctaaccttctcctggtcgtgtgtgttggcgctgccggtgtgtgggtggtggtatatttttttctttctcctggttatgaccctccagggttgtaatcttgtaattttttcctgctctatcaatagaatttcgcatcgtctcgtgtgagtcgttcaaaaaaaaagatagaat

SEQ ID NO: 45746 - DNA, 672 bp, Oryza sativa
  Clone ID: PAT_MRT4530_48681C.1
ccggccgggaccgccgcgcgccgccagctccgctagccgcggcctcgagccgccaccgccacgagccgccaccactatgagccgccaccatgcgccgccaccgccgagcgctgctaccgtcaccggactcactcccggtctgcaaggaggagctgccgagagggaggtcgcttctactacgccgtgacccgctcgccgtcaccgccgcgcgccgccaccatctccagacttgctcccgttctgcaaggaggaggccgccgagagcccgagagggaggtcgcttcaggcttctacaaggaggaggtcgcttcaagaaaaggggaggtggcggcgggattgggtaggcgcagtcgctcggcatcctgctctccaccctcgataacctcgccatcgaccacccacgcatcgacctcgccatcgacggcgccaacgaggttttgacctttttttcacttcttttggattaattcagttccatgctgattgctgttcaggcttccattgctgctttcgacgtgggaaggtttgacttaatattaatcctattttggttgtcctgcaatcacttttacctttgctaacttccctcgcgagaaaaaaagttgtatcttcatgaagaaagtagaaaaaaaaaaggaaactttccagattataaaaacttattactcccca

SEQ ID NO: 45747 - DNA, 582 bp, Oryza sativa
  Clone ID: PAT_MRT4530_48682C.1
atgccatttactttacttgtaattgttttgccggggaattgggtaccccgttcccatttcaccgacacgccgggattgtcagccttcttcttccttgtacctcagcagatgcttccttttataaagcattgcacaaggcacctcacgatggaagttgtttcccttttctcttacagaaggggtgaaacaatggtacacccatacgacaaggagttttccatgtatcctgatatttccgccggagggtatagggctatccgcagagcgccaatcaggcacaatgatgtcaaggtcatccttgatttccatgtgttcgaagtctatgacttcgccctcataataggccattctatagaaaaactcttcttagatgtgccgagaaccggagttctcgacatcaaactcgataaattgtcattttccttcccgatctcaaggtcgaaaaactccttgacggaacctgttcccgagtctgagccaattgaaaacatgttggttgtctctccatttgagtccctgaatccctccttgaagatgatgccattgcatttgttgaggaagaggacgattttgaagacatga

SEQ ID NO: 45748 - DNA, 410 bp, Oryza sativa
  Clone ID: PAT_MRT4530_48683C.1
atgccgacgggagtcgatgaggccctccatccccgacgaggtcggccgaggcgaaaggggcacctggcagcgaggtccatgggggaagagccagctgatggcgcggttataggagaggccatcagtggcgaagccggtgtcgacgaggtccgcagggaaggcgacgaatccaggcggagacggtgggaaagaggcgagcagtgccgcacggaggtggtgttcagcgccgacgcggttggagccgtgccaccatcgcgccgggcgctgctccgttttcgcgtggccgctgctccgcctttgctccggtcgccgctcttgcacgagtgcgctaccgcgccgcgtgccaccctgtgccgcgtcaccggccgcctgcatagcgttgcacggccaccacgagccacgccgttgct

SEQ ID NO: 45749 - DNA, 579 bp, Oryza sativa
  Clone ID: PAT_MRT4530_48684C.1
attttcttttttttttttttttttttttttttttttttttttttttttttttttttttttttttttttttttttttcttaacccggccatcagggaggacacacataaaaatggggccaacaaaaaaccccattagggaaaactctaatctaaaacgggccgaaactataacccattttggaggactctaatctaaatcggcccaaaattataccccatcacggttgaaaaaaaccccccaaaaaaataaaattaaaaaaaaaaaaaaacctacccgaatgcggaagcaccgaaaccaaagctcgccagccgtttgggccgccacctgcccccgttcccgtggttagggccggattaatcgcccccgttgcccgccgtcgtcgttgccaccggatccgtcgttcccgtcgcctgccgtggtcgcccaaaccggatccgtaaccctcgttgcccaccgttgttgccggaatggaatcggccgttcctgccacccttggcgccaaaaccacggggggcggggcacccgaaggcggaaaaaccccccctgcccccctggcggtaaggaggggggggggaggg

SEQ ID NO: 45750 - DNA, 270 bp, Oryza sativa
  Clone ID: PAT_MRT4530_48685C.1
cacgcgtacgcatacacgcactcgtacttttcgttttgcgccaagtctcacattccgacctttggttgttgatgctctggggccagatactgatcttccggcggatgtgcatctgatgattgtggaacctgcccaacaagctccagattttatcaacgcaggtgctgatattgacagcgttgactgtcagcaatcattcaccatccatctacaccgaacagtcaataacatcaaaagtcttggaacacaggctggagttggttgaatact

SEQ ID NO: 45751 - DNA, 202 bp, Oryza sativa
  unsure (1)..(202): unsure at all n locations
  Clone ID: PAT_MRT4530_48686C.1
agaacggatgatgaaacacatcacggacagtgaggggtttcttaattttgttggtggggtctcgnaataaaaatgattttattgtnnnctatcccggnctaaacctgtatgttgcgacgaaaacgtnnctattggagacttggagaanataatttgacatttgacacttctccaaatataatatatttgtaactatttaaat

SEQ ID NO: 45752 - DNA, 165 bp, Oryza sativa
  Clone ID: PAT_MRT4530_48687C.1
ctgttggtatttcttaacgacattactagaaatataattcccagcaatgacgcagaaatactcctggtatattatggttacagattttatccgcaagtgcacggatataccattgtagcatttcacccgagagtattccaagggtatcgtatttattttatcccg

SEQ ID NO: 45753 - DNA, 1247 bp, Oryza sativa
  Clone ID: PAT_MRT4530_48688C.1
gcacgaggatcagcttgccggccatggccaagctcgtcggagcaactctctacctctacctcttcctcttcctcctgctgctgcatctccattgccaccaatgcaaacctgctgctgctgcgagcttcgtcgtccatggcggcggcggagcaacggcaagggcggcggcggtgagggcggtgttcgtgttcgggagctcgctggtggacaacggcaacaacaaccacctgaacggctccggcgccgtgcgcgccgactacgcgccctacggcgtcgacttcccgctgggcgccaccggccgcttctccaacggccgcaacgtcatcgacgccctcggggagctcctccgcctccccgccgccggcctcctcccgcctttcgccgaccccgccacccgcggccgcgccgccctccacggcgtcaacttcgcctccggcggctccggcatcctcgacctcaccggcaagaacaagggagaggtcttgagcctaaagcagcagatcaccaactttgaggcagtgacactccctgacctgcgggcccacctgcagggagcaaccacagccaccaccaccaccggacacaagatgaagggccaggatttctttgaccagtgttacctgcccaagagcctgtttatcattgggacaggtggcaatgactacttgctcaactacttcaacgctggtagtgggcccacaagggcccccttgtcagagttcacaagctcactcctcaccaagctctcaaaccacctgcagagattgtatgatctaggggcaaggaagtttgtgctattctccatccaacccctgggttgcacccctgtggtgaggaccttcctcaacgctaccagtgatgcttgcattgagccgatgaaccatgcggcgctcctcttcaactctgggctaagatctatcgttaaaaatcacaatggtggcgtgaggtcacacatgcccgccgcgagcttcgtctacgtcaattcctacaagatcattagcgatataatacagcacccggcaaaatatggcatcaggaaaacgagtcgagcttgctgtgaggtgtcgaggggaggcgtgctgtgtcagaaggggggggccatctgcagtgacaggaccaagtacgccttcttcgatgggctccacccgacagacgtggtgaatgccaggctggcacgcaaggcgtacggctccaactcgccggacaaagtctaccctatcaatgttaagaagttggcaatgctgtag

SEQ ID NO: 45754 - DNA, 162 bp, Oryza sativa
  Clone ID: PAT_MRT4530_48689C.1
atgggggcgccaggtggcacttggaaggttgaaaccactgtgctaattgaggtgacacctataaatgccggcaacatttggccctcgcggctgtcggcgtctagcccttcccacgaatccgttccccgcgccagtgttgacacgctggacctcaacgcctag

SEQ ID NO: 45755 - DNA, 336 bp, Oryza sativa
  Clone ID: PAT_MRT4530_4868C.1
atgcggcggcagaggggaggggggatgctgcggtgggatgagaggcagtggcagcttggcggcggcgccctcccctctcgactctctcttgctatccgcggccggcggaggcgtcagcggcagtcgcgccctcccctctgccagatccggggagggcggcccggcggcggccgtggaggggcggtccagtggcggcggaagggaggggggatgcggcggcaggacaagaggcggtggcggcctggcggcggctccctccctccgtcggatctggcgaaatgtttcttaaaagatttctgtgaaatgatttgtgtgatgttcttcaatgtttcttga

SEQ ID NO: 45756 - DNA, 2737 bp, Oryza sativa
  Clone ID: PAT_MRT4530_48690C.1
ttcagtacacggcaaaatcgccgctaaacaaacatgtatcaaatatgcatatgctctctagtgtacagtccaacccaccatgcaaagccggtcagccggtgtggatgttcatattgtaaaacattgcagagtctgaacttacaaatgcatttaaaaatcggttcccctagcagtcccgcgagaactggtagatcacctccatggatacagagcagatgaggaacaacatggcttcaaggcaaagggagcagcggatccatgatagcaagaaaaatcaatccttgaatactgggcagctcaagcaacggctgaaacgggcgcctatctgctgtactcagctatcctgcttcggatgccctcaaggaacgatctaaaacctgtggcgctagctaccaaagaaccatcgacactttgatcctcaatcaggtatctctcgaatgctgtagtatcatcgtgtgcaccatggataaagacaagcttgggggttatattcctttcttgcttcaatctatcaatcttggatctcaacagacagtcacgtggaggagggaaggggattgtgctactgactgtaggtgagtaatacaccagaagatcagtgtaggcatcaagaaggaatatcgggctctcactgttgaatacacttcgacttagtgactgatgcacttctgcttctacatcaggagaagagtatgaaatcaatgtaggacatatagcttggcgaagcgatgatgcctccagtgcactgaagaggcattgcaaatatgtccgataatctggatgaataccttgaccgtgaagctgaagcagtggacttaatagaaaagcaaatacaagtcttgacagaggttgcagttgtgagcagtgtatgaaatcaacatcaatatcagacattccagttccaccagatctaacgaccttgtatgccttgttgtactgggcaatgaaattcaccaaccaatcacggagccatatccttgcctctagcacatcatgggattggatgaagctacgccaaaacagaaagtaccagactgccagagcatcagccatgtgccatgctacaacctggtgtactagtatagtcaatacaacatctggatcaacaaaatcatacaggtcccagatattagcagttatgttgtactggatagtccgcactcttagccgcctttgcaaggtgaactttgatctgctgacagaatttgagacatcatcagaagtatcaccctgttgcacaatcgttgtgtacttgaatgcaatttgaagtataggagggcttgacttcctggaaaactgagaatccttttgaaactcaaagtcatagacgtaggtagcaaatgagtcacaacaatttatgtgctgaacatgcatgtattgaggatccggaaagaaatggccataagaatcagcaatcttgaactctgaagatgttctcaaacgcagcacacatccgaaagcataaggacggcttagcattttgtatatatcttgcggaagtgttgattcatctgtacttgaatacatgtacaatgagccaccgctctcaacactaagaactttcaaggaagaaagatctgtgtattcatttgtaattgcaaaaaggtccacacatacacctgcttgaacagcactagcagccagatttgtgtagaaatttgtctgctcggaaatgaatgtatggtcggatcccagcattttagcagcattatggtccacgtcacttcttgtttctatttggccaggcccgtaattcggtggaccagacaaaaatgtgaatatccttgcaagttcaaacaaacttccgtactctgtacataggtagttgacaacagcatccattgctaacccaaaaccgcgggcatgatgcaacgcgtgatcctggacttctgaggcagttgctgttatttcccaggaagatgttggtttaattgtttcaagtgcttcagcaatgcgatctttgcacccgtcgacaggagccaaaaaggaacgaagcggcatgacatcttcaaggtcgacaagtaaggtaccatcagaatcaggagggatgaaagcattcttcacaatcggtatcggaccttgaacatcatataaacctatcttgctgctaaatgtcaaaagcccaaacaatgatcctggagggatagcttcaagagctgctaggagagcacttttgactagctccaagaactcctccgaagaggacaagtcgattgccgccacgtacactggcgtcgtcgtcgccgcctctccctcttccccagggaggaggaggtccacgaaggcggagcgcatctcgggcgggtcctggccgccgtcgcgggcgtaccgcgcggaggcgtcgggggtgaggtcgttgtcggcggagcagatggcgcaggaccacgaccagcggtggagcgggcagagggtgctaaagtaggcgtagcaggagtcgcagcgcgggaggaggtggccctcggcgccggtggcgggcgccgcgccgcgctcgtcggcggcggagaagggcgtcacggcgacgccccacgggatgcccgaggactcctggagtgccgcgtcggaggggaagcaggcgaggctcgcgcgcaccgccattgctgctgctgcggctgctgcggccccccgcgctgcagctttgggatgtggatctgtggttgttggccgcgaccgcgagagggatctgaggagaagaagaggagggaggaagaggaagccgtgcagcgcagcgtggagtaac

SEQ ID NO: 45757 - DNA, 965 bp, Oryza sativa
  Clone ID: PAT_MRT4530_48691C.1
ctctccctcataatctggttcatgccagcaggtgttgttgatctgtcatgcatgtcatcaaatttcttctcatgggcatgaataaaagtgcgccctggaagcaatttttcactgccactaggcctatcaaactcaaaagctaggcgctgctgcaagtcagactgcatggtggacatactccacatattattctgccgccactggcttgaaaattgcccggcaggaggtctccagctcttgacaaaattgtcttttctatcagctacattttgagccatatgcatggaagatgaccatatctgacttggtgccattgcagcatgcgacttgcgagcacacatgacgcactcgacccctccggcgtcgaggtgaacaaatgcatggaccgacacaatgcacccacagtgcagcctcttcccgcaggattcgcagttcctccacccggcaacctccaaatggaaagtctcgcaaaagcccccatgctcgaacgagtgatagcatcggtcgcagagctcggcgaagtcgccgttgcggagtcgccatccgcggcggcgcgggccgtcggatttggggtccttgcagtgcgcgttgaagcagatcctgggccgctgctgcggcggcgcgtgaccgggggggccctgctgctgctgctgatgctgcggcgtcggcggcggcggcccaaccccaaccgagacgaccgcctgaggcggctgctgcggatgcggcggcggtttcggctggagcgggggcggctgcaccgagatgggggccgccgccgcgagggatgggggcggggcggccaccggcggccgcgtcgggggcggctgcgccggcgacgacatgcgccgccataccccttcgccggccgcgccgagcccccccggggcgcgcggcgccgcgcggcgagagaggagaggagggggggttttggggtgtgtgggaatcgtgggggacgaccctcgtgc

SEQ ID NO: 45758 - DNA, 567 bp, Oryza sativa
  Clone ID: PAT_MRT4530_48692C.1
atgggcggcgggggcggcggatctgacggcgacgacgagaggcgcacggtggatccggcgcggaggacgtataatcacatcataggatctatacatgtaaacaagacagtaaaggatgaacagatcgaagatgcgaaacatgttgataccgatggttttggaaatccggttgctcggcaggaagaattcacggtaccgtcccttaacggtagcgcacagcacgcgagcgaagaggaagacgagccgtatgaacgaatagggagcagtcgcgtggagcgcttcccaaaaacccaaaaatcttattgctaccttcttctagtgcaaaacgtagaaggcgcaggtttcggagagctgctctcccgattgccattgagcaccggcgagtgggatggagtagactacaaacaacaacgtagtacggaggaggaggccaacccaagattgattccacgtatgttgcgaggaggtggcggctcaaattatatagagatatcaggacacttgatcagggcgcctacacgatctccactctgcataaccgaaccgaaccagataagtcacgcgtaa

SEQ ID NO: 45759 - DNA, 2409 bp, Oryza sativa
  Clone ID: PAT_MRT4530_48693C.1
atggccgaccggaccccatccacctggtacaccgccgtctccggctgcgtccgctgcggacgcgacgggacggccttcgagatgctccgcggtatgcgggagcgtggcgtcccgctcagcgggttcgcgctcgccagcctcgtcaccgcgtgcgagcgccggggccgggacgagggcatcgcgtgcggcgccgccatccacgcgctcacccacagggccgggctcatgggcaacgtctacatcggcacggcgctcctgcacttgtatggctcccgtgggatcgtgtccgatgcgcagaggttgttctgggagatgcccgagaggaatgtcgtgtcgtggacagcactgatggtggcattgtcatccaatggttacctggaagaggcattgagagcttaccgtcagatgaggagggatggggtcccatgcaatgcaaatgcgttcgcgacagtggtcagcttgtgtggatcgctcgagaatgaggtgcctgggcttcaggttgcttcccaggtcattgtctctggactccaaaaccaggtctctgtggcgaattcgttgattaccatgtttggcaacttgggaagggtgcatgatgctgagaagctctttgatcgaatggaggaacatgatactatttcatggaacgcgatgatatcgatgtactcacatcaaggaatctgcagcaaatgttttctggtgttttcagatatgcgtcatcatggattaaggcctgatgcaacaaccctgtgcagcttgatgtctgtctgtgcctcctcagatcatttcagccatggaagtggaattcattccctgtgtctcaggagcagtctggattcatcagtaacagtaattaatgctctgaactgtaatagcaccgacgcgttgaagacactaggtcagttatttcatacaaaggaaagcccaaatcacctgacattttccagtgctctaggagcatgttcaagtccaggagccttgatagatggcaaaatggttcatgccatcgtattgcagttgagtcttcagagaaatctactggttggtaattctctcatcacgatgtatgggaaatgcaattctatggaagatgctgagaaagtttttcagtccatgccgactcatgatattgtcagctacaatgtacttattggtggctacgcagtacttgaggatggtacaaaggcaatgcaagtattttcttggatgagaagtgcagggataaagccaaattacattacaatgataaatatccatggttctttcgcatcttcaaatgatctgcataattatggaaggcccttacatgcatacataatacgcactggatttttgtcagatgagtatgttgctaactctctaatcacaatgtatgcaaaatgtggcaatttagagtcaagcactaatatattcaatagtatcaccaacaaaaacattgtttcatggaatgccataatagcagcgaatgtccaacttggccatggagaggaagctctaaagctcttcattgatatgcagcatgctggaaacaaacttgatcgtgtttgcctagctgaatgtctgtcatcctgtgcaagcctcgcatcattagaagaaggcatgcagctacatggtcttggtatgaaatctgggctggattcagactcatacgttgttaatgctgcaatggatatgtatgggaaatgtggaaagatggatgaaatgttgcaagtggttcctgaccaagccattcgacctcaacaatgctggaatacgctgatatctggttatgcaaaatatgggtatttcaaggaagctgaggaaacatttaagcaaatggttgcaacggcttgtagtcatgctggtctagtagacaagggtatagattactataactctatggcttcttcctttggtgtttcccctggaataaaacattgtgtatgcatagtggatcttctcggacgcttaggtcgatgggcggatgttgacaaattacgaagtcacatgaaaaccatcaatataaacaaaagaccagcttgcagttggcttaagcttaagaatgaagtaagcacctttggtattggtgaccggggtcataagcatgcagagaagatctacgcaaagttagatgaaatgttgctgaaactcagggaagtaggttatattgctgacacatcatctgcactgcatgatacagatgaagagcagaaggagcagaacctttggaaccatagtgagaaacttgcgttggcatatggccttatcgttgtcccagaaggatctacacaaggatcagcagttaacacctctagtagcattgatgcttgtttggaaccttcgatgatctcaactacatttccttgcaacttaattgagtctgtcctgggagcagttgcccagggaattcaacagaatgcttgttgtccatga

SEQ ID NO: 45760 - DNA, 327 bp, Oryza sativa
  Clone ID: PAT_MRT4530_48694C.1
atgcacccggtgcaccgccttgccttctcgcgctccaactcccgcgtcggcccgaggcgcgcggtcgggcacttcgaagccgcacgccggacccgcgcaccgctcggccgcttcaccgccagcacctccatcgccgcctctgctccaccttcccgagccagctcgccaccagtgccgccatcactcaccccgccatgccaccgccttctggctaattctctcgccgccatcaccctcttcgccgtcggccagggtgccgccgcgctcggccaagccggcccccgcgcgagcgccgccctacggccgattgctcgcccgtcgccctga

SEQ ID NO: 45761 - DNA, 2616 bp, Oryza sativa
  Clone ID: PAT_MRT4530_48695C.1
atggccgaccggaccccatccacctggtacaccgccgtctccggctgcgtccgctgcggacgcgacgggacggccttcgagatgctccgcggtatgcgggagcgtggcgtcccgctcagcgggttcgcgctcgccagcctcgtcaccgcgtgcgagcgccggggccgggacgagggcatcgcgtgcggcgccgccatccacgcgctcacccacagggccgggctcatgggcaacgtctacatcggcacggcgctcctgcacttgtatggctcccgtgggatcgtgtccgatgcgcagaggttgttctgggagatgcccgagaggaatgtcgtgtcgtggacagcactgatggtggcattgtcatccaatggttacctggaagaggcattgagagcttaccgtcagatgaggagggatggggtcccatgcaatgcaaatgcgttcgcgacagtggtcagcttgtgtggatcgctcgagaatgaggtgcctgggcttcaggttgcttcccaggtcattgtctctggactccaaaaccaggtctctgtggcgaattcgttgattaccatgtttggcaacttgggaagggtgcatgatgctgagaagctctttgatcgaatggaggaacatgatactatttcatggaacgcgatgatatcgatgtactcacatcaaggaatctgcagcaaatgttttctggtgttttcagatatgcgtcatcatggattaaggcctgatgcaacaaccctgtgcagcttgatgtctgtctgtgcctcctcagatcatttcagccatggaagtggaattcattccctgtgtctcaggagcagtctggattcatcagtaacagtaattaatgctctggttaatatgtactctgctgctggaaaattgagtgatgctgagtttctgttctggaacatgagtagaagggacctaatatcatggaacactatgatttcatcctatgtgcagaactgtaatagcaccgacgcgttgaagacactaggtcagttatttcatacaaatgaaagcccaaatcacctgacattttccagtgctctaggagcatgttcaagtccaggagccttgatagatggcaaaatggttcatgccatcgtattgcagttgagtcttcagagaaatctactggttggtaattctctcatcacgatgtatgggaaatgcaattctatggaagatgctgagaaagtttttcagtccatgccgactcatgatattgtcagctacaatgtacttattggtggctacgcagtacttgaggatggtacaaaggcaatgcaagtattttcttggatgagaagtgcagggataaagccaaattacattacaatgataaatatccatggttctttcgcatcttcaaatgatctgcataattatggaaggcccttacatgcatacataatacgcactggatttttgtcagatgagtatgttgctaactctctaatcacaatgtatgcaaaatgtggcaatttagagtcaagcactaatatattcaatagtatcaccaacaaaaacattgtttcatggaatgccataatagcagcgaatgtccaacttggccatggagaggaagctctaaagctcttcattgatatgcagcatgctggaaacaaacttgatcgtgtttgcctagctgaatgtctgtcatcctgtgcaagcctcgcatcattagaagaaggcatgcagctacatggtcttggtatgaaatctgggctggattcagactcatacgttgttaatgctgcaatggatatgtatgggaaatgtggaaagatggatgaaatgttgcaagtggttcctgaccaagccattcgacctcaacaatgctggaatacgctgatatctggttatgcaaaatatgggtatttcaaggaagctgaggaaacatttaagcaaatggttgcaacgggtagaaagccagactatgtaacgtttgttgctctactctcagcttgtagtcatgctggtctagtagacaagggtatagattactataactctatggcttcttcctttggtgtttcccctggaataaaacattgtgtatgcatagtggatcttctcggacgcttaggtcggtttgcagaggcagagaaatttattgaagaaatgccagtcttaccaaatgatctgatatggcggagtttgttgtcctctagtagaacccacaaaaatcttgaaattgggaggaaaaccgccaaaaagcttcttgaattggatccattcgatgattcagcttatgttcttctgtcaaacttatatgctacaaatgcaagatgggcggatgttgacaaattacgaagtcacatgaaaaccatcaatataaacaaaagaccagcttgcagttggcttaagcttaagaatgaagtaagcacctttggtattggtgaccggggtcataagcatgcagagaagatctacgcaaagttagatgaaatgttgctgaaactcagggaagtaggttatattgctgacacatcatctgcactgcatgatacagatgaagagcagaaggagcagaacctttggaaccatagtgagaaacttgcgttggcatatggccttatcgttgtcccagaaggatctaca

SEQ ID NO: 45762 - DNA, 2155 bp, Oryza sativa
  Clone ID: PAT_MRT4530_48696C.1
atgtatggcatgttattcatgctcctgattgtcgagaaaaaggtggtacgcttgcgcaggacagtagcttcaaagaaggatgaatactacttggatgggaagcatatcagtaaaactgaagtcatgaatctgttagagaatgctggattttctcgctcaaatccatattacgttgtccagcagggaaagctataatgggacctcttgtaagtggacattgattcatgatttattagcagccaacaaaagaaagcagattgatcaagttgtccactacttggaggaaaggttgagagaacttgatgaagagaaagaagaaatgaagaagtaccagcagctggacaaacaaagaagatcacttgagtataccatactggaccatgaactaaatgatactaggaacgaattagctttgatggatgataaccgaagaaaaatttctgaaagaatgtcccatgcggataatgaagtggtagatgtacgtgagaagatcaggagttttgagaaagaaataaaattctcaaccaaggggataaatgagaacaaggctcaaaaggaagatgtagagaagaagtgtacagaggtgcttaaggtagttgctcaaattgagcttgatttgagagatataaaagatagaattttgaatgaaaaattggcaaaggatgaagctgcgagggattcacaaagtgtgaggatggagagtgaaaggtcaaagtctgaattagctgagactagtaaggtgcatcaaaccaaactgagggaagaggaagaaatatcaaaaagcataatggaccgtcagaagcagttaagtatattgtaccaaaagcaggggagggcaacccaatttgcaaacaaagctgccagagataagtggcttcaaaaggaaattgatgatcttgagtgtgtgcttttatcaaaccgaaagcagggaggtttactccaagaagaaatccagaagcttaaagacaaaattaataacttgaatagctattttgagttctacgaaagtgaatcaaacaaattagagtccgcacttgcaaagaagcacagtgattacaatgacttgaggaagcagagagacaagcttcaagaagaaaggaattacgaagctaatgtgacagctgaaaaagataggctcaaggaaaatcttgtgaatgcaaaggagaagctgggcaatgcaacacctggggatatcataagaggcttaaattgtgttagcagaattaccatggaacatggtattacaggagttgttggtcctatactagagctgattgattgtgatgagaagcttttcactgctgttgaggtcactgcagggaatagcctgttccatgtagttgttgagaatgacgacatatcaacgaaaatcattcaagtattgactcgagaaaaaggcggacgggtgacatttattccactgaatagagtgaaagttccagatgttagttatccacgaagtgacgattttgttccattgttagagagattagaatgtaataaggccaatcatcgccgtgcttttgaacaggtttttggcaggacagtaatatgcaaagacctggaaactgcgaccaaagttgcacgcgataacgggctaaattgcatcacgcttgatggtgatcaagttgccagaaaaggtcatatgacaggaggtttccatgactatagatgctcaaaactgaagtttgtaaaaacaattaagaacaatatgaaggcaattgaggaaaaggaggaacatctaaagaatgttgaaaggaatctaagtgatatcctttctccttgtttacatgacgctgataagaaaatgacagatttagttaccaaacagcagcaaatggatgctgaaagtgatcatgcaaaatcagagttggaacactttaaggttggcattgctagcactatgaagcaaataggatcacttgagaaggcactaggaaagaagatagaaacaaggaaagaagaattgaaagctaatctatcaactaatctcatgaggcgccagaaagagtttgaagcagtaatttcatccgcagattctaaaaccttgtctcttgaagctgaatcaaaagagcaagaattaaatagctctaagagcagtcttgatgatttgactgcgatgctgaaaggtatagacgcactgatagacttttag

SEQ ID NO: 45763 - DNA, 430 bp, Oryza sativa
  unsure (1)..(430): unsure at all n locations
  Clone ID: PAT_MRT4530_48697C.1
cggtccgggccgtcntcatacttgtatctatccaagcactgcggggccgcctatcgacgtagtttgtatccatcctaaccggagccttcatgagggagagtatttgcatccacatcgggctagacggtatccccgtcgtgaacgcatgctgggagctttattgccttgagcatggcatccagcctgatggacagatgcccggtgacaagaccggtgggggagagttgaccttcgggaaagactggcccgtgaagaacaactcatgggtagcgttaatgaatgtgtatagcccttttaaatcacattaacgatcttgataaggatgcagctcctcactttcagaaagctgtcaaattttacgatggccttgccaaacaattggtcaatcaaggccatgtcttaaatgtttttgcatctgctcttgatcaag

SEQ ID NO: 45764 - DNA, 107 bp, Oryza sativa
  Clone ID: PAT_MRT4530_48698C.1
caagcttgagctgccattataccttgatttgcaggcttttaaacaacaacctttatttaagcttgggaattgtcaactggaggaaccaaattttaatcaggccattc

SEQ ID NO: 45765 - DNA, 546 bp, Oryza sativa
  Clone ID: PAT_MRT4530_48699C.1
gggtctgggattgctgaattttgcaaacaacgaacatagctttgttgtgcaaatggttatggaaattagaaaatgaaaatggtggtggcaagatcttattaaagccaagtagctaaaaaacaaaaccctctcaggagtatcagttaaacctggagactcttattttttgcagggcttgatggaaataaaaaatgtcttctttaaattctgcactgaaaagtaggaaatggggaaaacacccttttttgggaagacagttggattggtggccgtcctctgaatatacaatttccttcattgtataacaaaattttcaaaaagaaaaagtttcagtagccatggttaaaaaggaaggttggggtataatcaaattcagaaatactttgcttggagagaagttgagagattgtaataaataagataaaatctatgtgtgagcagatgcagctgcaggttggcagctctattagggtcttgtggaatcttacgttgatgagtctttcatagttaagtctttatataaaactcttaagattcaacaaacac

SEQ ID NO: 45766 - DNA, 1665 bp, Oryza sativa
  Clone ID: PAT_MRT4530_4869C.1
atggctgacaatgagaaaggcaataaggtcagaagtcaggacattggtatctcaagctcccgagtgaatgaagcaccagacaccagttgtgtgacactggtccaacacctgattaaccagaaccaattgcttatagagatactacagcagcatcagacgccaattctgaacctaagtcagatacaacctcaagcgcagttggaggcagtccaagcactcacaccacaagtcagcatgccgccagcatcccgaaggacccatggtgaagtgccacatgttgactcaaaagaagcaagtatcatttgttttatgtgtgatgagcaagggctctatgcaagggagtgtcctcagcagaaaagaaaaacaccaatgcgaaccgaagatgaagtccgtaagatgagcattaccagcacagaatggcctccaccaggaatgacaaaacgtcagagaagaaataccttccgaggtgcgccacagttgacagagcatcttttagctaatggaggtagagtgtctgatagtgaagattcagatcaagtctcctcagatgatgaagatgagaagtctccccaaggtttcaaccagaataaaatggaacgtaaggcatgctctcgttgtggagaaatcggtcatgttgccagctcgtgtgccactacatgcgttcattgtgaggaagaccatccacccgacaggtgtccaacgagcaggatcacttgtttcttttgtgaaggaactgatcatgtcccaaaagattgtcaattcagttttctgctgacgaagaagacggccaaccaacccgccagttccaatggagagaagtatcaaggcaacacaaatcctcaccaagattacagttttagcctaactccagtgccaggacagaggaatcaaaatgagaaaagaaaatgccgagtccggaaagatatctgttgcttcaattgtcaaggaatgggtcatttcgccgacaagtgcccaaaaccgagaaacatagctgccagcacgtcagtccacgcaactccctgcaatcagaagcttgctcctcagcgaactgtcatccatgcatcccgaagcagtcctacagcccgcgttgcaacagctccaactccagcgagtgcattaccacaagatgtcactgcccaatttcagccccagccatcagttgacgagaccgaggccagtatcggcattgtacctttggatgttccagcacagcagccaagaaatcaagtacaagatgaagaacccgagcataagaaagttattaggcatgcacccgttgtggagaaactggacacgttgctggcatgtgtctcacactctgctctcactatgaagaagaccatccaccaggggagtgtcccactcgcaagcctcagcaaagaattgtcatcgatggaagaagttgtgtccctccccgacctactccaggccgagcaaagggcaatcaacctccggagggcgataccaagcagaagaccgtcatccgcttcaaacagcaatcagaaggaagcttctcctatgaatgatagcaatatgcagtcctatcacatcatcacagaaccaatcaaggatgatgcagtcactagaacaatgccagctatatctctccagaaacaaaatgagcagctacgcttgtggttttcagttcgctacttatcactgtaa

SEQ ID NO: 45767 - DNA, 126 bp, Oryza sativa
  Clone ID: PAT_MRT4530_486C.1
aagcacaatcccagatcctctaacttaattattcctaaacatatatggatattaagaccctacctccatcgatgcacggcacgtacgctgcacgatgcctgctcggcggatatatattccaggtcg

SEQ ID NO: 45768 - DNA, 445 bp, Oryza sativa
  Clone ID: PAT_MRT4530_48700C.1
cttgatgttcatttttagctgtgcctttagtcatttgagcttcttgcttttttttgtcaccggcccattgattggggagcttttgaatttacaagattttgacaaggcctgatgccggctgtctgtacacgagctggattgcttcacacttaaaaaggaaatatgccccgcccacgaactccctggggaagcccgtgtagattgaagaaattccgggaagttttttgtttcgcaggagaactgactagaaccccttctttgtgactcccacgaataggatcacaaattgaatttaagggtaggggggggtatcctccctctaaaaaaggccaaggggaatttcagggagtatttctccttcagggccagagccttgtgttattaagaccggggaggactttgaggaaggcgccctttccttgatgaagatacacaaccttgtggg

SEQ ID NO: 45769 - DNA, 1509 bp, Oryza sativa
  Clone ID: PAT_MRT4530_48701C.1
actacccttctattgcatcgctttcgtcacgaccgaagaggcggaggagtgtataagggcacgcccctagactatcgccatggtacagtgcgctgccaccggatcaaccacggggatcgggacgagctaccaggggaggtaaatggccgccgcccgcttcgccggtgtccctcgccgcgcggcgcagtcgtcgtcgtcgtcgtcccaggcgcccctcgacgagccgcctccgccggcgctgacgcccgagcaggtcggtctatgcagggaggcgctcgagtacttcgaggggatgtgtggccggccggaagccatgtccgacgagttcaggagactccaggacacgagacacgagctgatgagaagttctaatgaagctcgtaatgctgcaaatagggagaaaaaccgctatattgatgtcgtaccatttgatactaccagggtaaggctaaaacgatcaaccaccagtcagacttcaagcaatgattatatcaatgcaagctttataaaggtcactgaggacaacagagttgcaaaatttatttccactcaaggtccactagccaagacatttgatgatttctgggaaatggtctatgaatatcaatgtcctgttattgttatgctcacacaattcgacagtcttaagtgtgatgaatatcttccattacgcaagcaacgtgaagcgtatggaaagtacaatgttaagattacaaatgccaaaagagatagccatcagttatggttgcgtgatgtgatggtgcaatgcaacgagtcaagcagggttcattctgtacgccatatagaatatcctgattggcctgatcatggagttccaactaatactgatgctgtaagacaaattcgaaaatggttacaaaatactccgatggagcatcctatagttgtacactgcagtgcgggcattggaagaaccggtgcttacataactatccatagtacaattgagagacttctccttggtgataaaagctcatatcatcttgatgaaactgtcaaaactttgagaacccaacgagttggaatggtccaaactgagaaacaatacatgttctgctatcgtgcaattgctgatgagctgaaagatcttttggagtctaaccgctgaggtatccctaaggcaggaattatggacatgtctgtttttctcacccttaaattcctataatctgaatgaatgcctgattggagcacaccatttctgcattgactgaaccgtttgaagcttagcacttttattttgggtgcacgattacttctgaatagatttgactgcatcagtaccgccatgtcactttcatttcattacctctaaattgttgttattcctgctctcacggaattaaagagagttagtaggtttagaactattggtggcattgtgcctgttcttattgtgcagcgaagaatggttccttgcttggattttaacggaatcacgtacctaaaaaaaaaaaaaaaaaaactcgagactgttctctctctctc

SEQ ID NO: 45770 - DNA, 452 bp, Oryza sativa
  Clone ID: PAT_MRT4530_48702C.1
cgcgcggcgtcggccttcggcataccgtgcccgctggcggcgccgcggaggcggcgtcggcacagccgtgccctgctgggcgcgccggcgcgcgcggcttgaagcggctcgtcgacgtcggggaagagggcggaggtaggagagagtggcgccggctgtcgcggcgagcggaggacggcggctggccggcggtccggcgagcggaggccggcggctgcagcccgcctcgctgcagtccccgccctgccgccgtgcctcgtcgttgtcgtcgccattgtccaacatatgcagagagaatgatgagagagagagagcgtgggtcccacactcccaccgttggcgagctagttttggctggccaatagctagttttggctgagctgtggccaatagctgttggaactcgtttttagtttaaaattacccaattttaaaaaaaaaaaaaaaaaaaa

SEQ ID NO: 45771 - DNA, 854 bp, Oryza sativa
  unsure (1)..(854): unsure at all n locations
  Clone ID: PAT_MRT4530_48703C.1
cgtccctcctcccgttcccggactctacgccccgcggagaacgaagccgccgcggcgcacggattcaccgaggccagcgacggcggcaactgctcctcccctcttacaaggttacacgatgttttctgtgaggtgcgggccgcctgcattcgcctttggattggaaagggctgccattacgcatccttcaaagttcagtactttagtggtatgtggtgccaggggcccgaggccaagatatcctcgtgtgtggaaaactcgcaagagaatcggaaccgtttccaagtctcaaaagcttgtcgaatgtgttaaaggcttgtctaatgtaaaggaggaagtatatggtgctcttgattcatttgttgcatgggaattggagtttcccttgatagcagtaaagaaggcacttaagacccttgaagatgaaaaggaatggaaacggataattcaggttattaaatggatgtttaacaaaggtcaaggaaagacaatgggaagttattacactttgttgaatgctttgattgaggatggacgagtggaggaagcagaagagctgtatggaaaaatattctcacgatatttggagggtttgcctcatacctttttcatgagaatgatatctttatattacagactagaatcatatcagaagaggtttgaggtaggaatccaaatatattatactttcgttctaatgaacacccttcttatgttaattctggaccatggtttcccttgcatggaggaacagaactgaacttgtgaaaattttctgctaacagcctaacacataagtattgttaagatagtaagttgtaattcntgttaaaattttttttttgttttctact

SEQ ID NO: 45772 - DNA, 688 bp, Oryza sativa
  Clone ID: PAT_MRT4530_48704C.1
caaattacaccacagaagatatcaactactcctcacgaacatccaacatgaattggaaagaaataaaaatcacatgatcacattgagatcatgtgattaaaaccaagaacacacgccaagaaaccatcatgtgatgtgacttgtgagtactaaagtatactgaaccaagatagaacaccaaagaattgctgttgatcaagaaacagcaagggatcgatcaaagaaagtgactactgacgaatttcctggtgcggctggtgccgtggacgacagggttggtcatgttgccgatgatgtaggcggtgaggccgaggttgaagagcatgtaggcggtggtgtagaccatctcgccggtgttctcggcgtgcatgtcgccgtagccgacggtggaaagggtggtgatgaaccagtacatggaggcgacgtagaactgcgaacatcgactaggccgcctcctcctgaaaaacttgtccaacaaaatttctcgggcagtaaccatggcattttcagggtgtgttcgaaccaaggtgttggaagcctctcctttccttgtgtcgcccccaaaatcaaccaagctttgccctccgaaatcaatcacaacgaactcccaacagtcaacatcaccatcacagatcctagtcatcgtcacaaaaccatactccctccgtcccattttaagtgcagccat

SEQ ID NO: 45773 - DNA, 1583 bp, Oryza sativa
  Clone ID: PAT_MRT4530_48705C.1
gatccccgggctgcaggcgttcccggactctacgccccgcggagaacgaagccgccgcggcgcacggattcaccgaggccagcgacggcggcaactgctcctcccctcttacaaggtgaaatgtgctcccgtcccttcgattcccctattcaggtggggcgagcgagaaggggaagaggagaggacagctagaactttttcttcccaattctttgcgcagttcttgctcgctatcccttttcctgtttcgtatacggaccagcactgtctgctgcggaaggtttatccgattgtttgtcacggcaggttacacgatgttttctgtgaggtgcgggccgcctgcattcgcctttggattggaaagggctgccattacgcatccttcaaagttcagtactttagtggtatgtggtgccaggggcccgaggccaagatatcctcgtgtgtggaaaactcgcaagagaatcggaaccgtttccaagtctcaaaagcttgtcgaatgtttgcagtttgtatccgcttttgcatccaacatcttcctggttaaaggcttgtctaatgtaaaggaggaagtatatggtgctcttgattcatttgttgcatgggaattggagtttcccttgatagcagtaaagaaggcacttaagacccttgaagatgaaaaggaatggaaacggataattcaggttattaaatggatgtttaacaaaggtcaaggaaagacaatgggaagttattacactttgttgaatgctttgattgaggatggacgagtggaggaagcagaagagctgtatggaaaaatattctcacgatatttggagggtttgcctcatacctttttcatgagaatgatatctttatattacagactagaatcatatcagaagatgtttgagatctttgctgatatggaggagctgggtgttagacctgacggttcgattatcagaatgcttggtgaggtattccagaagttagggatgttggacaaatatgtaaaattaaagaagaaatatccaccaccaaaatgggaatatcgacgcatcaaaggcaaacgcatcagagtaaaagtctacccaaaagacgaaattgaagaaccaatgagaaaagctggcacagatgaagtggaagaggaagaaaacatggatgtagatagtgaattggaagaagcggcaagtgcaggcctggacaggaatgtattggacgaagcagcttgtggagaccttgaatttgtgtagttcagagctttcctttggtattattcatgcctgcttcatcaaagcaggttagaacaatgaactgataagaagtaactgactagttagattcagttttgtgccatgaagtcatggattgccacattagaagatgtagaatatgtaaaacattagctcattacagatttaattagcacgattagcatgttatacaaggccatgttgttctagaacaagagtttcctcggagtttgtagtccttgtactgatttatgatatcattccttagagcactcgttctacttgttaaaattataagtcaatatggtagaacaaagctaatcttatacttgttgtaccggc

SEQ ID NO: 45774 - DNA, 1815 bp, Oryza sativa
  Clone ID: PAT_MRT4530_48706C.1
ctgagttctgacctgttaatttctcctcttcctccggcgtcgtcgtcgaggagatcgttcgatcgactgatcagcgattaggcgtgagatagaggaggaggaacggattgtggttttcttgaattgttaggttgggttgtggttatgatgatggggggtaggattgcgaggagagggttgtcgaggctcgcagcggcggtggagacggccgccgtcgcgccgccgagaatggcggacttcaaccacgtcccgctcccctacgacggcccgtccgccgccgagatcgcacggaagcgcgccgagttcctcagcccgtccctcttccacttttattccaaaccactgaacatcgtggagggtaagatgcagtacctgttcgacgagcgcgggcggcgctacctggacgcgttcgccggcatcgccaccgtgtgctgcggccactgccacccggacgtcgtcggcgcgatcgccgcgcaggccggccgcctgcagcactccaccgtgctctacctcaaccacgccatcgccgacttcgccgaggcgctcgcctccaagatgcccggcgacctcaaggttgtgttcttcaccaactccggcacggaggcgaacgagctcgccatcatgatggcgcggctgtacaccggctcccacgacatcatatcgctccggaactcctaccacggcaacgccgctggcaccatgggcgccaccgcgcagaagaactggaagttcagcgtcgtccagagcggcgtgcaccacgccgtgaacccggacccgtacaggggcgcgttcggctccgacgccgaaaagtacgcgcgcgacgtgcaggagatcatcgagttcggcaccaccgggcaggtcgccggcttcatatcggaggcgatacagggcgtcggtgggatcgtggagctgtcgccggggtacctgccgctggcgtacgaggcggtccggagcgccggcgggctgtgcatcgccgacgaggtccaggccggcttcgcgcgcgtcggcagccacttctgggggttcgagacccacggcgtcgtccccgacatagtcaccatggccaagggcatcggcaacggcatcccgctgggcgcggtggtgacgacgccggagatcgcgcaggtgctgacaaggcggtgctacttcaacacgttcggtggcaacccgctgtgcaccgccggcgggctcgccgtgctccgggtgctcgagaaggagggcctccaggcgaacgcccacgccgtcggctcctacctcaaggaccgcctccgcgctctccaggacaagcacgaaattatcggcgacgtgagggggacgggtttcatgctcggcgtcgagctggtgacggacaggcagctcaagacgccggcgaaagacgagatttgccgcgccatggagcacatgaaagagatgggcgtcttggtcggcaaaggcggcttctacgggaacgtcttcaggatcactccccctctgtgcttcaccaaggaggatgccgatttcttcgtcgccgtgatggactctgcactgtccaagctctgaaacctgctctgcacggatgctagaagagtagaaggccatcaaagatgtttcacaatcttcatcagagatgcatggtttcatgaacagttcaggaaaattgttcactccttgatgcttcgatgcatttcttatttgtcagaaacttgtagagagaatcttggaaatctcaatcagtcttggttgagtcttgtatatatagatataataaatatacgtgtggtatcctatatttaagtataccgataccaattaatttacggttcaaaacttgcacgc

SEQ ID NO: 45775 - DNA, 1819 bp, Oryza sativa
  Clone ID: PAT_MRT4530_48707C.1
caggagagagaaagagagagagacccagacccatgccaaggccaagaactcggagtccccgagcccaagctccaatcccaatcccctccccatccccacccccccctctcctcctcctccatctccaagaacaagagcgcatcctagaacattaggggataaaggaggaggagaagaagaccaagaaaaggtactacctttcatctctccctcccccccaaatacacactggtcgcaaaacgagaggccgcctcagccttctccaatcccctcttacggagagcaaagcaagcaagatttttcttcgatctctgctcgagtttcttgctgtgaagtctgttcttttttcttaactgttactgctcgtgcgtttttgagaagtttcgagaggagagggaggagagttcaagaacttggagagaaggggatggatccggtgttgctggacgacatcatccggaggcttatcgaggtgaagaatctgaagccggggaagaacgcgcagctttcggagtcggagattaagcagctctgcgcaacctccaaggagatcttcctgaatcagcccaacctgctcgagctcgaggcccccatcaaaatctgcggtgatgttcatggacagtattctgatctcctgaggctgtttgattatggtgggtatccacctcagtccaactatctcttcttgggcgattatgtggaccggggaaagcaaagccttgagacgatatgccttcttttggcttataagatcaagtaccctgaaaacttcttcctactcagaggcaaccatgaatgtgcatcggtcaaccgcatctatggattttatgacgagtgcaagcgcagattcagtgtaaaactctggaagacttttactgactgttttaactgcttaccagtggcagcattgatagatgaaaagattctttgtatgcacggaggtctttctccagagttgaataagctggatcaaatactcaacctcaaccgccccacggatgtgcctgatactgggttactttgtgatctcctttggtccgatccatccaatgacgcacaagggtgggctatgaatgatcgaggtgtctcatatacattcgggccagacaaagtgtctgaatttcttgagaagcatgatttagacctcatctgtcgagcccatcaggttgtcgaagatgggtacgagttctttgctaaccgccaacttgtaacaatattctcggcccctaattactgtggagaatttgataatgctggtgccatgatgagtgtagatgatacactgatgtgctcttttcaaatactaaaaccagcgaggaaaatgttgggtggttccacgaattccaaatccggcttcaagtcactgagagggtggtgacgatgagcaaagctgtgatctgatctgctggcgcatgtcttctacagcggctgcgactaaccggcattttcgcctacagctcgggtccataaacagcgaagcagatagaaatgtgtacaactttccagccgatggaactgtacatcatcgttcatgttggattaacacttgttgtaatgtattattggttttaccatgcggatctcttatcatatgagaggatgtgaatgaaaactgttctcccgtcctcccccctaaattcagaaaagttcagacagaaggactccaataaaaatagctagaatcgaatgcttttgaaccaaaaaaaaaaaaaaaaaaaaacagtgctaacatagttatatcccaagaggtagtcccattgaacctgctattactgaatttttctgccctttttaaaaaaaaaaaaaaaaaaaaaaaaaa

SEQ ID NO: 45776 - DNA, 243 bp, Oryza sativa
  Clone ID: PAT_MRT4530_48708C.1
atggaggcggcgatcgccgaggagggaggcagcgacgccgctgggcttggggggaaggcgctttcggagctggaagcgagggaggcggcggcgctcggggaagggagagggacgagagtggcggcgaccggcgaggatgttgggccctgtgggctatggtgcaatttctccctgggtttgggccgatttggaccactcgcgcggccgactgcgcccctttccgccggcaaccgcattgcgtaa

SEQ ID NO: 45777 - DNA, 453 bp, Oryza sativa
  Clone ID: PAT_MRT4530_48709C.1
ctcttggtgacttttatgttctaggagtggctgaattgactagcaaaatgtttgtatctgcaagaaagagactgtgctttctgttcataagtgctctacttctgtcgcttcttgcgccgtctgatggctcatcaaactccacagcgaatctcaatcaaagccacaacaagaccggacgtactttggagatgacacccaaagtattatttcaactcaagatgcatgcattgttccactggtcttcttttggtttcttgatgcctgtagggataatactagccagaatgtcaagcaaatctaaaagcggcaggagcatcagagtccttttctaattgccatgtcatttctcagattgcagcggtccttcttgctaccggcggtgcggctctttcactaatgacctttgagaattcattcagtaacagtcaccagagagtaggattagcattgtat

SEQ ID NO: 45778 - DNA, 3884 bp, Oryza sativa
  Clone ID: PAT_MRT4530_4870C.1
atgtcgtattacgtagatcctcgtaccagcgtaccccaataccctctatatccggtctacgggtatcccccgtcgacagtggtgcgccaggtagggggacttagtgctcaaggttctactactatgacatccagcttcgtcgacaatagcgtcaataccaacctcaaccaaagagttcctacttcaacaatactggtgtggactcaagtcggcgaaatcgtctttccggtttacaccacagtgccgatctcagctagtccgccaatgaccggaaacgagaacgcagtggctacaacccggggcgactccatgtcgaaggatcctcctgccgaagcggagatcggaacatcgacaacatccgagttcgagatcctagtgcggctaagccttgtcttttcgacaggaatcatgagccgacgaggattacttccgaggtgacaaggtcctggtgtcctatccacaaaaccagaaaacacaccttgcaagcctgctgggttttcctcaacgtccatgctgaaattcgtgcctgcaaagagcatggaattcagcgtacctctccaactcgtgatgtctattgtcctattcacaagacaaagaatcacaacctctcgagctgcaaggtctttctcagcgccatgaagacgccacctcctaaggtccagcagtcacgcgttcccttcagggatgaggacaaggaacaaggagcgacgccgatttcagatcgatttgttggagtaatcgacatcgatccccacgaaccatcagtcttgcacctgctcgaagactatggttcatcgacaacgagtatgccgcgtgaggtattggctatcgacgatgtcggcacgtcagcatgcaccaatgcggaagcggagaatcaagtgattacaccggcccagcacattagagccgtcaacgcaatactgagggaaactccctacgaccccgttctgaacgacgatctcgcacgatggacaaagcggttatgggaatcagtgaccaacctcagcaacgcgttcgaagaggccgccactgcagcgcacccgaaacagccaccaactggcgatgctaatggtgaaaaccctgaacagcgggaatcgcctcatcgagccacccctccacctcgcggcaccggtgatctccgcgatcacctgaatggccgccgagaggcgcgacgcacacgagtcgacgagaaccgttcctgacatcgcgtctcttcacggcgtcacgataacgaagaacgaggaggccgttcgagcgaagaccgagactgagataaccgccacaaccgccgcgatcacgacgatcgcgagcggcgggtgctgggcgattctggtcgaggacgttgccataatgacgacgatgatggagatcagcgccgagacaacaacgagagacgacgacagagttctcgagaacctggccgacgtcctcgtaatcgcacgccggaaccaagcgatccatcgtcattgtcgtcatcttcctcatcctcatcatcagatagacatccgcgaaggacgtacgatcgccgacaacccaccgcccccagcgctgggtgtagagctttcggtcgttcacttcaagatgtccgatggcctgaaaggttccaaccaggagcaatagagaaatacgatgggagcaccgacctagaagaattccttcaggtctactccacgaacccgggtgaatccttgagggattatgtttggcgctttaacgagtgcagaaatacaatccctgaaatcaccgacgcttctgtaattcgcgctttcaagtccggtgtcagagatcgctatactacttaggagttggcaacgaggcgcgtcatgactactcggagattattcgaaattgtcgatcgatgcgctcatgcggacgacgcactgagacgcaagaacgacaaaccgaagaccggaggagagaagaaaccagcaaaggacgcacccgagtcaagcaagaagaaaaatcgcaagagtgggaaaaggaaagctcaagcggaagttctcgcagcagaatacgcggaccctcccaagcgcccagacccacaaggcagcgacgcgaagaaaatatggtgccctatacacaagtcagatagacactctctagaagattgcctcgtcttcaataagtcgctcgtaaaacatatggtatttgaaaaaggcaagcgaatacgtgtggtcgagaaggacgctgaggcggttactcaggaatcagactcagcatatccagactccgatctccatgtctcgcacatcttcggaggttccacgacatactcctcagaggctgcgcccaagatgaagtgatccgaacagaagatagtattctcagaagaggaacaccccaatactgccatcatcctagggcaatatctgatcgtggtcgaacccactattcggaatatcaaggtcacgcgagttctgatcgacgacggcagctcaatcaaccttttcttcgccagcgctttggacgcgatggggatcccacgaagagagttgacacccaccaatcaacccttccatggaatcactcctcagtcatcgtctaaaccattgggcaaaattacgttgcctgtgactttcggccaagcaaataacttccgaacggaacagatcacctttgatgtcgctgaattcgatacagcataaaatgccatcattgggagaactgcactcgcgaagttcatggccgcatctcactacgcgtatcaagtgctcaagataccgggaccgaagggaacattcactatttaagggaatgctaagctggcagtgcaatgcgacaagcggagccttgacatgctcgagcacacacccagcccactcgccacagctgagccacccaagaaaccgtccgacatgcccggggtacccagggaggtgattgagcacaaactcatggtgcgacccgatgccaagccagtaaaacaaaaactgcagagatttgcaccagatcgaaaacaagccatacgagaagaactcgacaaacttctcaaagccggtttcatcagagaggtactctatctagagtggctaaccaacctagtcatggtgcggaaggccaacgggaaatggagaatgtgtgtcgatttcaccgacctcaacaaggcgtgtcccaaggatcacttccctcttcctcgaatagaccaactggtggactcaacagccggttgcatggcgaaagaggacgaggagaagacaacattcatcacgccgttcggggtattctgctacgttaagatgccgttcggactaataaccgcaggaaacactttccagcgcacggtccaaggtgcacttagcgaccagctcggaaataatgtcgaagcctacatcgataacattgttgtcaagaccaagacaagtgactcattgattgacgatctgcgggaaacgttcgacaacctccaacgatatcgcctcatgctcaatccagagaagtgcacgttcggagtaccatcgggcaagctactcggcttcctcgtctctggcagaggaatagaagcaaatcccgagaagatcaaggcaatcgagaacatgaagtcgcctacaagactcaaggaagtacagaagctaatcggatgcatggcggcactaagcaggttcgtcgctaggatgggagagcgaggacaacctttcttcgctctgctaaaaaagcaagacaaattcgtatggacacaggaagtcgaagaggcattcattgcactcaagcgctacctatcaaatccacctgtacttgttgcccccaacctaataaagaattatttctctatatttccgccacgccatattccgttagcactgtcattgttgtcgagagagagaaggtgcaacgaccagtctattacatctcggaggccatgctccccaccgagctacgacatcaaa

SEQ ID NO: 45779 - DNA, 1404 bp, Oryza sativa
  Clone ID: PAT_MRT4530_48710C.1
atggcgaggtcgaggcctagggtttggctcctggcggggtgcagcgccgtgctgctgtgggccttcgtcgggcagctcgtggccgtcggacgcctcctcgccttgttcggcctcgccggcgacgcggagccctcgcctccgcccaccgcgcttccgcctcgaagagtctataagagtaatggttatctgaaggtatcttgcaatgggggtttgaatcagatgcgttcagagatatgtgacatggtggcggttgctcgcttgctaaaccttacaatggttgtcccagaactagacaagaggtcattctgggctgatcaaagcaattttgaagatatatttgatgttaaacatttcattgacacattaagagatgaagtgcacattgttaaacagcttccgaagaggtttggtccagaggattcaaacaatatacttaatatgccacctgtgagctggtctgatgaaaaatattacttgcatcagatcttaccattattcagcaaatatagcgtcatccattttaacaagacggatgctcggttagcaaacaatggtatcagtacacagcttcaactacttaggtgccgtgttaattttcatgcactgaagttcacccctcaaattgaggccttggggaataaactggtgcagaaacttcaggccaagggatcatttgcagccttgcatttacgctatgagatggacatgctggccttttctggttgcaatcatggtctttctcaagaagaagctgaagagctcaaaagaatgagatatgcttatccatggtggagagaaaaggaaattgattcacaagctaagagattgcaagggctatgcccacttacacctgaggagacatcttttattctgaaagctctgggatttcagaaggacactctcatatacattgctgccggtgaaatttatgggggagaaaaaagattagaaccattacaagctgcatttccaaaacttgtaagaaaggagacgctgctagacttggaagctctacgacaattccagaaccattcttctcagatggctgcacttgacttcattgtatccacagccagtgatattttcattcctacttatgatggtaacatggcaaaacttgttgaaggtcaccggaggttcctgggtttcaggagaagtgtgctactagaccgacagaaattggttggatttatagatctgtacaacaataagacaatctcttggaacaattttgcatcttctgtccaggaaactcatagaaatcgtgtagttcaaccgtcctgtcggcagaaacttgaaaataagccaaaagaagaggattacttttatgctaacccacacgaatgcctggccaattcaagattttgcagccgaaccaaggatgcaatcagtgtaagaatatga

SEQ ID NO: 45780 - DNA, 245 bp, Oryza sativa
  unsure (1)..(245): unsure at all n locations
  Clone ID: PAT_MRT4530_48711C.1
ggggtgggtgggtgaagttcgattgaatataataaacctttttactagggaaaccacacgaattcacgattggttaattttactgngaatagcacgggtccatcacatcacacaaatttatacgttgatacacccatatgtcccgaaactacaagctgcataattaatcgataacacacgggtttaattcagcaataattaggacacacacaaaccacactcttatgggtggtttttattgtgga

SEQ ID NO: 45781 - DNA, 466 bp, Oryza sativa
  unsure (1)..(466): unsure at all n locations
  Clone ID: PAT_MRT4530_48712C.1
cgaataagncgagcctcccattgnntgattnctttgggattaccaatggggagtccacgcaagggtnnctcggcgaatgcctcctggggctcgccatggccctcgcgcnntctccnntcctcccccgcttcnngccctcgnncgtgcggcnntcgtgcgnnngctccgnngcggtanngcggcagtggcacccnngtcgggccggnncggcggacagcgacgcacctacggagtgtgtgtgngtgnngttatcnggnagnngagtcgnnncggagggaaatcgtcnnggggggtgtgggcgtgccgcgtcgnntcggaggcaatcnnngtcggcaaaggttcccctcctgggtcgtagggaggaaagtgtgtcggggggaagtagcttctncggtcgggtcggtggggaatcnngtcgggaaaaggttcccttnccggttgggtaggaaggaaagttgtnncgggg

SEQ ID NO: 45782 - DNA, 399 bp, Oryza sativa
  Clone ID: PAT_MRT4530_48713C.1
atggatattcacggctgcacttattttgggacggaggaaaaacacatctctctcgatctgaatgcatgtggcttgaaacgacagtacgacaccacatttacctggccagaatttgcaaagtttggagcaaaatcacaagcaaagctggaagatgcatctagtaggagtagtagggagggagtagagatagcaacggtacatgagtccacgtgtgtactgggcgacacgcccagtacaaggtccctttcgctagccgtggcggcgtttggtggtttcaccaagaagctcaagccctcctcgttgccacgtggatatctggtccaggacgcggcgggcccaccgcagcctcgagtgacaggtctccttgcaagtgggccccacgctattatttattatccg

SEQ ID NO: 45783 - DNA, 286 bp, Oryza sativa
  Clone ID: PAT_MRT4530_48714C.1
ctcgtcgcctacctagggtttcgtgtttgggagatctgagagggggagggggatggaggtgagggcgactaccgtgcccggcgcactctccccgcgccgcctcctgggttcgcgggggacaaaatgccggactgttccgaagctgatcggtgacctgaccttccccgcgcggggggatttctgccgccggaaggctggatctttgattcttgaggcaaatggtggtgcaagcgaggagggtgaaagtctctactctctccttccttacttcctgcagcacctgccc

SEQ ID NO: 45784 - DNA, 1635 bp, Oryza sativa
  Clone ID: PAT_MRT4530_48715C.1
agagtgaaaaaaaattctaatgctaatttaataaggggtacaccaggagcaaattaagtggagtaatccaacaaaatgaaaaagaagcctagagacacacacacacacacacacagaactaatagtataattttgtaactacagaactctccaatctccaataagaccgacatggtgttacaaggaagcagggtagcctgatgcttaaacagtgactaatatcgggacagctacagcaattgcagttagactcttctgcctgaagatggaaaacctactggaactcagatacatcttttacaagtcagaaagaaatgaagccatctttggccgccaccggcgatcatggtgtgcggctgcagcagtgacagaccaggaatttcatggatcctggtcagttcatctcagtttcaggctccagaggcggtgaccttcacatcgcccgatggtgttctcgcgctgtcaggtatcgactgagcaggagatgcccagctctggtctgggttgtatgctgaggttacgatgtttgttgttcttggggcgacggagctgtgctgcccttgctcgctgctgtgcgtatcggtactagagattggaacagcaggaggagtctgtgcaagggcgggtgccgcttccaccctaggcttcttattcttctgttccatttgatagcttggtaggaagcttccgacaacaatctgaacaggacttgctgccaccagaaggccagcaactccaccaccgacaacacggccatctgggctggcaagagaaacgctcatcccacctgaccgactccgtgttccgctgttttcagtaggcataaacgatccagacaaagatagcaactcaaaacgtccctcgtaagttaatgtgccacccgaggaatcaggttgacgcagtgtaacgtttgatatcacaccattagcagatagaatacagatagctcgtggtccttgttgagaaaatgatatgaccttcatagtcacatcctctccaggagcaacagtgatgatgtgaggagtaaaattcgcaccagcagaacaagccaccatttcaccaatggagtcgaagtggaagccgaactgctgctgctggtgatggtgctggtgttggtggtggtgatggagcttggccgtggaggcgaagtcgagggggcgacccctcccgcgcttcatggcggcgcccaccgccgacgccggcgtgtagggccccaccgcggaggccgccatgggtaccgacgccgagatcggcgtcgcgttcagcggccggatcaggctcccgtccggcccatacttcctcggcctccccctcttcttccccaccttcaccacccccgccaccggcgccgccgccaccacaactcctcctcctcccgccgccataggcggcggcggcaccagcacaccaccgctcgagctaccctgctcggccaccgccgcctgcggctggaagctcaccgtcgccgccgttgcctcggtcgccacggccaccggcgcaacgctcgcttcccccgacttggcctccatggtcacacacgcgagcgcgacgacgacactcctcctcctcctcaacactagtagggtttccgccacgagctctcgccattcctcgtgccgattcctgcagcccggg

SEQ ID NO: 45785 - DNA, 345 bp, Oryza sativa
  Clone ID: PAT_MRT4530_48716C.1
atggcaaacctcacggccaccggtctcctggtcgcgttcctcttcgtcgccgcggttgccatcgcggacggccggagcctctccgtcgcacacgagaagttccacggagacggagctgaccatcactatgtggcgccggagcacgcgacgacgccgctcccgctgatctgcaccggggtgcacggggtggaggccggcgagacctgcgactccatcgcccggcgcttccacgcggggctgggccgcgcgcctttcttccgcctcgtctccctcaacccgaacatcaactgccgggagctcttcgtcggccagtgggtgtgcatccagggcctgctccccgtttga

SEQ ID NO: 45786 - DNA, 441 bp, Oryza sativa
  Clone ID: PAT_MRT4530_48717C.1
aaagagaaaaaaaagagagctttttttttttttggcaaaagaccagccagtccttttcaagtaaactttgggcgggaatttttttttttagggtttcgttccccaaaagccggacccgggaggctccccgaattttccggaccggatccggaagagaatccaactttccctttagggaggccttttaaagccgggggaaatctagggcattacgggcccccggggaaaatgagtttccgctcaaaattccaaaaaaaattcgagccggaagctttaaaggttaaccccggggggcccaaagaaaaaaccatcccacatttataggggggggcccactgcccgttttccataaaaaaaacccgccgggccagctgtttttataaatcggcctacccccggaaaaagggggtttgctttttgggccccagagggggttttttt

SEQ ID NO: 45787 - DNA, 252 bp, Oryza sativa
  Clone ID: PAT_MRT4530_48718C.1
atgtggaacccacgtgggtcctacgctgattcagccgccacgtcggacaaaccaggggtcaaaaccacccaaggacctaaagcggtggccgtgctggggtcggcgtcggcgggtggcggtggtcatgctcgtgctcaaggatgtggaggcaacatgcaagcatgttcgatcggcggcagctcaagcttgccacccattggccccactcctccacggcttcctcttttgtacgtcggcgacgtcggcatatga

SEQ ID NO: 45788 - DNA, 317 bp, Oryza sativa
  unsure (1)..(317): unsure at all n locations
  Clone ID: PAT_MRT4530_48719C.1
aacatgatgagacagtgaccaacgatgagatggcagccgacccgagcgaacaagacatcaagccagagaaccacgagcaggaccagggcgagaagacaagctgccagagaaacccatctggacgcgtcgccagcgtcggaggggagggggacnccgatgctcacatggccgcacaatcagaattgacacagacggcgacgggcgagcgcacggtgccggcgcccccgccgccgggacccaaccaaggctgaccgccgtggagcacccgcggccaggaaagcggccacgagcatagatgccagccaccttgcaggtcg

SEQ ID NO: 45789 - DNA, 282 bp, Oryza sativa
  Clone ID: PAT_MRT4530_4871C.1
atggaagtggaggataagagcagcggtgctgctagggcattggagattaccgaccgcagcgacattcataggaacgtgatggcgacaatgtggttcagctcgggttccattgcgacagcgaccatcatgaagttggtttggaagggggtgacgaaggagcagcgttggttcactgatgacggctgcgacgatgacgacgtggtggcggaactcaacatcctggttgcacagagtggagcagcaggggggcatgatgtctcaacctatgggaacaccacatga

SEQ ID NO: 45790 - DNA, 852 bp, Oryza sativa
  Clone ID: PAT_MRT4530_48720C.1
atggagcttgccatgtcatcgccgcttttcgcgaagctctccgcgctcttctcctccgatgccgcgtgcctcgagggcctggagcgcgtccgtgggcgtggccacgagcggctccgtgtcgtggcgtataggctcggcggcttggggtacagctgggcgccgcggttccgcctcgccttgctgctcctcctgcgggacaagttccccgagctggtcggcgccgtcgaggtggtggatcccaccgtggccccggtggagcgccgggccatggaggagctgggctgcgttgtcaccgcgtcgcctgcgctctgccttgtggtcgaacagccaactctgatcttcatgccctacgcggatcgcgtcttctttgagaatttgctcaccttgaactggaccccagatcagctcggcaagatcgtcgttctcgggcacagtttcagtgccatggtgaagatgcttgagctcagcatttcgaagcaagagaagtgtggtgtcactgagcagagggagaaggtgaggagggtactggcaattcagagctatgttcaggaattagagctttgtgctgagatatctggtttgttcgataaccctctcttgggagatgagtatcctgatgaattgaaccagtctgactacaatcattcatcagagcagtgtacatgcatgcactgcgttgcgcatatggaaagcggtgctttgatttgtgctcttcccagcaccttttcaattcatttctttcacctcgatgctgaaatcgatatggaatatttgataccaggtaattgcgctacaagggtcgggagcaatgtcaatgtccaaatgggctatgatgctcagttagaagggtaa

SEQ ID NO: 45791 - DNA, 306 bp, Oryza sativa
  Clone ID: PAT_MRT4530_48721C.1
atgccgtgccgtgccgtgcgaaacggctgcatatgcatgctctcgcatctggactggatcaacccaacggtgaccctgaccagtgaccaccggcttctcttctccgccggttggatatcagacaaatcgaacaaccaattccgcaccaaccatggccaccactaccagcacatcaggatagagttcttatttcagtatggtggacctgatcatctctcttttagccaagacctgatcaatgcaaacttatacattcagttaactggcactgtcattgacgacactgttgaatattctggtgagtaa

SEQ ID NO: 45792 - DNA, 1765 bp, Oryza sativa
  Clone ID: PAT_MRT4530_48722C.1
aaccgacaagaacaaacagaacaagtaggataagcatcacaagtagtcaatactcaacacaaaacagaaattacaaataagttctaatagtacggttcaagtgcaatgtctgtgaagatatccacagcactaactggcatcttagagatcatgacctatactatagggatcataaaaagaaaaggaaatagtggtgatcattcattgtataacagctataaatccttactcagccatccgctgtagcaaatggatcatgggaaggtcctacatcatttccaatggttctttgcactaagcgctgcaaatcagccatgaccttgtgctctcgcttcgacttctcctcataattaaacatagcaagcgccctcttatcctctgcactgtaaacctggttttccttccttatacggatagcattcatcctctggtgcctactcccactcatcacatagcccaaatcctcgaacttctgaatctcctctgcagatagaccaacctcaccacgtcgtggcggacgtttcccttgctgtacgtactgtgcaatagcatcaccttctccaggtctcagtgcaccaccatagctaatatgaccttctgcacgaggaagaggcattggcccaaccggcatctcattctccaaagcagccttcttttgggcctcgagcatttccttgaatttgattgcttctgggtcaatctctggctcatttgtctcatcgatttccttaacaccaaggtcggcatcggatggggcctgatcttccgaatcagactgcttgctcctcttcctccgtgagctccggctcttcttcttactgtccctcaaggggctagggcttgatcctgaagccgctgccaccgcctcctcctcagagcttccctcagaagctgtatcattgctcttcctcttcttcctcctggagctccttcccctcctcttagacttcttgtgcctccgcgatctcttcttcttcctcctatccatagagtcctcggaatcataagagccctccgaatcctcctcagccttgctgttgtcgtcaccctctgtatcagatgaatggtggcggcggcggtggcggctacgcttgctgctacggtgactacccttacgccctttcttcttcctccgggtatcatctgatttgctggaatcggacaagctatcagactcaccggagtcggattccgacgaacccttgctatcctcctcttcgctcttatccgaggaggccaccttctttggcgattcctttttctcctcctcctcctcctcctcgtcgctgtagccataatcctcatcctcaccttcgcggcgaggagggctgggcgtgatgttccagatgcaccgcttcatgctcttgcggagcttctctctcttgacgcggcggtactcgaagtaggtgagacccttgagctgctcgtcgtcgtcatcgtcggaggcggaccaggcgccggcccccgcgccgccgccgccgcgacggggcgcagggtggtctcggtcccgagcccactccctctccacgtcgcggccacggtcgcggtggtagggggaccactggcggcggcggtcgcggtaggggctaggggaccggtccctgcggctgcggtaggggctaggcgaccggtcgcggcggcggttgcggcgcggggagggcgaccgggacggggagcggcggcggcgaggggagggcgaggcggagaccctggagcggccggggaggtgcaccacggacgcgaggcggccctccgtgcgacccat

SEQ ID NO: 45793 - DNA, 246 bp, Oryza sativa
  Clone ID: PAT_MRT4530_48723C.1
atggttgttaaggcgtctgtaaggcgacgccttagcgtccataaggcggtaaggcgtgtccagggcgggaagaggaaggaccagaggagcggaagggatgaaggagatggagacggtggctgggcagggttcttgccgtcggcggtagtggagcggacgcggctaggtgtcgacgggattagggataaggatggggtcggggatggggatggattgataaatatctatcaccatctttcgttttag

SEQ ID NO: 45794 - DNA, 1286 bp, Oryza sativa
  Clone ID: PAT_MRT4530_48724C.1
caaccaatagctaccactactgcccagcaacaagctagagagatttgccaaaagaaaaaatggcgatggctaggcgcggcaatggcggctaccagtacggcgcctacagctacggctacggctacagcaagccgcacgtgaactaccacagccagagctccgagagcgtcaccaccgtcgtgacgaagatggacgagatgagcgtccacgagaacgccgtgcagaagatgtcgtcgtcgttccgggaggagaaggtgtacgagcagcagggcggcggcggcggcgacgtgcaggtgtgccgcaatgggggcgctgctgcaggcgccgtgcagaagcacacctacgcggagaagaaggaggaggaggtgtacgaggagagcaaccatggcggagcaggcgctgcggccgccggctgggtacaacctacaaccgccaccacgcgggtcgccgtggctggcggcgggcagcaccactacggtggctgccaccggccactgcctgcctgcgtacgggaggactgcactccaaccaagcagcacgttcactgccggcggcagcccatacccaagtaccgccagccaaatcctacggttgcgaggaggaagattctgacgacgacgactgcgacgaccacgacgagagcgacgaccacgacgacctctgcccaccaagccgcacaaggcagcgtccacagctaccacgaggcggcgtaccagcacgaggagaaccagcacgccggcgagcaccaggccatcgagggtgtcaacggctgcggcgccggcgggtacaactacaaccgccaccaacccatcgccgtggctggcggcgggcagcaccactacggtggcgccactgccgccgcgtatggcaacgcctccaacaagcagcacttcactgccgccgccgccggccaccacagcagcggcggccatacccaataccaccaccaatcctacgaatgcgaggaggaagattccgacgaggacgactgcgaggacgacgacgacgacgagagcgacgacgacgacgacgacggccactgcccacctagccgccaaggcagcgtccacagctaccaccaggcggcgtaccagcacgaggagaagcagcacgccggcggccgcaaccactaccatgcatacgagcgccacgaggagcacggcggcggcgcgcaacgctaccagaagtacgagagctccacccaggtgggctacgccggcggcggcggcggcaacggcggatgcgtgcgtggcaatgccaagccatgtttccgaatcatggcctaa

SEQ ID NO: 45795 - DNA, 456 bp, Oryza sativa
  Clone ID: PAT_MRT4530_48725C.1
tcctcctaccacgagatagaggatcagtacgacgccgccggagggtacggccgccaccacggcggcggcggcggcgccgtgaagcagcacgccacctacaagcagcaccaggcgatcgagggtgtcaacggctgcggcgccggcgggtacaactacaaccgccaccacgcggtcgccgtggctggcggcgggcagcaccactacggtggcgccaccgccactgccgccgcgtacgggaggactgcctccaacaagcagcacttcactgccggcggcggccatacccaataccgccaccaatcctacggttgcgaggaggaagattctgacgacgacgactgcgacgacgacgacgagagcgacgacgacgacgacctctgcccaccaagccgccaaggcagcgtccacagctaccaccaggcggcgtaccagcacgaggagaagcagcacgccggc

SEQ ID NO: 45796 - DNA, 552 bp, Oryza sativa
  Clone ID: PAT_MRT4530_48726C.1
caggagcccgtttctctgaaccgcaggcttaccagcacccatccccccacaatgccaaacatcggcctttcttcatccactctgtcactgctcccgatctatggcggtatgcttgctttcttcagatcacatgctgcatatcataatcattaatgaaagaagttgacggttcagatttcagatttcatattccacttttcttgtgcagcactcgtccttctcagctcagggccagttgtcagcttcagtagcacctcatgactgcaagatgtatgttctgacgccgaagtaacaaatacaagatcgagtctatagtgtgggatcagccattcaatcaggattcaggaaaagggtatgctatgcacaccaaggatccgtagggaggaattgagatcttatacaagaccaagagcgtcggagaaataagcagtaatctgtaagtgtattttaggtgccgtcaaatgtcagcgcattactaaatgtttgtaacgaaagttgcagcaataataaattagcttgcccacccgctatctctacaaaaaaaaaaaaaaa

SEQ ID NO: 45797 - DNA, 158 bp, Oryza sativa
  Clone ID: PAT_MRT4530_48727C.1
atggcttcaaatggcctcacacggttcatcacgacacagtcttcactcgcccttcaccaccagtttcggtttgtctgcgccaagccccttgcttgcccttcaccaccgcatggtccatcgcagctgagcgtcgcttgcgcttcaccgtcttgcgatag

SEQ ID NO: 45798 - DNA, 1236 bp, Oryza sativa
  Clone ID: PAT_MRT4530_48728C.1
atggcgacggcgtggatgcgttgggcggcgaaggcggtggatcggacggcgaaaatcgaatacggggttgagatcaaggatgagagaactcggcatggtgaagacgcctgggtgcagtcggatcgatgtgaagggaagagctcatgctttctaccaggggagcatcccacgcttggagttgtcccatctgtttggacttggaacctgcttctcaaatttatagctgagactggtgaatatgagatggttctcgcagcttataatgaaatgaagtgctttcagctgactcccgatgtttatacatttgccatagtcactaggtcactttttcaagcaaagaaagtggatgaggctttgcaagtttgggccgagatgactgaaatgggagtgaaaccagatgcacgtgggtactcgtcatttctaattggtctgtgtgattgcagaaaatatgatttagcttatgttattctacaagagattaatagggagaaggttcctgttgaggccatggcttataacatggtaatggatggactatgcaaagaaatgagattggatgaggcggaaaagctcttggaaaacaaggccagacaaggatccaaccctgatgtatatggttatagctatctgattcagagttattgcaaaatgggcaacctaataaaggctgtggatcattatgaagccatggtttctcatggtattgagacaaattgccacattgtgagttaccttctgcaatgcttcaggaagttaggcatgacatctgaagtaatcgcgtatttcctgaaatttaaagattcagggcttcatcttgacaaggtgatttataacattgctatggatacttattgcaagaatgggaacatgaacgaggcagttaagctactgaatgaaatgaagtgtgggggtttgacacctgacaaaattcactacacatgcctaatcaatggttactgtttgaagggagaaatgcaaaatgcacagcaggtatttgaggaaatgctgaaggccaatattgagccagatatagttacatataacatattggctagtgggttttgcaagagcggtcttgttatggaggaggtcaacattgatgatgaagaactttctgtagaaattcgcaaagaaaatgaggctcctgttgttgagagaaaagtcaagaacatttcagataccaacattaagaggttgtccaagttccacttaggttgtgagtctctgtgcaagtag

SEQ ID NO: 45799 - DNA, 138 bp, Oryza sativa
  Clone ID: PAT_MRT4530_48729C.1
atggaggaggagcggatggctgggacagggacatccctcgccctgcaggggtgcgtgcaggtgcaggtgcagcgcagctccctgcgcgccctgcgcgtgtcagggggcggaggtcaaaaccacgacgagcgacgctga

SEQ ID NO: 45800 - DNA, 1506 bp, Oryza sativa
  Clone ID: PAT_MRT4530_4872C.1
atgggccgaatctcgctcggcccatctctctctcccccggccctctctcccgggcgctctctctctctctctctctctccccccggcgcgctcctccccccccccccgctcagcctcgcccgcacgctgctcgcgcgtgcgagagccgccccgagcgcctctctccccgcttcccctccgtcccgcccgcgcgccgcgcgcgcgtgcgcgggagtcgcccgcgctaagcgcccctcccctcgcaaagccgcttcccgcgcgccgagttcgcgtgcgcgcgcccgcgcggacgccgcccgttgtttcccgcgcgcgcgcgctgagtggccgaccgcccagtcgccgccgtcgtcagcgcctgccgcgcctgtcgcccgtgtcgcctcccctttcccctcctctcccattcgcctccgcgccattgccgccgctcccgtgctctgcctcgcctccgccgtccatcgccaagcgccgggagagccgcctcttcccgagctcccccgtggccgcaccgcctctccccaccttctccctctctctctccggtgccggccggcctccagccgcctctcccgcctcgccggagcgtcgtccggccgtgccgtcgcctcctccagcgtcgccgccacctcctcttcgccggcctgccctccgtttcgcgcggagacccccggagctgcgttcccgtcgtcgcccatccctttcctccgcgccggccgcctccagccgcctctgtctccctgcctgagcgccggacgacgtcgccaccacctccctcggctccgcgacgccgccctcatccccggcatcacctcctcctcgcccgaagctcgctggagtggcctcctcgccggcgtccagtggcgtcgccaccacttctccgtctccggccggctgctgttcgtcgccggtacgccgaccgacgtcgccgtctcctccgttgacatcgcagcgtcgtcctcccctccggctgctcctcggtttcgccggaacgccgtcgccgcgccggcctctccatcctcttcgtcgccggcgtcctttcggccgccccttcctcctccccggctcgtcggcttgctgcaccactaccacctccggcatcgcagcggcaaggtcgtcctcggcatcgtttcccctccatccaaacccctccgcggtccatcatcgtcgtctccgatcgttctcgtcgtcgacgtcccgtcggttgcccggctcgtcgtctcgcggcgccgcctccgtcgtcggcatcgcagcggcgtgttccacgtcgtcctcgtctccgtgcagccaccgccggctgccctcgtcgcctcctcgccggctccggtcgtcgtcgtcgtcgtcctctcgtcgttcccggttccgatcgtcgtggcgttcgtccctccgtcaagccgttctcgttcgtcgtcctcgcttcgtcaagtgcagcagccccatcatcgtcttcgtcctcgcctccgcgtcgtcaagcctcgtgccggccgcgtctcgccttcgtcctag

SEQ ID NO: 45801 - DNA, 3231 bp, Oryza sativa
  Clone ID: PAT_MRT4530_48730C.1
atgcaggtgaacttatgcgagggtctgcaccatatgctcggcagattaaaggttaaattaatcatatgggatgaaacaccgtgctcatatgatgagcaatgctcaaattcatttgatctcatgaatcatatcagcaggttgtttctgatatggagactgtctaattcccaagagaccacggcggcggcgaggcagagcaaaaaggggaaaaagcaacggggcggcgagagctcgatttatggcggcgggagcatctccggtgttcgaggggtgcgttcccggcgtcggattggacggggacatgctagaacgaggcagcgacgagaggcggcctccgggacagagcaaggcgtgcgatgggctacgtcgagcggcggcgggcgcggcgcggcgtgcggcgggctatggcgtgcggcagtgggcgcggcacagcgttcggcaagacgaagaacacggtgggggctcaccgacgagaggggagcggcgttggtgatgcggagggagtcgcggcgaggcggcgcggcaccgagagggcgcggccggggaagaagagagggagaggtggcgcccggagctcctcgtcacgcgcccacgcacgcaccggcctccccggtgcttggcgacgaatggcgacggcgcgagcagggcaggggcaataaggcggcgacggtggttcggcggcaatggcgcgggttgagatcaaggatgagagaactcggcatggtgaagacgcctgggtgcagtcggatcgatgtgaagggaagagctcatgctttctaccaggggagcatcccacatgccttggaagctgaaacttttcaggaccagtatctggagcaacatcctgcatcatggtatggtgccaggatgagagcaatagggtggctcttctggtccaaacgactgctccttcaagaagtggctcctggttttcttgctctcctcttgcgatattgctgggtactccctctgtttcataatactctccactgcctaaagagacgacctgccattgcatttgcctactttaaagatacacagagcattgggtttaatcatgacttttcaacctactcagagatgattcagattctatcccactcacgccaggggaagatgttagtttcattgttctctgagcttgtttcaagtagtaatgctagtggtcctgaaattttgccccttgttgatcaccacagaagaacatgtgctactccatgttcactctcgttcatggttgattgcttgatcaaggcatgcatcacttgctatgatgtacaagcaaccatatgcttatttagtggcatttgcaggcttggagttgtcccatctgtttggacttggaacctgcttctcaaatttatagctgagactggtgaatatgagatggttctcgcagcttataatgaaatgaagtgctttcagctgactcccgatgtttatacatttgccatagtcactaggtcactttttcaagcaaagaaagtggatgaggctttgcaagtttgggccgagatgactgaaatgggagtgaaaccagatgcacgtgggtactcgtcatttctaattggtctgtgtgattgcagaaaatatgatttagcttatgttattctacaagagattaatagggagaaggttcctgttgaggccatggcttataacatggtaatggatggactatgcaaagaaatgagattggatgaggcggaaaagctcttggaaaacaaggccagacaaggatccaaccctgatgtatatggttatagctatctgattcagagttattgcaaaatgggcaacctaataaaggctgtggatcattatgaagccatggtttctcatggtattgagacaaattgccacattgtgagttaccttctgcaatgcttcaggaagttaggcatgacatctgaagtaatcgcgtatttcctgaaatttaaagattcagggcttcatcttgacaaggtgatttataacattgctatggatacttattgcaagaatgggaacatgaacgaggcagttaagctactgaatgaaatgaagtgtgggggtttgacacctgacaaaattcactacacatgcctaatcaatggttactgtttgaagggagaaatgcaaaatgcacagcaggtatttgaggaaatgctgaaggccaatattgagccagatatagttacatataacatattggctagtgggttttgcaagagcggtcttgttatggaggtgtttgatcttctagaccgtatggcagatcacggtttggagcctaattcactcacctacggtatagcaattgttggattttgtagaggaggcaaccttagtgaagcagaggttctatttaatgtagtagaagaaaaaggaattgatcatatcgaagtgatgtacagttcgatggtttgtggctatttgctttcaggctggactgatcatgcttacatgctttttgtaagggttgctcgacaaggaaatcttgtggatcatttttcatgttctaagttgataaatgacctctgtagagttggaaatgtccagggggcttcaaatgtttgtaagattatgttagaacataatgttgtacctgatgtgatttcatatagcaaactcatatcaatctattgtcagaatggagatatggacaaagctcacttatggttccatgatatggttcagcgaggactttctattgatgttattgtatacactatactgatgaatggttactgcaaggctggtcgtctgcaagaagcttgtcaattgtttgttcaaatgacaaacttgggcataaagcctgatgtgattgcatatacagttctactggatggtcacttaaaggagacccttcagcaaggttgggaggggattgctaaagagagaaggagctttcttcttagagcgaatcataacaagttattaagttccatgaaagacatgcaaattgaacctgatgtaccctgttacacggtgttgattgatggaaagtgcaaagctgaatatctagtggaagcccgggaactatttgatgagatgttgcagaaaggacttactcctgatgcttatgcttacacagctcttataaatggatattgtagccaaggggaaatatcaaaggctgaagatcttttgcaagaaatgattgacaagggaatagaaccagatgaattgaccttttcagtattaaatcagagttccttgaggtctaggaagattcagttctgtgcatga

SEQ ID NO: 45802 - DNA, 3167 bp, Oryza sativa
  Clone ID: PAT_MRT4530_48731C.1
atgacgtcagaggatcctctcccactacaccacctctgccttcaccatgcttcccacccccacccccacatcctcctagcagtcgtcaccgtctcctatcccaacagaggcaaggtcgatgctgccaaggaaaccctaaacccaaatttcccctttgtccagttctccaatccccaacctgtgccgtgcgcgaggaggggcgcggtagggcgtagagcggcgcgcgcgcgggtcggcggcgcggcagccggcactggcagcgcagcgcagcgcagagagcaaggcaaaggcagccaccaaccagggactgaaggcaggcagagctccttcaagaagtggctcctggttttcttgctctcctcttgcgatattgctgggtactccctctgtttcataatacacctgagaattccccccctgggactctcttcctgccccttctctgtactgacagcttcagcttcagttcaatcagactgctctagtgatgatgaaaaactgaattgtgctccgtctcaacatgcccggaaaagatcccgccctttgtgctctgatagtgttgtacagactctccactgcctaaagagacgacctgccattgcatttgcctactttaaagatacacagagcattgggtttaatcatgacttttcaacctactcagagatgattcagattctatcccactcacgccaggggaagatgttagtttcattgttctctgagcttgtttcaagtagtaatgctagtggtcctgaaattttgccccttgttgatcaccacagaagaacatgtgctactccatgttcactctcgttcatggttgattgcttgatcaaggcatgcatcacttgctatgatgtacaagcaaccatatgcttatttagtggcatttgcaggcttggagttgtcccatctgtttggacttggaacctgcttctcaaatttatagctgagactggtgaatatgagatggttctcgcagcttataatgaaatgaagtgctttcagctgactcccgatgtttatacatttgccatagtcactaggtcactttttcaagcaaagaaagtggacgaggctttgcaagtttgggccgagatgactgaaatgggagtgaaaccagatgcacgtgggtactcgtcatttctaattggtctgtgtgattgcggaaaatatgatttagcttatgttattctacaagagattaatagggagaaggttcctgttgaggccatggcttataacatggtaatggatggactatgcaaagaaatgagattggatgaggcggaaaagctcttggaaaacaaggccagacaaggatccaaccctgatgtatatggttatagctatctgattcggagttattgcaaaatgggcaacctaataaatgctgtggatcattatgaagccatggtttctcatggtattgagacaaattgccacattgtgagttaccttctgcaatgcttcaggaagttaggcatgacatctgaagcaattgcgtatttcctgaaatttaaagattcagggcttcatcttgacaaggtgatttataacattgctatggatacttattgcaagaatgggaacatgaacgaggcagttaagctactgaatgaaatgaagtatgggggtttgacacctgacaaaattcactacacatgcctaatcagtggttactgtttgaagggagaaatgcaaaatgcacagcaggtatttgaggaaatgctgaaggccaatattgagccagatatagttacatataacatattggctagtgggttttgcaagagcggtcttgttatggaggtgtttgatcttctagaccgtatggcagatcaaggtttggagcctaattcactcacctatggtatagcaattgttggattttgtagaggaggcaaccttagtgaagcagaggttctatttaatgtagtagaagaaaaaggaattgatcatatcgaagtgatgtacagttcgatggtttgtggctatttgctttcaggctggactgatcatgcttacatgctttttgtaagggttgctcgacaaggaaatcttgtggatcatttttcatgttctaagttgataaatgacctctgtagagttggaaatgtccagggggcttcaaatgtttgtaagattatgttagaacatgatgttgtacctgatgtgatttcatatagcaaactcatatcaatctattgtcagaatggagatatggacaaagctcacttatggttccacgatatggttcagcgaggactttctgttgatgttattgtatacactatactgatgaatggttactgcaaggctggtcgtctgcaagaagcttgtcaattgtttgttcaaatgacaaacttgggcataaagcctgatgtgattgcatatacagttctactggatggtcacttaaaggagacccttcagcaaggttgggaggggattgctaaagagagaaggagctttcttcttagagcgaatcataacaagttattaagctccatgaaagacatgcaaattgaacctgatgtaccctgttacacggtgttgattgatggaaagtgcaaagctgaatatctagtggaagcccgggaactatttgatgagatgttgcagaaaggacttactcctgatgcttatgcttacacagctcttataaatggatattgtagccaaggggaaatatcaaaggctgaagatcttttgcaagaaatgattgacaagggaatagaaccagatgaattgaccttttcagtattaaatcagagttccttgaggtctaggaagattcagttctgtgcatgattccctctgtggtaccatgtttagtaaattctttctactgagaacacctatgtcaacagcaaggaggtcaacattgctgatgaagaactttctgtagaaattcgcaaagaaaatgaggctcctgttgttgagagaaaagtcaagaacatttcagataccaacattaagaggttgtgcatcctacatctcagtctgcttttcaagcagacctccttgcaaatctctttgagtcctcgtgcaattgatggccttgttaaaggattggaggccaatcaacgtctagtaggtgacttgaccctagcaacccttgaggacagttgaactcagttcaggctctgattttacctccc

SEQ ID NO: 45803 - DNA, 740 bp, Oryza sativa
  Clone ID: PAT_MRT4530_48732C.1
gcccacccccgccaccgccgccttgaccgcctgcctgagcatatcctccaccgtaaggcccgtatccaccagcttggccagaaccagatccagagccagaaccagacccgccgtattgtccaccgccaccacctccaccttgtccacctccttgagcatatgctccacctgggccataactaccagcttggccatagccagagccagaaccatgcccagacccgccatactgtccaccgccgccacctccaccttgtccacctccttgagcatatgctccacctgggccataactaccagcttggccatagccagagccagaaccatacccagaccctccattttgtccaccaccgccacctccaccttgtccacctccttgagcataagctccaccggggccatagctaccagcctgaccatatccagacccagagccggaaccatatcttgacccaccattcaccccaccaccaccgcctccaccttggccacctccttgagcgtacgctccaccatgagggccatagccaccagcctggccataaccagaaccggacccagaaccatatccagatccaccattttgaccgcctccaccaccttgacctcccccgcctccactagcatatgctccaccggaagatccgccggcctgaccatacccagagccagagccggatccccatccagaaccatcctcggaccctccaccacctccccctccactaccgccaccc

SEQ ID NO: 45804 - DNA, 324 bp, Oryza sativa
  Clone ID: PAT_MRT4530_48733C.1
atggctatgatctttgagatcgagccatcaagagatgatgaatttggccatggttttgtcaggccgttctccaagaagccaacgttccgcaaggccgtggacgagcgcatggacacttcgctccggcaggagaaccaatcgttgctcgccacacggggctgtgtcttctccctcctgctgctcctcgtcagggatcacctcgtcagcgtcgccaaagaggtccggcagctgcacgagactggtgagctgacacgtcctgcactcccgcaagagtctgctattattactgttatactttcacataagcgccattcgaggaaatag

SEQ ID NO: 45805 - DNA, 1686 bp, Oryza sativa
  Clone ID: PAT_MRT4530_48734C.1
atgggcgatcccccggcgctgaagaggcccaagctcgagaaggacgactacgaatccgcctactggccccgccccgccgcctccaatgcctcctccgcatccaaacccccccaatcctcttcctccgccaccgccaccgccgccacgcaggaggatgaggaggatgacatcgcggaggaggcggtcctcgccctcatcgcccaccgcgagcgggacgtcgagcgctgcaagctcaagctctcgcactaccagtccctgctggacaccgcggagaagaagctcgccgaggcgcaagatcggctcgcccggtatcgagatcgcaagccgcctccgccgccgacccatagggaccccaagccgtcgctgccaccgacgacgacccagagggaccccaagccatctcctccacagcacaaggcgccggagcggccgcagcttgtcatcccgggggcaaacaaccggccacccccgcgcccagagcccatgcctgggttgaagaagaccgccgctccatcatcctcctccgcatccgtgccgccggagcggcccagggcactggagaagaagcccaagcttaagatcgaacagaaggagcatcagaacttgattcagagcgtgaagaaatcatctgcaacggtgcttaggttctatggcggtaccgtaatctgtagccaacacaagaggaagcttaggtgtcttgagctatgccctgtcaatgatcagcttgttgctactagtgcattggatggaattgttactctgtggcaagtgcagccaaaaggcaacttaagcaacataagaaaaactctctggttcgatggaaaacctgtaattgcaacacaacccgtcatctccttgctcagcacaacagattgcttttctcctaagcataggtggcctgaagatgtagcttggcatccacatggtgaattaatttttgctgtgtacagtgctgataacggcgactctcaagtttcagtgatgaatcgcaacttatcaggacaaaagaaagttagttttctaccagtgaagcctcataccaagggaattattaacaacataaatttcatgccatggtctgatgtatgctttgtgactggtggaagtgaccatgctgtcatactttggcaagaaaaagatgattcatggaaccacaagaaagtgcacaaggatttgcattcttctgctgtcatgggtgttgctggattacagcagaaaagtacaatattatcagttggcagtgacaagaggattatatcatttgatctggcagctggaaggacagagtccaagaacctaattgattacaaatgcatgagtgtattaccaaatccatgtgatttcaacttgtacatggtgcaaacagcggcaccaggcaggcagcttcggttgtttgacgttaggcttaggcagactgaagttcatacactcggttggaaacaagagagcagcgagtctcagtcagctcttataaaccagtcatggtctcctgatggttggtacttatcatctggctctgcggaccctatgatccacatctttgacatcaggcacaatgggcagaatccctgccagtcagttcaagcgcaccagaagcgagtttttaaggccctttggcaccgaacggccccagttctgacctctatatcatcggaccttaacattggaatccacaaatattcatga

SEQ ID NO: 45806 - DNA, 1087 bp, Oryza sativa
  Clone ID: PAT_MRT4530_48735C.1
aaacacatagagtacttaattagcaatggccagaaccaagttggtatctcttagctttgttgttctgctgagcgttggtctagccaatgccgcaagggtagctagatatgctagcgccgagggtggcggtagtggagggggaggtggtggagggtccgaggatggttctggatggggatccggctctggctctgggtatggtcaggccggcggatcttccggtggagcatatgctagtggaggcgggggaggtcaaggtggtggaggcggtcaaaatggtggatctggatatggttctgggtccggttctggttatggccaggctggtggctatggccctcatggtggagcgctggtagctatggccccggtggagcttatgctcaaggaggtggacaaggtggaggtggcggtggtggacaaaatggagggtctgggtatggttctggctctggctatggccaagctggtagttatggcccaggtggagcatatgctcaaggaggtggacaaggtggaggtggcggcggtggacagtatggcgggtctgggcatggttctggctctggctatggccaagctggtagttatggcccaggtggagcatatgctcaaggaggtggacaaggtggaggtggtggcggtggacaatacggcgggtctggttctggctctggatctggttctggccaagctggtggatacgggccttacggtggaggatatgctcaggcaggcggtcaaggcggcggtggcgggggctatcagtgcactcttccgggtgggaccagaacttcctactcgttctcgcaccccagcgcacggaaagaaaatgaatcaccatgaaggcacggagaatacacacaccctccagattcctaaccaccgaaacactcgaagactaacctcgaggaagtcaacaacggcgtgggcgccgctggcgaatccaccgcccgtcgctgtagcgttcggcgccgccgcgggagggggcgcggctctagacgaggtcaccgtcgccgacgccggcggcggcgtctccgcccccgcgtctgctaatgggcaagatgttggagaattttcgttttag

SEQ ID NO: 45807 - DNA, 433 bp, Oryza sativa
  Clone ID: PAT_MRT4530_48736C.1
agcaagcaaaacttcatcctttattgtctcagattaactgctatgtccatgttgccgtcagtacatgttctatgtactagcctagaattacaaacagcatttcgccgaaagattcacttgggggaaacaaacagtctgctaccaccagcctcaacaacgaaattacgagtataaactctataaaccccctcatgaatccgccagatcatattattcttttcttcttctatattaatcttggtatatatttctataaggactgtgaatgtactcctacctacaaaacattgggttaataggaatttgcacttcaactttggatgttaccgtagcgctcgttggagcgccaagtccaccgacacgccctcacggaacagctttgtcatacatgaagcagatagactgagccatgtactcctcattatcgaaatct

SEQ ID NO: 45808 - DNA, 183 bp, Oryza sativa
  Clone ID: PAT_MRT4530_48737C.1
atggctccgatcggacagagcgagagcgagaaaggaggagcagcaacagcggaaaagattcggccttttgctccctttcccgttccaaagaacctgtgtgacctggacgtcgcggcgcgggaagtggctaagcggttgctgcctcttgaagtaaagtatacgggcaaaatggcgatggtatga

SEQ ID NO: 45809 - DNA, 241 bp, Oryza sativa
  Clone ID: PAT_MRT4530_48738C.1
gggtataaatttcatttattcatacgaacagccaaagactattccaaattttattacatgacacacacgatggtgggggacactttatttatccaactttatatatatgatggggcacactaccaagaaccgcaatgaccaggagcaactttggatgggggggtggaggacctaggggggactccacacatgggggggaaattgggaggcccctgggcctgggcctgagcttgggggttgg

SEQ ID NO: 45810 - DNA, 669 bp, Oryza sativa
  Clone ID: PAT_MRT4530_48739C.1
atgtcgagaatcagacttatcaatgaatgggctaagaacccagaaataacacgaccaattgggccaaaattcacaagtctgcatattggaacaaaagagcaggccacctgccgaaattgggccaggccgacccagcccatggttcggccaaacccactgcagctccgttcgatgcagggttttgatggacggccgggattgatccccaatgacggttggaggaccatagaagaatctcgtgcaggtggaacatatagggagacacgcaatacggcaagaaatgaacgcgaaggttcaacatcctcaacactcgtactgatgtatgaggctggttgggagccaactggggatgcgtccggatggacccaagctccacaccatagcattggaggctcgggctgggaaagtgctagtgagagccgatggctgataagcggtatacctccatctcccggtgaatggcgctcaagtttctctcgttgggacttgggtgaaatcaccaggagaatgaatactcttgatatgcaaatgggagagatccattacaacctcgaggaacacatagcacagacgcaagaatggcaacaaaatgttgatgctcagttcaccaacatcaacaacttgatgcagcaacagcacgttgaccttcaagcgtacttccacttctag

SEQ ID NO: 45811 - DNA, 1485 bp, Oryza sativa
  Clone ID: PAT_MRT4530_4873C.1
gagggtaccagtttcaccgccaggtttaaaacgggcagagagcggaatagcgctaaagagaaataggacctggccccacaggggaaatgaaaaaaaaaaaatagtaataacaaataaaagcaaatttttcctttttttttttgttttatttgtttttttttctaaaatagaatgatgccccgtcattgcgtattttttttcttacaattctagcaaatgtttcaacggcaataatttgtttcacatagatttcagacttggacataatataatccctaattaatccagacgacactcctattagtctctaggtgatcaggtacacagagatatcggcgaagggcaccaaatcagcatggagcagcttttgctagttgacaagggcgcatgtcctccggatctccccctggctgccggtgagcacgcccaccctgcccatgttcaccattgacacgccaaagtcccggaggaagctctcctccgatctcatgtactcgtagacgagccccctggtaacgtcgttccggagcagcgcctcgtcggagtggaacatgcccttccgctcggcgacgaggccgtagtaggtggcgtcgaaggtggtcgagctgccgggcaccatctccagctgggtggtgttgtccttggccgacctgcactgccgccgcagccccgcggcgtacgtcgcatccagggtcgggtccgtgttgtggtgcgccgtgaagttgcgcagacgcttcgctatcgatgggcagtgcgtgttgcccagcgcgtgggcgcctgacagaacagccagatccttgaggctgaggcccttggaagcaaacctggtgatgagcctgcgaattccatcgaaggagtcgggcaagtaggtcaccgcctccttggcgctcgacacgcggccgtctcgccggccggtctccacctcgtacaagttgccgtccttgctccaccgtccttgcctcaccgcctttgttgccaaggagacggcgtctctggcagcaatggcgaggatgtcggcgcaggagacggtagcggggcacttgtgctccagcttctccttgattgcgtcgatgacgtcgtacgcgtccagcgtgtgattcggcttggcgtccttctccgccgtgttcttcttggtcgagttgatcagcaccgatccttcacaccccctgacgaaacaatcgtggaagtgaagcctgagcagcggcgcggtggtggtcgggtcgtcatggacagccgccgccaccaccttgcgcactatcttctccgcctccgggcacgactccttgtagaacccgaccgtcagcccaccgccgccgccgtatccatggacgacgggaacagccgccgccaccaccagcagcagagaagaaagcaagaaccaccggcgaggaggaggaagaagcacgcgcactgccatggcagtacactacactacactacgctgcaggtagcttagcgctctagcaatgcttaagtgcagctggc

SEQ ID NO: 45812 - DNA, 551 bp, Oryza sativa
  Clone ID: PAT_MRT4530_48740C.1
ggtgaactcgccgccccaaaccacgctgcccacgaaatcagaggtaagatctcgcccttgccttgtggtttgtttcgacttgcgttgttgcaatcccgtggtcctccgctgcttttatttgggaaaaatcgagtcccattcatggacagatcgtaatcctcgtccgattccccttccgtgcttgactaggtctctccctcaatctgtttctctattgtgctatgcatccgagttggaaacatatccgactccttccatgtcacaacctctccagatcgagtcctgtgcaatccgacttcctgctactcaggctctggccacgttccatggtcccggcttcaacaccaacacgtgcacaccgccatctccgtgacctcctcagcctccacgcacccgtacgacctctagcgtagccacctagcctcccgctgaacctcgccagtgacgaataccgccggtcagttgcaaccaatgcttattgctgtgctaacacaattgatcagcgcattgacggtctgaaattgactgcccttctgcttgattccgtcgct

SEQ ID NO: 45813 - DNA, 563 bp, Oryza sativa
  Clone ID: PAT_MRT4530_48741C.1
gtgtttttcaccacctgagtgccggtctccccgtgcacaagctccaccaagatttggaacaagaatgccggtaaatttgccgagttcgttataccagcaacggcctccttggttagctgcctcagttacaatcagaacaactatccctgtatgctcagcgaggccaaatgtggtgaactctagtgctggagcagctcaacctgctgttcagatcctctcggcctcgcctagaaaagaagaacctgaagctcgcacgaacaccagtgacacaagcaatgctgcaacggcgagttctgagctcaataagctccatatttgaaagtcacagttttggttcatctgagctttagtcagggctgagaacttaactctcagctgcatctcagttttgattgtttcttttcctttcattttttttatctccttgggtatttagctagatagacataactatatgaagagttggagagcgggcatctctcgcgatatctgaacctgttggattttttatgtaccacatcttatcaagaagagtgaatgggaacagtatatataccgaatgc

SEQ ID NO: 45814 - DNA, 289 bp, Oryza sativa
  unsure (1)..(289): unsure at all n locations
  Clone ID: PAT_MRT4530_48742C.1
ttnnnncagcaaaaatacaaaaaagcgttttttgtcaacttgcagaacatacagtacaacaagggagcattacagggctaaagaaatggactttggagctaccattttagacaaatacaacaggttctttgttaggtttaaccatccaacgtttaaggtggctgaaaatttttaggatgtaaacagtttttccgggtgtggggccatgtgatacaaaaattcacattttaagcggaggctaaatgggcccttctacaagggtatgaattctcttatggtttcttacccc

SEQ ID NO: 45815 - DNA, 193 bp, Oryza sativa
  Clone ID: PAT_MRT4530_48743C.1
ctcatcaaagtttatgcagatgatgttgtgcatgtgtgacaagttattgatggataagtggcattgaattgttcagatgagcagttcacagatcaaaaccatttcattgcttcagctatatattgtaaagccatgggaactaaattaaagtccattaaggcagtgtatctatcaccagaattttcctcgttcc

SEQ ID NO: 45816 - DNA, 2430 bp, Oryza sativa
  Clone ID: PAT_MRT4530_48744C.1
atgaagacgaagacggcggcggcggcgacctgcctcgtggcgctgctggtggtggtgctcgcggaggcggccggcgtgggcggcaccaccgtcacctacaatgaccgcagcctggtgatcgacggcgagcggcgcatcatcatttcgggatctatccactatccgaggagcaccccggagatgtggcctgatctgatcaagaaagcaaaggaaggtggccttgacgcgatcgagacctacgtcttctggaacggtcatgagccccatcgccgccagtacaacttcgtggggaactacgatattgtcaggtttttcaaggagatccagaatgctggcctgtacgctattcttcgcatcgggccatatatttgcggcgaatggaactatggaggacttcctgcttggctacgtgatattcctggaatgcagttcagactgcataatgcgccatttgagaatgagatggaaatcttcacgactctcattgtcaacaagatgaaggatgccaatatgtttgctggacaaggaggcccaatcatcctggcacagattgaaaacgagtacggaaatatcatgggccaactgaacaataaccagtccgcgtctgaatacatccattggtgtgcggacatggctaacaagcagaatgtcggtgtcccatggatcatgtgtcagcaagatagcgatgtgccacacaatgtggtgaacacctgcaacgggttctactgccatgattggttcccgaataggacaggaatccctaagatttggactgagaactggactggatggtttaaagcctgggacaagccggatttccataggtctgctgaagatattgcttttgcagttgcaatgttcttccaaaagcgtggtggcccatacatcacaactagttacgactatgatgcgcctttggatgaatatggtaatctccggcaaccaaaatatggccacttgaaggacctgcactccgtgatcaagtccattgagaagattcttgtccatggggaatatgttgacaccaactacagtgataaagtcacagttaccaagtacaccttggactccacctcagcttgtttcatcaacaacaggaatgacaacatggatgttaacgtaacccttgatggaaccactcatcttctgcctgcttggtctgtgagtatcttgcctgactgcaagaccgttgccttcaatagtgccaagatcaaggcccaaacgactgtcatggtaaacaaggctaagatggtagagaaggagccggagagcttaaaatggtcatggatgcgtgaaaatttgacgcccttcatgaccgatgagaagggaagctataggaagaatgagctcttagagcagattgtcacatcaactgatcaaagtgattacttgtggtacagaacaagcattaatcacaagggtgaggcaagctacactttgttcgtgaacacaaccggccatgaactatatgcctttgtgaatggaatgcttgttggtcaaaaccattctccaaatggacactttgttttccagcttgagtcaccagcaaagcttcacgatggcaagaactacatttctcttttgagtgctaccattggccttaagaactatggccctttgtttgagaagatgcctgctgggatagttggaggaccagttaagttgatcgacaacaatggcaaagggattgatctctccaacagttcgtggtcatataaggctggcttggcaggtgagtataggcaaatccaccttgacaagcccggttgcacatgggacaacaacaatggcaccgtacctatcaacaagccctttacgtggtacaagactaccttccaagctccagccggtgaggacacggtggtggtggacctcctggggctaaacaagggcgtggcatgggtgaatgggaacaaccttggccgttactggccatcatacacagcggcggagatgggcggttgccaccactgcgactaccgtggagtttttcaggctgagggcgatggccaaaaatgcctcacgggatgcggtgagccgtcgcaacggttctaccacgttccacgctcattcctcaagaatggtgagcccaacacagtcattctctttgaggaggccggcggtgacccatcacacgtcagcttccgcactgtcgcagcgggctccgtgtgcgcgtccgctgaggttggggacaccatcacactatcctgcggtcagcacagcaagactatctcagccatcaacgtgactagctttggtgttgcgcgtggccagtgcggcgcctataagggcgggtgcgagtccaaggcagcgtacaaggctttcacagaagcatgccttgggaaggagtcatgcacagtgcaaatcaccaatgcagtcaccggctccgggtgcctctccaacgtcctcaccgttcaggcttcatgttga

SEQ ID NO: 45817 - DNA, 2475 bp, Oryza sativa
  Clone ID: PAT_MRT4530_48745C.1
atggcggcggcggcgacctgcctcgtggcgctgctggtggtggtgctcgcggaggcggccggcgtgggctgcaccaccgtcgcctacaatgaccgcagcctggtgatcgacggcgagcggcgcatcatcatttcaggatctatccattacccgaggagcaccccggagatgtggcctgatctgattaagaaagcaaaggaaggtggccttgacgcgatcgagacctacgtcttctggaacggccatgagccccatcgccgccagtacaactttgaggggaactatgacattatcagatttttcaaggagatccagaatgctggcttatacgctattcttcgcatcgggccatacatttgcggcgaatggaactatggaggacttcctgcttggctacgtgatattccacaaatgcagttcagaatgcataatgcgccatttgagaatgagatggaaaacttcacgactctcattatcaacaagatgaaggatgccaacatgtttgctggtcaaggtggcccaatcatcctggcacagatcgaaaacgagtacggaaatgtcatgggccaactgaacaataatcagtctgcgtctgaatacatccattggtgtgcggacatggccaacaagcagaatgtcggtgtcccatggatcatgtgtcagcaagacagtgatgtgccgcacaatgtggtgaacacctgcaacggattctactgccatgattggttcccaaataggactggcatccctaagatttggacagagaactggactggatggtttaaagcctgggacaagccggatttccatagatccgccgaagatattgctttcgcagttgcaatgttcttccaaaagcgtggttctctccagaactactacatgtaccatggtggaacgaattttggtcgcacctcaggtggcccgtacatcacaactagttacgactatgacgcacctttggatgaatatggtaatcttcggcagccgaaatatggccacttgaaggacctccactctgtgatcaagtccattgagaagattcttgtccatggggaatatgttgacgccaactacagtgataatgtcacagttaccaagtacaccttgggctccacctcagcttgtttcatcaacaaccggaatgacaacaaagatcttaacgtaacccttgatggaaacactcaccttctgcctgcttggtctgtgagtatcttgcctgactgcaagaccgttgccttcaatagcgccaagatcaaagcccaaacgactatcatggtaaagaaggctaacatggtagagaaggagccagagagcttgaaatggtcatggatgcgtgaaaatttgacgcccttcatgactgatgagaagggaagctataggaagaatgagctcttagagcagatcgtcacatcaactgatcaaagtgattacttgtggtacagaacaagccttgaccacaagggtgaggcgagctacactttgttcgtgaacacaacagggcatgaactatatgcctttgtgaatggaatgcttgttggtaaaaaccattctccaaatggacactttgttttccagcttgagtcagcagtaaagcttcatgatggaaagaactacatttctcttttgagtgctaccattggtctaaagaactatggccctttgtttgagaagatgcctgctggcattgttggaggaccagttaagttgattgacaacaatggcacagggattgatctctccaacagttcctggtcatataaggctggcttggcaggtgagtataggcagatccacctggacaagcccggttacagatgggacaacaacaatggcaccgtccctatcaacaggccctttacgtggtacaagactaccttccaagctccagccggtcaggacacggtggtggtggacctcctagggctgaacaagggcgtggcatgggtgaacgggaacaaccttggccgttactggccatcatatacagcggcggagatgggtggctgccatcactgcgactaccgcggagtttttcaggctgagggcgatggacaaaaatgcctcacgggatgcggtgagccgtcgcaacggtactatcatgttccacgctccttcctcaagaatggcgagcccaacacactcattctcttcgaggaggccggcggcgacccttcacaggtcatcttccactctgtcgtggcaggctctgtgtgcgtgtccgctgaggttggggatgccatcacactatcctgcggtcaacacagcaaaaccatctcgaccatcgacgtgaccagctttggtgttgcgcgtggtcagtgcggcgcctatgagggtgggtgcgagtccaaggctgcgtacaaggctttcacagaagcttgccttgggaaggagtcatgcacagtgcaaatcattaatgctctcaccggctccgggtgcctctccggcgtcctcaccgtccaagcctcatgttga

SEQ ID NO: 45818 - DNA, 568 bp, Oryza sativa
  unsure (1)..(568): unsure at all n locations
  Clone ID: PAT_MRT4530_48746C.1
cccacatcatccatctccgttaaatggggagcacatcaagggaaggctctcttgtcaaagccagcaagaccaagtttctggaagatccccattggatcccgaaacccgcagttaacctnattccaacccagcaagtgggcatgccaggtccgccccntccaacttatggcanaagggcttccacccagttcnaccanggactttgaagaaccaagggtcctccgcctttacccaaaaaactggcnaagaaaatgtcccatggatgnatccccncttttggagggaccttttgaaaccgcccntttcaatccngttgcttnnacagnaaaggnaaattaaatggcttcccccagaanccnaaaaanattgttntagtttgcctgcctcccantttgaangaacactggggggaattccttcccccnccgaatgnatttacctggattcaaacanaagttttaaaaacccatttcctggttncttnccnnnaattgaattgcctgnaaaaatattgctttaaanaaanttgaaaatttttggctttaactggaaatcctttggggccgcc

SEQ ID NO: 45819 - DNA, 2838 bp, Oryza sativa
  Clone ID: PAT_MRT4530_48747C.1
ggcacgagatggaaccctaaactccaccgctcccatctcgtctcgatcccctccatttcaaatccacactccgcctcccctctccggccgccgccggcgagatggatctctccgccaccccgtccagatccaaatccggcctcagatcctccccgaggaagcccgtcgccgcccccgccgtggcccagatggacctctccaccccgtccaagccgacccccaggcggaagcccaaggcgccgcccggtggcggctccgatgtcccccgtgaccccgtcctccgtccgccgctcctcccgcctcctcgagacgccgaccaaggtaacttccgagacccccgtgaagcccaccccaaccccgaagcggaagcgcgccgcgccgtcgccgtcgccgaagacgccgacccagtccgagcccaagcggcagcggcagaggcagaggcagaggcagcagccgaagaagccgaagaagagggcgtactaccggaaggtggtgtacgacggcggggagttcgccgccggggacgacgtgtacgtgaagcggcgggatggcgcggagtccgacgcggaagacccggaggcggaggagtgccgcgtgtgcttccgcgccggcgccgcggtgatggtggagtgcgacgtgtgcctcggcgggttccacctgcggtgcgtgcgcccgccgctgcggcgcgtgccggagggggactgggcgtgcccctactgcgaggccgagcgcgcggggaaggccatcgagaggcccaagccgccggaggggaagcgcatcgtgaggaccgccaaagagaagcttctctccagtgatttgtgggctgcacgaatcgagagtttatggagggagccagatggaatattctgggcaaaggtaagatggtatattatccctgaagagactgcagcaggaaggcagccacataatttgcgtagggagctgtaccgcaccaatgatcttgcagacattgagatggaaacaattcttagacattgttatgtcatgagccccaaagaatttaaggatgctagtgatcaaggagatgacgtattctactgtgaatatgaatatgacatacactggcataattttaagcgtctggcagacatcgatgatgaacctgagacaaaggaagatcctggcgacgagccatacaatgctggtaatgattatgtcagtgactcggatgaagattctgaatatgatgaggaggaagaacctactaaatgtagttctgctagaacacatcaatcacatgcgttggctgcgaatctgcggaaagggaggacatatggcctacaaaaaattgggatccgtaaaattcctgaacatgtccggtgtcatcaaaagaccaatctggagaaggcaaaagcaaccctgttattggcaaatcttcctaagtcgttaccttgtagggataaagaaatggaggagatatctgcatttgtgaaggatgcaatttgcaatgatcaatgtataggacgctgcctttatattcatggtgtaccaggcactggcaagactatgagtgtacttgcagttatgaggaggctaagatccgagcttgattctgggaatctgaggccttattctttcatagagattaatggtcttaaattagcttctccagagaatatctacaaggttatatatgaacagttgagtgggcatagggtagggtggaaaaaagcccttcattatttaaccgagcacttttcaggtggcactaaaattggcaaacaagcaaaccagccaattattttgctcatcgatgagcttgatcttcttttgacgagaaatcagtcggtgctgtataacattcttgactggcccaccaggccaaattcaaacctagttgtcataggtatagcgaacacaatggatcttcctgaaaagttattgcttcgtatttcaagtcggatgggtatccaacgactgtgttttggcccatataattatcggcaactgcaggagatcattacaagccgtttaaagggcattgatgcctttgaagaccaagctattgaatttgcttctagaaaggtagctgctatgtctggtgatgcaaggcgagccttagaaatatgtagacgtgcagcagagtttgcagattaccgcgttaaacaatctgggcacacttctgtgaatagaggaaaaaatgttgtttgcatgggtgacatagaagctgctattcaggaagtctttcaggcaccacatattcaagtaatgaagaactgcccaaaatttggaaagattatattggtcgctatggttcatgaattatacagaagtgggctaggtgaagtgatgttcgataagctggcagcaactgtcctctcttggtgccatgtcaacagagaattattgcctggctatgataatcttctgaaaatctgttgcaagcttggtgaaggtaagataattttctgcgaggaaggcactaagcacaagttgcagaagcttcagcttaactatccaagtgacgatgtaacttttgccctgaaggaatccccagatattccatggttgtccaagtacctgtgaagtttacacttgcagcggttgtactttcccagcatttcattcatttactcctggagttggagagcaacgatcgcaactacttgcccttgatcagcaaatctcggaatttatgtgggtccaattgttcatcttccaaaagatatcgactcgaaggatgccgctgcaacaaaatgtaaatgcagtgtcgcaccaggactgtaacatatgtatgattcgaaggagattgtaggtcgccattttattttcgccaatctgttgttacccaagaaaaaaaaaaaaaaaaaaaaaaaa

SEQ ID NO: 45820 - DNA, 223 bp, Oryza sativa
  Clone ID: PAT_MRT4530_48748C.1
tttgttttctgattttttgtgttccaaaaaaaataaacttgattgttaaacctcttacatatggcccattgcaagcagatgttcactgcacataaaacgagagccattcccgtgggcttaccttaacaaattctaaaactaggtctgtcaaccgcaaacttgcaaaccaccctttggacgaggttcactaaatattgggacacaccttggtaaccgtggaacc

SEQ ID NO: 45821 - DNA, 423 bp, Oryza sativa
  Clone ID: PAT_MRT4530_48749C.1
atgatcaaccaccgactttttgaccacgcgcgcgcgcgcgtgcaaagcgcccacctcctcaccgtgaacaccgtcccgtccccactcctcgccgcgctgccaaatgtacgtcgctgccacctgcccaacggtgaaaaaaaaaccccaccgaaacgctcccgctgcctccacgtctccacctcgcaccgcgccaaggcggcaacacccatgcccattactccgtactactacagcagtggcggtagcaacgcgagaggccgtggtccgtcacggagtggcgcgagagctgctgctgctgctacctggcacggggaggaacaaacaaacggaaagaaaggggattccttgcttccacagccaccaaaagtaaaaccacccggtgcatggtgttggtggccggccgcccatgccatggctccctga

SEQ ID NO: 45822 - DNA, 309 bp, Oryza sativa
  Clone ID: PAT_MRT4530_4874C.1
atgaccttcgattggcatccgcctgacaacgacgacgacaaccttcaagtacgacaggggcagggagatctggaggtgaacaagcggtgggcgggcagacagtcggcgaggatgggcggtgtgcggcaggtgcggggacgggcggttggcggcagcgggtggtggacggtggcgcagggacaggcattggcgggcgggggtaattcggtcgaccgtgatagttcggggagagaggttaattcgtactttttccttgttaaaacaatggccggtttgtctaggctcaacataacgctatcgcataattaa

SEQ ID NO: 45823 - DNA, 489 bp, Oryza sativa
  Clone ID: PAT_MRT4530_48750C.1
atgacggagtcgtcgtcgccgtcgtcgtctccctccccgccgaggaagttccggcgtgtgcggtcgccgctggcgaacggcggcgcggcgggtgacttcgagctgcggcactggcgcacgccgccgaagcgggcgcgttcatcggcggcgccgccgtgggcgccgccggagatcgagatcccctgcggcggaggagaggcggcggggaggggaggagggtacacgagcctccgggacatcctgatgtcgccggggtacgcggcgtcgtgctcgcccgcggcgtgcggcggcggcggaggcggcggcagctgcggcgacatacacatgatacgccacccgctggtgaagcacgcggcgtacgcctacctgcagatgacgccgtcggcgagggacgaccccgggcgccgccaccgccggcgctggcgcggcccgctctgccgcctcctcctcggctgcctcagcttcatcggcgcgctcttccggccatga

SEQ ID NO: 45824 - DNA, 498 bp, Oryza sativa
  Clone ID: PAT_MRT4530_48751C.1
atggcgccgcctcgcttccctccctcctcctccgccgcgcgcctcccgccgcgatccacaccgccggagcccaggcccagccccccagccgcagccgccggcgccgccgccctcgcccccggctcgctggaggaggtcctcctccaggcggccttcgacggcaacctccgcctcgtcaggaagatggcgagggcgctggacgagggggacggccgccgcctcggcgacaaggtgggggccgtgagggacggcaacggcgtcggcgcgctgcacctcgccgccggccgggggagcctgcccgtttgcgggtacctgctcgaggagcttcgtgtggatattgacgccgtcgaggacagaggtgaaacggccttgacatttgcgatcaattccgggaatgcggacatggtgcggtatcttcttgatcatggagctgatactgaaaagctcaacaacgatggacttactgttctccattttgcttctggcgaaggtgtataa

SEQ ID NO: 45825 - DNA, 357 bp, Oryza sativa
  Clone ID: PAT_MRT4530_48752C.1
atggagaatgtggaccaaaaagttcctcttcctgcatcgatctcaggtttgcagtcttctgctcgaacagatctacgcccagccacaagccggtacagacggataaaatgttcagattttacatcacggtcgcaaaagctagccaagcagcatcacgctacccgaatatgcccaacgatatgggccgactgtaacatgctgacatccagcacagcgggccagaattgcaatggacaactggacaagacggctgccacgttcagtgaggcaatgtacgagaatcccatcatggcgttcaactatactatcaacatggagaggccatcgatccttcgttacgttaccctgattaattag

SEQ ID NO: 45826 - DNA, 412 bp, Oryza sativa
  unsure (1)..(412): unsure at all n locations
  Clone ID: PAT_MRT4530_48753C.1
tttttttttttttttttttttttagaactaattgtccctgcatcatccattgacatctcttcatcagatccaaaaaaaaaggccacatttttgtttatgaatctaatctttgcttgggcctcaccattagagcaaaagctaatttgctgctgctactactactacttgctaggttgactgatgagtcatttcattagccattagggttggttaattagacaggaaaaaggctacaaaaaaagaggaaaaaaaaaagaaaagaaaagaaagagacaaccttgattcgactgtgctactagtcttgatctggtgccctatttctggcgtccggcggacccactatctctagagccggcctgtcacggggtggagctcccagcttttcgttcccctttagccgagggntaattcc

SEQ ID NO: 45827 - DNA, 259 bp, Oryza sativa
  Clone ID: PAT_MRT4530_48754C.1
ttctttttttcttttttcacatctcaaatattcttaatggatactcatgtgaatctattcaccaggatgtgcactatattcacacttttatctcaagcataaatatacataagcaaattcatgaaagatgaatgagatcgaatcacaaatattatttagatacttcggtcgatcggacatataaaaatatggtacagtgaaagcttgactacccaatccacaggcacaccaattagggtgttaccccattaatttcaca

SEQ ID NO: 45828 - DNA, 1033 bp, Oryza sativa
  unsure (1)..(1033): unsure at all n locations
  Clone ID: PAT_MRT4530_48755C.1
aggggctttgcgtatatccccatggggaaagggggtttttccaagccattaggtgggaaacccgggtttcccctccagctttgtaaaaacgggcaggggggggcggtaaaacaccctaaaagggggtttgggggcccggccccccccgagtttttttttaattttttannananactaaaaananaattatttttttttaaaaaannnanaataanaannnnnatttttttttttttttttcacccaaaaaaaaatcaaatagaaacgaaatgtcgtctaactccacaaacacgagagggtttcatgtacaacatctgccatgcacgcacgctactacagtttatttgacataagctgtaaaagataggaaaatccatcacacttcacaccgaagccatggagatgcagagtatacgtatcaccagacgcttcgaaatgtagtgaaaaagcatgccacggcacagagttagctttccctagtgctgttctttagccactccaggtacttgaggttgcctccttttatgggcagcgcgatgacttcaggaacgtcatactcatggttggctttcacgtgttcggtcaacgcatcaagaagagactcccttgtctttatgatgagcagttcttcagcatcagtttgcacctttccttcccaccagtaaacagattcaataccaggcactatgttcacacaagcagcaagcttctcacttataatgctcccagctagcctctttcctgcttctttattaggaactgtcacatacacaacaatggaaggcacagtggtggaagtagactccattcgagcagaagctgaagagctgagacttctcacccctgcgaaggcgccgaggctgaggaagaggagagcgccggcgataggggcgcggcgccggagtaggagcggcgagagcccggcagccgcggcggcgcggcgtggggcggcggtggcggcggcggagagagatccgagcggggaggggagccgtggcatcttctgggagcttcggcctacatcgcggccgg

SEQ ID NO: 45829 - DNA, 132 bp, Oryza sativa
  Clone ID: PAT_MRT4530_48756C.1
taactctcttcggcagcgagcatgcagggtccttccaccatggccgaagcagatccacgagatcaaggacttcctcctgtacgggcgaggcaggaaaggacgcgcaggtcaggtggcgtgatcaacgaggac

SEQ ID NO: 45830 - DNA, 279 bp, Oryza sativa
  unsure (1)..(279): unsure at all n locations
  Clone ID: PAT_MRT4530_48757C.1
ttatatctagccttagcctagctagctagcttgggtgtctttttatgatcgaggggggtggcgaccatggcgccctcgagggtgatcctagcgctgctgctcgcggcggcggcggtgatggcgtcctccgcgcacctggacgagaagttctacagcaattcttgccccaccctggaggcccgcatccctaatgagatggtgcgcgcgctcagagnngntgggcagcctcgccggccccctcctcaggatgcacttccacgactgctttgtcagggggtg

SEQ ID NO: 45831 - DNA, 1518 bp, Oryza sativa
  Clone ID: PAT_MRT4530_48758C.1
atgtacaagcaggggggaggaggggtcgccctcgacgtcgagggggtcggcgggggggaggggcggtggtgaccaccagcgcctcgtcgtgccgtcctccgcgtcgtccatgcccaagggacggtgctccgaaggggagtctgaatctgatagtgaagcatcagatgttagtggttctgacggagaggatcactcatggatttcatggtactgcagtctaagagggaatggtgctccgaagttctttgcatgaatgttgccagtcgggttgaggagtccattagtttaattcatctatgctattgcgggtctaactggagtataacttttaagttttttgaggtatgctgcatttgcatcattgtttgtaaaagcctttgcattgacaagtccatgcttgacattgcaggggagtctgaatctgatagtgaagcatcagatgttagtggttctgacggagaggatcactcatggatttcatggtactgcagtctaagagggaatgaattcttctgtgaggttgatgatgattatatacaagatgacttcaacctctgtgggcttagcagtcaagttccatattatgattatgctcttgatctcattttagatatcgaatcttctcacggtgacatgttcaccgaagaacaaaacgagctagtggagtcagctgcagagatgttatatgggctgattcatgcacgatacattttgaccagtaaaggattggctgcaatgctggagaagtacaaaaactatgattttggaagatgcccacgagtttattgctgtggtcaaccctgtttaccagttggacaatcagatatacaccgatctagtactgtgaagatatactgccccaagtgtgaagacatctactatccacggtccaagtaccaaggcaacatcgacggcgcatactttgggacaacattcccgcacctgtttctgatgacgtacgagcacctcaagcctcagaaaccctcgcagcgctacgttcctcgtgtatttggattcaagctccacaagccatgaggcggagactggagttttgcagggcttggagacaccctggtggactactgcaagagtggggggcatttgccagcgatggtctctatcatgccgccactgccacctccacaggcctgccgcatgcatgcaccttggcaggcaggcccactccacattcgaagtgtagctataaaaagacatcaatcgatcaatgttgtaacgtaattccaattgttctttaattagcgaatctgtgggatcccgtaattctaaagtagccgatgttgtttgtgccttgattaaaatggtgtgctgccccaggcattggtttagtttatcttgtaagttgtaagcaaggttcatgcctgcaattggaaggcgagggatgacaggggcaggccggtattctggtccaaaaaaaaaaaaaaaaaaaaaaaaaaaaaaaaaaaaaaaaaaaaaaaaaaaaaaaaaaactcgagactagttctctctctctctctctcc

SEQ ID NO: 45832 - DNA, 492 bp, Oryza sativa
  Clone ID: PAT_MRT4530_48759C.1
cgggctgcaggaattcggcacgctacttgcccttgcgatgccactttgcgctccgccggtcgctcggccgcggaccggcgaccaacctgccgattccccgataccctcgtgagtctatctcgtcgactctatcgtccgccgccatctcgaaggtatattaggtgcttcagatttgagggtgggggttgtttcagactcctgatttacacaagagagtgagtaggtaagatagcaagaaaatgatgactaaaaatctcatatattctggcaaaatctcatatcttctatatgtgacatggacacaaggaggtaaggaacaagcatcatgggcataatataaccgtggaatgagctagggatctacctgctgaaattcaggagcagatctattctgactctgctgattggtccatatttcagtcctaccatacgcatatgtgagttccggctttactgtaactgcgattgcataaattctatcattctatcact

SEQ ID NO: 45833 - DNA, 507 bp, Oryza sativa
  Clone ID: PAT_MRT4530_4875C.1
atgctgttatatggagatttgcggattattggaccacggtggaccgagtacacagagacggtccacgggtcgacggaagcggatcccgtgtgtcaaccgaggcgagtggccgacaaacggactccactagacaccacccgggctgctcacgtggaaaccacgcggctaccgagcgggcacactaacacggtcaccacacgcacaagcgaacgactaccgacaccgatacacgggtaccggggccgacaaccgcacaacaggcacaggcgacaccgaaaggacgaggacggggcagcgagggagagggatccttaccaccacgcgacgaggcgtgggaacgacaacgacgaacgggcgcggcggaggcggtcgggaacgacggagacgaacggcgaggggacgacttcggcggcgatccttggacgaaggcgagacacggccggcgcagggcttgacgacgcggaggcgaggacgaagacgacgacggggctgcagcggcacacttga

SEQ ID NO: 45834 - DNA, 2681 bp, Oryza sativa
  Clone ID: PAT_MRT4530_48760C.1
cttcttccccgacacgtcacctcgtcgccgatggagtcccacgacggcggcggcggcggcggcggcgatggggactcgctcttcgaggggatggtcctcttcaccccgtccctctccgtcgatcccgatcccgcgccgcccgtcgccgaggcccccgaccccaagccgcccacccctcgcgacgatgccgccgtcgccggagctgacggggcggcctcccagcagcagccgccgccgcctctggatgaggacctgttctccgatctcaccctcctgtccccgcagtcccccgtcgacctgagcgacgcccaccaaggtcaagatcaggaccactccgtcgccgccgccccctcgccattgccggctccggctgcacccgtcgccgttctggcccggcaggcgtcctcctcggcctcctcgtcgctctgcaagacgaagagggccgtgctaatcgggtatggccgctcgtctcaacccgcgcctcctttccctactgcccttgcaattgctgcaacgaccgccacgggttcttctaccgctaatgtttgccatggcagcgtcctccccgatgcttcgatgcatcatattttcgctccgaccatcccaatcccattcatccgaatgtaagaaaatggcgttgagcaggctgcagcggtagcggtggtggatccggatgagaattctcttcatgtgaaagaagaggatggtgaattggaggaggatggaggtgctggggctgaagcaatggggattgaggagagattggctcttcttagatcccaaatctccggcaagctcgagtctatccagcagagagccactgctgtggctgccaagaggaggcagttggctggtaggcggcgaaaggttgcggaggacgtgggctctgcggcatccaggcacaaggatttggagagggagcttgaagaggcgtgcgaggccgaggactttgagagggccgagaagatcagcgactcccttgcggcattggagaaggacaaggatcggttgttgacagcgctgcgtgatgcggagctcaattatgattcggtggatttggaattgcaggatgtgctggattcccgcattgccgcagaggaggaagctgcttcactcctggagcattttgcaaaggatgctactgatcacactgattcagcaagcaaggaggcagaagaaatatcattgaaagaaatagaagggtggcgagaatcaatggaattgctagaaacaaagaaactagagacggaagtagaaaaggagttaactgagctcctgaaattggtaaggttgaaagaagcagagatagctgaaaacaatgctcagatccaggaggttcaagaaaggatcactgccgttgtctccagattttatggatcccagacagatattgatctaaagctcaaaacccttcaggaagcacaaactaaaatggactcagaggctcaagcacttgccctaaaaaagaatgaaattgatagtttcatctccttatcagaacagaaagactcaaaattacgggaaattatcaatgattgttcctctgaagcaaaagcttgccagcagtcagtagatatcagaaggaagcttgcatcgtcaattttgaagtcaagggaggacagaattgggttgttaaaaatggaggaggaaattttgcaagatatccaagtgctcaggcaacaaacatcagatgcaagaatcagtcttcaggagatatcttcaaggaaggctgtcattcagcaagatatagctacatttaagcagaaattgagctttattgacaaaaggggccctgaactagaggctgaaaagagagttgctgccgctgcaaggaatttcaaggaagctggaaggatagctgctgaggctaaagcgctttactctgaaaaggaagaacttcatgctaaacttgagaaagctgctactgatctggaggtaatcgaaaaggatatcacagctaccactgacaaaatacaggaatgcgaagggcttattatactcaaagaaaaagaatcagccatgacaagttacaaaagactcaggttggatgctgctgctgctagagcagaattgactgctgcaactgaaacagacgatagcgaagaggttgaggttctgcggaaagaagctgaagctgcagaatctaaagcaatggaactaaaaacatgctatgaccttgaactggacgacaacgaaatcatgtttcagcctgtagtccctatagtattcataaccaattcaacagggcagcacttgctagaaattgcgtcttctttcggtctatccccctagaagcaaacttcgacagtacttgcatgccaccatgcttgttacagtttgtagagttttgccagcgacagctgcctattgaagggaacatctgtgctgcaatcaaagcttatctccagatatacatgtcttcctcattgttcctccttacctcctagcatttgggatctactctaaatcgaggagaggttcctaggggacagccaagtgtataacatccattttgcgtactcaaactcttcagggagtttgtctccccctcatttttgtgtacattaagactgtaattcttttgttgttgtggtaattttggttgagctacagtaaatgccattcatccgaatgtaatcagtataagttatccatgaaataaactctcttctgcattgccc

SEQ ID NO: 45835 - DNA, 2790 bp, Oryza sativa
  Clone ID: PAT_MRT4530_48761C.1
atggaggtgagcccacggaacctcctccttgtagggactgcttccgtcgccctcctcgccgtcgccttcgtggtgtataccggcgtgtggcagggtaaggcggatggggaggtcgagacgcctctgcgcagggccgtgcgctccgtcacgccgcttgacgcgcccaggatgatggatctgcctcaggagaataacggaatcgaccactgcttgtttggattttacaagggctgctttatgtttgaaccacatagtggatacgactggtttgtcatagttgactgtttacagttccaaggagatcacaaggaaagcttgtattggggtacctacaggccgaatgtatatcttggaattcgtgcaagaaccccgttgtctctaattgctgggataatgtggattggtgcaaagaatgggcaatactttcttcgtcatgtttgccaagattctgatgagcttagcacatatgggtggacagatcacaatgggagggattatggacatcaagtgttggttgatcatggcttgttgttgaccacgagtttcctgaaagagaaaggagagggtagcggttatggtggagattgggcagttcgattgaatgcgaagactgatgggccaagtttaagtgaagaccaagaaagcaccacacacctgtttttctacatcgcggatgaagcagggaactcaatcactatggattcgcatataccttcgtcaagaggtcatgttcttttggcatctggatcccgtgaggagattggtgattggaaagtctatttgagatctgaggaaaatttggaaattcacagagctggattcaaatcaattagtatgcacaatctaagtgacctagtacagcaagcccttgcgactaatgcaatgcaaagtgggaaccttaaccttccagacatggcagaagattcttcaaatgtaatagtatatcaggtttccatgaaacgttctgccgaagtcgacatagtcttcttgtcaggggccgcctcagaaaacccaatgattgaagagcgcattaacaggctaacaggtcctgttctgagcactcgtcttgaatcaaaacagaaggattttgaaaagagatatgaccaaattttcaatgcaaataataagattaatcccaaagaattatctgttggtgttgctgctttatcaaatcttcttggtggaattggctatttctatgggcagtcaaaaattgcacttccaaaaggttttacacaaaaaaatggggataaatatatcccatattggccagctgcactatatacagctgtgcctagtcgctcattcttcccaaggggatttctatgggatgagggcttccatcagttagtcatttggcgctgggatgtgcatatatcgatggatataattggtcactggttagatctaataaatgcggatggatggattcctcgggagcaaatattaggagctgaagctttaagtaaagttcctgaggaatttgttctgcagtacccttccaatggaaatcccccaaccttatttcttgcactgcgtgatttggcaagtggaatacatgcaaaccagttttcagatgaggaatctgaaaagatatccactttccttaaaagggcttatgtaaggctgaactcttggtttcagtggttcaatagcacacaaacagggaaatacgaaggcaccttttattggcatggaagagacagcatggccaccagggagttgaatccgaagactttgacatctggtttggatgactatccacgggcatctcatcctaatgatgaagagcgccatgttgacctccggtgttggatgcttttagctacgaattgtatgtgctcaattgcagagtttcttaaaacagacagctctcttgagaaggattactacaagatgtcaaatcaactttcagattttgggatacttaacaagatgcacttggatgataaaaccggtgcctatttcgactatggtaaccacacagaaaaggttcgattgagatggtatgaagttagagagaatgatgttatgagacgagagcttttgcgtgaaacattacaaccccctcagctgcaattagtacctcatgtcggttatgtcagcatgttccctttcatgatgggggccattccacctgaatcatgggttcttgagaagcagcttgatcttatatcaaatagctctatcctgtggacaaattacggacttcggtcactttctcgaacaagttcaatatatatgaagcgcaacactgagcatgatcccccatattggagaggtgccatttggataaacatgaactacatgattctttcaggactacaccactatgcacatgaggatggtccatacaaggacagggcaaaggaactgtatgatgagctaagatcaaacctgatcaggaacatcgtgaagaattaccatgaaactgggttcttctgggaaaactatgaccagaagaacaaaggaaagggtaagggtgcgaggtcctttactggatggacttcgcttgttgttcttatcatgggcgagtcctacccgaccctacatagaagagatgactacccaaatctgtcatggttctcgtggatcaatatttgcctgagccttcgagtgaactttgcttgctacttctgcaagcatatgatctcactctctaatgcaagcaaagtaccggaagattatcgtgatcgtactgcagcagtaacagcacgatcttctgtcatgaaaacggatactgctaatacgacaaactcaatccctaccatctgtcccgataaaaactaa

SEQ ID NO: 45836 - DNA, 1924 bp, Oryza sativa
  Clone ID: PAT_MRT4530_48762C.1
atgacttttgtttctgttaaaaagtacaggagttcaggcttgaaagtggtggccagatcgtttcctctacaaacctatagtgtaagaatccagaagggaactagtggctctaggcttggaaagtgcaggtacaaggattttcgtctgccaatacttgaaaacatgggttggctgagcaaaatttttaaaggttcagtaaatagagtatcaagagggcactacaatggaaacacccatgaaggccactcagcatggcacactaaagcctatgagcatgacagtgaccatgaagacatagatcgtgctattgcattatctttatcagaagaagatcagcggaaggggaaggctgttgatgaggtagatattgatcatcgtttacatgaagatgaacaacttgcacgggctctacaagagagtctgaatgatgaacctcctcgtcagaatgttccagtaaaagatgttcactcagagagtactccagcaactttcatgcccccatatatattcccttcaactggattaagggtttgtgctggatgtaaaactccaatcggtcaaggacggtttcttagttgcatggattctgtttggcacccccagtgcttcaggtgttttgcttgtgataggccaatatcagaatatgagattccaacaaacaaagatggccacattgaatatcgcgtccatcctttctggatgcagaagtattgtcctgcccatgaaactgatcgtactcctaggtgctgcagttgtgaacgaatggagccaaaggatagtaagtacataacattagatgatggccggaaactctgtttggaatgcctgaatacttcaataatggacacagacgaatgccaaccactatatattgatattcaagaattctatgagggtttgaacatgaaagtggaacaacaaattcccttgctgttggttgagcgacaagctttaaatgaagccatggaggccgagaaaactggacatcaccttgctgaaaccagaggtctctgcctatctgaagagcaaattgtccgaactatactaagaagaccagtaattggaccaggaaacaagattgtagacatgattacaggaccatacaaactggttagacgctgtgaagtgactgcaattcttatcctatatggccttccaagactgttaactggctccattctggctcatgagatgatgcatgcttacctccgacttaagggataccaaactcttgatccaaaggtcgaagaaggcatctgtcaggttctagctcatatttgtagcgcatatgtggcaccgagtcagaaatgtcatctaggatctagtagcatcattgcatccatcgcagcatcatcatcgtcatcgtcgtcatcttcagcaccttcatccaaaaagggctatacgaagcacgggacgttcgagaagaaacttggagagttcttcaagcaccagattgataacagacccttctgatgtatatggagatggttttcgagatggcattaaggccgttgaacgctatggcttgagaaaaactcttgatcatatgaagcttacaggggttttcccgtgttgaagtcacaaatttagagtatgaagaatacattgaggaattttggttcaagttagacatgccaaaagggtatatatgctgttaacattaactgagcaatagaatagacgagaaacaatgattttgttttagtaaatttcagaaagttacaactatcttgtctaaattatcggtttgctgcaatattagttggctatttcagaaaactacagcagtagttgattttatcagaaaactgttacactttgggcctagatgtcaaacacttagtttctgataaaatcattcgctatagctgttgttctctaacaaactgtttgcataaagttctaggcttctagccatagtgat

SEQ ID NO: 45837 - DNA, 742 bp, Oryza sativa
  unsure (1)..(742): unsure at all n locations
  Clone ID: PAT_MRT4530_48763C.1
cggacgcgtgggcgatgacccgggtctggattntgtggaatttgctgttgtcagaggtacaaggattttcgtctgccaatacttgaaacatgggttggctgagcaaaatttttaaaggttcagtaaatagagtatcaagagggcactacaatggaaacacccatgaaggccactcagcatggcacactaaagcctatgagcatgacagtgaccatgaagacatagatcgtgctattgcattatctttatcagaagaagatcagcggaaggggaaggctgttgatgaggtagatattgatcatcgtttacatgaagatgaacaacttgcacgggctctacaagagagtctgaatgatgaacctcctcgtcagaatgttccagtaaaagatgttcactcggagagtactccagcaactttcatgcccccatatatattcccttcaactggattaagggtttgtgctggatgtaaaactccaatcggtcaaggacggtttcttagttgcatggattctgtttggcacccccagtgcttcaggtgttttgcttgtgataggccaatatcagaatatgagtttgcagttcatgaaggtaacccataccatcgatcctgctataaggagcttttccatccaaaatgtgatgtctgcaagaactttattccaacaaacaaagatggccacattgaatatcgggcccatcctttctggatgcagaagtattgtcctgccccatgaactga

SEQ ID NO: 45838 - DNA, 453 bp, Oryza sativa
  Clone ID: PAT_MRT4530_48764C.1
aatgagcataattgcatctccgtctcccattccaatccattttcacgttgctcacatgttatgtcatgaagagagaaagaaagagaggaaaaaggcatatgtttggtgggaggagcaaatcggagcttcaattattgtgctttgttttggccagggtattactggatgctgacacagatacatgagcttgttgtaaagtagtgcaagatgtgccatctgcctcacctgccttgctttcctgcctccttcctaccttcctgtatgattgctatttcttgagtagattaaccctgttccctgatgtggggtttgtacttgtcactttgtcagcattcatgctagtttctagagcttagagccctagtttgttaatgcaaaagcatattataaatatatgtaccatctggttgtaaatgactcgatgaaattctctagtgaccactattctcgtgt

SEQ ID NO: 45839 - DNA, 591 bp, Oryza sativa
  Clone ID: PAT_MRT4530_48765C.1
atggaggccgagaaaactggacatcaccttgctgaaaccagaggtctctgcctatctgaagagcaaattgtccgaactatactaagaagaccagtaattggaccaggaaacaagattgtagacatgattacaggaccatacaaactggttagacgctgtgaagtgactgcaattcttatcctatatggccttccaagactgttaactggctccattctggctcatgagatgatgcatgcttacctccgacttaagggataccaaactcttgatccaaaggtcgaagaaggcatctgtcaggttctagctcatatgtggctcgagtcagaaataacatcaggatctagtagcatcattgcatccatcgcagcatcatcatcgtcatcgtcgtcatcttcagcaccctcatccaaaaagggtgtacagacggacttcgagaagaaacttggagagttcttcaagcaccagattgaaacagacccttctgatgtatatggagatggttttcgagatggcattaaggccgttgaacgctatggcttgagaaaaactcttgatcatatgaagcttacaggggttttcccgtgttga

SEQ ID NO: 45840 - DNA, 171 bp, Oryza sativa
  Clone ID: PAT_MRT4530_48766C.1
atgaccaagaacattcaacaattggatcgtgtcagccacggtgatgggctgctagacgacgtcttgcctgattcaggtggtcagggagaaaactcgttcttcggcagcctggcccgcatcaaagacttcaagattggagttggaattgtctctttagtaacgtttcgctga

SEQ ID NO: 45841 - DNA, 1515 bp, Oryza sativa
  Clone ID: PAT_MRT4530_48767C.1
cccatctctccctctctcctccccccatggccgccgccgccgaccgcctcctccacctcctccgcgccgcgcctgcttccccggcccccgccgccgtcccgtcgtcccgcacccgagccaccttctaccaccagccgcggagcctccgcctggcggcaggggcatccggtatgcgccgcgttgccgtggcctgcagctccgcgggcgcgggcgggagcggggtcgagggcgatgaggaggggatgacgtacaagggcgccggcgtggatatcgacgccgggacggagctcgtccgccgcatcggcaggttggctccagcgataggcggcttcggtggcctcttccccttcgttctcaccccaggtgaccaatttcttgttgctggaaccgatggagtcgggacgaagctcaagcttgcgtttgaaactggtatccatgacacaattgggattgatctggtggctatgagtgttaatgacattgtgacttcgggtgcaaaaccactgttcttcctagactactatgctacgagcaagctcgacgttgatctagcagagaaggttatcaaggggattgtcgatggatgccggcaatcagattgtgctctgctaggaggagagacagcagaaatgcctgatttctataaagaaggtgaatatgatctaagtggctttgctgtgggtgctgttaagaaggataaggtcatcgatggtaaaaatatcatggagggagatatcatcattggtcttccttctagtggggttcattctaacgggttctcccttgctagaagagtactggagaaaagtggactttcgttgaatgaccagctccccagaaatgatggcatgataactactgttggtgaagctctcatggcaccaactgttatctatgttaagcaggtgctcgagattattaacaagggtggtgtaaaaggaatagcccatattactggtggtggcttcaccgataatatcccaagagtatttccttctggacttggggcaaagatttttactgcagcatgggaagtgccacctgtattcaggtggattcaagaggttggaaaaattgaagatgcagagatgaggcgcacgttcaacatgggaattggaatggtccttgtggtaagcaaagaagcagctgatggaattctcgaaggtacccatggaccgaaccacgcatatcgcattggagaggtgatcagtggtgaaggagtccactacgtctgatctaattaatgatctttataatgctttgagtagtttgaggtttgttcatccgacaggcaaaccagcctaatttttgtaatcgcataacataaagggggccaagtcctggagcaacagtgagtttagtcctgtaagataagaaaacatggggcgtactccttttagttccacatgagaacttgcccccaaacggcagaacctattatttggacttgcatctacggaggggttcattttattaaaaaaaaaaaaaaaaaaaaaaaaaaaacctgcagcccgg

SEQ ID NO: 45842 - DNA, 156 bp, Oryza sativa
  Clone ID: PAT_MRT4530_48768C.1
atggcgaggcacggcgagatcagtgagataatgagatgtccatggaaggtcgtgtgcgtggcgtggatgcttgcgctcatgtgcggtttggtgatcgaaaacgcatggaagggctgcagctgcactgcctcgcggaaggcaaggcgcatggtgtag

SEQ ID NO: 45843 - DNA, 138 bp, Oryza sativa
  Clone ID: PAT_MRT4530_48769C.1
ttcctccacctgtaccactaccaacatgtggggcaatttctaatactgggcagacgaaccgaaccataccaatgagcaatgatccagctgactcgcaatgtaccagagaatccaatcatcttcatctgaaccggccac

SEQ ID NO: 45844 - DNA, 691 bp, Oryza sativa
  Clone ID: PAT_MRT4530_4876C.1
ccgctcccctatggtcaccggcggcggctataggcacggcggagcggcggccgagagaggggagggaaagggggaaacgaggcggcggtccacggctcaccctaggtcgacggcgacgacgaaaaaggcggccggagcggaggaaggcggcggcgctgctcgggtcgacggggaccgcggcgcaccggcggtcggcgagctcgacaagggggtcaacggggacggcgacggtgcggcgaagccggaggacgcgacgccggggcgggaaacggtcccggcgagtggagagagccggccgaaggtcgtcgtcgacggaggagagagagggcgacggtgcgagctcgatgccagtgaggagacggtgtggcaaggggcggaaacgggcgagggaggcgcggggagggtttaaatagggttggaaggaggagagggcggccgggagaggaaggaaaccggccgggaggtccggccgccatcaatggcgccggcgagatttgcgggagcaaatccgcccgcttgaatgcaagagagagagggaaaaatggggggaaagggagaagggatcacggagagcggtgggattcgtggcggcagcggcgctaggcgcgggcgaggcggcgggagcggcgggaggaaggagatgacaggtgggccccacccatcagcgacggtggcgggcgggcccgcccgt

SEQ ID NO: 45845 - DNA, 495 bp, Oryza sativa
  Clone ID: PAT_MRT4530_48770C.1
cggacgcgtgggcttgctcggcatacctatcgcagcggtacaaggatacgcatgccgatctgaccggtgacagctgcaacaaggcctataagacatcaccatttgatctcattcaaccgattatgtgagctcaagatgtacaacctgaggcaataaacccttacgatcgatggaaggcggtatatacctaaagaaccgaaccatagctagcacgcgaccgctggccgataagggcaagccgtctaacaagtgatcgtgcaaacatcataagctgagactctaacagaggagagcattggagtactaccacttgggtggcatagtctgcatgctcatagcaaaacatagcagagataccatatgatgctgggcatacataggcactgatctggatgcgtaagaaagtatggtggattgaatttgggagttgactagttggattgatgtggcggtcagtgcatgggaatgtggtctgtatatgctgctctaactcct

SEQ ID NO: 45846 - DNA, 2466 bp, Oryza sativa
  unsure (1)..(2466): unsure at all n locations
  Clone ID: PAT_MRT4530_48771C.1
atggcctccacctcccgccgcggcggcggcgaggacaacnacgacgagccctacctcctgggcttcatcgtcgccaacgccgtcggcctccagtactaccagggcggccgagccatcacccgccgcgagagcgtcggcctcgtccgggagccccacaacccccacgacgccaacgccatccgcgtcgacaacgcccggggcgagaagatcggccacatcggccgccgcgccgccgccgccctcgccccgctcctcgacgccggccacgtcgccgccgcccacggcatcgtccccaagcccgcctccaagaggctctacagcctcccctgccaggtccacctcttcgcccgcccgccccacgccgccctcgtcgccgccgccctcgccgcctccgggatcgacctcatccacgtcgaccaccccgagttcgccctctccgagtccgccatcgtgcaggagcagcagaccaagaggtctcgcggggatgtcgataggctgttctctcatgtggggaagggagggagagctcggattgcgcccatggaggcgccgcgggatgtggtggtgtccgaactgttcgagcaccagaaggcggcgctggggtggctggtgcaccgtgaggagtcatgcgaccttccaccattctgggaggaagataatgatgggggatttaagaatgttcttacaaatcagaagacgaatgagagaccgccgccgttgaagggtgggattttcgctgatgatatggggctagggaagactctcacgctgttgtcgctgatcggaaggagtaaagctcgcaatgtaggtgggaagaaggctagaggggcgaaaaggaggaaggttgaggaggcggtggaggaggagtcaagaacaacgcttgtggtgtgcccgccatcggtgttctcatcttgggtgacacaactggaggagcacacgaaaaccggtagcttgaaggtgtatttgtaccatggagagcggacaaaagagaagaaagagctgttgaaatatgacattgtgattaccacttatagcaccttggggcaagaacttgagcaggagggctcaccggtaaaggaaattgaatggttccgtgtgattctggatgaggcccatgtgatcaagaactctgcagcacgccaaaccaaggcggtgattgctttgaacgcggagaggcggtgggtggtcacagggacgcccattcagaacagctcatttgatctttacccgctcatggcatttttgagattccaaccattctcaatcaagagctactggcagagcttgatccagctccccttagagagaaagaataacggaattgggttggcacgattgcagagcctcctaggtgctatttccctgcgcagaaccaaagagacagagagtggtagcaaaagcttggtcagcattccgcccaaaactgttttagcttgttatattgagctttctgcagaggaacgtgagtactatgaccagatggaattggaagggaaaaacaaactgcgggagtttggtgacagggattcgattttgcgtaattactcaactgtgctttatttcattctgaggctccgccagctctgcaatgacatagcactatgcccattagacctgaaatcatggcttcctggcagtggcagctcccttgaagatgtgtctaaaaacccagagctgttgaagaagctggcctcattggttgacgatggagatgacttcgaatgtccgatttgtctcgctccaccagccaaaaccgtcataacgagctgcacgcacatatactgccagacttgcatcatgaaaatcctcaagagctctagttcccgctgtccaatatgccggcgctcgctatgcaaagaagacctctttattgcgccagagattaaacatcccgatgaggattcctcagtcaatcttgatagacctctttcttccaaggtgcaagccttgctgaaactactgaggcgttcacagagcgaagaccctttgtcaaagtctgttattttctctcagttcaggaagatgctgatcttgcttgaagggccacttaaagcagcaggctttaacatactacgactcgacggctctatgacggcgaagaagaggtcagaggttatccgccaattcggatgcgttggccctgattctccgaccgtgctgctggccagcctgaaggctgcgggagccggcgtgaacctgaccgcggcatcaacggtgtacctcttcgacccttggtggaaccctggggtggaggagcaggccatggacagggtgcaccggatcgggcagaccaaggaggtgaaagtggtgaggctgatcgtgaaggatagcatcgaggagaggatgctggagctgcaggagaggaagaagaagctgattagcggcgcatttggtaggaagaaaggaggcaaggagcacaaggagatccgtgttgaagagctccagatgatgatgggaatgaaatga

SEQ ID NO: 45847 - DNA, 225 bp, Oryza sativa
  Clone ID: PAT_MRT4530_48772C.1
atgccggcgacgcagtgctcccttcctcccgcatcacggcagacaggcaccttagcctccctcgcaagatcatgccagacggtgccattggcgcacccgttcggaggtcccggggggatcccggaccgcctcggaatcatcaagcccagggccacctgccaaagcctccgctcctcccttgggggcctcggggccctcccgggggcaggaagctttgggcgctag

SEQ ID NO: 45848 - DNA, 437 bp, Oryza sativa
  unsure (1)..(437): unsure at all n locations
  Clone ID: PAT_MRT4530_48773C.1
atatcccgctgtaccatgggtggatagtagatccccaggatactgacactgctacttccattggatcaaagtcttacaatgctcttgcatctgggcttgctgaatttaagtcgggggaatcaacaaaagagaatagacatgtacaggaggaagaaactgttgattttgctgctgcaactactgcagcactaggggttccttctcctagtgtttctcgaggtatatcatttgatgaaaatacactcactgacccagttgagttgcacataagacgaggcgatcgtgaggaagaagaggaactaaggagagtccttagtctatcaaaagctgaaaatgctaatgcctgtgatggatctggttcctttgacacttnacagtctaattcatcctnaaatatggaggagacaggacacactgataagtttccattagaggca

SEQ ID NO: 45849 - DNA, 849 bp, Oryza sativa
  Clone ID: PAT_MRT4530_48774C.1
atgggcccgttaatcttcgtcgtcgtgctcgtggccattggccagtctgtggcactgtgctctataggccgttcgtctagctcccaccggcagtggccttccccttgctgtatcttctcctgcgaccttagctgcgtgacccatcttctacgtaccatcaccggcgccgccgtacatcaccagcggcagctttttgttcgtccgctcctgctcagctgcttccccacctcgccgtcagacttctaccagactaccaccaacgttgcacatccatcatcagtggctatgcagcagctcccactccaccttgcttgtccatcgctggcagcccgtcctgcgcgacatgagcgcaccttctccggcgtcttcggatttgcaccggtgggcaccttccgcttgctgtcaccgacaagctcggccgcggtcggcgatggcgaaggggccatcggtagcggcgccacggccacgaacgccgacgtgcgggcggcgtcgactgccaagaagacggtggagccgaggaacgaggagtatacaagcacggcgacgaggagccacggcccgagcagcccacctgcagccgccgccgccggtctctgtctccggcgcaggaccatctcagatgccgctactcggtggccgcacgtacgccacgcgcgcacgaccgcaggcgatcgccgcctgtcgcttgttgtagctgatggaggggctgccgccattgacgggattcttttctgcctcccgaactcccaggccgccgctgccactagggctaccaccgccgccaccgggacccacattcacctccttgccgagaaccttgcgccagcactcaggccgccgctatcctag

SEQ ID NO: 45850 - DNA, 213 bp, Oryza sativa
  Clone ID: PAT_MRT4530_48775C.1
atggcgtggagagaccgatgggaggaaggatggattggggcgatggtgagccactcatcgctggcaccgatagcaacctcgcattcatatcacaacctcctagctctcgatctatgcggtcctagagatgttgcatggaggaggagcgccacgaccatggctaggagggtcaaggcggagctaggacctcaccagggggacggcgacgtttag

SEQ ID NO: 45851 - DNA, 185 bp, Oryza sativa
  Clone ID: PAT_MRT4530_48776C.1
gcacgagggagagagagaggaactagtctcgagtttttttttttttttttttttccctgcatgcaccatcatcctggaggtagtgcataaaaatattttgcaatttgtaaacatctccacaagacaggaccctatttgctgattgatgttccaacacatacggtagttttcataagcaagttact

SEQ ID NO: 45852 - DNA, 318 bp, Oryza sativa
  Clone ID: PAT_MRT4530_48777C.1
atggagcttaattatgcttggcatcagggggacacttttgatcatctcacgacttggatagaagaggcgagacggcttggagttggaggtgccaagctgacaatatgtttcattggaaacaaatgcgacctctctgatagacgtgctgtcagctacgaggaaggtgaacagtttgccaagcagaatgccctgctctttattgaggcatcagcgaaagctgctcataatgttaacgaggcattcactctgactgctagagcaatgtgccacaaagttgaagatgcatgggtttgtttaatgagaaaattcgatccatag

SEQ ID NO: 45853 - DNA, 894 bp, Oryza sativa
  Clone ID: PAT_MRT4530_48778C.1
atggagattacagtggcagaaccagaggtgcaaattgtggcatcagtcgggacatatatagaagaagtagtacgattggaatgggacggtacagagccagaaatatttgaagacccttctcctgcgaaagaccccgaggtgcaagaaaccccggtccctgagaaggccactgacaattctaaggtgcctaaagtgcttatgagccacgactccaagtctaaagatgagaacaatgagaagttcatggtaaccatcttcagaggggatttcgaagatctccatgccatatatcatcgggacaagatgaacgtcaactatgttgctgttaggtgcatgatgcaatacatggatgctaagaagaaaaataaacctatcagcttcttggatccaactcggatctgtcaaacacaacataccgtgaggctagcaccagggtcagatcagctgaagggcaagactccacaagagataactgaatacaagaagggcttgcacaaggagaaacgatcattatatctatttaatcatccaccagaaggatggaaccgtggtagtcttggaccctctcgattacatacaccagtcatacaaagaatttctaacaatcttacagtatgtcacaagcaacctataggaactgtcttttgcgggtattacgcgtacgaattcctcagggttaatgggaggtacaaggttaacgcggaggatttgctaagaatagaacgtcgaacgagctttgacaatacaagcatcacgaatgtccagcgcgatctgtgccaattcatccaccatgagtgttgtcatgtgaaaggagagtttttcgacccagagggtgccctatctacaagtgacgaattcaagaaatttcgagagtggagcactactatgccataa

SEQ ID NO: 45854 - DNA, 1465 bp, Oryza sativa
  Clone ID: PAT_MRT4530_48779C.1
atggagccgagatcgccgcgccggtttccttcccctccgggccgccctctctccctccccgctctatttaatcgttccccgcgcccccctcctccgtttccgccgctcgccgccctctctccccgtcggaatcgtgcccgcgccgtcgtcctctctctccgccgttgccgccgagttccggttcgccgccgtcgtcgccccggacctcctcccgcttcggcatcgcctccatcggcttcgccgcgtcctcgtcgacctcgtccgctcctccgtttcgcccgccgaccgccggagcgccgccgtctccgtccacccgaaccgcgccgccgccttctcccgcttcggcatcgcctccatcggcttcgccgcgtcctcgtcgacctcgtccgctcctccgtttcgcccgccgaccgccggagcgccgccgtctccgtccacccgaaccgcgccgccgccttctcccgcttcggccgccgtttccgtcgtcgccgtcgacccggggggcgcgagcgagccgcctcccgtcggccgtaccggcgaggccgccttcgggcgcgccccgcggctgccagaccccgaggtgcaagaaaccccggtccctgagaaggccactgacaattctaaggtgcctaaagtgcttatgagccacgactccaagtctaaagatgagaacaatgagaagttcatggtaaccatcttcagaggggattgtttcggcggcgaatgttacgtatggctagatttcgaagatctccatgccatatatcatcgggacaagatgaacgtcaactatgttgctgttaggtgcatgatgcaatacatggatgctaagaagaaaaataaacctatcagcttcttggatccaactcggatctgtcaaacacaacataccgtgaggctagcaccagggtcagatcagctgaagggcaagactccacaagagataactgaatacaagaagggcttgcacaaggagaaagtgattattgtcgcatacgatcattatatctatttaatcatccaccagaaggatggaaccgtggtagtcttggaccctctcgattacatacaccagtcatacaaagaatttctaacaatcttacagtatgtgtacaactactacaagttcaagggtgaagaacagacccgaacaagggagaagctgctagtacatacatattggccgtgtcacaagcaacctataggaactgtcttttgcgggtattacgcgtacgaattcctcagggttaatgggaggtacaaggttaacgcggaggattggccggtggcgggcagcggccggctcagagatctcgagcggttccgcagcagacaaggaggtggccgtgtgcgggcggttcgaccacctcgggcggtgccgctgccacagaggcagcggcgatgggacgacgtgacagtgacaacgggcgtgggcaacgtcggcggacaccctccccccccccct

SEQ ID NO: 45855 - DNA, 163 bp, Oryza sativa
  Clone ID: PAT_MRT4530_4877C.1
aagaccacataaaatccacagatcccaaaatccctctgttgtatttttcgacaagggcaagtcatccccccaactactaaaaactatcaattgcaacaaaaataactccttaccaaaacatctacttcagccaaaattgttgccccaatattcactcctttaa

SEQ ID NO: 45856 - DNA, 287 bp, Oryza sativa
  Clone ID: PAT_MRT4530_48780C.1
aggcgtttgaggtttttatgagtaggaacaccggggatccatagagtccttagagagccaccggcaccttcagttccttccgagacacagctccttaacctttcgtgacaccgtccttcaattcgtactgtacctctgacgtgcacgtagtgcacaccccataaccccaatcagcaccgcgacatgccaccggtatgtacccccgtgcgcgaactgtagagcaccgacgtaagtaacgactcgtggagcgaaacgcagcgacacagaccaccggagtcatcgcaaac

SEQ ID NO: 45857 - DNA, 510 bp, Oryza sativa
  Clone ID: PAT_MRT4530_48781C.1
atgaagctgcccgacgatttggctgctgtctttactacaagagcgtcttctccccataggtccagattgaatccgacctcgacctcaattcaatctggctctagggaagtcggcgtgatacttcaaccacttgggacagtttccacggaagaattagatggctacctcagctctctcggtgtcgactctcgtcaacccaccgagatcctcgactacgactacttcggctactactatgacttcaacaacctcgacgatttcgacgaccttgatgaagactatgaagacaactgcactcctctctttttcggtgtttttatggccgataacgagaagctgctgagcagcgtgcacgacaggaagccgagcgccttcggctggagcaagagcgacaagcccaagagcaagcccgactgcagcgtgagcagcaggagcgcgagcgattggcacgggaagctgaggagcgacgacagtgcgccttggcatcaggacgtcgagcacgagatctaa

SEQ ID NO: 45858 - DNA, 2685 bp, Oryza sativa
  Clone ID: PAT_MRT4530_48782C.1
ttggttttcttcaactcttaccacaccacgccgggtgggcgaaaccctagccgcccgtcttccccctcaaagcggcggcggcggcggaggccgatgcatcgcctgctaagttcgccgtggggttttcgcaggggacgtcggccgatcaggacacccgtttctccaacaagcaggcgaagctgctcaagacgcagaagttcgcgcccgagcttgaacacctggtggacatgactaaggtgaagatggatgtgatgaaaccatggatcgcgacccgtgtcaccgagctcctagggttcgaggacgaagtgctcatcaacttcatctacggcctcctcgaagagaaggtggcggatggaaagaagatacagatacagctgacaggattctcggagaagaacaaaggtaagctgatgaagtacttgtagactccactaatgacagcacagcagaatgctagcgggatgcctctaaagttcatagatacaaagtaggctgatcagcagcaaacaaagagaagtgctcaggagatccggaagaaacgggagaaagatggaaggaagcaagaactagagaaacaaaaattgatgatagcttctccgattatttgggttcatatcgttctttacctcaaaactgctgtaggacggggatgccggtaattctagattaggtcctgatcgtgctgatgctgaggaggaaaaagaactggattctaagcatagctcaagaacaaagagccggttagttctaccttcttaaactggaactacctttaaatccgtgacatcagcttctcatttcagggaaagccttaggtccaggagcatctccttgtcgcctcgcggtaggcggcgatctgtttctcctaggaggcgttctccatctccttccagaaattccatttcttttgggagacagcaacgatcttcaaggcgctcagtttcacctaggcgttctttttctccacgaaagcgttctccaagaagtaccccttcgatgtcgaggcggagatcaccgtattccagaagatcaccttcagtaccaagacatcgatctccgtcacctcatcgtagatctcatattcgcaggaaatctccaccttttgtgcgtcagagatcacgagtcccacacgaggagaagtgtcgagaagaggttgcgaaaagaggaaagccggcgcgtccgtgatctccgccgccgtagaaagccagaccgtcaggccagccaactaaaactgaagcatgctgaaactgttgatatggcttcagatcttgagaaggatcgtgaatctgactcagatgctgatgctaggaagaaaggttcatataatggaagagacgaatcggatcagcagaaacttgaaattgagcttcgcgagaaggctctggaatctcttagagcaaagaaagccatcaaccactaggctgaggaatctcttgctatgcatttacatcttttaaaaacttttcttttgcttatatcatgttctggaagtgtgtttatatgactcctatttaatgttctgtatgtttacgtggcagttgacctgagtaattgaggattcctgagctgtttgcttgatgcagctgtattcaggcttagctgctagttatctggtaatgtttgcttttataagcctgtaaaaccataatactggattggaactatttctgttatacagccatcccagtagttactaacatgtttcgaacaatatcagagtacctgtttaaggttactgattcttggcttgaggtttgtgttactcccttcatgacttggttctgatcgcgtaatgaaaatatgtatgtatttctctgaaaagaaagaacacacgatgacaataggaatcatacagaagtcagtggccctcttgcttcggattctgagcatcgtaagctgacaaaatccttgaattctccaaacaagccagaaaggaactcgacacgcgataggtatctactcgtccgttctagtggcatggagacaaggaggaaacagaacaatcaactgtcagagtcatcagaagatgagcgtgatggtagaagaacgaaacacacggttgattctcctgatgattcccaacagaaacagcacactcctagtagagttggaatgcacaactcttattcaaaggatggcatgaacagtgaggatgcaataaagggtttacgtgacggtatggcttctaagaagtatcctgctaaaatcgatgatgattctgagtcagaagatggaagtccttttcgaaaagataagagaaaagcacacggtaataacaacattgattctggcagttcaggttcagaagaatcagggaaacatagatcccattctgagaagcgaaagcataaaaagagccgtaagcataagagacgttatgatgacagttctgatgaatctaattcggagtcagatgacaaagagtccaagaggaggagaaaggaagagaagaggttgcgaaaagaggaaagacggcgcagacgtgaagagcggcaccgtagaaaggcagaccgtcaggccagcaaactaaaacatcttgagaaggatcgtgaatctgactcagatgctgatgctaggaagaaaggttcatataatggaagagacgaatcggatcagcagaaacttgaaattgagcttcgcgagaaggctctggaatctcttagagcaaagaaagccatcaaccac

SEQ ID NO: 45859 - DNA, 624 bp, Oryza sativa
  Clone ID: PAT_MRT4530_48783C.1
cgcgacgtagcttgatcctcagagcggccgcccttttttttttttttttatgagaaatatattgtcactaattgagattaatgttaataacaactgggagcacaagataacataaatatttccttctcagtattatggttgtacagacttataaaagcaaacattaccagataactagcagctaagcctgaatacagctgcatcaagcaaacagctcaggaatcctcaattactcaggtcaactgccacgtaaacatacagaacattaaataggagtcatataagcacacttccagaacatgatataagcaaaagaaaagtttttaaaagatgtaaatgcatagcaagagattcctcagcctagtggttgatggctttctttgctctaagagattccagagccttctcgcgaagctcaatttcaagtttctgctgatccgattcgtctcttccattatatgaacctttcttcctagcatcagcatctgagtcagattcaacgatccttttcaagatctgaagccatattaacaggttaagcatgctttaggttttagtttgctggcctgacggtctggctttctacggggccggtcttcacgtctgcgccgtctttcctttttt

SEQ ID NO: 45860 - DNA, 744 bp, Oryza sativa
  Clone ID: PAT_MRT4530_48784C.1
ttagctcaaagtcgtcgccctcctccctctatttattcgccccacccctcgctcgagctcgctcgcacctttgccaccccccaccctcgatccagagacgcacgagccaaccttgctctcaaccgttaatttcctctctccacgactcgacgccgcacgacaaaccagcggaggcgctcgcgcgctcgccttctcctcgccctccatttgaacaaccccttcaattaactcctcctcgatcgctagctctctctctctcgttgcctcctcgatctccttgaatcgatcagcggcaaccagcctgatcgttgtttgctagttagttaatttccgtcgccgatgccgacgacgcctcgtcgcaaggagccatgaaccgctgcaccgacgtcgagatcaggaacgcgctgcgcctcctcgcgcccaagcccaccgaggacatgtcccgcctccaccaggcctacgaccgcggctagcttagcgagtagctgctactagcgttcataatcattctgtgttccatcgctcgagttcttgaacacgaagaggagcttagtagtttgtgtcagctgttagtttaatttgtgcatagttcgctgcgcgcggcgacgacgacgatgaaggaaggaagaggaggaggagggcagaggagtaacatcctgacccacacgatcgactggttcccggccaggctgctgcaccggacaacgatgctccccgtcttcgacgtcgtcggtggtgactacc

SEQ ID NO: 45861 - DNA, 499 bp, Oryza sativa
  Clone ID: PAT_MRT4530_48785C.1
tcgctcctctcccacgcctcgccgccgcccgagcagccgtcggtaaagccgggcggctgcaaagacggcggcggcggggctcccctttctcctcactcctggtcaagtggttggggcgccgatgagaccggagcacgaggggcgcagctcggcgaggactgccagatccggcgccgttgaattcggatccggccctcccttggccggatctgggctggacgcgcaagtcggcggcgaaggcggcagccgcggcggcgaccgcggcgcgagggccgcgcggaggaggcgacggtggcggcgaccgcagcgcgaggggcgcacggaggaggaggcggtggcggacgtggctcgaggaccgcgcggcggcgactgcggcgcgaggacctcgcggcaacggtggctgcggttcgcggacgtgcgtcaactgctgcttctctggcttgtgtgcaccaggaagcggttggcggtggcgacgtctcttttcccaggcggcttaaaa

SEQ ID NO: 45862 - DNA, 455 bp, Oryza sativa
  Clone ID: PAT_MRT4530_48786C.1
gtactagacaggaacattagttccctcttactgtatcccatcaatcagtttgttcaaatgatcagttgtgaaatgaattagtagctgcctccggtaatcccagttcccaaacaaaacactttctgccaccccaaaaccatatattacaccaaggcagacaagcagggccccaatctaacaaaacaatggaactcatcagagacaagagacacacaagacaacacaggcatagggcatagctaaaattgaatataatcatacatccactaacacctacaagctctaagtaggaaaaagaaaagaaaaaaacatttcttcttctttatcttcctttctctctggatctacatgatgaagtatgctcggatcacctcaattatgggtgcacggcacagcgggcatttcccttcgctttgaacccactcattcgcgcattttgaacatgtgcacatgtg

SEQ ID NO: 45863 - DNA, 357 bp, Oryza sativa
  Clone ID: PAT_MRT4530_48787C.1
aaagctcagtagaaaccggtaccctcccaagaatagactttgtagcaaacattcaactgtatcatatacatcttttctttttcgttagtaacttgcaactaaaactgcggttacctgtagtatgcatgattgaacaagtcagtccacctgctaactcaagaggattcttctcatcacatcgcatcaaagagcgaaaagtccttattaggattagtgctgaaagcagcactagtgaggtcaagttggggtcaaatgtatgaattgtcagcgccttagcgtcgtctttttctggaacggacgcgtgggcacaagagcagacagtaatttagtccataaaaccattttaattggattcca

SEQ ID NO: 45864 - DNA, 1364 bp, Oryza sativa
  Clone ID: PAT_MRT4530_48788C.1
atgaagcaattgacttctggaatgaatgttcagaaaagagatctggctaaaacacataacgatgaaataacagcatgtgattgggattacttgggtactcaatatgatagtagtgttgtgccagagtcagatctgagatttgagacagcagaactattactggagacaccaaaaaatggtgatgccatgcctggtaaatctttcttgccaattgttgaagcaaatttggagaattcaagaagaaagctgtttcagggatcagctgactgttattctcagagtgctgtagataacattcatgcttattgtacctctcgagggaaagaggtcgcaacaaatcatgtctctggaattctaccttgccctagagaaagtcaattgattccagatcatcacttctctgactcacttgaagtgcccagcgattacatggcaatgaaccccagcgctgtatcacagcatctacgtggtttgcataggcgcagtctcttcaatgacaaggtaagggatcctactatgggtgtgcagagtgtctcaaatcttggtgcttcaacctgtgctactaggcatagaagtatacctgatgataactactcgaagcttgtgggatcccctgtctgtgcactacctaatgttgatttgcatttggtccgaatgacagaagaaatgctggctcccaataccagtgaaatgaacacacataatcaaggcgactactcttctcaggcaacgatgcctacgagtgctggtaattctggtcaagaaaatcccaagagaaaaaggcagaaatgtcaaaatgacaatgtggactcgtgcaaacgttgcagctgtaagaagtcaaaatgcttgaaactttactgcgaatgttttgcttccaaagtgtactgttcagaatcttgctcctgccgagggtgttttaatgatcatagtcatgaggaaacagttttatctactcgcaatcggattgaatctcgtaatccactagcttttgctccaaaagtaattcgcacttgtgggcctggtctggagtttggggaagactctaatgcaactcctgcttcatctcgtcataaaagaggttgcaattgcaagagatcatattgtgtgaagaaatactgtgaatgctttcagagtggtgtggggtgctccatgagttgccgatgtgagaattgtaagaattcttttggagtaagaaaaggaattgaacggtttgaaaccaaggaaattgagcgagcagaccgaaaaatgaaggatcatcccaaggaagaacagtctgagatggacaaatatcatgcattatgtgaaatctggggtgttcgatccacggagaacctattcacaacaccttcaatggattctcgcag

SEQ ID NO: 45865 - DNA, 1939 bp, Oryza sativa
  Clone ID: PAT_MRT4530_48789C.1
ataacataccaactcttacagattccatctcttcgaaacatgttgcgaaattcaagaggcttcgctgctctctcaaaaaatggagttctacctttgccaagctctccagaacaattgaaaggtgtaataaagtaattttgttcttggatagattggaggaatttcgtctcctcaatgttccagaattaagattcagaataattgttaaggcccacacagctcatttattgaactggcaagaatagtattggaagcatagattcaagcaaaagctggtactctttggaggtgaaaacactaagtttttccttgcaatggccactgaaagatttaggtgcaataccatttcctgcctccaagatttagatggtaaccaagtttttgatcatgagaggaaagctgctatcttctggagtgtgttcagggatagaatgggagtttctgataagcctaaaatggtgtttgatcttagtgaacagattgaagataaaggtgacctgtcctccctctgtgctcagatttctacaaaggagatagttgatgtgctcaagaaaatgcttgtggataaggcccagggccagatggtttcaatggatgtttttataaatcttgttgggagattattgcacaagatttctacagactttgtgctgacttttggggtggctctgttgatcttgctgccatcaactattcttacatcaccctggttccaaagatgtctgcgcctcaaactcctaatgattataggcctatctctttgatgaacttttcggtgaaaattctttgcaaaattttcgctgataggttgcaggtgttgatgttaagattggtgcattagaaccagtatggtttcataaaaggcaaatcgatctaggactgtttagcttgggcctttgaatacattcatcaatgtaagcattcaaaaagggaaatagtgctgttgaagcttgattttgaaaaggcctttgacacagttgagtatgaggaaatcctcaatgtgatggctgcaatgggtttcccatcccaatggaatgcctggatgaaagtgatcttctccttagcttcttcggctgttcttcttaatggtgttcctggcaagtttttaaatgcaaacgtggagtcaggcagggggttcccttatctcccctcttgcttgctttgggagcagatctgttgcaatccataatcaacaaggcacatcaaagggggatcttgtccatgcctatcccgatccctggtgatgataacttccccgtgattcagtatgcagatgacaccctcatctttatgcaggcctcggcccctcaacttcatgctcttaaagccttgttgaactcttttgctctctcttcaggcttgaaggttaattattccaagtcttgcatgattccattgaaactcacagaggataaagctcagatgtttgcttaaacttttggatgttctattggaactctgccatttacttacttggggctgcctcttggaaccaccaagccaaaagttatagactttgctccacttacagatagaattgagagaagactgacgctagttcagcttttctatcttatggtgatagactcacattggtgaattcggtcctctcattgctcccaacttattacatgtgttctctgtcattgccagtctcggtcattgattccatagatagagctagacgtcattgtctttggaggggaaatgaccttaattcatccaagaaatctcttgctgcttggtccaaagtttgtaggccaaaagacaaaggtggtctagaagttattgacctcaaagttcaaaaatagggctcttcttatgaagcatctgcataaattttataacagagcaaacattccttgggtcaacttgatctggttatcttattatggcaatcaaccgcaccgtcgcatccatggcagatgctgggtggcac

SEQ ID NO: 45866 - DNA, 1592 bp, Oryza sativa
  Clone ID: PAT_MRT4530_4878C.1
ccacgcgtccggagctcctacaagagggaagctttcttatgttcttgatggtgataatttaagacatggtttgaacaaggatcttggctttaaggcggaagaccgtgctgaaaatatacgcagagttggtgaggtagcaaagctattcgcagatgcaggcctagtatgcattgcaagtttcatatctccgtataggagagaccgtgagtcttgtcgtgcattattgtcagatggtagctttattgaagttttcttgaacatgcccttggaattgtgtgagtcaagggatcctaagggcctttataagcttgctcgtgcaggaaaaataaagggttttactggaattgatgacccttatgaatcaccattaaactctgaggtacatctccattagatttgctatcatctccacatggtcaaagtgtgcattattaactgtgttagtatatggctgttctttctggttcatattaaatcagtggccttaatgaaactcaagatattaaaagttttcatttgtgattggattagattgcagagcgatccattttataagcatgttactcctacataataatcttgtaggattaaatgcattctcagaagaggcaatgataaaatatatgcattggtggtcggctgatgggaatggcagttgtgggtagcaaatgttacattatgattattgccacactagacgtctatatcgctagctgaatatagtttgtgatccttattgtattttatcctcaattttaaattacatatgtagcagtctggaagacacctttaatcaattcggtagttgtctatttgtacatctatgtctttgtcattgtatcatttattgtgccccacatgaagttgccactgtttgtcctttacccagtatcacgaactcttccttttgttacagattgagatcaaagaagtggatggtgtatgcccttcaccatcggacatggcaggacaagtagtcacttatctagaggagaaagggtttctgcatgattagatgggatgcatcgatcagccggtagagttttctcctccatattagactagttcagaataagtcaagctttggcatgttttctgtactggtttttgtttagattggggcggaggacgggccgacccaaaacgcagcgtcggtgcggaggcaaaggaggtgggcgatgccggccaggtaagcaggggaagattcgtatctccgggaagcaaaatcatcccagttattaacaggccgtagaagaatatccatttacttctgttcttacattgtggactttatactgttactgttcttctaccaaaaaaaaaaaaaaaaaaaaaaaaaaagaaggagaaaaaaaaaaaaaaaaaaaaaaaaaaaaaaaaaaaaaaaaaagaggggactctgagattaaaaaaaaagaagaaaatggtatatgtccttctccatcggacatggaaaaaaaaaacaacactggtctagaggagaaagggtttcaacatgattagatgggataaatcgatcagccggtagagtttactcctccatattagactagttctttataaagccagtattggcatgtaatctgaaaatg

SEQ ID NO: 45867 - DNA, 348 bp, Oryza sativa
  Clone ID: PAT_MRT4530_48790C.1
atgccgtcagattttcgccgccgccaccacacccagaccccctcggccgcagcagcctcctccgccgcgaccacctcccgcaagctgtcgtaccctgaccgcctctaccgcaacctcctcccgcaagaagccgtgcctagacggcttccgccactacaggctcctttcgctgccgcgtcgctgatccgtatactctatgtattcgaggatgggaggatggcaggaggtggtagtgatgcggatggaggcggcagtggggatggaaaggaagttatcggcggcgggatgtgggaggatcattttgcaaaagaatctcttgaaggacttcgaagtgatttccctcattaa

SEQ ID NO: 45868 - DNA, 2751 bp, Oryza sativa
  Clone ID: PAT_MRT4530_48791C.1
gtggttttttggacaaaggggcgagactgatttgacacaaccacgtgtaacattgaacacaacgaacgaaatgactaattaagtattaaaaggcctagcgagtgtttttacctacaaactcacataccgatcactaacagtagcctttattggcattccttgcctgtacacaatgctggaagtgatctggaagtgagatgatggaactacctatcaacactaaacataggggaatagcctacagcctctccctacacaagctagaatggctggaatccttcacgtcagtgtaactgaaaagtaaaggtcttccggttagtgaatttttggtagcaaaatagctattttttctcaaaacttgcgaccttttcgggcagcgtttaattgctccagcaaatcttgtatggtagaagaagcatcctttagcttccctcgcagattttcctcttctaggtctcgtcgacctctttcttctgagaagatgtcaatcaatgctaattgttccttgtttgaagtttctagttgcctctgtgtatcctctaactgcatgaggaaatgtgaaccactcaacaagtactgagttaaacacttagtttgcctctctgttaacgatttgctcttagcgcgttcaatctccagctcctgtgacaatttcacttccaccttcattaacctaatttgactctgagtaacaatgtcactttacttccactatgaattttcgtccatctggtacatgttaattgtatgattatctccaatattataatctccaagacttgttgcgttaagtttcacaggatgggatagacttttgtatctctttctttccgtccgttcataggttggagttgtttctaaagcagtcccattctggaaagattttctatgtggattcaggatatgagatcttgaacttgttggagttggggcgcccacaaactcagaatcactttcatcactggtatctgaaagcccatacattattgatcttccaggttgtttagtcgttgcagacttatcagttcttcgctgagtatgaaatgacgtgcttgccttcccagatttagtatttgattttccattatctttcccagtagagtaaggcgattgctttttatttgattttccataattttttccagtagagtaaggtgattgctgtgcactttgggtaacttcaggggcgtcctcttctgtttcattggatctgccagcacgtgtcccagaatatccaattcgatgagcatttcctgaccaatagtctttctgcatttgaattaatcgtgcttcaagtcttgctagaagagttgttctctcaaagtcctgcttatcatgagctggctctataaaattagcttccagtacacctatgacaccacgcccaccacttccagcggcagtccacactctccagaaaggctttattagcctgttcttgtggtatacattaaatccctgaacatcaacatgatgttttgcatctttaacaaagccaattgttacatcggctaccatctctttcttcaacatcatgtcagtcacaatattatggtgctcaatctcttttccacgtaaaatcatttggaaaaaacttggaactcggagatataaaatggatgcatagctccttaatgaatgcctataagtcaggaaatgcttggagttcggaaactgcttagccatcaggatatttttctcatcacgattgccacctctgagttgaatatcgtgtatgtcctcatcaaaatcaagctccaaatgtccttcatcgtcctcccaaagattgtaaatgataatacgagtcccttgttcctttatagaactaaactgctcaagtagttctgcttcagttgaatatggcgaccatgtaataatagtctgtaagcttgtgttccaatcagcaaatgtagtccgtggctttcttttccaaccttgttgattttcataatcaatcattggaacaacaatatcctctttgttggtgctcctcagaaaggtgtaggatagcatgccaacactttgggtaagccttttgccaccttttccaccactacgggagaaaactaaaacatcagcaccaagtctcattgtacttgtcttgaaaccatttccatattgcccaatagtacttgcaactttgctcttggctgaataacccaatgacatgcactgccgcattttgtctgggtccattccaccaccatcatcttcaacaaggagcattcttgttttgtctttattattctccaacatatcaatgttcacataggtagctccatttatgaccccccagagcccacttgtggcttgttgcatttgagtgcaaaaatttaggatgtacacgaacatgatccaatccggataattggcagctattttcctaaaaagtgtaatcaggtctgacgactgcggcgctccatccccaagcggcttcccgtcgtagtccccggccttccagaactgcttcgtcgcgctcttcgacggccccgccgatgcctccgcccccgccgccgccgacgccgcatgtggtagaggatcaaggaaacccgggggcagatccacggccacgcccgccgcggaaaccctagcgcgcttccccgccgatccacccgcccccacaccccgcgacctcttcgcgctgccgcccccgccgccctccccggcggaatcggagtcgctgctactcagctcgatgaaatcctcctcgacggggcgcccccctctgccgccgccgccggcggccgccat

SEQ ID NO: 45869 - DNA, 497 bp, Oryza sativa
  Clone ID: PAT_MRT4530_48792C.1
gttgtgggggttttttttaaatttttttttttttttttttttttttttttttttttttttttttttttttttttttttttttttttttttttttttttttaaaaaaaaaaaaaaattttttttttttttttttaaccctaaattttaattgtttcagaccaggggcccccaccttattttttcactcccccaccccaaattttggaaaaaataaaaaaaaaaaacccccaaggggggaaaaaccaccccggcccctttaatccccggggggaaaccccaatgtagagggcaaagaaaaaacaaaaaaatcttgcccttgacccaaattcccggcaatgtaaaaacccccaaacttcttggaggggattttttcccctatggccctgaaaaaataaaattcccggttggaaaaaatttgccccccccccccgacccgttaaaaaattttttttttttttatttaaaaaacaacttatttaaaaaaagggttttcccaa

SEQ ID NO: 45870 - DNA, 429 bp, Oryza sativa
  Clone ID: PAT_MRT4530_48793C.1
atggcggctcgggttcgcggtgggaggatggctgcagcgatgggatggggaaacggagcggaggccggggtgcggcagggcgaggcgaagccgaaggaaccaacggcgtggcgtggcgtggcggtggctacggcgacggcggcgtgtagccggagttcgccggcgggcggcgtcgcgcggagcggcgtggggagcacgggagagggcacgaggagctcggggaggagggggaaacggaagaggagagcacgaggggctcgatttgacgccaaaaattggggaaaagtgggggatttggtggaggaggtggtggggaaccgattttactcggtttgggcgcgagggcgcgagcgggagggcgccggatttggcgggacatgggcggcaaccgccggccatggcggcttcggcctgggaagccgaaggtag

SEQ ID NO: 45871 - DNA, 228 bp, Oryza sativa
  Clone ID: PAT_MRT4530_48794C.1
atggctctattggcaatggaaggaaaaggcagtgctggcttctctgtgacagcagaaggtttttttttggaaagttcactgaggagaccaacatcgagggaagaagatgttagtagcaaaatctttactctcattgagaggatggcgctaggagagttggggcaattttctgtctattttcttacaaaagccataccatcccaagggaggttgggtacatatttatag

SEQ ID NO: 45872 - DNA, 177 bp, Oryza sativa
  Clone ID: PAT_MRT4530_48795C.1
acaaggacacatggggcaaaacttactggagcgcccactgcgagagcttgttgagctgcacaaatggccctctctttgaggggctcaactgccaccaccgtatgtcccttgcaggggcttaagtccactgcaggtatgccaacggcccgactgtccggcagatccagtttatgcaac

SEQ ID NO: 45873 - DNA, 368 bp, Oryza sativa
  Clone ID: PAT_MRT4530_48796C.1
ggccgcccattttttttttttttttttggtccaaattgtagtttactcttactctttaaatataactgcaccacaaaaacacactttgaagctagtagttcattcaatgaagatcattgcggtgcagaaaggggagacgcttgaaaaaaaacacaacggggcaaacctagcacaggaacctagaccacgtaaattccctagggccccccacatataatcgaattttaaacccacattccacgtatcccgggggggtcaggattttccatccccgagcttaaaactgccaaaccttggtttttttcccggcgcccccgccttggaagaccttattttagacccccttgaagggacaaccatttcccggg

SEQ ID NO: 45874 - DNA, 152 bp, Oryza sativa
  Clone ID: PAT_MRT4530_48797C.1
gagacggagggggtgctaatgcctaattaacaatggggacgtggacagacaacttaactaccacggtcaaatgggtcaaaccacctagaaccagtacaaagggaagagcaccccccactaaatcaaagactaattaaaccctgcgtgggggg

SEQ ID NO: 45875 - DNA, 152 bp, Oryza sativa
  Clone ID: PAT_MRT4530_48798C.1
gaatagtaaatgggaatttggttttgacttagagcttgcacaacccaccaaggaaataattttttaagtttgggttttcatttaactatgggcaagagacattgccttttttttaaaattaagagttcaaggtcccggacccaaatattaaa

SEQ ID NO: 45876 - DNA, 289 bp, Oryza sativa
  Clone ID: PAT_MRT4530_48799C.1
ttctccgaacctggagcagagtgtaccgatagctccggtactcctccataatttctcctaggaagctgcactcgtcgaggtagaagtcggatgagtgccaaacttccgggcactcctccagagcttctcctcactctctaccttattctaatgtacaaaagatacaatagagcctcttgtaattcagctcaaagttgtgtgttcttgaagtgagaaggagacctccttatataggttccaaatgacggttaggggcatgggaaatgaccaaaacaccctgcaaccgcca

SEQ ID NO: 45877 - DNA, 582 bp, Oryza sativa
  Clone ID: PAT_MRT4530_4879C.1
ccgacctaaaccctccgccgccgccgccgccgccgccgccgtcgccggggaagaagagagatgggggtggggggaagcttctgggacctgctcaagccgtacgcgcggcacgagggcgcggggtacctccgcggccgccgcgtcgccgtcgacctctccttctgggtcatctcccacagcgccgccatccgggcgcgctcgccgcacgcgcgcctcccccatctccgcaccctcttcttccgcaccctctccctcttctccaagatgggtgcttttcctgtgttcgtggtggacggccagccgtcgccgctcaagtcgcaggtgagggccgcgcgattcttcagaggatctggaatggacctcgctgcgctgccgagcacggaggcagaggccagtgcggatgcgccggttcaaccgaggaatgccaagttcacgcgatacgtggaggattgcgtggaactgcttgaatatcttggaatgcctgtgctgcgggcaaaaggtgaaggtgaagctctttgtgctcagttgaataatcaaggccatgtagatgcttgcatcacttcagacagtgacgctttcctc

SEQ ID NO: 45878 - DNA, 373 bp, Oryza sativa
  Clone ID: PAT_MRT4530_487C.1
gtttaggggacccaataatcccatatgtcctgtcgggaattcattggtgtctccggagaagaagagaaggttgttggagcttgaacacacaagggtttagagtacaagccacgaaacttatccgatagcctaaattaggtaatatttggggatggattttttatcggcgaaaggttagtaattccgttccataaacatccatacgaataaattaaatggaaatcattccctaaatctttcatatagcattaacctctcttttctcttttagaccgccaaatttaaaagcttattaatttctaccacgatttattataaataaaaggagactccaactctcgaaggaacgaaccaaaaaaaaaaaaaaaaaaaa

SEQ ID NO: 45879 - DNA, 912 bp, Oryza sativa
  Clone ID: PAT_MRT4530_48800C.1
ttcgctccaacaaactctccacatacctctctagataccaatggaccacaccagtcattctcctcttcctttttcttcttccatcgtctctccaatcctctccctagtgcacaagagaatgatggcagggcgcgcacggatcttgatgacggcgacgcaagagactgcgggcgatgacggggcgaggcgagacgaggccaaccacgacgatggggtacatcggcggcgacgctactgctgttgttgctcacgccagcaggggaggcggtggcaacgctgtggaggcggtgtctaaggcgtgccactccgctgtcgctccttacggtggcagagtcccctttgactatggctatgacgcgcaactacagacagcccgagtgcacaaccaccgatggcgggcgctctgcttgtggggaaggaaacagtgtggcgagagagagatgggggaaaaagtacgaattaccccccccgaattatcgcggttgtccgaattacacccctaaaccacaaaaccggacattcttcacccccaactatgcaaaccggacgaattacccccctcaacccaatccgcggtggttttggtctacgtggcagtccaagcgcggcggcggtagcggaggaggcgagcggcgggggcggaggaggcgaggtggcggcggcggcgagttgagcgacgggagcggaggaggcgaggcggcggcggagaggcgagcgcggcggcagtgaggcaagcggcgggggcggaggaggcgaggcgacgggagcggaggaggcgaggcagcgacggagaggcgagcgtggcggcggcggaggaggaggcgcggcggcggagaggcgaggcggcggcggcgcggaggcgaggcggcagcggcggcgaggtggttggctgggggacgacgtcgccccttc

SEQ ID NO: 45880 - DNA, 421 bp, Oryza sativa
  Clone ID: PAT_MRT4530_48801C.1
ccgcctaccacgccgcccccgcctacgcccccgcctacggcaaggcggtggttgacgagtacgaccctcacccccagtactccttcgcctacgacatccaggacgctcacaccggagactacaagagccagcacgagagccgcgacggagacgtcgtccacggaagctacagcctggtcgagcccgacggctccaagaggactgtggagtacaccgccgacccccacaacgggttcaacgccgtcgtccacaaggaggctggagcccaccccgtggcttacgccgcccccaagtacgccgcccccgcctacgccccagtcgccaaatacgtggccgcccccgcctacgctgcccctgtcgctaagtacgccgcccccgcctacccagcgtacgccgcccccgtagccaagtacgttgccgc

SEQ ID NO: 45881 - DNA, 1479 bp, Oryza sativa
  Clone ID: PAT_MRT4530_48802C.1
atgaaggagtggatgcctaagcctatagagattgaggagccggttgttgttcaagcggagaaggaaaagcaagtagagaaggatgaacaacgggttgtcaaggatgatttgctgccaaaggaagacatggacatcaacatggtgtgtatgttacctatggagttttgtgctatggatgaggttgaagttgctcaactttcactaggtccaagagatgcggtttttgagaaggccgatgaatctaatcgtcatatgaagtctctttatcttaatggtcatattgatgggaagccgatctcttttgggcgtggagatgatgagttgaagaagaccaacatgactctcaacagctttaatggtgaaccaatggaggcgaaaggtatcttttcagtggagcttaccagggggaacaagacgttgccaactgctttcttcatcgtcgatgtgcaagattgcttttatcttgttcttgcttgtttcttcgatttgcttgcaagaataaggttgatctgcatcggcaagatcaacaacccacggagaggattacacaaggggaaacgagatggtcatgctcaacctcgacttcttcaccatcaacgagatatagcgacttcttcacgcattgcatatgagggagctcagaacattcaccatgaggagaagagcgatatgctcgagatgtcatctccatcgctcacgaaggaagaagagaagactgatgcacctacattatctgaagagggcataaaaggtaaattaaatggtgctgatattactcaagtgtttcattgtgtgctgattttaagcatgatgttcacattgctaatgatgttgaggaacgttattttgaatggactatgtgacgagcaccgtatagaaaaatcgaggacggttttccgtgaagaaggggaggatgatgtgaccatggctactacggatacaaccattgctcacatcatggaagaacaagataacatcaagatcaagtcctccaagtgctggaatccgattcggccacctactacactgctaaattcaatcggccgccgaatctgcatacaacctccgtttttgacccgaataaggttgatctgcatcggcaagatcaacaacccacggagaggtgtatcgatcactaaggcgcaacacaacatctcatacggttgtagtcagatcgtcatgtttctcccaaatcgtagttacctacaactcaccgaaagatcgggccaacaacagctcagggttcatcataaagataggctaaggattcaccgctcgctgctcccagatatcgctttactacgcacccggacaggaagaacttcagtgatcttgagggttgtcaccacctcatacctactgtgggatgcggagaaaacaccggaaatcaactaccgagacactgcgtctaagcagttaataacatacttgaatgttagctacgcactaaagcaatccctatattttagtggattatag

SEQ ID NO: 45882 - DNA, 513 bp, Oryza sativa
  Clone ID: PAT_MRT4530_48803C.1
ggagagagagaactagtttcgagttttttttttttttttttagtagtaatcagtaatcacaaaatagaattagcaagctctcagatgtttcaaaatagacaagcatgaaccaggagcacagaacattgaggaccaaaggagaacaaaagcatttgcaccagcctatatactaattcagccatctttacattaatttagcagcacacggccaattcctccaccttggggacagcatgctccatctcagtcactccagcttcctgcatgtcctgagattgctgaatcatgggcaactcgaaacaaacatatttccagtaatcaactaacttatggtctgcaggtaccacctctgttgccctgcccgcacagaagattgcataagcatcagctgcgtacttgccaacaccacaaagctcagtaatgtaggtccattcttcttcaacatacgccttagagaatctctggattctgtttacttttacacgctgcaaacccagaggagccagatacttg

SEQ ID NO: 45883 - DNA, 168 bp, Oryza sativa
  Clone ID: PAT_MRT4530_48804C.1
aagtatactcctattctacggagtaattggcgggcctcattctaccaatgtaaagatgaagatttgcacaaattagcatagcatttattgttgccaccatgctgctcaatgcatggagtggtagacatgtgaggtgtagcccgatgacaaatttaacgaagagatctt

SEQ ID NO: 45884 - DNA, 249 bp, Oryza sativa
  unsure (1)..(249): unsure at all n locations
  Clone ID: PAT_MRT4530_48805C.1
tccttggctgcagggatgcnctttgagaaagaccacangaggnctcccacgnnnggcngngcgtgcncnggctgcgntgnttgagggggnagtggtggaggangagggcnaggcngtggaagcgcnannaggcacaggagggtncttcgcgacnnctccttgggatcnccanncccncctatccggangctggccangangggcngtnttnatccncntctcccggcttntcttcnanganncccccng

SEQ ID NO: 45885 - DNA, 394 bp, Oryza sativa
  unsure (1)..(394): unsure at all n locations
  Clone ID: PAT_MRT4530_48806C.1
tctagaactagtggatcccccgggctgcaggaattcggcacgagcctctctgcctcacctgctgatcctctggggctcgttttccgacgacatgacgatcactgggatcggcttcagagggctcagcgcctgcaaacatccaatgaagccatgagccaatcacacatcaggcttgcagcagcagcagggcatcggcggcgattatggacggtaatggcgttggtttaagtggtatgattagcagagactttttttttttttttaccttgccttcttccttgaggccgaggaactccatggccttcttggcgctgtcgacggcgattactgcacgaaattgagccgagtttcagtctttcagattaaaaaaaaaaaaaaaaaacgganaactagt

SEQ ID NO: 45886 - DNA, 744 bp, Oryza sativa
  Clone ID: PAT_MRT4530_48807C.1
tccccgggctgcaggaattcggcacgaggattagtccatgctagttttggatatattgatacggtattgtatcgtacgtctgtaacgtgttggcatggccccacgtattatcagcctcacaatgagtgatagtatatcatataatagaaatcaacgggccgccggtgtcggctccaggctcacaaataagtagtactaagaaagttttttttttgttaaaaacaaaattgaatggtcatttcacgtttatggatgcaatgtatttgggcaagacaaagattagcagccttggagagttgggaaaatgttccaagaatattctctttttttttccaaaatacaaagcagcataaaatgttcaataaattttaagtggatgaaaaagtagtggcaaatgtgataaactgataatacatataattccatactttttttaagaaattccatacttttcatacatactagtccgtcctttccctcttatagattactagtactacctagtaccacacacactctctctctctctctcttcgtcccaaaataaatgaaactactccagttagtatggaacgtgacatatcccagtacttatcttcagattcatagtattatgatgtgttacatcttgtattagatttgtttattttggaatgtgagaaatacgttatcacgggcacgcttcctaaactcctaaactgtgtgatttatggaaaaaaacattctatatacaaaattcttata

SEQ ID NO: 45887 - DNA, 503 bp, Oryza sativa
  unsure (1)..(503): unsure at all n locations
  Clone ID: PAT_MRT4530_48808C.1
gggttttgtttttttattttttttttttttttttttttttttttttttttttttttttttttttttttttttttttttttttttttttttagccaatcattaaaattttttgaaaggaacatcggggttcattattttttttccacacatttgggtgggaacaaaaagaaaactttttttttttttttaaccacacccaattctttcccagtttgcttcaatagcctaacttgtacccaaattttcccagccaataacaaacaccaccttccccgttggggatttccacctttaaaaacccccggaggttttcccccccccccttcaaatccccttttcgggaatccggaaaaaccttgaaaattgggtcccccaaattgggggcccccaactccctttaaattccttccaacattttggttaaccccttgaaccttcaccaatttttnnnaacggggggaaatttcccgcaaaaaatttccccaacctttttgggggggggg

SEQ ID NO: 45888 - DNA, 410 bp, Oryza sativa
  Clone ID: PAT_MRT4530_48809C.1
ggcggtggtttggcttgctcacaccacgacgctatgggggggggagaattcatagtgttggttattcatcaaatgctcatgactggaagatcctaatatgtgacattgagccttattcgaataccagttagaaggcaaggcgctcattgagcctgtaaacgacaaaaagctgaaacatcgcgcgggcctgttgatggttggcgtgcgtcacgaatcttgagggaagggcccatctgtacattaccacaagcaccagacaacctggggggaagtatcgatgcttaggcttgtattgatagagtcgtctatactaagcctgcaagcgatcttacacgcgagcattgagtggcacgaattcctgcaatattcggatgacactgactaatggtatgttcttggcaggccccgcc

SEQ ID NO: 45889 - DNA, 343 bp, Oryza sativa
  Clone ID: PAT_MRT4530_4880C.1
ccaccaaaaagagctttttttttgggtaattttccaaaacaagcccgttttacagggggttgcagtccctgcctggaaaatttttagcttgttttttttgggccccgtccccctggggagggggcaaaccgttcgggttgacccccccagaaaaaaaaagttttttttcctgaccgggcgggccgattaaccttgggtgcccccccttgcctgcgtggggattgaaccaccttaactagctttttttttttttccaaaatccgtcccgtttcttttttttttgggtacagaattgggtggggtccacacatggaccccccggggggcttttgtttgcatttaa

SEQ ID NO: 45890 - DNA, 1831 bp, Oryza sativa
  Clone ID: PAT_MRT4530_48810C.1
ttttttttttttttttttttagcaaatcgtttctcaaataaaaactgtacaggttggcttgggttggaccaacacgattcataggtacaccaatcaaaaacacaaagttgttactattacatagtcttagttacaccttacaagtactacaacactaaacaaatagtaaaactctatatgtacggttccctcctctcagacacatatttgtacttctaccaactggtctcatctctcatgagatggtcagttgagcctgcatatctatatggccaagaaaagctgcgatgaatgcaaagcaaatttcttgaaatattggatagatcatcacagtccaaggctgccaatatatccatgaacgatatctcaggtgaaaatgttgccaatgactatggatgctctttggataattggattggctgtcaagtctgcagctcaactcttctaggcaactcaattgaactggcaagatgatgtttagtgacctttagggaccggttaaccgcagatttattcgtcatgcgcttgcctgcttcgacacagctggcaggtaaggagaatctcttatttccttgaggatctaaatgcccagtcctctccttaggattactactcgacctagttccaagtcccgaaggacgagacgaaatttcatcacatccttctctggatgacagtttcagttttgacttagccgatgccgaaccaccagaccggttcgatgaggaaccaccgccctctgagtttggtaggcaggtcttctggttcagtatgtttgaatgaagtgttgaagtttgtcttctaacatgtttcttatgtggagtatagacagcattttcctcgtcttgcattgctccactactaacaggaattccatctgctgcataagagcccaggaatcggctctcccatggacgaacagccatccatctctctagccaattccagccccagctgttcttgtcaggttgaaatgctgtaatggctgcatgttgccttgcttgccactggtgagttagagcataggccatggctcgttcgcgtttggctgctgcctcctgcctctttaatagttttgcttggatatcttccacagatcctatgctatcacaccaaccatcctcgatttcccgcacatgtgtctcatttattttctcttgtagaatagcttgctgatccgtctggctttccaaagcaatgcgcactcgccttgctctaacacgggcttgaaccctcaccaaagcttgcatacacctgagtgttatagcagcttgctttctcactatatgaccccttacaagggcttgaagcctaactagtccttttaaagcccgacgggctctcctagccaggaaggctctaaacacagtctgaataactgtagcagcccagatctccttgagttcttcttcagtctgaggcacaggcacgttaggtgaactaaaagcgggttccgagcacgaaagtgcattgctatcaccttctgatggaccattttcatcaggaaactcttctggtgctccaaggttatcatggtcttgaccgtgctgattttggcagtgaaaatggttagcaccgtcccttttctgtgctactcgcccaccatctccatcctccttgctctgctgctgctgcttctccaccttcctcatcccaaccaacgacttgagccacctcgccgagatgcccatggcgccgcgcccctcaaccgagacaaaaacctaaagcaagaacttctaggtgcgtgttcttcttggcaagaagccccgtgcccgcacaccaccagatcgcggcgagacggggccaagaaaacggtggtcgaccctcgtgc

SEQ ID NO: 45891 - DNA, 437 bp, Oryza sativa
  Clone ID: PAT_MRT4530_48811C.1
ttgagtaccgactttactttatacttgaatcaatatagtcgcgtaactagctttccagataggtgtattggtgtgggtttagtgtccgattattcggatgctctatgtcggttgcaaggatgtagagtagtatttagtaatgtaagcgcggtgcttagattattagataccattaataggggttatatactgcggatgagaggtgggccgctgatggtgacagctcagtacgggtattcctctgcgctggtatataatcctaagttaattccctggggagggtactcctctgtatttagccccggttgtatggtcatgatgggctgtcgtaaggaactcggtagacaggggtggcttcttgaaacaccgagaggacactgggtacggggtattggttacatgacttcagcgaggtccatttcctttgtaaaaagaaa

SEQ ID NO: 45892 - DNA, 1686 bp, Oryza sativa
  Clone ID: PAT_MRT4530_48812C.1
ttgtttcgttgagaggaagccatccagctagctagctataagatagatagaagaagatcaagacgacgaccaggtggaggagaggcatctctcgaagcttagagacaaataattaactagagatcaagagcctattcgtcgtccatggggagcaccggcgactgcggcaatggaaaggcggccgccggcggcggcgggttggtggtgccggagatcaagttcaccaagctcttcatcaacggcgagttcgtcgacgccgcctcgggcaagacattcaagacaagggacccacgaacaggcgatgtcctggcccacatcgcagaggcagacaaggctgatgtggacctcgccgtcaaggccgcgagagaggccttcgagcacggcaagtggccccgcatgtcaggctatgagaggagcagggtgatgaacaagctggccgacctggtggagcagcacgccgacgagctggcggcgctggacggcgccgacgccgggaagctgctgacgctgggcaagatcatcgacatgcccgccgcggcgcagatgatgcggtactacgccggcgcggccgacaagatccacggcgagtcccttcgggtggccggcaagtaccaggggtacaccctcagggagcccacttcggtcccggtgatgtccctcatgaagttcaagacggtggaggaggcgatagagaaggccaactgcaccaagtacgggctggctgccggcattgtgaccaagaacctcaacattgccaacatggtgtcgaggtcagtgcgggccggcacggtgtgggtgaactgctacttcgccttcgaccccgacgcgccgttcggcgggtacaagatgagcgggttcggccgggaccaagggatggtcgccatggacaagtacctgcaggtcaagaccgtcatcaccgccgtcccggactcgccctggtactgataaatcaaatcaagcagcagctatagctagagtgtaccatgtaccatgaatgctgcagcctgtgtagtgttttcggatgtttttctccttaattctgctgctgcttggtgtggttgtatgtagtttggttgtggggtgagatatggtgcagattaaaaggggttctgatgatcatgatctgatccttgtttggttgaacttgttgagaaatggatgtatagaactcatgtgccatcgtttgaaatcgtacaaaatgtgcctcacaggttgacaaggtccaatttgagagggttctcaagtacattgagatcggcaagaacgagggagcaaccctactcacaggtggcaaacccactggtgacaaaggatactacattgagcctaccatatttgtggatgtcaaggaggaaatgacgattgcgcaagaggagatcttcggcccggtgatgtccctcatgaagttcaagacggtggaggaggcgatagagaaggccaactgcaccaagtacgggctggctgccggcattgtgaccaagaacctcaacattgccaacatggtgtcgaggtcagtgcgggccggcacggtgtgggtgaactgctacttcgccttcgaccccgacgcgccgttcggcgggtacaagatgagcgggttcggccgggaccaagggatggtcgccatggacaagtacctgcaggtcaagaccgtcatcaccgccgtcccggactcgccctggtactgat

SEQ ID NO: 45893 - DNA, 237 bp, Oryza sativa
  Clone ID: PAT_MRT4530_48813C.1
atggcaacgggcttgtacgaaaccacccccgatggccaccgtagccgttcactgatccgatgggatcttttcaccaagacggggaagagctccagggcccaggcaatgcgagcaagacggcggccggcggcgttgctcccagatctggatgaaaaagcgaaggagcggcagctctacaactccactccagactcaactcctggagttaaatttaggagttggagttctaccaaatag

SEQ ID NO: 45894 - DNA, 1891 bp, Oryza sativa
  Clone ID: PAT_MRT4530_48814C.1
cggcggcgtgggcggacacagccaaaaagcggcctccgcttagctagccgcagctgaaaatctcctcctccatttcgaagcagagcagagcagccgccgagtgtttgattgctgcagtgtgtctcggcaaagcgcgacggcgacaatggcagctcgtgtcgtggtctaggaggagggagcaggagcaggagctgcgtgcgtttcttggtttcttcttgtgcgtcgcctcgcgcattggggacgacgtgaggtgatcgggcgaggaggaaggaggaatggcgcgcgggaaggtggtgttgatggtcgtggtttgtctcgccgtggcggcggcggcggcgtcggcggcgagcggtggggggcacagtcgcggacgcccgggcaagtcggcgaggctgcagctggtcccggctgccccgggcgcgtcgatggccgagcgggcgagggatgacaggcggcggcacgagtacatctccgccaggctcgcggcgtcgcggcggcggcggcgagcggaggagacctcgtcggtgtcgtcggccggggcggtggcggcgtcggcgttcgctatgccgctgtcgtcgggggcgtacaccggcacggggcagtacttcgtgcggttccgcgtgggcaccccggcgcagccgttcgtcctcatcgccgacaccggcagcgacctcacctgggtcaagtgccgcggcgccgcctctcccagtcacgccaccgccaccgcctcgccagcggcggcgccgtctccggcggtggcgccgccacgggtgttccgtcccggcgactccaagacgtggtcgcccatcccgtgctcgtcggagacgtgcaagtcgaccatccccttctccctcgccaactgctccagctccaccgccgcctgctcctacgactaccgttacaacgacaactcggcggcgcgcggcgtggtgggcaccgactcggcgacggtggcgctctccggcgggcgcggcggcggcggcggcggcgaccggaaggcgaagctgcagggggtggtgctggggtgcaccacggcgcacgccggccaggggttcgaggcgtccgacggcgtgctcagcctcggctacagcaacatctcgttcgcgtcgcgcgccgcgtcgcggttcggcggccgcttctcctactgcctcgtcgaccacctcgccccgcgcaacgccaccagctacctcaccttcggcgccggcccggacgcggcgtcgtcgtcggcgccggcgccgggctcgcggacgccgctgctgctcgacgcccgcgtccgccccttctacgccgtggcggtcgactctgtctccgtcgacggcgtggcgctcgacatcccagccgaggtgtgggacgtcggcagcaacggcggcaccatcatcgactccggcacgagcctgacggtgctcgccacgccggcgtacaaggcggtggtggcggcgctgagcgagcagctcgccgggctgccgcgcgtggccatggacccgttcgactactgctacaactggacggcccgcggcgacggcggcggcgacctcgccgtgccgaagctggcggtgcagttcgccgggtcggcgaggctggagccgccggcgaagagctacgtgatcgacgcggcgcccggcgtgaagtgcatcggggtgcaggagggggcgtggccgggggtgtccgtgatcggcaacatcctgcagcaggagcacctctgggagttcgacctcaacaatcggtggctcaggttcaggcagacgagctgcacccaatgaacagtctattgatgcagatattattcaattattgtaattggtgattttgcgatcgtattaattaaaaagtgttaatgcaaaaaaaaaaaaaaaaaaggacggccctcgcgatctagaaccggacgcgtggg

SEQ ID NO: 45895 - DNA, 198 bp, Oryza sativa
  Clone ID: PAT_MRT4530_48815C.1
atgcgacggcagtggcacggcaaatttgcaatggcatggatcctggtggtcctcctcgcgtcgttggcgtcgtctggtcatcctcctcgtgtcagcaccactgtcctctctccatcctcgagctgggagcccatccgtcctgctcgcgtcgtcgctatcgtccacttgccatcagaggaggaggaggaggaggtctag

SEQ ID NO: 45896 - DNA, 303 bp, Oryza sativa
  Clone ID: PAT_MRT4530_48816C.1
ctgaagcaaatgaggttcttgatcatggcagccatcaggtgggtggttcttgcatacattgtcgtcatcggatgcgccactattgcgcgtggcgatgagcagccactgtcgaggattgcgatcgagagggcgacggttgctgctgttgattcagccagcgtgaaggctcaaccgacagttcttggcctgaagttcagtatgcaatatcaacatgctgactacacagaagtggcaagggatgctgaggctgaattgatcaccagaggaagactctcattcggtcttttcggggcttctgcgtag

SEQ ID NO: 45897 - DNA, 863 bp, Oryza sativa
  Clone ID: PAT_MRT4530_48817C.1
gctcccacccggggatcgagtgtaaaagactcaactcaacgcagacctgcaataggggggattccggcaagattttcagtcttggctcaacctttgttccgtcgtagttggggattgtccttacctttgcctggggctaaaacgatcatttccatggcacgacaagctcgctatcaaaaccttttagggctcaatccgagaactgaatcccgcagtctaatttggtgtcgtcgtttctccgttcgtcctaattgccttgggcttttgtatagaaaaaattgctttgaaaaaactttagaaccgggtatttactccttttgggattttcgctcagaattggaacttttcctgattccccgttctgaccagttctttattgttacaaatcaagaagtattaaccaaagataatattcctctacgtttttcttacattgtcaattatagaattacagacggtcagaaattgttgacctatattgatcctgcccaaatgggatacatcgaagggctagcaagtatgattcaaactctgattcatcctctaacccaaatttattggcgtagtgctattagtgtaattaacagccttgagcttaatgagcaatgggaagctttcatccccaatattccggatgaattgcaagaatcagcccaaaaatttggggttatgattgaagcaatgaaattaagggatattacttttcccaaaaatatccaaactctttttgctcttcagttagaagccaaaattagaggtcaaacggatttggaaaatgcccgcacagaagttgccaccgctagggcgttaaaaaatgcttcccaattaataggagatgatcctctagagtagacctgaggcat

SEQ ID NO: 45898 - DNA, 461 bp, Oryza sativa
  Clone ID: PAT_MRT4530_48818C.1
atcaaaaaaacaaataatacgtaattacacgggaaatttcaaataccagttctcaattaacatttaccacattgttttaattcaccaataattagcacacacacaaactactctgatatgttaggtttaattaatatcttcttcaaatattccttcttacggatggctccatttttatcatctgggcctagtgccttctcccggagctttttcagtttctcccttactttacttttgttcttttgcctgaatatgtttttttttttaatttctaaatttattataattttttattatttctttaattttctagaaaattatttaaaaattatttttattattcttttatattttataaatttcttttaatattctcttacaatttctcttattatatattttataaattttattctaatatttatactctatattattatatcttttcattttattttttt

SEQ ID NO: 45899 - DNA, 1602 bp, Oryza sativa
  Clone ID: PAT_MRT4530_48819C.1
gcgcggggccccgggctgctggcatatccccgtgtgcccccgcaaacgcgccatggccgccgcggcgcccgcgctgccggcgttcgcctcgcttctcctcccctcatccagctcgcctccccgccgcatcccgtggccccgccctctgccttctcgccggggcgctctccgccccgtcaagctgctccccgccatctcagctgtggagaagggcaagggcgccgccgccgaagccaaggaggtggagctggaagggatgccgccggagtactacgacgaggaatggcaagctcgtcagcgggaaaagactaaggaatggaatgcatatcggaagaaagaggaagctgaggaagaaaggctaacaaatgaataccgtgaaataggcatgcgtttgaaagcttacccacaggaagaagttcgcaaagctcggattttggtttcaagttttataagagctggtgaagatattgaagaggaaattgagaaggctgctgaaagaggagagcttactgaacttgttcttatggtcatatggaatcgacttgatgttgctcgccgcgatgatgagagggatgccatcagaagccttgatctcttatacagaagggtagagacggaaattttaaggagtgaagcaactcctgctatgagattgctcaatgaccttctgaatcttcatgatggatctgatgatgacaagtggttaaagaaatgtaaaaaacatatgcttgaagtttttcccagagaagacccgttcaccatggtctttcctgctggtttcaacatggaggaacatcaaggacagatcaagctgccacctcaggatgatgatgttcttctaagagttgatttcatcagggaagttgatgagctcttgaaggaagttcaagctgcacatgaaaacaataaggtcccaactggtaatgacccggaagctgttgcgaccaagttgaagtatcaagagaagctgcggaccatacgtcaagtggaatctctcctggaactggcatcctccctgaaatggtgaggattgagtttgcagaggaccatgaaattctgcgcacataggactagaagttaccggctgagtacttgatagctgcaattagggtgcagccttttgagctgattctcaggtttctgctagttagaaactcctagcatttgaatacaaaggttagctgatatctgcttgggcgtcaatgcattttcgtagaatattttctgcacctgggtgtccaactcctattagatttgtactgctctagtcattcagagttcaactgtaactcaagcagtgaggctttgctctggattaatgtatcatcatgagaatggtgtgagggtatctcacacgctcaagctctagcatgaggcagatgagtttcaagccaacaagctgtgtctctagtgtgcataatcgagatgcagagatggttgagtacttgagttctgaagttcccaagtcaaatactgtgtaaagattttcgtttgaaggaaaagaaaacattgaatgtaacattagtacaataacttgtaaaagtttttttttgtatggagcatgtgaaaatatctggaacaatccatggtttcaacagtagc

SEQ ID NO: 45900 - DNA, 553 bp, Oryza sativa
  Clone ID: PAT_MRT4530_4881C.1
cgagatcctccgctgtcggccatgtcccgtcgtcgcggggtcgtctccgtcgcagggttgtctgtcgtcgctgttgagggtggaagaggaaatttgtggtcggagctgtgtccacgagacacacgtctagccaccgcgcgtccacgcgtagcctggcgccgtggctcagccaaaagcgactgaggaacgcatccccccgcgagcaaacgcgcgcctacgcggggggacggctcaggccgaaaagcaaacggtacggcgacgccgtgagctaggggaacggctccaagacacccattgcttatgctctaaggctagtttcactgttcccgcgacagaaaaaaagatgtttggacaaagatggcttcataaacagaatcagataatttcttccaaatcacgagtaacatacggcattcggcatattttattcataaatctggagcacgacaaacggaaatagaaactaagtagcttcaatattcaagaatgagcatgtctgattgcatgacaatctgcaggaaatttattccacaaacaacaaaaaaaaaaaaaa

SEQ ID NO: 45901 - DNA, 810 bp, Oryza sativa
  Clone ID: PAT_MRT4530_48820C.1
gcacgaggatgctccttgctagctgaactacacactacgcaggaatgccaacccgtccgccggcaccttcagggagatactgcgcattgacagtggggcaatgctggtaaccaacattggagcaccattttggtgacgctatcctcatcgacctccgaatcgaccacaaacccgatctctctcgcgaatgtgacgtcgatgttctgcgtattaacatatattactaactaagctagcggtggcaggctccatcgacccgctcctctacatggtccctcatcctggcaccatgctctgggagctgctctctgccgttccgtcagatcatgcagcacgcaactgagctttacgccagcgtgcgcgccgggagacaatgggaagaggggctctacagcgcgcgcgcagagctcatcgactaggacctcgagtacctcgcctggacgtcgagcgctgacactgcatgagcgatcgcaagactaccactgtgctatacgacgaactgcacctggtatccggaccacactaatctcaggtatccaggacggaggcccaggccatgaactacacccacttggagttcgcctctgacttaatggaggtgatctcgctgtgcgacgttacaatggctactgatctggctatcagccgaagaaatgctgtcgagagattgcactcgtcattgaagatctatatcacacctgctacctcactgtgaacagggagcccctatgctggagactctaacctgctgttctgcactatgagagctgtacatgatagctagaatgcctcagcagcttaatctggcta

SEQ ID NO: 45902 - DNA, 587 bp, Oryza sativa
  Clone ID: PAT_MRT4530_48821C.1
ccaataagcacgctggatattgcccttcaaagttcaaaccaacacttcagcatggttcttctttccttgaccagaacaagtgtagcgaagaacaaaaacgcattcaacaacaggcaatctgcataaacttatacatcatgttttctttgttgcccattgagaggcactcagcatatggtacatcatccaaattgccggtcaacaagaaaacaaaaccctcaacctcggcacacgcgacagtgtctttcgtcctactatcttcaaagaatatatcttgcaccggacaaaactatatccttccacgtatagggagcctgacatttatatccttcatgttagcatttgatgttggtgttagtgttcaggcaggctcgagaccatatcatgtcaaccaagattggttgatgtcccactcccaaacaatgcattgtctgctgttcaagctacaacatccgaagtgtcaaaactgatcatcccaaccaaccaatccttgcagtttcatgatccaccctctccaaacgaaggaccaatataactctgttggacagtcaaaaaactgtctcaggcgcacatcccttgtgttatga

SEQ ID NO: 45903 - DNA, 197 bp, Oryza sativa
  Clone ID: PAT_MRT4530_48822C.1
ctattccactgtatataaattagctagtaaggtataacagggcagtttgaccaaaggaggactatttttcagcgatgtatttacacaagaaagttactatgcgctgcagaaaccaaggaatctgtagttaatgccaattttgacccattaagtgacccacaagataaaatgttggggtacattttagaatggatctc

SEQ ID NO: 45904 - DNA, 1843 bp, Oryza sativa
  Clone ID: PAT_MRT4530_48823C.1
ctagatcgcgagcgactttcctttttttttttttttctcttcattgattgggcgtttttttttttgctaatcatttcaatcaaacacgtaccatacaaagcatcacgcgaaaacattaaagcatctaatctagatcaacctaagtagtaaaaatctactagtagtgaatcaccggcgctaggttgcgcttgtacaagcttctcctccggaagaaatccccgaacttccttaggatcgacctcctcttcttctgcttcatggcgtggtccaggtcgccgtactgcccgccgtcgaagtggtcgaactcgtagtcgaagtcgtccatggccgccgcggccgccgccgacttgagctcggcgatgttgctgagcgacgcgaacatccggtccttcctgcccgccatcaccctgttggagtccaggaatgtggcgctgagcttgccatgcatgtcgcccctccacttgtgcagcgacgacaaggggtcggccgccgccgcgagctcgccggcgccatgaccgtgatcggcggccttccgtgctgccgcgagctggccgtcgagctccttggcgcgcccgcgcgcctcggcctcgctggccttgaggctctcgttctcctgacgtagtgcctccatggcgctctccttctccgcgacggcgtcctgcagcttggagttctcgccggtggcgagctcgagcgactcgttcgccgcgttgacctcctcgacggcgcgctccagagcgcgacgcaggctgccgttctcgtcgtcgaccacccggtgcagctcggcgagctcgacgttctcttgcccggccgcgtgggcctcgtcctcggccgcccggacgcgcgcgagaagcaccttctccctggcgcgccacgaaacggcggcctccttccagtccgacgtgaggccgtcgagctgctcggtcgtcgaccacagctccgcctcggcggcgtgcagcgactccctgagccggtcgacctcggcgttggcgtcctccagctcggcctgcgcgtcggacagccacgccttcacctgcttggcctccatggtgacggcggagagcgcggcggtgaggtcgtcggccgccttcctgctcttctcctccgcctgcacggccgcccggagcttggccctcagcccgttgatctcctcgtcgacgccgccgaacatgaggtccatgacgctccactgggcggcggcggctggctcggcggcaggggcgcgtccctgctgctgccgcagcgtggcgacctcgagcttagcctcctcgagagcgatcttcgcctgctccatctccttcgtctgctgtatcagcgactccagcatattcatctccgtcgccttcgccgtcgccacctcccgctccagcagccgcacccggtcgtcggagcacgccgcgccgccgcccaccacttccttgtccacgccaccgtcgctctgccgcaacccatcgacttcttgcagcgtgcacgacgtcttcttctcctccatctccatcacgacgccgccgtaactctgcaccagccagtgcgtcacctcgggagacgacggcgagaagatggtggcgacggatttgctgcgctcgtggcgagacctcggcgtggacaccggagaactccgcgtcccgcctccccaggacccggataccggccgtcgtgtgcggatgtttatccggcgcctgttcccaggctcgtgatcaacctcgttaataagcctccgagctctagctagctgccacgacgacgtgagcatattatttttcctgtagagcctcgccctcgcggccgacgacggcggggcacgcgcatcaccgtagtcgtcgatcgcgagagacagcgtcat

SEQ ID NO: 45905 - DNA, 335 bp, Oryza sativa
  unsure (1)..(335): unsure at all n locations
  Clone ID: PAT_MRT4530_48824C.1
atggaacagaagaccggnacacaacagcacacgaagaacgaggggacgaaagaacagaccccgcacgaaccaacaccacggagggagaccgccacaagcggacacagaacagacgaacaaacaaaacgcccaacgagaaaggaaggcgcgagcgcgcagcgacagcgggggaggcgaagaccacgcaccacggacaagaaaaccagcggacaaaaagagaacacaccccgccgacgccgcccgagcgaggacaacaacaaccaaaaaccagaccgaccacgcggcgcgaacaagaccgcgaacaaaaaacaaagagagcacgcggcccacggaaa

SEQ ID NO: 45906 - DNA, 787 bp, Oryza sativa
  Clone ID: PAT_MRT4530_48825C.1
gcgcgcgggtcgcgtccgccgcccccgccgcggccctgggagcgccagcctagatcaccggccacgagaccaccacgagtccacgactacttgaggatggcgagcccaacaacaatggtgggagtggcaacctcggcgcatctccacaccaccaccaccggccgcctcagctgcgcctgtgcaccaccgacgaggggaacaaggcggcggcggctcgcggtggcggtgcgggtgcgggtgcgggtgcgggcgtcggcgtcggaggcgatggcgacggagaagctcggcgtccgtgtggagcgcaacccgcccgagtcccgcctctccgagctcggcgtccgcgagtggcccaagtgggggtgcgagaagagcaagttcccgtggacgtactcggccaaggagacgtgctacctgctgcaggggaaggtgaaggtgttcccggacggcgccggcgaggatttcgtggagatcgcggcgggggacctggtggtgttccccaaggggatgagctgcacctgggacgtcgccgaggccgtcgacaagcactacaagttcgagtagatttggggatttggcacgccaatcgatttcagccatatgacatggcgatggtttgtgcttctgctatcttctactagtaacttagctcgtgctcttatgcgttatatgctccagttgttgtggatcatctcctgcaaatgaaataaaacttgattagtggattaaaaaaaaaaaaaaaaaaaaaaaaacgcgagactagttctctccctcgtgaaccccaagcctt

SEQ ID NO: 45907 - DNA, 832 bp, Oryza sativa
  Clone ID: PAT_MRT4530_48826C.1
gcacgaggggtgacctcacctctcttcctcgccgccggcgcccgcgcgtcatcgcgtcgccgtgggggccatggccgccaccgcactccaactcccagtggccagctcgcaacgtctgacgctgaggcgtttccccggcagcggctcgttgggtcggtactctgggttgcggtggcccgtcgcggcgcaggcgaggagggcggcggaggaggggtttcgtctccgtgtcgcgttcaacccctccgggaacttcgacctctccctctccaccgaccaagacgatgccccacaagttgagcctccaccaccacctacagaaggtcgctttgagattgtcatcaacaccgatatcatccggacgctcgacctttcgcctgttcatgaagtacttggtgacttgaattccctgacaccagctcaaacaagaaatctcttggatcgaacggtcgggtttactataaactatgagagggaggatccatatgatgtgagggagctgtcagagttccctgatataaggctatggtttgtgaggcttgatgcttgttacccttggttccctgttgtgcttgattggagagctggtgaacttgccagatatgccgcaatgctggcccctcaccagatgagcatgaggcttggtgtggtcttcaacccggaggcgctggagctgtttgtgatgaagaaggtgttcattgtttactcatggctaaagcagcaggaacatcctaaacctggactcaagacggctgacatggccaggatgcttggtttcggtataggagatgaattattcgacttgattgagaagtatcctgctggtccttcatga

SEQ ID NO: 45908 - DNA, 336 bp, Oryza sativa
  Clone ID: PAT_MRT4530_48827C.1
atggcggggagcaccgggaagctgctccggcgggaggtcaccgagatcgtgttcacggtgagcaacatccgcgccgtgctccagcatggagccgggcacctcgagctgcagcggctcggcgccgagctcggtggtggagcgatgctcggaggaaggcgatcggggcgccgccaacatgtttctggctttggggccggcacagcatcagtggcggagctcgcgaaggagaaaggtggcagccgacggggtggcggtggttggcagtggatcctcggctcctcgccggttgttgcttccgccactggtggagagatggtttgtagtcccggttggtaa

SEQ ID NO: 45909 - DNA, 519 bp, Oryza sativa
  Clone ID: PAT_MRT4530_48828C.1
cgtgtggcgggtttttttttttttttttttttttttttttttttaaaaaaaaggagggacatcttatttgttccagtgaaaaaaacagagaaagccacaaaaaggagggacatcttttatcaaacatcaaatgtccgcgtactctactacatgcatgtagacccaaacacactcgggtgtgcgctggcattttcttaaaaatattattattttaataaaaagtcacaaaaacaaaagttggtatccggatttatttgcaaaaatagggacctgttgaactagcttagtttgacaagccaggcaatcgaatggagcgcattccacgggatcctatcaagtggagcacattcgacgggatcctgtcgatccagccctgagctcgtgctgctgccgtcgtcatcgtcatcctcgcagtctccaccatgggcgtcgcctttcttgccattgtcatggcccaccccactgcctgtgtgctgcttgctgccgctttgacccctgcttccctcccactgctcctca

SEQ ID NO: 45910 - DNA, 1599 bp, Oryza sativa
  Clone ID: PAT_MRT4530_48829C.1
atggctgtgtggggtgggttggggcaggcggcgacggtggcgcagctggtcggcgcggacgtcggcgggctcatctccagcatcatccaagcggcagcgacggctcggcagaacaagagggagtgcgaccagctcgcccgccgcgtcgtcatgatcgccgacctgctgccccacctgcaggacccggaggtgatgcggcggccggaggtccggcggccgctggcggagctcggcgacacgctccgggaggctcacgagctcgtggcctcctgccaaggccggagcgcggcatatcggttcgtcatggcggggcgcctggctgacaggttcagggacgtgcagagcaagatcgactcctacctcattgtcttccctttcatcgcccacatcgacatcacccgtcgcctcgatcagatctacagaattcttgctccaaacgatacggccgcagcatcatcttcttcatctgcaggcagctcacagtcggatcaaatctacaacattcttgtttcaaatgatacgaccgcagcatcttctccttcatctgcaggctccctgcagtcaccagatgcgctggagtttgcacggatttctcaaggagatggaggagaggagttcaccgtgaaggagctcgtggcggcgaccaacaactttgccaacgagatcggcagaggcagctccggcagcgtgtacaagggaaggcttcgcgacgggcgggaggtggcaatcaaatccttggtaaagacatcgccggaccatggccgggaggaatctctcatgagggggctcgccattctctcccgtctccgccatgaccacatcgtccgcctccttggcttctgcgtggtaagggagaagaagagggagagcacgctgctgctatccttccggaagaaaaagaaggcggcggcggagaggcaggctggagagctccttctcgtctacgattacatggagaatggctcactcgccgatcagctgcatggccacctgtcgtcgtcgtcgtcgtcgtcgccggtgatggcgtcgtggaagatgcgcatcaagatgctgctcggcgtgtcgcggggcatccagtacctgcaccacggcgccaccacgacgccgatcatccacggggacatcaagctgtccaacatcctcgtcgactcgagctgggtgccgcatttgacggacttcggcgcggcggtgatcaacggcatggagcgtccgagcaccgtcgtgcacggcacggccggatacatcgacccggagttctacagcacaatgaatcagacgcggagcagcgacgtgaacagcttcggcgtcgtgatgctggagatgctcacgggcaagaggccaattttcatcgatcggaaggaggagggcgaggtcaccaacttggtagccttttcgcttccaatcattgaagacggcgagctggggaggttgctggacaggcggccggcggagccaacggcgaggcagctcgaggcgttggaaatggtggcgcggacggcggcgcgctgcgtgcagctgcagcggaaggagcgaccggcgatatcggaagtcgtggccatactcgagactgagcttgatctcctccttcgcgatgggtag

SEQ ID NO: 45911 - DNA, 428 bp, Oryza sativa
  Clone ID: PAT_MRT4530_4882C.1
gcacgagggattcctctagttaaattccctactgatttcctaccttccaaaggaaccctaaactgtgtacacatgataagtttctgattataatcattattttgttctttcctaacaacctcatagtctctgaagtaacattggaatgtaacctgccatgtaccagcacgcagggcctttagttttgattaacatagtacaatgttttattttcgcctatttctattaaaattataaagggtttgtttggagagtttctaacaagtgtaatttttttcagaaccaaacatttttttcccaaatagtttagattttcatccagaatttagggaactgcaattacataatcgagaaaataaatcaggaggcagaggcaagaaacgtatatacgaaccggtatgatactagctacgaactatagttgcttc

SEQ ID NO: 45912 - DNA, 388 bp, Oryza sativa
  unsure (1)..(388): unsure at all n locations
  Clone ID: PAT_MRT4530_48830C.1
nntcctcctcctccgccgccgccgccgtcgggaagtacacctgtgctctggttccggcgacaccgcgagcaaggagaggagaggtgggggtnagggagtaagggtgaggccggggttgggcaccaccagcaagccagccagcccccccgtccccttagatccgggccgggcgttctccggcgatctcacggccatggcgtcccgcgcctcttcgcctccctcctcaggtccaccgcggcgccgcgcaccccgtccacgcccggntgcctcttcaaccgcgccgtcgccgccgcctactcctcgtccgccccctanaacggccagggttttccacttnctcagtctgaaactgcttcacgtctggntttgttctccagtcccggcgaca

SEQ ID NO: 45913 - DNA, 348 bp, Oryza sativa
  Clone ID: PAT_MRT4530_48831C.1
atggagaacgcgaccctgtcgaactgcgccagttcggcggatatcctatcgaacaggggcagttcgacagctctgcctgtcgaacgggggctgttcgtaataaatggagaacacgaccctgtcgaactgcgccagttcgacggatatcctgtcgaacaggggcagttcgacagccctgcctgtcgaacgggggctgttcgacaggtcctgtcgaacggcagccttccgatctcctcgccagtcgcgctctggccgttcgataggcgccctatcgaactgcacccgtcgccagggacctactgtcgcgattttccccgggttgacccctacttttgcgattttccataa

SEQ ID NO: 45914 - DNA, 396 bp, Oryza sativa
  Clone ID: PAT_MRT4530_48832C.1
atgagccgccaccgccatgcgccgccaccgccgagcgctgctaccgtcaccggactcactcccggtctgcaaggaggagctgccgagagggaggcgcagtcgctcggcatcctgctctccaccctcgataacctcgccatcgaccacccacgcatcgacctcgccatcgacggcgccaacgaggcttccattgctgctttcgacgtgggaagggagaaagcagcagcagccgcagagttcgccggccggcgttccttcaagacgatgccgttgacgaacggcgattcttcggccgacacaaccacaagaagaaatgctgaggacttccttgtgatcctgttgaaggtccctgagtgctcactggaacttgattgcggcatggcgaggtctgggtaa

SEQ ID NO: 45915 - DNA, 363 bp, Oryza sativa
  Clone ID: PAT_MRT4530_48833C.1
atgggtagacccgatggactaggaaattctcgtgggggcggcaccccagacatggactcccctcactttcggttcgaggtagggattgtgtgtcggggtgcaatggaggctcatagtccttggagcgggtgccgcaacgcgagagtgactgaaaagttgggaagtgacaagtctcatgtgttgggtgcatcatggagtgcgggattaaaagcgtacatccactgcagtgtcaaatatggtaaacaatatgaatctggatgtgagggtaaacctgaccaagcgaggctcgggctagacttagatgatgtggaagtgccgctcgagactactcccgaggaaggagaacccgaggagatgccctag

SEQ ID NO: 45916 - DNA, 1322 bp, Oryza sativa
  Clone ID: PAT_MRT4530_48834C.1
ggagctagttggggttagcggtgtggaagggtcgaaaatccttgcagacattggattggatttcagtggggcggacggcggtgggcggggcttcttgtaggctgggctgtaccagagaggagccaagacggcggcgataacggcggcaccggtggcgacggcgccgtcgccgtcggagctgtcactctgtcatacaaaaactactaccttcgatgtggttcgggcgctgtcgatggggacatgccttacgacggcggagcagcgggccatggaggtgccggctgcgtcggtgaagggaggagggggcaggaggagtgacgaggaggcgcccggcaggatcgcgggtaacggcgcggggaatgtggcctgcctgttcactcggcaggggaagaagggcaccaaccaggatgccatggtcgcgtgggagaactataacggaagatcagacacggtattttgtggagtttttgatggccacggtccacatggccatctcattgctaggaaagtaagagatattctcccttcgagactctgtgatttgatatatgaagactgtggggatagtccaaccagcaattcagatgtctcaactctggaagagaatttatctccgtatgcagatgcagagtgcagatctcccacattggctggacaaaaagaacatcaagaattcttcaacgcaatgaaagaatctttcagaaaggcttttaaaaatgtggataaggagctcaaattacaacggaacattgatagcatttgcagtggaactactgcagttactttaatcaagcaaggtcatgatcttattgttgggaatctaggtgactctagagctgtattaggcaccagagatcagaacgataagttggttgctcatcagttgactgttgacctgaaacctgatcatccaagggaggctaggaggatcagacggtgtaatgggagggtctttgctcatcaggatgaaccagatgtggctcgcctttggcttcctaattgcaactctcctggactggcaatggcccgagcttttggtgacttttgtctaaaggattttgggttgatctcagtacctgatgtcacctataggcaaattactgaaaaagacgagtttattgtcctggcgacagatggggtgtgggatgttctctccaaccaggaagtggtggatgttgttgcctcatgctctggtcgtttcgctgcagctcgttctgttgttgatttagcaaatgagacttggaggttcaaatacccaacctcaaaaactgatgattgtgcagtggtctgtcttttcctgaacaagtatgaagttaccggtg

SEQ ID NO: 45917 - DNA, 249 bp, Oryza sativa
  Clone ID: PAT_MRT4530_48835C.1
acagaaagacgatagcaagactctgttgattaaacatactgggaatggcaccggagcgtgatatcccacaaaacgcgacactgattcctgcctagacaactaaaagagcacttggtcaaaatgttgattgcccaccggattcattgtgaattgctcatctcacgcacaacctgtcctgataatgatggctgtttttattggaaaatttaagtcatgaacgcacaccatgatgaccaattgactgcctac

SEQ ID NO: 45918 - DNA, 175 bp, Oryza sativa
  Clone ID: PAT_MRT4530_48836C.1
aaatagcatgccgtttatgtcattcgatcacattggctgacagatacagcatgatgaccagctattttcaacaagatttgcccggagatgacagcaattgtaggaggacatgaacggggtgacacgctctttcgcccatgaatatttttttttctaaaaaaaaaaaaaaaaaaaa

SEQ ID NO: 45919 - DNA, 1324 bp, Oryza sativa
  Clone ID: PAT_MRT4530_48837C.1
ctgcaggaatcggcacgaggcagatccacgcgtgttgcggacttgcggttgcttttgttcgtcttctcccggagattcggcgtgttcgtgctgcgaaatccgaactacttctgctgctaagatttctgccgcgtgctaatggcggaggaagggtacaaggttgttcttaacgtgtacgacctcagcaacggcctcgcgcggcagctctccacctccttcctcggcaagccaatcgaggccatctggcatacgggcgtggtggtgtacgggaacgagtacttcttcggcggcgggatccagtcgctggcggcggggaggacgccgtacgggcggccggtgcgggtggtggagatgggcgagacgcacatcccgcgggaggtgttcgaggactacctccgcgacatctcgccgcggtacacggcggagacgtaccggctgctcagccacaactgcaacaacttcagcaacgaggtggcgcaattcctcgtcggcgccggcatccccgactacatcctcaacctccccgccgaggtcatgtccagccccatgggccccctcatcatgcccatgattcagaacctcgagtccacgctccggaccaacgccgcgccgcaggccacgcagttcgtcccctcgtccgtgccgccgccgccgccgccgcagaacaagcccggcgagggctcgtcttcctcgaagcaagaagacaaggcggccaaagcgaagcagggctcggcggctgacccgctcggcggcgcgagggggaaggtgcaggaggaggtgatgcgggagttcgcggcgatcatggcgagcgggacgctgcgggcgagcgaggcggcggcgctggcgatgcggcgggtcatggagcggcacggcaacgccaccatgcagcagagctagacgagagagacacacacaccaccatacattcgacgcgatgatgcgtgtcgcaatcgcaattaccgagtttttacggagtagttaacttctttatgaatgagaaggtgatttctgtagcgtattgattgtttgttactgtgtgtgaacctggactgttctgcttaaattcgataatctttctcttgtctactatccgatggatggataacgataacccattctccattattgaatagacaaagcatgtttgtggtgtctggtgatcagactgttaactgtgatagtactattgttgatttcattcatcgagtcttttgtttgtcgatgtttagggccctctagccaacataatcaatttttgcgatgtcaaatttttgagaatctgataaaaaaaaaaaaaaaaaaaacctgcagcccggggatccac

SEQ ID NO: 45920 - DNA, 180 bp, Oryza sativa
  Clone ID: PAT_MRT4530_48838C.1
atgagcatcgccgagaccggagattgggccgccgccgacttcggtgaagatggcgtgccggtggccggtgttgatcctgacccagaaccggaagaagatggtgcgggtgctgcaacattgatgcagaatttagatggtgagttggttaccccacagaaagtttgttcagttcttttttag

SEQ ID NO: 45921 - DNA, 451 bp, Oryza sativa
  Clone ID: PAT_MRT4530_48839C.1
gcacgaggctggtgccgccgcctcccccccgcgcggctcggcgcggggggcgccgtctcctttcactcgccctctctccgcgggatggcgtgaagcgtcatctcattccccggccgcgccctctcgccgcagggagttgccgggactggttcgtcacctctgcgacctggcaacctgacgatctgctaccacgcattctactcctccccaggtcaactttacactccctttgcctaatcctcttaatcaatatatatgatcgatccagcctgcttgcttgcgctgattccatatttgctgttctactcctctgctgaagccatcagcagacacaatttggtacactactacttaaatccctattatatgcatatatacatatctgttctagcccctgatctctattcttgacttgctgctcattatgagtttcacatgattggtaggaagg

SEQ ID NO: 45922 - DNA, 243 bp, Oryza sativa
  Clone ID: PAT_MRT4530_4883C.1
atgggccacccgcgccttcaggccggcccggcacggcccgacggctggtgggccgtgcctgggcgggaggcgcagcccatggacagcgcgcagcacgcacgcgaaaaggaagacgacccgttgtggtcgaacagggagcagtcgcgcgaagcgcttcccaaaaaccttattgctgtcttctcccggtgcaggacgtcgaaggcgaagttcacggactgtgccatcaccggcctcgtcaagtga

SEQ ID NO: 45923 - DNA, 1062 bp, Oryza sativa
  Clone ID: PAT_MRT4530_48840C.1
atgagacggtgtatgcattccggcgttgcaacggaaacccgtatggaagctcgcggtggactgaaacttaacaggggtatgcatccccgcgttgcggcgaaagcatgtatggaagctcgccgcggactcaaacataacagatgcagtacctccacgagcttgaaagaaattattagcactaatttgttgatcctggtggcactatcatatctagttcatgctgtcagtgcgcaatcactagatgaaccattcagggggactggagcagaaatttatgaaatgacatacgacctcaaacaggatcagcaggcttcatttattgttagcttcattgactgtgcaaccaaagaatctgaatttcacttagggaccctgaaggttcttagaaatcaaacagataccgatcgagaagtgccatttggttggatcctacccagactaattgcccgtaaggggtccgttaccttggcttttaggaccgataacttatacttgatagggttcacagataaatatggaggttggtatagtttcaatgggtacaaagttttgatcccgggttccactgaattggaaattaatggaggatacggagagggtgggatgggtgggtttagaaaactggaagatctacccctaagcaggagacatgccttagatgctgtagatattctttgggattacgacccatctactacacccaaggaagtcctccaaaatgcaacagcaacactactgttagtaatccctgaatctgcaagatttaaagaagtgtttgagccggtcattgctgattgggacagtaatgagggcatcagcttaaaggaaaagattaaaagcataggactactgcataattggggtatgctttcaagtgtgggaatgatcggattaccatgggatagcagcgaagtgcagggctatgttaaaaaaatgagaaaagacgaagtttatataaatagcaaagaggatgcactccgacctcttaaggttttacttatgtcgaaagcaatgagaccaaaagaactcgtcatcaaaaggattaatgacccccagtcctag

SEQ ID NO: 45924 - DNA, 1719 bp, Oryza sativa
  Clone ID: PAT_MRT4530_48841C.1
atgtggctgttccagtccttcttcgtcccgcagctgctgcatggtgcggtggtggggggatgctacttccagccccgacgaggcacggcgggccatacatcgagagtcatctctggaagaaccgcatggctggcggtttcggagctgggcgaggagtacgatgtagtgcagactcgccttaggggcctgcgaagccagggcctcacgggggcaatggtctttggcgattacttccgccgccgcatcgtacctctccaagagcggtcccgcggcacgtgggagtacactggacccaacgatcccatgcgcacccatgtgggtgagcgctgggactggggcgaggacgacgcgaagacggtgattcgtcgggtgctgggtctggacaccgccgagcaaacactgatcccagacaggatccttcccatctgcagcgaccgcgaccgggaaagtatcctggctgtgatgtcggccgtcggcgccggcaggggtcggtcccgccggggcagcgccgtcggcatgggtagcagcggcgcgaccgtaggtgggagtcgaaccagtggctccggcgggggtggtagctccagggcacccggcccgagccgcgggcccgggggagattcggccaacgacccgaaaggaaagcggaaaatgtccaaatctcgaccgccctctcctccgtgcatagggggcgccgagcgcgtggcggaccgaccgaagttggacggaagaagaagcggctccggaagaaaggtgctcgccaccgccgattccaccgtccgggaggggctcaacgcccaagtacaagccccggcggaggagcgggcggccctggaggcagagtgggcacagcttgtggcggaccgcgcgcgggttgacgaggggcgccgcgccgtggacgacatggtggaggtggggcgcaaaatgcgccaagcccaactggcagagatccagacgcgtgaggaggcggcactgatcacctcaagcatcctagatgaagcgctgggtgacatccgcttgcagtacgaggcctatgcgaaggacctgacgaagagggtcgaaaatgcctgcggtgtcattgatgcggctgccgcccaagagcggcgggcctcggaggccgacgcctcgctgcgggctcggacggcggcgctcgaggccgaacgcaaggccttggacgagcgcgctcgctccgcgcaggagtttgaggccacggttcgtcggcgaatcgaggtcctcgaccggaaccagcgcgagcaagacgcgcgcagccgggagcaggcgcagcgagcccaggagttggaggagcaggctcaggcgctagaggagcaagcacgtttgctagaccagcgggagtccaccttggccgcccacgagagaacggcgacggaagcggaggcctcccttcgtcttcgtgaggaggccgcagccgagcgtgaccagacgacccttgctgcgaaggcttcggcggcccgtcgtgtagaggagctacggctccgggaagaggcgtgccgggaacgggacgccgcgctcgccgagcgcaaggccgaggtgaaccgccatgaggtggcgacgcgccggctgcgtgtcacgcccagaaattcccgaatagaattccaagtagaatgtgcattaaaatccccgtccaggaccggccggggtacacaagcgacaaagttgacatatagatccacgtcttacaaacattataaaagtcttacataa

SEQ ID NO: 45925 - DNA, 304 bp, Oryza sativa
  Clone ID: PAT_MRT4530_48842C.1
gacctcgtcctcgcacgcaggcagagccatctttgcaatctcaagcggtggccgtgtccacccaccggcaaagaccttcacagaggccatgtcccccaccgatgtccccgatggcaatgtcccccacaagcgacgagttctccagagccacggccacatccccacacaattgacaagtcccaatagtggccatgaccccaacccctcgatgggccttcaccgtggccgcgtcatctcacactcgaaggcgacttcccctcacatgcgacgatacatcgcgcgctcgatggctgcacctctgtag

SEQ ID NO: 45926 - DNA, 624 bp, Oryza sativa
  Clone ID: PAT_MRT4530_48843C.1
atgaggaggcggccgctcggcgcgcttcccccctccctctcggcggtgtgcgggcggtggcggagtgcaaggaggacgcggcggcagtgggcggcaccgaggagggcgttggaggacaagggcggcgggacggcggcaggggcggacacagcttggggcggtggcatggcggcggaggtcgctcggggcgtcgaggacaacggcagatggcagtgggacaacggcaagcgagggtcggtcgcggccttgttcttccggatggaggccaccgaccgcctggcgcccagccccacagtcctccgacatccggccctgtggccatccgccgtccgcacctccgatggcgaccgtcgacgcatggatctccgtcgtcaggccctctctgccacgccgctcctctgccactcgggggaatcctttgccaccgccaagggatacagccacctcttcactgcgacaaggtgcacggctggcgttgtcgggccccctccaccgtgccgctccgacggtgcccctaactcccccgctggccagctcctccgcagctgctgcctctcgcccacccaaatcccgcaccgacgatgggcgcccgccgccggctacagggacctctcctccgtatga

SEQ ID NO: 45927 - DNA, 1415 bp, Oryza sativa
  Clone ID: PAT_MRT4530_48844C.1
aattcggcacgaggcttccatttccaagaatcgaccggccgggaaaaccctactttactactagtcgtcgatctcctcgcgactttgcccgccgccgccgccgccgctctccatcccgcgagaagctcgtcgccggcgtcccgctgcatccatcctctccggcgatggcgattactttgtccaatgtcaactctgaggcaggcctccagaagcttgatgagtacctccttactcgcagctacatcagtgggtaccaggcttcaaaggatgacatgactgttttcacctcacttccttctgctcccgcagcaagctatgtcaatgtcacaaggtggtatgatcacatcagtgctctcctaagatccagtggagttaccgcagagggtgaaggtgtgaaggttgagtcaactgcttgttctgtgtctccaactgctgaccaaaaggcaccagcagctgatgaagaagatgatgacgatgttgatctgtttggtgaggagactgaagaggagaagaaagcagcagaagaacgggccgcagctgtcaaggcttctggaaagaagaaagaatctgggaaatcatcggttctgctagatgtaaagccatgggatgacgaaacagacatggcaaagcttgaggaagctgtgaggaatgtgaagatggagggcctgctctggggtgcatccaaacttgtaccagttggatatggcatcaagaagttgcaaattatgatgaccattgtggacgatcttgtttctgtggacagtctcattgaggattatttttacacggaaccagctaatgagtttattcagagttgtgacattgttgctttcaacaaaatctaaaatggagtcttgtcagaggcagccttactaaaagaggaatgctatatgctcatcatcagaatttcccaatggtttatgtttcgtctatggaccttgagtgtactgcgaaccagcgtttggtattatcatgagatttaaatcttggttggacttgttttggccagttgccccctgttggtttgtacctattgattttggaggtctttgtcacatgcccgttcagtcgttctacacaagtagttgccctttgcatgatctggtataacagctgcacaactgttctcggctgatgtacgataatattgtctatatcgtacctggtacaccgaaatagtgggatatttaactattttctactttcaaggtgtggcatttaaaaaattgttactcagtttatgacatgtgggtattcgtacggctatgatttatgggttcagtaacaaatcgttaaatgtcacatcaatgagtggaaaatagttaaatatctctgaaatagcgggggcaggcgcaaagggtgtctactcaaggagcaaaatgcagctgcacccaaagaaaagtgagaactagttt

SEQ ID NO: 45928 - DNA, 351 bp, Oryza sativa
  Clone ID: PAT_MRT4530_48845C.1
ctagattgacaagcaatttgagcaatttgaaacagaggttgtagtgtggttagttcggacagatacagagaagttgttccacagaattaatgcaaataaatgcaattctgaatcgcctggagatacccaaatgccatgctccctaagtaagcgaaaccataaagcaacctcatgaaggctagagctagtgaattcacttcctttgatgtcacttattgcacttcctatttcttcttggaaaaggtgatctattccaagacgatggactgcatctattaaattcatcttctccaatatatcattgcaggtcccaaacagtatgcggacatctctttttagcttttcggccat

SEQ ID NO: 45929 - DNA, 2744 bp, Oryza sativa
  Clone ID: PAT_MRT4530_48846C.1
cgccgcggctcgcatcgtcgcagccggcgtcgagccgtcgggagggaaaaaaacatctctagctctccttcgcggcgccgccgatggctgccgtcgcgcggatggccgccgcggtcgtctgccttccctcctcgtcctcatcctcctccgcgtgccgcgcggcgccattgccgtggtcccgcggcgtcgtcgtcggggtgaggcggcggcgcacggtggcgcgggcggcgcggcggagggggaggaggcccggccgccgcggcctcgtcatcgtggacgagttcgccgggcagtacgaggaggggttcgaagacgtgcacacggaaatcatgaattacttcacttacaaggccacaagcacggtgctccaccagttgtatgaaatgaatccacctgcttatacttggctgtataactacgtcgtggttaacgatccaaaggagggcaaacatttcctcatcgcactcgcaaaggagaggcaagatttggcagagagagtgatgatcacacgactccacttgtacagcaaatggatcaagaaatgtgaccatgcaaaaatgtacgagaagatttcgaatgagaatctggagataatgcgtcagagtgcacaagcaagatatatcatagtgccatatacttcacttctgccgtctgatcttggttgccataactcaatagatttgtgccaactccagaatagagattacagtcaagaaatatttactgcttgtcaagttgtcatcgaactgatccctaaggacaagttgaacttcactgaatcaaatcataatggatcagccacaattcagctccaggaggatgccttctacaacaaggcggtcaagctcaccaaggatgagttgaatggaaagatcactcaaagcgtaggccgagcaatctacaccgatccagtgcctctctgggatagcaccaccggtcagttagccagcttcacaacccgcttcacgttcaagatatatgcacccacgaacgacagttcgtacggtgagggcctagccttcttcctctcatcatacccttctgtggtccccaataactccatggatggttatcttggcctcttcagcaatagtaatgatcagagcgatccactcaaccagattgtggctgttgagtttgacagccacaaaaacacttgggatccagatggcaaccatgtaggcatcaacatccactcaattgtatctgtagccaacgtgacatggcgaagtagtatcaacgatggccggatagccaatgcttgggtaacttaccaggcaaattcaaggaacttgagtgtcttcttgtcgtaccaggacaacccacaattcagtggcaactccagcctatcttattcggttgatctcagcaaatatctccctgacaaagtgtccatcggattctctgcttccacaggtaaatttgtagagctgcaccagattctttactgggaatttgattctacagatgtgcacctgatgaagactgagaaaacaaaaggtatattggtcataagcttgtctacgagcggtagtgttgtggtctgctcaattggcttggtttgcttctttttatgttttagaaggattagaaggactacaaggtcaagagagaaggaaaaagagaaactagactgtgatgagtccattgacagtgagtttgagaaaggcaaggggccaaggagattccaatacaatgaactcgtagtggcgacggataattttgctgcagagagaaagcttggagaagggggtttcggtgcagtataccagggtttcttgaaggatcaaaacattgaaattgccataaaacgagttgcaaaagggtcaacacaggggaggaaggagtacatctctgaggtcaagatcatcagcagactaaggcatcggaatcttgtgcaacttgtgggctggtgtcatgagcatggagagttcttgttagtctacgagtttatgccaaacaggagcttggacaaacacctctatgatggtggaaacctgttagcatggccattgcggttcaagataaccataggtgttgcatccgccctcctgtatctccacgaggagtgggaacaatgtgtcgtgcatcgtgatgtcaagccaagcaatgtgatgcttgattctggattcaacgctaagcttggggactttgggctcgcacggcttgtagaccatgaccgaggctcacaaactacagtgatagctgggaccatgggttacatggctccagagtgtgtcactactgggaaagcaagcaaagagactgatgtctacagctttggcattcttgctctggagatagcttgtggaaggaggcccgttgtgccaaaggaagataatgacaggatcagtttggttcaatgggtttgggatctttatggaagaaatgagatacttaatgcaattgatggaaggcttgatggtgaatttgaagagcgggaagttatttccttgatggttgttggactttggtgtgcacacccagattataatatccggccttcaattcgccaggtcataagcgtactgaagtttgaagcaccattaccagaccttccaccaaagatgccagtggcaatgtactttgcaccaccaatttctctctgcagattttcacagtcatctaatgggacactgaaggagctggaaaggccgaacagttatggaaatacgagctcgtccagtgcaaccaatgattcttgtgcccctccctctgttcggttgccagaggttggttactag

SEQ ID NO: 45930 - DNA, 249 bp, Oryza sativa
  Clone ID: PAT_MRT4530_48847C.1
aattgccataatgtccagaaactattagatactttatcaaacgtttgagcaaatccataatgtcaggcagcaacgttatgcagttataccacagatgcatgccataaatatcaagcataaggcacaggaatgctcaccgacaaatgacatcagaagatatacaagaaaaattaccagagttgcaagtcatagcatttgctcacaaaatgcacttgaagcaatgtaatccaagaacgttgacaggaagga

SEQ ID NO: 45931 - DNA, 286 bp, Oryza sativa
  Clone ID: PAT_MRT4530_48848C.1
ccgactcgacggcggcggcgacgcggaggcgaggcatcgccggcgagcgcgcggaaggaggaggaggaggaggcacaccctgtcgcctgaccctagatccgtgacccacccgctgggagaccctatgcgcccttgcccgctcggtgagagggcggcgcggccggggacggtgatggcgagacccgggcgcatagacgcgatgcatcgtctgagagttgactacatggccatcagctcgaccaccatctactacgacgaccactgcgtgtccatgggcccctgcacc

SEQ ID NO: 45932 - DNA, 389 bp, Oryza sativa
  Clone ID: PAT_MRT4530_48849C.1
ggcacgagtccccgtcggtcgcgctcgccgtccccaagatccgctcgtcctgtcccgtcccggtggctcgccgtcgtcgagccccgcgcctacttcaactccatgagcttaccggtcatgaactgataagtgagagttctctgttcctcgctcgtacaatcaggcggatagcaacgacatcatgcataactgagaaggcccatgccatttgcaactggtgtttgcggataaatgtactgtttcacatgcctgtacactaagagctggatgcaagatactctgggttttggtgaattttggtgagctcttgtggaacatcagtaagaattttgacctgaagatatctgccagcaagtataacgatgaagtttccaaaacgctatgccata

SEQ ID NO: 45933 - DNA, 150 bp, Oryza sativa
  Clone ID: PAT_MRT4530_4884C.1
atggcagtctgcaatcgacaaggtgtctggcttctggatccgtttgtctccgttgatctccacggtggtcctctttgcgccggatcgcacgacgccgcactgatcccattcccctcttcatatgcccctgttgtgaagggcaaattatga

SEQ ID NO: 45934 - DNA, 373 bp, Oryza sativa
  unsure (1)..(373): unsure at all n locations
  Clone ID: PAT_MRT4530_48850C.1
aagaatttccgatgaagatgcagcacaacagaggcgaccagaagacgtcaatcaagaaaatgcaacgcaacgctgggtccaagatggaattggaaagggaggaggcaatttcctccaatttgtggccaacgcaagagatgatgtcggtgatcaggttcacgaccgagctgaagccctcacggtggtctcatggactcctgatgctgatgccctccggcgagacttgcagcatccattcttggagaagaggatcgaacttttccattatgtccaaaacgcgtgcttagctctttctcttgcgcaagangatgcgtccatgccgtcaaaaacctggcttcttgccatggcgggagaagcccgaagcaagggaacg

SEQ ID NO: 45935 - DNA, 470 bp, Oryza sativa
  unsure (1)..(470): unsure at all n locations
  Clone ID: PAT_MRT4530_48851C.1
tcttgatccaaagctgcgtggaagtgattgaaaataacttttgtaatcgctaccagatagtattttatctgtaaggatgcatgagatgtcgaaacacanaaaaaaaaaaaaaaaaaaagaaaaaagaaaaaaaaaaaaaaaaaaaaaaaaaaaagggattacaaaatcaaaaagaaagaaaagataacataaaagtaaatgtaaacaaaaaatgaattcattaaagaaatctaaaaaaaaaaaagggggccgcggttttaaaagaacaaaattggtaacccggtgtggaaacttaaagcttattgtttggggtatatgaatacaattacctgcggcggttataaaaaataggtattgagaaaaaaccttgggtaacaaaagtaaaacctcaagaaagaaatgcattctttctgaaggggataaataataaaaggacgcgaagtgataattcttaaaaaaattgcaacatt

SEQ ID NO: 45936 - DNA, 520 bp, Oryza sativa
  Clone ID: PAT_MRT4530_48852C.1
gtttcgtttccccagagaaaccctaatcctccccgtcctctctcctctcgcatcgaagccgccacggcggcgatgacgcctcccttccgcccgtcgccctccgccggctccatccctcgtggctgcggcggcgaccggtgcgcatccggccgcgacgcctggcccctccaccacgtccgccacgacggcgtcttctgccgcctctgctcctcctgtgtcctgctctatcaccccgccgccttctgctccgcctgcctcctcctcttccctcccgcctccgcctccgcctccgcctccgccgccaccgccgtccaggagccccgcctcgatcccatcctctccccgccgggacctaccgccgcttgctccagctgcggcctcttcgtcgcgcaccactcctgtgtcccagactctgcctccttcgtctgcccctcgtgcgccgccgccgccgagggcaagcccttctcctacacgcccgcgggggggcggccggcgcgcgctggacgagcgcgccccgcga

SEQ ID NO: 45937 - DNA, 360 bp, Oryza sativa
  Clone ID: PAT_MRT4530_48853C.1
atgaagaccagtggcactgagaccaagaccagtggcactgagaccataccttgtggggcgatatttccccttggttgtgacacggcggcgctaacaacgatagcagcgccagcagcaactctccaacaggggcatcgtctcccgtcggttgcgatggcgcgctggggatggcgcgttggggatggtggcgctagggatggcgcgttggggatggtggttgggccagcgctgaggaaggttggtggggtagctgggtggaggggggaggggcgggaggctcctccggcgagggcatacaagcggccgcgggcggagatgcgcgtggcggcgctgggaagggaggcggcgtggtggtgctag

SEQ ID NO: 45938 - DNA, 237 bp, Oryza sativa
  Clone ID: PAT_MRT4530_48854C.1
atggagcctgggcggtcgcctgacctgcccaggtggttcaacagacggatggttattgcaggaacttgtggatgggtccaagagaaggacaagaaggctcgtcgggcggcttgtggtgaagctgcaaaagaagacaacccaagtctgaaggacaagtggatcgttgaacttagagttgtaataggtgataagggggtggagttagagtcggactctgtaacccggcaactcttttaa

SEQ ID NO: 45939 - DNA, 234 bp, Oryza sativa
  Clone ID: PAT_MRT4530_48855C.1
tggaagaagccgctcctcctcttcccgcggcccttctcctcgtcctcctcacccaaccctaccttccctcctgccgcgccaccgcccaacgaccgcgacgacgcctcaccaaagcccagcgagggggagggatcttgagattggacctggagctccttaggttttcaacgttgatgttgagatcacaatggggagcatagtgaagcatgagcttgacaagacgactggaatgat

SEQ ID NO: 45940 - DNA, 2208 bp, Oryza sativa
  Clone ID: PAT_MRT4530_48856C.1
ggtaccgggccccccctcgagttttttttttttttttttttttttgggaatggaatgtgaattgaatgaagctatgtataattttacactgtattctgttgtcaggctattctcctgctgcctcttttaatatacaactacaagaaaattacagtgctgcaacagcggccattttttttaggtttttcttttccctacatctctttctcctttttttgttttgcttcttttttcttcgtgctgctgacctaagagatgttagaacaccacaacacggagcaaaccaggttgtgcctgcgtgtagtggaggccttcctccagaagaaactgctcgacggcgatgggcagcctggcggtgcgagaacccttggtgtgatgacctgtcccgacacatatcatgacttgcatcctctcacctgtagccctcgcggtgctcttaagagtaccgagctcgaccttaagtatatggattgcttcgttcacatggagaccatgtagatcgatcagacggtcgctccctcgttgcgaagatgggttcctctgtcgataaatagcttctcttgctttctcatgagatgctttcatttgtgtgttatatgtctgtcccttcatactcaattccttggctagagctttgttgccaatcaggtaagcctgtctagcctgctcaaaacatgcatttcggatgcgggcaaaatcacgggcttctccccttgattctgagtacatgtttgctactgcatctccagtttcgagccatggagcagctcttgcactgctaacactttgaaacttgtttccagaagatgttttggtcgtagaactgtactgcttgggtacagaaacagttgaaacaccattaccgtattcaggacctttcttatacttccaatggccagaattttgcgatgcaagtttgcgaacagctgaaacaaaatcaccagtaccagtagatacagagggtgagctgcgtccattgaagatgcttagaatatctgcattgcctttggaaaaaccattttggtcttcaactgttggcagtgcggggaagtcccctgtgctaaagtttggtgtcctgggggtcagagttggattggaggtagcatcaacttgcatctctagctgggtgaggatttcaatagtatggttgaagtcacatccattagcatagtacagctctgcaaggctctctgatgaaaaatcaggaaactgtgaagctaaatacgctagggggtcaagaacatcgtctgttgctgcagcataatcgctagcaaaactgtcagaaaagcctgcagcactttcagaatcataatgaaggccctgatttccattcgtaaaatggagatcccctacaaaattttgctcccaattgcttgaacccatagttggaaacgatgcttgtgaattatcttcataaagtaaactggtaagccccagttccaggctcttgttagcttgagaagataaatcatgctctcttgaaaagcggctagctgttgttccatagaaagggggtgcattcaaggataatccagcaagagacaattcttcaggttcttgttcaattttctcaaaactgaagtctggaataatgtcatcaggaagctgcttacgccaaaactggtgtgcctcatcatccgagttatttgactttgatgactcggacctatctaggatagttttcccagaagccctaagatctgccttacttacatctgagacagcgctactctcaaaagatggtctaatacatgaaggtacaaattctgctgcgttgggattcaatgctgtgactttatttggcaacattgaccttgtatctccattggaaacaactttattgagtgaagtcatttttaatagaaattacatgtgatgttacatgtacaaggggaaatttgcaataagattttatccaagccctttccgccggtcgatgagctgatagtgatatatcgctggcgaccggcccatggggcggcgtcccccccaacgccgacggtagatgagaaacggacgccgccgcccgcagggggattcgggtttcaccgcccaatcgcgcaacgggagtccggccccccgctccgggagaatcgggggcggaatagggttcgccttcttgggaggcggaggcggaggcggaggcgaggagaggggagggaggagggagaggttggtgccctcgtgccgaatacctgcgggccgggg

SEQ ID NO: 45941 - DNA, 250 bp, Oryza sativa
  unsure (1)..(250): unsure at all n locations
  Clone ID: PAT_MRT4530_48857C.1
caaagagcaaacatataaaagagatgacagaaaancgaaagaactccagaatagggaagagacgataaacaaataacaaaaacaacggacatgcggcaaccaaacaaggaggacacgaacaggaaatatccaatagtccacaatgagaactacaaacacacaggacacacactgaaaataacttaaaaagaaggaacatgaagaaatccataaaggaggagactctcgccaaaagctgagttgactgaca

SEQ ID NO: 45942 - DNA, 321 bp, Oryza sativa
  Clone ID: PAT_MRT4530_48858C.1
atggtggagaagcgcgggagaaaattcccgctcttccccctttttctctcccgcgtgttgtctctggcggcgatcgcaccccaggtgcccctcgtccatggcgccctctccgacgatgtcccccactgtccagatcagtcaaagtacacaccatgcagtcaagctgacctcaccgccccagaggtcgtcgcctccccagcacttcaccaggacagccccttcatgtgccccccgtcgccagcaccatgcatcagccacaaccatggttccacagatcattgtctgctgcacgttgtcccaggtttttttaccaggctgcat

SEQ ID NO: 45943 - DNA, 1810 bp, Oryza sativa
  unsure (1)..(1810): unsure at all n locations
  Clone ID: PAT_MRT4530_48859C.1
atggccggagggggagggaaggcggcggcgggcggcggcgaagcgccggcgataacgctggagcacacaccgacgtggatcgtctccgccgtctgcttcgtcatcgtcatcatctcgcgatccttcgagcgcctgctccaccgcctgggcaagaggttgaagaagagccgcaagaagccgctctacgagggactcctcaaggtcaaagaagagctgatgctgctggggttcatctcgctgctgctgaacgtgttccaggggctgacgcagaagatatgcgtgaaggcgagcgtcatggaccacctgcagccgtgcaagctcgacttcagcggcgccaagacggccaagaccaccgcgcacttggccgccgccggcgtgaggaggctcctcgccggaggaggggccaagtctgactactgcgagaaaaagggtttagttccaatactttcagttgaagccattcatcaattacacatatttatcttcgtattagcggtctcccatgtggttctaagtgctgttacagttcttctaggaatcgcacagacaaggaaatggcaacattgggagaacaagatccaagcaagtgatgaaaatggtatgatgaaagaacattctccattgggcaaatggattattggaatgaaactttcaggtccccaaatgatcaaacatgtgcaagaattcccatttatcaaaaatcattttaaaggacacggcaaaaggtggaaaacatttggttggctgcgctcgttcttaaaacaattctatgggtcggttactgaggaggactatgtaaccatgcggcttggcttcattatgaaacattgcaggggcaatcctaaattcaacttttacaaatacatgattagagcactggaggatgatttcaagaaagttgtaggcattagttggtacctttgggctatgttgataatattcttgctgcttaatgttcaaggatggtatgtctatatctggatatcggcagtcccatttgttatgctacttgtggttgggactaaattggagcacattattactgagctagcccatcaggttgctgaaaaacatacagcgattgaaggggagctcgtagtatccccatcagatgagctattttggttccaccgaccaaaaatagtcctcttgttgatccacattgtcttgttccaaaatgcatttgaaattgcatttttcttttggcttctggttacatatggattcaaatcatgcattatgggaaataaaggatatgttattgctcgattggtcataagtgtcatcagtcaacttctatgcggctatagcagcctccctctctacgctattgtctctcatatgggaacttcattcaaaaaagtaatatttgatgagaatgtggtcgaaggacttgccaattgggctcaaaatgctagaaggcgtaatgcaagagcagcaagaacacaaaatgttggtgactcaccggttgacgaatcgaatgttggtgaagttcaaatgacaagcccaccaacaaagtcagttcagcaagggactgcaagactaatctaagcatattgatgacaatgccaatactaacatttttgctagttgttttttctttctttcggtgggaattatgataagtatgtcaatttccacattagttttcatgttgtttgtaaatgattttgcttatgcatgtatgttattccacgatctattataaatgataatacctatctaaaatgactattaacttggaaacaactcataaacattgtnctacatgaactattgaggccaatattgagtccaaaatgattctaac

SEQ ID NO: 45944 - DNA, 447 bp, Oryza sativa
  Clone ID: PAT_MRT4530_4885C.1
ccgccaccaccttcgtagccgtcggatccaacgcgggaagcagctgctgctgccgccacacacgtagccgtcggtgccgccggatccgccgtgggaactcgtcagcaccgtcgtcaccgtcggatccactgcgggaagccaccgccaccgccggattgggacgcgggaagcggccggcgccgttggtgtcgccggatctacccgcgggaagccgccacactatagaggcgccatcaagaggggaggagagggaggagggagtagcggagagggggagaggcgccgccaggaggggaggggtggggagcggcggagaggggacggtggaggaggagcggcgccaccggttaggagaggggagggagggggagaggcatcgctggtcaggagaggggaggggagggggagagccgagcggaaggtggagctcgcggtcgggtgtaggtg

SEQ ID NO: 45945 - DNA, 570 bp, Oryza sativa
  Clone ID: PAT_MRT4530_48860C.1
gaactgggaagtctggcgtggtttactgttgggtgtttagtgggtcgttccataatacagacatggtctggtgtggtgtttctgcagtttttttttttgacaccagtctgcagaaatttcagtgataaacagcaaggatttattagcgtgagatgtaatgatttttcagagtgcttcgtcggttataggatttttgatgtaataaaacaatggattatattatcaataagtaaatgtagtcttatgagcacaattaagagatgtcatcattgtagcttggatgtttaagatgggttgtgtctccacggcgctgtttggctgcccttgctgcagctgcaagccgggcaacagtgtttccttgcctgcactggctgcagcgcaggccagcaacgccaaccgaacaggcccatgtcttgtttaatgatccattgttatagacttgtatatatacctttagagtgtagactggtgaatcatttcttgtattactatatgttctgattaagtatctagggtgctaattggagattcttaaacatttctattttccttcatctctcatttgctatg

SEQ ID NO: 45946 - DNA, 327 bp, Oryza sativa
  unsure (1)..(327): unsure at all n locations
  Clone ID: PAT_MRT4530_48861C.1
aggcgcacgcacngcaggaagcagccgcagaaaacaagccaccaccacgggaccaaccaccaaggaagggcacggaaccagaggacccagaaccgaaccnngaaagaaagcccagngangacgagccangggangggngagcgngcaagaacacgacggacccangagggggagcaacgacanggngcccgcagagacccggggaagcnngggnnngccgggcaaaacgaacacaacgcaaacaaagacaagaaggaaagaaccggaaggcgacnagagacgcaagcgaacagcaaggaaganacaacagcngcggnggcaggggac

SEQ ID NO: 45947 - DNA, 1402 bp, Oryza sativa
  Clone ID: PAT_MRT4530_48862C.1
ttgcggcccaattaaagcctaaagcctttccatagtattaacccaaatcgagcaaattttttctcatcttggtagctttgattcttcgtcttctttgcggcgatcgattgatcttgaggagcttaatatatcgattgagatagcaaatggggaggcagccgtgctgcgacaaggttgggctgaagaagggtccatggacggcggaggaggaccagaagctcgtcagcttcctcctcggcaacggccaatgctgctggcgtgccgtccccaagctcgccgggttgctccggtgtgggaagagctgccggctccggtggacgaactacctccggccggacctgaagcgtggtctcctgtcggagacggaggagaagacggtgatcgacctgcacgagcagctcggcaacaggtggtccaagatcgcgtcgcacctgccgggcaggacggacaacgagatcaagaaccactggaacacgcacatcaagaagaagctccggaagatggggatcgaccccgtcacacacaagcccctctaccctgctccgccgctggccgacggcggctcgccggagcagaaggtgccggaggaggaggaggaggtggaggagaagtcgtctgctgccgtggaaagctcgacgagcacctgcgccggccacgacgtgttctgcaccgacgaggtgcccatgctgcacctggacgacatcgtcctcccgccgccgtgcgacgtcgtcggcgacaccgccggctcgccggcagagtcgtcgtccacgtcgacgtcgtcgagcggcggcggcggcatcgacgaggagtggctgctgccgatcatggagtggccggagtcgatgtacctgatggggctcgacgacgtcgacatggtcaccacggcggcgccggcgatggcgacgtcgtgggagttcgaggatccgttcaacgcgtaccagaggatcgcgttgtttgatcaccaccacgagctgacgtgggcttgacgtaaccacttctgaattttctcttgtttcatactccctcggtctcataatataagagatttattgtaccgggatctattatattatgagatggagggagtacaaatttcatctcggcgctagctgcacttagtgatttattaccattggattattagtgccctaattaaacaattagagataggattaagaacatatataagatgataaaaaaaaaggtgaagtggttgtgtgagagagagagagacaaatgcatgagctagccctctttaatttcgtctttctgtcatttttttttctgctcatcattttttttcaggcttcttttagatacatgtgtttggcatacatacatgtaaatgaaaggaatttgaataatgaaaatgagagtgaatggtgtcaaaaaaaaaaaaaaa

SEQ ID NO: 45948 - DNA, 262 bp, Oryza sativa
  Clone ID: PAT_MRT4530_48863C.1
ctcaacacgtaccctctcctccatccgacggtggagacgagcgaatcgctccacaccaccaccaccgtgcaccgtgacccgcaccggtgagtggatatggtccacccgctctccgccatcgtcgacgccgtcggcggccaccaccaccggctcttctactgctacccggtcgagcggacacaagtagttcaccaccaccggcggcggcagacgtgctccctgtgcttcttcgcgccagactgttcccacggctgtaccaaag

SEQ ID NO: 45949 - DNA, 358 bp, Oryza sativa
  unsure (1)..(358): unsure at all n locations
  Clone ID: PAT_MRT4530_48864C.1
ggcgtcggagaaaagccacncgaagagcttcgcaagagcgcgaacgtcccggcgagctccgtggcganccgcagaagcaccaganccgcgcgtggtcgcccatcacgaactcctccatgatcaggcctggccacgggaccgccgcgtgaagagaaagaagccgcagcaaatcaaaaaagttggagaggagaaggtaaaaccctcaccatgtggaccagaagggagtactcgtcgatcttggccaggttcttccgtctccgccatctcccccgtcaccctgaagagatctggagccgcgagaacgaaagagctgatcagtagtatcaagtatgcagcgaagaggagaaggaggcgatga

SEQ ID NO: 45950 - DNA, 483 bp, Oryza sativa
  Clone ID: PAT_MRT4530_48865C.1
atggcacatcgagcgaaaatagcggtggagatagaatggggcctgcgatgtgggtggacggcagggattagggctcagggcaatgtagatgcagatgaacggcatcagttcaaaaatggcagagatcaagtgcaagtttgcaacgtatacacaattgtggagacaaatagcgatgagtggctcactcttgtcataccttgtattgttgccccaaagaaaaccttaatacttcctccatttcacaatagggagtatcagattgtagatcttgcattttttttacccttgcataagtgttattttgcggtggagctgaacttttctttgattgccaaggccctaacctcctatgtgaggcccttgttggatcatgctaaggctagatctgctgcagctctctgtggacaccccgagtattataccatccagtgtccaacgcgaccaccacatactattggagaagtgggatccatacacgcataa

SEQ ID NO: 45951 - DNA, 2180 bp, Oryza sativa
  Clone ID: PAT_MRT4530_48866C.1
atggcgtctccgccgccgccgcctcgcctcctcactcccaagcccgaccccgacgcccccctacccccgctcccttaccccgaccccaacctcgtccaaagcatgctcttctccgcccagtccccgcaggcgcagccgcaggcgccgccaccccacatccaaccccccgcctccgcctccgccgaggccccctccggcgacgagaagaataagaagaagaagaagcgggcccgcgcctcccaggagatggtgcgcatcaccaaccttagcatcgccgaccacctccactaccgctccctcgtccgccgcgcccgcctcaccttcgaggccctccgcgccatctaccaacgccaggacctcgccaccgccgggggaatccgcaaccgcttcgacctccgggcctccagcaagatgctctccaagggcctctggatgcaccgcgacatccgcaccgtcggctccatccccggcctcctcgtcggggactccttcttctaccgcgccgagctctgcgtcctcggcctccacaccgcccctcaggccggcatcggctacatccccgccagcatcgtcgaccagggccaccccgtcgccaccagcatcgtctcctccgggggatacctcgacgacgaggacagcggcgacgtcctcgtctactccggcagcggcggccgcctgcgcaaccgcctcgaccacagcgccgaccagacgctccagcgcggcaacctcgcgctccactacagctgccactacggcatcgaggtgcgcgtcatccgtggccacgcctgcgaccacagccccagcagcaaggtctacgtctacgacggcctctacagggttgtcacctccaccttcggccctggcaaatccggccgcgacgtctgcaagttcaagctcgtgcgcatccctggccaggacgacctcggcagcaaggcctggcataccgcagcggagctcaaggatgcactggattccaagatccgcccgcccaagtacatctcgctcgacattgccaagggcaaggaaccattccgcgtgcccctctataacaagctcgacgacgacaggtcacccctcttctacgactacattgcctgtcccgacttccccaccacccagcagctgctcaaacgccagacccagaggggctgccactgtgccgagctgtgcggctccaggtgcagctgtgagaggaagaacaggggggccgacggccctgtgtacacctccgatggcatccttctcaggggacgccccttggtgtacgagtgcggacccctgtgtggatgccccatgacctgtcccaacagagtcacacagcaagggatgaagcaccgcctcgaggtgttccgttccaaggagacaggctggggtgtcaggacgcttgacttgatacagccgggtgccttcatatgcgagtacgccggcgacgtgctctccttggacagccactcaggtgacgcccctctgcctccgatggaggacgggagctccatcatcgacccgaccaagttccccgagagatggagggagtggggagatgcatccgtggtttacccggacagggtaccccatttccccctatttgcaggggcgcgctaccgactcgacgtgtcacagaggaggaacgtggcttgctacattagccacagctgcagtccgaatgtgttccttcaatatgtaatccgtggcaatgaggatgaatcctaccctcacatgatggtgtttgccatggagaccatccctccaatgcgggatctgtccatcgactatggcttggactagggtccatgaggggggaggagggatcaatggctggtaactggttttggcgggctgaggcaacgttaggaagctgcaaatggccccacagacagttggctcgtctttttggatattttgtaggtgagcaggtatctctttttgggtacccatagtgctctcattttggggtaactagggtgcaattgatgagtttgttctaggattggcatgaatgaagaactttgctaggtagcaaaaggggcgcatcaatactgcatcactggaaagaactattcaaaaccattagttgaataaactttgtgttagtttgcttatttatgatgatgaaaacatgatatatacattttttaaaaaaaaaaaaaaaaaaaaaaggacggccgctcgcgatatagaac

SEQ ID NO: 45952 - DNA, 273 bp, Oryza sativa
  Clone ID: PAT_MRT4530_48867C.1
atgcaggagcaggccattgcgccggggagccggccagtcgatctcctctccgctgctcctttcccgttggccgtgccgaccctcttccccgtcgccggccctccaatccgccgctccgcctgtgccaccgtgcatcaccgcctcaccccgacgacgacctactacggccacggcaatggcgccgcacggcacgcagagaaggagaaggaggccgccaaccacgctggccctcctccctgccgcgtcgaggacgccgccgccatcaacgcctag

SEQ ID NO: 45953 - DNA, 285 bp, Oryza sativa
  Clone ID: PAT_MRT4530_48868C.1
atgggcgagcggcgcacgggcgagcggcgcgcggggcgcggggcgcgaggcggcgacgcgacgctggcgcggcgcggcagcagcgatggcgacgcggcgcggcaggcggcgagggtgacggcgcacggcgacaggcgacggcgtgcggcacggcgcgggctcggcgcggctagggcagcggtcatcgacagcttccccggcgccaacacgtggtggaaccagctcaaggacaagcgggaattgaaagcacaagctggtgttcgtgttccacaagcgccaccgtga

SEQ ID NO: 45954 - DNA, 449 bp, Oryza sativa
  Clone ID: PAT_MRT4530_48869C.1
cgcgggaggcggtgagggacaccgtcgcctatgtgctccgcccgctggtggacaacttcaaccgtctattgtcgctcaagaccgcctttgatattaaggattacaatatcggcatgcccaccggtgcactcatcgcgtgtgttggatgctatcaactcctgaaaatgaatcccttcgtgttcgtcgatgctgtgctggggtacgcgttctacaagctcagcgtcttgtcgtcgcaggtccggaagcaggaattccccaacgagtacatcacccggatcaaaccaggcggctacggatccggctacggtgtcggcgacgacgacgacggcgaccgcgatggtgacggcggggaggacagtggcggcagctttaggattaggccttcctcttcccattcttcctccctgcctcttggcctcgccagcgttggaaggtgccaacagcgctag

SEQ ID NO: 45955 - DNA, 1836 bp, Oryza sativa
  Clone ID: PAT_MRT4530_4886C.1
ggccgcttttttttttttttttttggtcccatgcaatccctccattcttattagattccacatcctccaaactacattttgtagtactactcccaaaatactactacaagagagcagaaaaacagagaggagggaatgcgcctcctaactcgcatttacagatcaatgagaaactccacccttgaaactcagacttgttacatccaaaggaagagaacctagcatcttcaaccactatctagtcgaccgatcacgcaaattaagtacatgatatggtgttcctggtaattacctgggctccatgatcaataagtatgttactcagttggtgtgcccatggggcagcagcttgagggcctccatgaaagtgttcttgagcctgcccaaatgtggccgcacattctgcttgtctaggtagaccatcttgagagcgttccagccctgcttgtggatggagtaggggtccttgagcaccgggtcgtccttggggtattgctcgctcagcgtcgtctcgtcgagctggatcatatattcgaggtagtggatctgcatgtcggccgccggctccttgaacgtgccgcgggcgagccattccaggccaccatacggcaccacctggatgagcacggcgccggcagggaggaacaccatgttggtcagccctgcgccgtgcacgcccaccatcacgtccgccgagttcaccagccgggcgaacttggacacgtccgtgctgatgtccggctcgcccaaacgcacgtagaagcccaggctcatggccatgtccgccatggcacgctcgttcaggaacgcacgggagttgcgccgcgagatgatcagcagtcgtgggcggcgccggatgtcccaccggtcgccgctgggctcagccacagcgcgctccagcccgagcgctccacgcaacatcgtgcggaagtccaccatggagtaccccgacggcgtcctggacgcgtccacaccgagctccttgtggaacgtcggcccgaccaccacgctccggtaacatcggacctcgtcatcattgtcgatgtcaaccaattcgtacttgctgagccgctggaagatttgcatgtacctgttcgtccaccacgacttgaagctgctcaccaggaactgaacctcgccagcgaagcggtgtgcggtgatgaacgccgggatgagcacgtccgtgtagtcgtggaacgggttgcccgtgaacccgccggtggagagcacgaacgcggtggccgaactgttaaccgtgcaatgcggcaccgccgggtatgtgtcggcggtggagaggggccgaagcgcccactccttgacgtgcgacagcgcgaaggcatcgtgcttccggcagtacggcttcaccttccactcctgctccagtgggctgatgtggatggtctggctgcggccgtgcacgcggacgtcgccggtggcctcgcacgtgtccgaccgccggcttgactcgtaacacaccggcttagtcaggtggtccgtggccgtggtggacgctgctgcaacagctgcgctgcttgcgccaccgccaccgccaccagctgtggtgtctccagccttgggctgcgtttcttcttcctcttctgctgctgcagctgatgctgcagcctcatcggcggcctcgagggtctccatcttcacactccccttcctcatcgcctcctgctcctctgttttgatggcttcccctggcttcccgatgggggagaaccttgccctgacgagggagagcacaagtagggatcccagcataaacgctatcagtgccgcattccccagcctcctaccgtctcccctggtcaggttcctgttagacttcat

SEQ ID NO: 45956 - DNA, 729 bp, Oryza sativa
  Clone ID: PAT_MRT4530_48870C.1
atgccccgtggaggcttggatcaagagaatacaaaacgaaagctgcagcaaccatcgaggggcattgatcaacagaagaaccgacgacggcggcggcgatccggcggatgggaggcatgggggcggcggatccggcgggcgcaggcggaggcgacagcatggcgacgggcgacgacgaaggcgcgcggcccctccttcccctcgcacatctggcggagaagaggcatggggacggcagtggacgacggtggcgagcggcccctccgtccctctcccttctgttcccctccacttgcagatccggcggaggggagggatgggggcggcggatccggtggtgggcgtaatcgggcgatagcgggcgacgacggcggcgcgcggcccctccctccccttgcagatccggcggaggggaggcatgggggcggtggatccggcggcggcggaggcgacagcgtcagcggcggacagatcgggagggaggccgggagcggcgcatcgccatccagaggcgccggcggcggagcggcgcatctagagtgcgccaccaaccaccgctggcctgtcgtcctcgcttccttggctcctcgcgacctcgcccccgccgtcttgcatctcgcgccgcccttcctcttcgctccgtcctcgcccccaccaacggcgacggcaggaggcgacgacaacgcgcgaggcaacggcggcaggcggcggccgcacggctccttctag

SEQ ID NO: 45957 - DNA, 462 bp, Oryza sativa
  Clone ID: PAT_MRT4530_48871C.1
atgtcattctcacccttctacctcgtcttcgagtacatggaccacaacctcaccgacctcgccgccacgccggggctgcacttcacggagccgcaggtcaaggcgtgctgcatcgggacatcaagggcgccaacccgctcatcgacggcgacgggcatgctcaagatcgccaatttcgacatcgccaccttcttcgacgccgccaggccgcagccgctcaccagccgcgtcgtcacgctctggtaccacccaccggagctcctcctcgacgcgtccgagtacggcgtcgtcgttgacctctggagcaccagctgcatgcctgcatcctcgccgagcttctcgccggcaagcccatcttgcccagccaaaccaagggacttctcgccgccagcgctcgacctcctcgacacgctgctcgccatcaagccgtccgaccagggcaccgcgccaccgccgccgtag

SEQ ID NO: 45958 - DNA, 843 bp, Oryza sativa
  Clone ID: PAT_MRT4530_48872C.1
atggcgaggcgcctgccaaagtccgagaggtcgccgtcgccgccgccgccgccgcccggcgaccaaagggacgctgccatccaggagctcagcaagggcagcgagctggcgacgcagctcatggcgcagctggagctcatcccggagcgggagctcgacggccgccgcgacgacgcgctggccaacgtgaggagcctctccatgtccctcagctcctcgctctacgccctccggtccgagaggagggagcactactactgcggctcctcctcctcatccggcggcgctgggccagctgctgtcacctccgtctccggcgccggcggcgaaagaaagacgaagcgccggcgaggcaagcatggcgaggagctcatcgagacggtattcattactacgacaccagaaaatgatgggtttcactggaggaaatatggcgagaagaatatcctcaacagtgaatttcgaaagttatactacagatgtggttacagtgatgagcgaaagtgtcaagcaaagaaatatgtgcagcaagaaaacaacaaacatcccccagagttcagggtcaccctcaccaacgagcatacatgcaatacagtgttccaagatcagcccagttcaagcagtactaattcccaagtgctcgacttcacaaaagcatccatttcctcatcattaatggattctcatgtcggcgcgccgatcttgaaggaagaggaagaagaagaagttccctccattgatgagagcacaagaatcatgtccacaattatgcgtaactatggatcctatggcgactatgatgagtcgtctccgcagccatggaatggtgccggctggaagtga

SEQ ID NO: 45959 - DNA, 186 bp, Oryza sativa
  Clone ID: PAT_MRT4530_48873C.1
atggaggaagagccggcagggcacgaggtgaacgtcgcagccgcatcgtggccggcgaactgcgcgtccaaggcggcggtgcactcgctgctgggcaggggcacgccggcgtcgcacctcgcggccgggagttcgccgtcgcagacggggaaggcgacggcgagagatcgatggtgtgcgtgctag

SEQ ID NO: 45960 - DNA, 537 bp, Oryza sativa
  Clone ID: PAT_MRT4530_48874C.1
atgaacgggacgtgctgcatcgggacatcaagggcgccaacctgctcaccgacggcgacgggcatgctcaagatcgccgacttcggcctcgccaccttcttcgacgccgcaaggccgcagccgctcaccagccgcgtcgtcacgctctggtaccgcccaccggagctcctcctcggcgccaccgagtacggcgtcgccgtcgacctctgcagcaccggctgcatgcctgcatcctcgccgagcttctcgccggcaagcccatcttgcattcttgcccagccaaaccaagggacttctcgccgccggcgctcgacctcctcgacacgctgcttgccatcgagccgtccgaccgggccaccggggcaccgcgccaccgccgccgtagccctcgacagtgacgagttaggacaaagccgcctcccgccgcttcccgccacctcccgccgccccttcctcttccgcccacagctgcgggagatgtgcctccgcggctgcgcgccgctccctcctctcccgccggccgccgcgcaccgctaa

SEQ ID NO: 45961 - DNA, 480 bp, Oryza sativa
  Clone ID: PAT_MRT4530_48875C.1
atggcgtggcgcttacgtggcaactcgatctggaaaaataataaaccccatgtagtatttatttaccttggtttggctgggcaagatgggcttgccggcgagaagctcggcgaggatgcaggcatgcagctggtgctccagaggtcaacgacgacgccgtactcggacgcgtcgaggaggagctccggtgggtggtaccagagcgtgacgacgcggctggtgagcggctgcggcctggcggcgtcgaagaaggtggcgatgtcgaaattggcgatcttgagcatgcccgtcgccgtcgatgagcgggttggcgcccttgatgtcccgatgcagcacgccctgttcatggcagttgcggagcccgacgaagatctgcgccctgaagcacttgacctgcggctccgtgaagtgcagccccggcgtggcggcgaggtcggtgaggttgtggtccatgtactcgaagacgaggtagaagggtga

SEQ ID NO: 45962 - DNA, 1684 bp, Oryza sativa
  Clone ID: PAT_MRT4530_48876C.1
atgtcattctcacccctattcttcttcctcctctcttcatctctctctcctctctccagacacgatcgagagttagcggtgcgcggcggccggcgggagaggagggagcggcgcgcagccgcggaggcacatctcccgcagctgtgggcggaagaggaaggggcggcgggaggtggcgggaagcggcgggaggcggctttgtcctaactcctgaagaactaagcagcagcaaaggacacgacgtgtcagagatccatgcgagcgaggaggagaggagagggaggggagaaggtgtgcgtgcttacgtcactgtcgagggctacggcggcggtggcgcggtgccccggtggcccggtcggacggctcgatggcaagcagcgtgtcgaggaggtcgagcgccggcggcgagaagtccctgaacgtctcggcgatcttccgccgcaatggcaaatcagatgccgatccatttcatccacgcatagatgatatcatgacatatagatggagagttgaggttataatatttatttatttaccttggtttggctgggcaagaatgcaagatgggcttgccggcgagaagctcggcgaggatgcaggcatgcagccggtgctgcagaggtcgacggcgacgccgtactcggtggcgccgaggaggagctccggtgggcggtaccagagcgtgacgacgcggctggtgagcggctgcggccttgcggcgtcgaagaaggtggcgaggccgaagtcggcgatcttgagcatgcccgtcgccgtcggtgagcaggttggcgcccttgatgtcccgatgcagcacgtcccgttcatggcagctgcggagcccgacgaggatctgcgccatgaagcacttgacctgcggctccgtgaagtgcagcaccggcgtggcggcgaggtcgtggtccatgtactcgaagacgaggtagaagggccgcaggcgggggacagagcatcggcggcggcggccgcgacggcaagtgggggacagagcggcggcggcggcgcgtcgccaacgcggtacgtgatgaccaacttcggcaacttccagctcctggcctgggacaagagctcgttggagtggatcaccttcagctcgttcccgacgcaccagtgcaccacgtacggctactgcgacatcacgacgggcgccgccgccgccgccgccacgtgcaagtgcctcgacggcttcgagccagcgagcggcggggagtggagcgccggcaggttctcgggggtttgccggcggaaggaggcgccgccccggcgccgacggggatggtttcttggtgctgctgcggatgaaggtgccggacaagttctcgacgctcgccgggaacatgacgttcgacgagtgcgcggcgaggacaaaaccgctctgaattgggtcgaggggggtaattcgtccggtattgaaagttcaggggtttgcttcgttcatcggaaaggagcaggcggtggccaagtacagcagctcactgaagagcgtcatgtgcataaccagccaccggccattcctgtctgcgtgctgtccactgcttccgtgcgagcacagacgacaggttggggcatggccacacggggcactactccaccggctggaggctggagctgcctcccccgccgtccgctgctacagccagctcggctcattaaggctcggctcgtttga

SEQ ID NO: 45963 - DNA, 1017 bp, Oryza sativa
  Clone ID: PAT_MRT4530_48877C.1
atgaggacgcaccgcagctcttcttctgccgttgctgctgcactgtccctttgcaaggtgctcctgattgtgctcgcgctcatctgcaccctgcacactgcttccgtagacggagacacgatcgagagtcagcggtgcgcggcggccggcgggaaaggagggagtggcgtgcagccgcggaggcacgtctccagcggctgtgggcggaagaggaaggggcggcggaaggtggcgggaagcggcgggaggcggctttgtcctgaagaactaagcagcagcagaggacaccatgcgagcgaggaggagaggagagggaggggagaagatgggcttgccggcgagaagctcggcgaggatgcaggcatgcagccggtgctccagaggtcgacggcgacgccgtactcggtggcgtcgaggaggagctccggtgggcggtaccagagcgtgatgatgcggctggagcggctgcggcctggcggcgtgaagaaggtggcgaggccgaagtcggcgatcttgagcacgcccgtcgccgtcgatgagcaggttggcgcccttgatgtctcgatgcagcacgcaccgttcatggcagctgcggagctcgacgaggatatgcgccatgaagcacttgacctgcggctccatgaagtgcagccccggtgtggcggcgaggtcatggtccatgtactcgaagacgaggtgctcctgatgatcctcgccctcatctgcaccctgcacactgtccccgtagacggagcagggagagacagaagcaggaggtcactggatccaaactacaggccatcggttcctcctggaaggccttacacgccaacgccccccggatgcaacgctgtctacggctgccgaaactctccaccctcatcaccatgacactcttcttcttcttcttcttcttcttctagtgcttctgctgctgctaggcccatctctaagctaatcaatgacgccatgaaataatatggttacacgaataaacatggccagctaatattgatg

SEQ ID NO: 45964 - DNA, 2568 bp, Oryza sativa
  Clone ID: PAT_MRT4530_48878C.1
atgccgccgccgccgccgccgccgccgcccgggaatgttgcggaggagcagccatgggagtacacgctgcggaagtacctcctgctgctggccacgctggtggcgacggtggcgtacggcgccgggttcagcccgccgggcggcgtgtggtcggacgcgaaggacggcgtccacctcgccggcgaccccgtcatcagggaccactacaacggccgctacctcctctacttctactgcaacgccaccgcgttcgtgtcgtcgctcgtcgtcatcgtcctcatcctcctcttcgccgtgctccacgagaagcggaacgtgcgggtcaccgtgatgccgctgcgcgcggtcatggtgctcgacctcgtcagcctcatgggcgcctacgccgcggggacgtgccgggacaggaccaccaccacgttcaccgtcgtgctcgtctccctcgtcgtcgtctacgtcgcgctgcaggtggtgctcgcctcgctgcccgccggcgagcacgacggcgacgagcacgtcgtgaaggagaagtcgcgcaaggtgctcctgctgctcgccacgttcgccacgagcctcacgtacgtcgccggcctgagcacgccgggaggcttctggtcggactcggacgccgccgccggccaccgcgccggcgacgcggtcatgggcgacaggcacccggcgaggctgacggtgttcctcctctgcaacaccaccgcgttcgtcgcgtcgctgctcgtcatcgtgctgctcctcgaccggaagctgcgcgacggcacggtgcgcgcctgggagctgtacgggtgcgtcctcgtctcgctggcggggctcgtcggagcctacgccgccgggagctccagggcggcgcacaccaccgcctacgtagtagctctgatcggcgctgtcctcgcctacattgccatccatctggccgtcgtcgcgtgcgccgcgcgcgcacttagcaacaccggcatgtcggagaagcttgctgggatgtattcttcggtgaaagaacggcgatatcatctcaggcaaccggcccgagaattagcccaggctaatgatgacagggagaagctactgaaccaagctctagagaaggctcgctctcttgttctattgctcgccactctggcagcaaccataacttaccaagcagtgcttgacccgccgggtggttattggcaggttgacaaggatggccacaaggctggtgacccaattctcctaacaattaatgctaagcggtataagacatttttctatttcaactcaactgccttcgtggcatccttactcgccatcatcctggtgcagagcaagtctctgcttaagcgccatgcactggaggcagccatgattttagacttatttgggctcatgggtgcatatgcagctggtagctgccgggatgcaagcacctccataaatgtcatggccatagctggtgcagtgctggtgtatgtggtgatccatatcgtgttcttcacactagatcacaatgatggcagtatgctaggtgaagacaatgcactgctggaaaagaggcgcaagaggttgctcctttttgcgatcttatgtgcaaccatcacctatcaagctgggctaaccccgccaagcggctgctggcaagatgatgataaacaacatggttatcatgcaggtcacccagtcctctttagcaaccacccacgccgttacaaagccttcttctactgcaacacaacaagcttcatgtcatccatcgcccttatcatactcttggtcaatccaaatttgtataggccagccattcatagctatgcgctctctgtttgcatggtggctggcatgtttggtctcatgggtgcctatgctgccggaagctcacaacatatgcggacatccatatatatcttcgttttgctattcatttttctggtcttacttcttgtagcattcgtggtgcaccagaaatctcagggcacgcagaacaggagaacaaatgaagcggaagtacctaatacgaatgacatcaagcgtaaacagtacaccaagcgcaagaacttgatgctactggggattctagcagcgagtgtcacctaccaggccggcttgcacccaccgggtggcgtgtggcagagcaatgatgatgctgggcatgctgcgggtgacccagtcttgcatgacaagcaaaagctacggtatcacgccttcttctacagtaactccatttccttcatggcgtctatcattgttatcatcttgttgttgccagagtcgctaaaactgaatgtcaatgagtggttgttgaaggcaatgaacacgacagttgttctcgacatgattggactcctggtagcctatggtactggctctagtagggattgggacacatctggatatgtcatcgcgatggcaatatttgttctaggctacatttcaatccatgctatgctatcgaagttgagccaggttgccaaccatcgtgttgcttctgaggatcctgagtctcaagtacttggtaatggtttgcatcaggcgcgtggggtctgtgtgggactccatccatccatcaatgttgttcagtga

SEQ ID NO: 45965 - DNA, 210 bp, Oryza sativa
  Clone ID: PAT_MRT4530_48879C.1
atgaaaagggagaagaaaagaaaggcggccggcttgattgagtggccctttgaccgggagaagaagcccccgcttgctaccccggtcccgcgcatctcctcactgagcggcctccctgtcggcgtgcggccatcaatcgacgacgacggcggcgggccccgcgggggaggggacgggtcgacctcgactaacctgcgcggctgcgcctag

SEQ ID NO: 45966 - DNA, 372 bp, Oryza sativa
  Clone ID: PAT_MRT4530_4887C.1
atggcggcgctagggcggctgacactgggaggacgacggcggcggcgctgtgagggcgacaacgacgacggagccgggaggacgacgacgtcggcactgggcagatggtggggcaggcagggagggagctctcttcgccggcacagggagggagctctcttcgccggcggaggggtggcgcggatgggcggcgtcggcggagagaatgctacgggcggcactggatttgggaggaggagagaggctacaggagggagagagaatagaggtggggcccacgatttagccagcgcgagcgactttggccagccaggctgttggagtgcaaatttgagccaaaattgctataatataacttggaaagtgggataa

SEQ ID NO: 45967 - DNA, 316 bp, Oryza sativa
  Clone ID: PAT_MRT4530_48880C.1
acgagtgtgtgcacacgcattgggagagtaggcctccaaaaccacgcgctgatgcgacgtttgcacggacgggcgggcgatcaggtttttgggagcgtaaggcgcgactactcactgttcgtcaacatctacttcaccttcaccaatatgtcgaacacttgagacaacggcaacactgcatacaagcagaagaaggctcccgtcaacatcaacggaggtaatgctgcctcaaactccagcggaggaccattcttgggctcccgcggagaatgtaaaatgcccctattttaagggggtgtggaaacgggccccccct

SEQ ID NO: 45968 - DNA, 240 bp, Oryza sativa
  Clone ID: PAT_MRT4530_48881C.1
atggaggtcggggaggcaaaggcggtggaatggtggggatggtcggtggcgcggctgcaccgaccgaccgagcaaaagtcggtttccggaattgacttgtctggagaagcgggctgtacttgcaacggcgaccggtgggcccaggcccagaatgtatgcgtcagacgtaggccgattcctcttcaggcccagaatgcatgcgtcagacgtaggccgattccttttcagccccagcattag

SEQ ID NO: 45969 - DNA, 423 bp, Oryza sativa
  Clone ID: PAT_MRT4530_48882C.1
gatcgaaattttacggccattattttgtactagagtttttctttctaaaaaaagcggcttatatttcgtgtgatagttggaggccccaaacacatgtttgttagtgcgacccaagttcttggaaattcaatacggttataacccaagaaatctttttgcaaaacacaaaagatgcctgcgccttattagaataaccaagtgtggttctattatatgctgggggaatgcattcatgtggctgaacgcttagtttgaaaagggcgcgctggtacatttttacttctggtggggtcgtgtaacggctgatacaaagggtctgctggagggacctactcatgcggagaaggatttcccttgcaatagggaaggcggtacccttcatcatggtcatcagacagataaaacaagtcgtccgcctggggc

SEQ ID NO: 45970 - DNA, 1811 bp, Oryza sativa
  Clone ID: PAT_MRT4530_48883C.1
gaatcttagctgattggtgctttggactgcagttaggagctgcaaatgtagtgctgatggggacaaatctgactttgtcgtttgatgatgttgaggcaagttttgctccaggagtgaaaggttcaggttttgaaggcgttgtttatactgctgaacctttggacgcctgcagtccgttaacaagtaaagcagaaaagggtccaccatctccatttgcactgatcataagaggcgggtgcacatttgatgaaaaagtaaaaaatgcacaggatgctggattcaaagctgcaatagtatacgacaatgaaaatagcggggttctgatttcaattcatttagcattgtttagactttgggggcatatggttctgcattatctaactttgaagtttacagtggctggaagctcaggtggtattcacatttatgcggtgttcatctcgaaggcctcaggggaggtgttgaagaaattttcaggccatactgatgtagaggtgtggatactacctgcgtttgagaactcagcctggtcaatcatggcaatttcattcatatctctgcttgccatgtctgcggttctagctacttgtttctttgtgagaagacatcatataaggcgggaccggcctagaattccagaagcccgagaattccatggaatgagcagtcaattagtcaaggcaatgccaagccttatcttcacgaaggtgcaagaggacaactgcacatcatcaatgtgtgccatttgcttggaagactacaatgtcggagaaaaattaagagtgttgccttgccgtcacaagttccatgcagcttgtgtggacctttggctcacaacttggagaactttttgccctgtatgcaaacgtgatgcaagtactggaataccagatcctccagcctcagagactacaccattgctttcttctgcagttcgtttgccttctcagtcatcttcgttccggtcaagcgtggcagcatcgcctccaagaccaataagtcgacgaccttcatcacagtccatatctcggatttatgctgcttctggtacccccaactctcctaaccccataaggtctttcacaaactcaactgccatgagcataagtagaagcaatgtggacttatcaaacatgtcttcccgccctcgcgcctcacacctcgcctccgcacattctttggttggcagtcacttgtctccaccaatcaatataaggtacgcatcgccgcatatgtcccactctggctatgcatcacctagtccacatgttagctcatcctatgtctccaactctgggtatggatcttcaagctactatctcggttcatccagccagcatcggtcatacctaaggcgctgtggggaatcagggcctagcttgtctaccatggcccctcagtcgccgcaacagtcccagttaggtcatagtggggcatacggtcttagtctaagcaggagcatcctcaggccagttgtccggcgatccagcctgagactctgtgctgattaagatgcaagcttatctgccatggcatcagctcaatccttgccaggatgctaatttctctgggatcagatcagcttctgtctgtactaagacctggcgtgacttgtgtatacatttgaggcatgtactataggctattggttgagagaaaatggtcgtatttgtttgtgtttctcctgctgccctgcccttttggttgtagtgattgttagcgctctatttgtttcaccctagagtgtatagtacaattgtacagcaactttcttttaaactaagcaatatcatccgcgcgttgcccatacc

SEQ ID NO: 45971 - DNA, 231 bp, Oryza sativa
  Clone ID: PAT_MRT4530_48884C.1
atgggagggtccagtcgcaacggcaacggtcgccgacacgtgggggccacgtcgagtgggaccaacacgtcagtgggttgggtccggctggcaccgaccaccttcgtcgcgagagcggcgccggctatgttgacccttcgtgcagcggcaccgcgtcgccgggagggagaagcggtggacgagtgcctcgccgtcggattgtccatggacgtgtgtgatggatcacgataa

SEQ ID NO: 45972 - DNA, 197 bp, Oryza sativa
  Clone ID: PAT_MRT4530_48885C.1
tgtatgcacagggtgtacaataccaagtcgcgctggtatttcgaaaaacggttcgctgaagccgctatggacgtcttcattgaggcctttgacttaaattttcaggtgccggtgaccaattgtttacgtagccatttgttactgcgtggttgcttgaggttgccagggtagtcaggggtgtattgacgcgaaggtcc

SEQ ID NO: 45973 - DNA, 684 bp, Oryza sativa
  unsure (1)..(684): unsure at all n locations
  Clone ID: PAT_MRT4530_48886C.1
ggccgccccttttttttttttttttttgctttaactatgcactgatatagggatatattcatattcttcatgtacagcagatatgaaacctgtatggttgtatgacaagtagtaaattatttgcaacttggtggatttgtacacttgaaaacagtagaggcaggttgtttgtattcaggtatgctggctggatcaacaggtcgaacctcaccgggctgaaagaataggctgctatgcctccggaggtctagccctatcaacccagcttgtagaattgacaggttgtcagaatctggtgaaacaatgacaacggtatcccccgagtactgagtctctagtattgacatgagctgcgttacccgaacaaatacatctgcaacactctcatttggtgtaccatcactaataggaggtggcttgatgtctggcgaaatactgtctgatgcatacacctcaggcaatgtttctaggctcttcccttcaaacgcgcccaggccacgcgcatctaagaagctgtactcgggtacaatgtggctgcgggtgatctcgttggcggcggcgatgatctcggcggcctggtaggcgcgctgngtgatggagggccatatccagcagtcgtcctcgcaggcgccgaggcgctgcagctcgagcgcggggcgggcggcctgccgcagcccggcgggg

SEQ ID NO: 45974 - DNA, 922 bp, Oryza sativa
  Clone ID: PAT_MRT4530_48887C.1
aaacattccccggggtttgggggttggtgtatttttcttgtgcgggagagatttaaaaccttttggggttttaaaagagaaaaattatttgcaacttggtggatttgtacacttgaaaacagtagaggcaggttgtttgtattcaagtatgctggctggattaccacaatgtacaccttttcccattggtctgtaagatgaactcaccgggctgaaagaataggctgctatgcctccggaggtctagccctatcaacccagcttgtagaattgacaggttgtcagaatcatcactaataggaggtggcttgatgtctggcgaaatactgtctgatgcatacaccaagcaaaaaaatggctgatccataaaccgaagaagctcaggcaatgtttctaggctcttcccttcaaacgcgcccaggccacgcgcatctaagaagctgtactcgggtacaatgtggctgcggttgatctcgttggcggcggcgatgatctcggcggcctggtaggcgcgctgggtgatggagggccatatccagcagtcgtcctcgcaggcgccgaggcgctgcagctcgagcgcggcgcgggcggcctgccgcaggccggcgggggagaggccgctgtccacggaggtcttggagaccgggttggtgcggacgacgccctgcccctcgtacaccgactcccccgcgcgcaccaggaagtagcggttcgccagccgcggcggcggcatgcggaacagcccgcgcgccgaggccgccgccggggcgagcaacgggagcgggagcgggagcgacgcggatagaagcaggagctcgcgtctgcggggacagggcgagagggcggcgcgcggcggtggcggtggcgatggcgccaccggcgaggacgccgcggtagcgggagaggcggcttgcacttgcat

SEQ ID NO: 45975 - DNA, 738 bp, Oryza sativa
  Clone ID: PAT_MRT4530_48888C.1
atgccgccgccgcggctggcgaaccgctacttcctggtgcgcgcgggggagtcggtgtacgaggggcagggcgtcgtccgcaccaacccggtctccaagacctccgtggacagcggcctctcccccgccggcctgcggcaggccgcccgcgccgcgctcgagctgcagcgcctcggcgcctgcgaggacgactgctggatatggccctccatcacccagcgcgcctaccaggccgccgagatcatcgccgccgccaacgagatcaaccgcagccacattgtacccgagtacagcttcttagatgcgcgtggcctgggcgcgtttgaagggaagagcctagaaacattgcctgaggtgtatgcatcagacagtatttcgccagacatcaagccacctcctattagtgatggtacaccaaatgagagtgttgcagatgtatttgttcgggtaacgcagctcatgtcaatactagagactcagtactcgggggataccgttgtcattgtttcaccagattctgacaacctgtcaattctacaagctgggttgatagggctagacctccggagttcatcttacagaccaatgggaaaaggtgtacattgtggtaatcctgcacacttggtgactctgttcacgattcaatttactgatcctttattactagtaaatcacgctcaaggatacgtccaatacaatttacatcaaggagttgttcagagcaggtacaagctataa

SEQ ID NO: 45976 - DNA, 1728 bp, Oryza sativa
  Clone ID: PAT_MRT4530_48889C.1
aatccgcccccagcctcccccttctcctcctcctcccctttctctctacccgaggcgacccacgcgaagcgaacccccgcgcgagacgagagtagtaaaccctagaaacctagaggagatccccaccaccaccatgacggtggatcagaggacgacggcgaaggcgatcatgccgccggtggagatgccgcccgtccagcccggaaggaaatggcgagcccggggatctcgcggagaccctgcttcagtccaagagaccgtcaagcggtgggccgagctcaacaatcagcaggagcttgatccacagggtccaaagaaggcaaggcaggcacctgcaaagggttcaaagaagggctgcatgaaggggaaaggaggaccagagaatacacgttgtgacttccgtggtgtgaggcaacgtacctggggcaagtgggttgctgaaattcgggagccgaatcggcaaagtagactctggttggggaccttcccaactgccgaagctgcagcttgtgcttatgacgaggcagccagagcaatgtatggtccaatggctcgcactaattttggccagcatcatgcccctgctgcttccgttcaggtggttgcacaagcagctgtcaaatgtgctttacctggtggtggcttaacagcaagcaagtctagaacatccactcagggtgcatcagcagatgttcaagatgttttaactggtggcttatcagcatgcgagtccactacaacaacaattaataatcaatctgatgtcgtctctaccttacataagccagaagaggtttctgagatctctagtccacggggagctccaccagctgtcctggaagatggttctaatgaagacaaggctgaatcggttacctatgatgagaacattgtcagccagcagcgtgcccctcctgaagccgaggctagtaatggaagaggcgaggaggtctttgagcctctggaacctattgccagcctaccagaggaccaaggagattattgttttgatattgatgagatgctgagaatgatggaagctgaccctacgaacgagggtttgtggaaaggcgacaaagatggatcagacgccatcctggagcttggccaggatgaacctttctactacgaaggggttgatccaggcatgctggacaacttgctcaggtctgatgagccagcatggttattggcagatcctgcgatgttcatctccggtggcttcgaagatgactctcagttctttgagggcttgtgatttccccttggcggcagccggccatactaaaattttctggtgctttggtcggctagctcctgcacatcgccctcaggatcagcaagagaaacactggaccggattgggttcgttggtggaactggatgagcatctagtagctaaggaaaaaagatccttttatttagttctgtaggcaatggaactccttgagaactccgtttcagtgtttgttaatttgataacgcttgcttgtttgtgtgtgtatatcgatctcttttgaagccatgagaaaaaaaaaaaggactggagaaaatgtgtataaaaaaaaagcgttcttcagcctttcttagccttcatattttacctatgcacgtgggatgttacagttttagagcttgtgagccttctctaaaaccggggattaaaatgcgactaggcacgatatgttcaatctaaaccgaactccactagggtgtatcctcgtgcca

SEQ ID NO: 45977 - DNA, 215 bp, Oryza sativa
  Clone ID: PAT_MRT4530_4888C.1
gcagtgaattcggcacgaggacagtgatgtacaaaaggataagtgacgtctgggaccctccttcaccaagaactaagcccaaacccattaagaaagtatctgatcctgtgagtgagacagaaatctggaattgaagagaacaatgataataataaggacagaagaaactatgagaagccatggcaggtgcctcaacaggttccagtacagaaagg

SEQ ID NO: 45978 - DNA, 512 bp, Oryza sativa
  Clone ID: PAT_MRT4530_48890C.1
ctccctctctctcttcttcttcttccttccctctcaacccgacgacccacgcgaagcgaactctcgcgcgagacgagagtagtaaaccctagaaacctagaggagatccccaccaccaccatgacggtggatcagaggacgacggcgaaggcgatcatgccgccggtggagatgccgcccgtccagcccggaagaaaatgtggaggcgaggaaagtactggaaaccttgattccgtccaaccgataggaaaaagcgaccacggagatcacgcgatggacctacttcagttgcagagaccatcaagcggtgggccgagctcaacaatcagcaggagcttgatccacagggtccaaagaaggcaaggaaggcacctgcaaagggttcaaagaagggctgcatgaaggggaaaggaggaccagagaatacacgttgtgacttccgtggtgtgaggcaacgtacctggggcaagtgggttgctgaaaattcggagcccgatcggcaaagtagactc

SEQ ID NO: 45979 - DNA, 536 bp, Oryza sativa
  Clone ID: PAT_MRT4530_48891C.1
tgcatgcctgctggtgagctcttgtagattatacaccaggcctgcttgttgagaaccctatagaggtgtggcatcatagacgtgtactgctatgtaatcgctagaggacaaggaacgtacggcaataaccaacatcaagatgtgatggcttatggccgtactattcagctgactgcgcaccaagcatacagtgccaccgttggccttatatgcataccaactgcacgcctttcatatcggagtgttgtgaccaagaatagaatatgacccacactggtcttcgttgtacagcaagcccatgacaataaagaattgcacttatgtaaaatgattttccacctaggctcacatattacatggtcaagatacatctatttcttaaactgcaacaattctggatagcatgaccgaatgcggtgagactgaaagtgagactagggtcacaacaaagtcttgccaataattctaaaaatatactcctcccatattcatgaatgatgttgctgagtacagatgatagtacaagcaggcatcat

SEQ ID NO: 45980 - DNA, 720 bp, Oryza sativa
  Clone ID: PAT_MRT4530_48892C.1
atggggcaccgacgtgctggccacctatgcggacacacgggcggctcagatggaggccggggccgatccgacggcccagatcggccgcgcgacaggggtggcggcaactggctgcccggcgaggacgcggcgcgcggcggcagcgacccgaccggacggccactagcggcagcggcgcgtcgcgagctggcccaggatgcgaccgacgaagcggagaaagagggagagggaggggagcgctcatcggggaacgacactgtagggaggcggccggcgaagctcgaggcggaggggggcggcggagctccagtgacgagcgacgctcaggaaggggtgtacgagctcggtcgcgacctggggatggggtttaaaggggttagggaagcgcggggtggccggaacagcgaggaaggatggccgaaggcgatgagggtggcggagctcaccggcgagcgagggagatggagctccggcgaggttttcgacggtgtggggcggtgcccgtggtacggcacagtgcaacgacgctggggtgaccatcgtggctcgggatggcggtgcggcggtgacccaagcggtggtggtgggcggctgaacgacactggtgagcggctgaggttggtggcgcggtggggcggcttttcgatggtggtgggggaaaacggagtggcggcctggcttgcccttgcggcggcgaagctggcgatgacggcggagtag

SEQ ID NO: 45981 - DNA, 129 bp, Oryza sativa
  Clone ID: PAT_MRT4530_48893C.1
gatgtcgccaaatacttacacagtacgaagttatctacagactacagcttggctatagcacccctgtacaggggaactgtatcacttgcaaagatgagaatggctattcgtcatcacctgaatggctga

SEQ ID NO: 45982 - DNA, 333 bp, Oryza sativa
  Clone ID: PAT_MRT4530_48894C.1
atggcaccccatacccagtcggactatacatgccgtgtagtcttcgacttcagcgattggagtgaggaacgagacagcatcacgggtgccgcggcggggagtggggcggtgcttgcggtggcaagggatggaggaggtggcggtggcaaggggagggggatcgatctgggcgggaggagaggatgggggaaaggagagcgcaatacgccattgggacgtgaattttctgcagcaagattcgtcatgggcttcttctcctctgactccggcaagctccccctcttctctagcgccgttgatacccccaactccagcaggagacaagcgaattag

SEQ ID NO: 45983 - DNA, 257 bp, Oryza sativa
  Clone ID: PAT_MRT4530_48895C.1
cacaccttaggcaacttttggctaaaagatgggtgtatgacatgtgggcctttgaattgaaaaactttggcataccacaacccccggaagtgaaaacaaagtatcctagaaagtgtggcaaagtgagagagcgaaccaaacagcccccgatgtccgcatgcagatcggagacctgtctgcaccaaaggatcaaaagctgattgaagaaagtcctgctgaagtctgcacccgggaattcgcttcctgaatggctttga

SEQ ID NO: 45984 - DNA, 1222 bp, Oryza sativa
  Clone ID: PAT_MRT4530_48896C.1
ttttttttttttgtgtctgttttgagaacagtctaatatcagtatatatatttgttaacattatcacttagcagggtttcttggcagcacaaatctgctacaaaataaaaggaaaaaaaaatctgaatgctgcctcatgtagtcatgtgagattaactgaccactgtagtactactctactgtatttttgcatcactcttcttctgtattttatcgttgctgatcagccgaaaagtgtccggagaacggtgtcgccgaggccggggacggcggagaggaagtggccggtgccggggagctcgtggtagctgacccagccgagcttcccggcgacgtgccgctgcagcgcgacggggacgaggccgtcctcgtcgccctgccagatgtgcaccgggcacggcggctccggcagcgccatcgggtcgaactcccacttcccgaacatcaccgtcatgtccctgtagtacgactcgttgatcccttgctgcgtcgccatctccttcttcttttggagggtgccgtcggcggtgagggtgcggcggatgtcggcgtcgcgcttgttggggaggaaggtggtgttgtcgacgacggtggaggtggggagccagctctggtccatccaccagtggaggatggccggggcgtggtgcgacacgcggagcgcccactggtcgccgtacgactgcctgccgtacgccgccgcggcgtcctccgccgggaacccgggccaccagtagttcaccacgggcgccatcatcgccgccccggcgatcctctccgggatgtacctgagcgcgccccacacggcgtggctgccgagggacacgccgacgacgtagaacttgtcgccgaggcccagcgcgtcggcgagctccgccatgtccagcgccgcgctcttgacggtgcggttcgggttcgggtcgctctcgccgtagccggcgcggtcgaaggcgaccatgtacacgcccagctcttcagccacttccggcgaggcgcggaggctgtcgaggcgggagccggtgaagccgtgggagaagacgatcttgtatcgcgccgcctccttgggcacgccggactcctcgtacgccaggtgccgcccgtcgctcagccgcacccgcggcgccgtcaccggcgggccacccggcgcgccgcacacccgcggcggcggcggcatcaccgccctggacagcagctccccgagctgccccacgagcgtgcccat

SEQ ID NO: 45985 - DNA, 227 bp, Oryza sativa
  unsure (1)..(227): unsure at all n locations
  Clone ID: PAT_MRT4530_48897C.1
cctagagtgcctgacagacgcgccagcggcggtaccgttcacggtgatcatattcttgcaccatgatagcttgatgcactcntccgacagctcggaccatataccacagactgtgccggcggatagtgaagctgatcaagggcgtctgacaagtgcgtgaactacctgcgcgcgccagagcaccggtacccgtgcgcgtacgacgactgatggaccatgctgaagtg

SEQ ID NO: 45986 - DNA, 2142 bp, Oryza sativa
  Clone ID: PAT_MRT4530_48898C.1
atggaggtcacagcaggggcgatgagagctctcctccccaagcttgctaagctgctcaaggatgaatacaaccttgagaagcatgtgagggaaggggtcaagtctctggagatagagctcacgatgatgcatgctgcactccgtaaggtggctgaggtgcccctagaccagctagatgatcaggtcaagatctgggcatccaaggtgagagagatctcgtacgacatggaggatgccggtgatgcattcatggtacgtgtggaagatgactcccatagtgggcccagtaccttcaagaacagagtcaagaggcctattaaaaagataagcaaattgttcagaaaggcaaaggagctccatcagattgctgatgccatcaaggaagcccaagccctcgcgcagcagatggctgggttgcgtgaaaggtacagcggactcgagctgcaaaacagcggcatggttactagtactattgatccacgcttgacagcattgtacatcgacgcaacagatcttgttggtatagatcacgctagggaggaactgatcaagacattgacagaaggtgaagattcatccaagcagcaactgaagattatctccatcgttggctttggaggaccgggcaagacaactcttgcaagagcagtgcatgagaaaattgaagcacagtttgattgttcggcttttgtttctgtctctaggaatcctgacgtaagaatgattttcaagaagatgcttcatcaattggacaaagtaaaatatgcaaacatcaatgaatcatcaagggatgaaatacagctcattgacgaattgagagaatttcttcaggacaagaggtactttatcataatcgatgacttatgggacgagagagtatgggactatatcaagtgtgcttttcctaaagacaatcttggcagtaggttaatcatcacgacccgcaatgtcaatgtatctaaagcatgctgctctgccaataatgatataatctataaaatgaaacctctttctgaagatgactccaagaaactcttctataaaagaatatttcctcatgggaatggatgtccttgtgaactagaggaagtatccaatgaaattttgaaaaaatgtggcggtgtgccattagccataattactatagcaagccttttggctaataaggagttacagacaaaggatcaatggtttactttgcacaattctattggacgtggacttacagaaggccgtaatgttgaagacatgcagaaaatattatctttcagctattatgatctaccttcacatctgaagtcttgtttattgtgtctgagtgtattcccagaagattatgagattaggagaaaccggctgatatggaggtggatagcagaaggttttgtgcaacaaacacaaaatggtggtagcttatttgagcaaggtgaaaattactttaacgaactcgtaaatagaagcatgatccaacccattgatatcgatgctgaaggcagagcaaaagcttgtcgtgtacatgacatggtgcttgatctcatatgccacatgtcaagccaacaaaacttcatcactgtgttcaatgatattgggaatatcacatgttcacgaaacaagacatgtgggttgatcaagtgcgaccgggggatatacaaatccttggagaactggcagcatagaggagcgtgtagtggagagatttgtggtcagcaccaacgccttccaacgcgcgacagagtgccatccatgttcccacgaggagccatgccgagggttaggtaccttgagttcagcctccgagcatgggacaacgacatggccatcggtaatggtagcagtggtgatctcgacttggccatgggacatctcccttcactggagcgtgtgagcgttacgctcttggtgcacgagctagcaggcagcatcttcctcgagatcgacattacaattgacaatatgtcaatgtatgctgaactggctgtaattggattcgtttcaaatgatagaaatcggatggatgcattacattcatcaggggacgacgtcgagacgaagctcacaatctccacatattttgatatggttattgttggattcatctactttgtatctgttctgtcacttcaagttgcccaatgtttttag

SEQ ID NO: 45987 - DNA, 357 bp, Oryza sativa
  Clone ID: PAT_MRT4530_48899C.1
ctcactctcacttccttagctcgcatgtagcagagagtccagacacaggagagcaatggcggcaatgcatgtggatgcttccacaggggtgatgaacactctcctacccaagctctccaagcttcttgaagagtacacaaatatcaaaggcgctgcgcgcaaccaaattaccttcctgagagatgagttgagcagcatgaagcctgtgctagagatgtttgcagatgtagatgatgggctcgatcctctgaagagggaatggcgggacaatgtgcgtgagctggccttcgacatcgaggactacactgattctttcatgatccgtgttagccatgaaagtgatgaactgcctactgg

SEQ ID NO: 45988 - DNA, 322 bp, Oryza sativa
  Clone ID: PAT_MRT4530_4889C.1
ataggactcgaacgatccaatcatgctacaaaataaatgggagcacaattctaatttgtccacacccacactacacccatgcgtaccagtgcattgtgtataggtgcgcccatacatactcacatggagaacacactgattcgatcagacggaggagtatgaattctggcgtacacgcacttacccatctgtactgagatagctacatccatgaaaacttggaacaaatgcaaaacatgctggatagaatggctaatggaacttgatgcgaggagagctgtagaggtggacggcatcaggtacgctttcaaggccagttgta

SEQ ID NO: 45989 - DNA, 1476 bp, Oryza sativa
  Clone ID: PAT_MRT4530_488C.1
atggacaccttcttttctgctgttcttggtgatcttctcagcaggtctgtatccttcctgatcaacagataccaccagcaacagaaggatgccgaggagaatcaacagcggttacaccgtgtgcttctgcggatcgaagccacagtcgaggaggccgaccggaggtgcatcacaaaccaggcgatgctgctgcagctcaggatgctgagagacgtgatgtacagaggctattacttcctcgatagcttcaggtaccgaaacatccaagcacatgctcaagatgaggttggtgatcactctcttggcctgtcccatttctgtccattaaagcgtttctgcatctccactagaacatggaaaattctgtcacaagttctggagaagaaagagctgcaagagatgcttgatcacctgcaaggcatagtttcagacatgcaggagtttgttgtgcttatgagcagctaccctcgtatgagtcgccagccttatggcagctacttgttgctggaaaactgcatgtttggccgccaaatagagaaggagaggatcatcaacttcttgctagaaccacatcgtcctgccggttcaaaaggcattgatgtgctcccaataattgggccttgcagagttgggaagaccactcttgttgagcatgtctgccatgatgaaatggttcgtaaatgcttctctaaaatacttatgtatggcgcagatagtattgagtgtggagaattggtgcctcttactgaaatcggtgtaatcaaacatcgaaatcctgcatcaactggacaatcacttcttatcattgaacttgtcaatgatatggataatgaaacatggacaagaatattgcacagactgagaggagaccactcaacacctgtgggtaagatcatcataacaagtcgatcaaacaaggtagcaacctttggaacaacggaagcacttcaactagattttctcccagaagaagagttttggtatttcttcaagacgatggtatttgggagcgcaaatcctgaagaagagccggagctagcagccatatgtatggagatcgctgccttgatgaatagatcattcatgggaacatacatcattggtgacatactcaggtctaatctcaatcctcaattttggtacaagtttctcgaatgctttaaatattatacagacattcatatccgtgagctaggcgaacatccaactgaaacatataaaaggataagtggacacacttgcgtttggacgcctgaaaatcggtgtgttactgaagcgacatatgcattgacatacactctttatcaagcaagttctgaagatctgaatgatcagcccatggtgctagcaagcgatgttcttgttggaaatgttcagcttcaagggaaagttgatgtcctgcaatggcgatcgaagataccaccttactactgctacatggcacatttcgagataatctcaattttagtttactaa

SEQ ID NO: 45990 - DNA, 321 bp, Oryza sativa
  Clone ID: PAT_MRT4530_48900C.1
atgtcactgaagaaggtgtccgacgtcgtcggaggagagcacgatggggaggagctacctgcaccctgcatgcactgcaagaactccatcgccgccgccgagcgccgctaccgtcgcagcccatggccgcaacgacgacgcggcactgcttggggaggctcgccggggacgggcggtggacggcgggcagtcttcgcgtggccgggcgggctgacagccggcgccaacgattctcatctgtcgggaaaggataggttcacttcaagtccctcaattgtcaccaagtctaaattctaccctgaaccacaatactacatatga

SEQ ID NO: 45991 - DNA, 1527 bp, Oryza sativa
  Clone ID: PAT_MRT4530_48901C.1
atggccggcaaccagcagctgcgggtgctgcacgccctggacattgcaaggacacagctgtaccatttcatcgcgatcgtgatcgccggtatgggcttcttcaccgacgcctacgacctcttctccatctcccttgtcgccgacctcctcggccacgtctactaccacggcgagctgccccggaacatccacgccgccgtcaccggcatcgcgctttgtggcaccgtccctggacagctcgtcttcggctggctaggcgacaaaatgggccggaagcgtgtctatggaatcaccctcctcctcatggttgtctcctctctcgcctccggactctccttcagtaagcacgaggggatgaacattatcgctgtgctttgcttcttccggttctggcttggcgtcagcatcggtggggattacccactctccgccaccatcatgtcagagtacgccaacaagaggactcgtggtgccttcattgctgctgtctttgctatgcaaggtttcggcaaccttgctgctgggatcattggaatgatagtatctgcagctttcaagcattcatcggcatcaaagattgactatgcctggcggataatcctcatgtttggcgccattcctgctgctctcacttaccactggcgcatgaagatgccagaaacagcacgttacactgccctcatctctaagaatgcaaagaaggccgccaaggacatgtctgccgtgctcaatgtcaacataaccccggacgatgaagttatcaatgagcttgcaaggcaggacgagtatggcctcttctcgttcgagtttctccaccgccatggcctccacctccttggcaccaccgtctgttggttcgtcctcgacgtcaccttctactcgctcaacattttcatgaagaatatcttcaccgaggtcggtcttcttcctcgtctagatagcgaataccaccataccctccagcggatgatcaccatgacagcagttcacacatttatctcgctttgcggtgcacttcccgggtacttcttcactgtcgccttcgttgatcgcatcggccgtgtcaagatccagctgattggattcaccatgatgactgttttcatgctttgtcttgcaattccttatgatcagtggctgaggcacaagaacaagtacggatttgcagtcatgtatggcctgaccttcttcttcgccaactttgggccaaatactacaaccttcataattccagctgagattttccctgcaaggctacggtccacatgccatgggatatctggtgcggttgggaagatcggtgcgattgtcggtgtgtttggtttcttgtacacagaataccatatcaggatctttctgtttgtccttattgggtgcaatcttgttggattcatcttcacccttctcttaccagagtcgaaagggaagtccctcgaggatctcactggggagattgaagagttccaggaggaagatgaaggaagtgaagttgctttgtctagacccatacatactgtgcctttatag

SEQ ID NO: 45992 - DNA, 669 bp, Oryza sativa
  Clone ID: PAT_MRT4530_48902C.1
atggaatcgaaatcgaagcctctccttgccctcctctgcctcatgatcgccaaaggcaactgcgtgtgcttgcgctgcatgaacgacttcgtcgtcgtcggccagcagctggcggagaacgatcacggcgagctcggcggcggcggcgacgagcacacgatgtacacgttcgaggtgacggtgacgaaccggtgctgctgcgaggtgagcagcgtcgtcgtggcggcgccggggttccggagcgccgtcccggtggagccgaagctgttccggcggatcgccggcggggaggagaagggctactacctcgtcggcgacggcgaggcgatcccgaacaacgggtcaagcgtcaccttcttctacgcgtggagcaccgtgttcaggatggatgtcgtcagcatgactgtctctagatgccgcatggactccaagacacactgcgtcaacgctaatgaaccagtgcatctcgtggactccggcgtcgcctcgattgcgcagcatggcctgcatgccttcctgccaatcgtcgatgtgcttggcaccacaccatcacttaaattggactggcgggatgtgggggtggtgacgggcttcggggaggtcggcactcgacacaaggtagatgcagtgtgtggcaatggcagggatagatacggtggagtctcgtag

SEQ ID NO: 45993 - DNA, 978 bp, Oryza sativa
  Clone ID: PAT_MRT4530_48903C.1
atggatcggaagaaggcgggggtgccgctcgtgtgccacggccactcgcggccggtggtggacctcttctacagccccgtcacgcccgacggctgcttcctcatcagcgcgagcaaggactcaaacccaatgattcgcaatggtgatactggagattggattgggacctttgaaggtcacaaaggtgctgtttggagctgttgccttgacaccaatgctctacgtgccgcctctggttctgctgacttctcagctaaagtatgggatgcactaactggtgaagagcttcactccttcgaacacaagcacattgttcgtgcatgtgctttttctgaggacacccacctgttacttactggaggtcttgagaaaattttacgtatatatgatatgaatcgcccagatgcagccccaagagagattgacaaatctcctggctctgtcagaactgttgcttggcttcatagtgaccaatctatattaagttgctgcactgatatgggtggcgtaaggttgtgggatgtaaggagtggaaaaattgctcaaactcttgaaaccaaggctactgttactagtgcagaagtaagccaagatggccgcttcggacttgttaagagctataatatgccatgcaatgtggaatcagcttctcttgaaccaaagtatgggaacaaattcattgctggtggagaagacatgtgggtccatgtctttgatttcttcactggtgaagaaataacttgcaacaaaggccaccacggtccagtccattgcgtccggtttgctcctggcggcgagtcgtatgcatcaggatcagaggatggaaccatccgaatctggcagctgggcccagctaccagtgacgagcaagagtcgccgccgaatgcaaatgggaagctgaaggtcaacacggtgagtgacgctgctcgcaagatcgaaggctttcacctccccaaggacggccagactgagggatag

SEQ ID NO: 45994 - DNA, 860 bp, Oryza sativa
  Clone ID: PAT_MRT4530_48904C.1
ggcacgagggaaaaccatagaagggaaacagtgggtttgactaatcttatggcatcgcatacatgttgataactcacaaatgtgtccctaacgcattgtctgaaggactgaaggtcgagtataaggtggacagaaagctcgtgactcgttagctcgctcggcttgtgacaggctctgctcggctcgtttgaattttctaacgagccgagctaacattttagctcgttagagataacgagccagctcgagctggctcgcaagccttaacgagctagactcataacagcccaaaagcccaatacaacaaaaaggcctaagcccaagacattgtaaaccctagtcctcactcaattccccactctcccccccagccgccgctgccgctgcgcctctccccaagccgtcgccgctccgcctctcctctggccgctgtcgccgctccgcctctcccccatccgccgccgccgctctgcctctcccccagccgccgccaccgccgctcccgctccgcctctcctctagccgccgccgccgccgggaagatcgagcacccgctgccgccggtctccgcccctcccccaccagcgctcgccgccgccggtctcctcctctcccctgccagtgcccgccaccgacgggagatcgagcgcccaccgccgccggtctccaactatcccccacgcccgccgccgccgggagatcgagcgcccaccgtcgccgatctccacctctcccccagcgatccagcgcccgacgctgccggcgagctcgagctcgtctcctccaagtgccggcggagctgcgtcgagttcatcccctccaccgtcgagctcctccctgtccctgtggtcgtcggcgag

SEQ ID NO: 45995 - DNA, 2121 bp, Oryza sativa
  Clone ID: PAT_MRT4530_48905C.1
atgtcggggttcgtcggcgtcgtggtctccgacccgtcgctgcagggccagttcacgcaggtggagctccgatcgctcaaggccaagtttctatctctgaagagagactccggaggacatgccacgacgaagaacctcccgggactgatgaagaagctgagggggctcaatgaggtgatctccgaggaggagatcgccgcccacttgtcccagtcttaccctgacgccgaccaggagattgagttcgagtcattcctacgggaatacctgaatctgcagtcaagggtgagcgccaaagaaggcgcacgtggtggtggcggcggtggcaagaccgcgtcatctttcctcaagtccagtaccactacattgctgcacaatctcaaccaggcggagaagtcgtcttatgtggcgcacatcaacacctaccttcgtgaagacccgtttctgaagaagtatttaccaatcgagcctaccgacaaccagctgttcgatcttgtcagggacggtgttctgctatgtaaattgatcaatttagctgtacctgggaccattgatgagagagcaataaataagaaaagagttcttaacccatgggagaggaatgaaaatcacaccctgtgcctcaactctgccaaggccattggatgtacagttgtaaacattggtacacaagatttggtggagggaaggcctcatttaattcttggattgatatctcaaatcataaagattcaacttttggctgatctgaatctcaagaagacaccccagctggtggaattgtttgatgacagcaaggatatagatgaagtgttgagcttgtcaccagaaaagatgctacttcggtggatgaaccatcatctgaaaaaagctggctacaagaaaaccgtcagcaatttctctacagatgtgaaggatggtgaagcatatgcttaccttctaaaagctcttgctccagagcattcccctgaaaccacattagagacaaaggatcctagtgagagggctaaattggtacttgaacaagcagagaagttggattgcaaaagatacttgactcctaaggatatcactgagggttctgccaatttgaatcttgcatttgtggcacaaatattccagcatcggaatggtctaactagtgacaccagacaagttactctcaatcagactgcatcacgtgatgatgttctattatcgagagaagaaaggtcctttcggatgtggatcaacagtcttggggttgactcttacgtgaacaatgtttttgaagatgttcgccatggatgggtacttcttgaagtactggacaaagtttctccaggatctgtcaattggaagctggcctcgaaacctccaattaaactaccattcaggaaattggagaattgcaatcaagtggtaaaaatcggaaaggagttaaagttttccttagtaaatttagctgggaatgatattgttcagggtaacaagaaattgattgttgctctgcggggccgattgatgagatttaatatgcttcaattgttgaatagactgagatcccactcccaaggatcccaaggaaaagaaattactgatgctgatatactaaaatgggcaaacagcaaagtgaaagcatcaggaagaacatctcaaatggaaagcttcaaggacaagagcttatcaaatggacggtttttccttgaacttcttagtgcagtacaaccgagggttgtcaactggaaagttgttacaaagggggaagatgatgaggaaaagaagctaaatgctacatataccattagtgttgcaaggaaaatcggatgttccgtgtttctgctgccagaggacatcattgaggtaaatcagaagatgatcctaacgcttacggctagcatcatgtattggagtctacagaagcaaccacagtcacaatctgaaacgtcagaacaatcagagccatctagtatggcttcggatgcagcttctgatattgcttcggaggacgctgcttcaataacagctgcatctgagggagaagaggtgaattcgctatctgatagtatgtccaatttgaccacatatgatgctatttcaaatgccccgccagcagaaaatggaaatggtgtggcaggatga

SEQ ID NO: 45996 - DNA, 417 bp, Oryza sativa
  Clone ID: PAT_MRT4530_48906C.1
atgggtgccttggtacaaagaaatgaaaacttattggctattcaatgccagcgatccatatatatcatgtgtgcgcaatattactgttgcagatacgtggaggtgaacgagagtactagcgtgcgcctcttctactactttgttaagtcagagaaggatcctgatgtagacccacttttattgtggctatcaggtgggccaggatgttctagtatctctggcctaacccacgagataggggcagggttctcatacgcggcaacaatggaagggtccaagtctagtgataccaagacagtgaaacagctttatattttcctcagaaagattataaagggaatagcggaactcaatgataccgatgagaccgtagtcgagttggttcgactaggtcacccggcgacttggctcctgtag

SEQ ID NO: 45997 - DNA, 222 bp, Oryza sativa
  Clone ID: PAT_MRT4530_48907C.1
atgaaaagcaaaaccggagaagagcaagcagcaaccaaacgcagacaggacacgggtgggccccacgcagcagcatgtcagcaccgtgcacgagtggggagtggacagacagatgcttccatgcacatgagaaaaatggaaaatgtggggggatttaatttcctcgttgacatgacatatgaccgaaaaaattatgaccaaccgggagcatttactacaatg

SEQ ID NO: 45998 - DNA, 257 bp, Oryza sativa
  Clone ID: PAT_MRT4530_48908C.1
atgggctcgctcacggggatggatggtggtgtaccaattgaccgggcggctgggtccgagtgctgttgctctgcggtggctccctgtgcggtgaggacggctgacgtgagcttctccaagtgggacgaggaaaggcgaggagatcaggagagaccggggatagagccggtgcgttggccgctacgccgtggaggcctgcgcttgcggcatgggatggacgacacggcgcttgcggcacgaaatcttgaaagggtctt

SEQ ID NO: 45999 - DNA, 730 bp, Oryza sativa
  Clone ID: PAT_MRT4530_48909C.1
gggggtactcttatctcgtaatgtatatatatgctgaaacgcaacttattaccacaactgtaacatgtccattctgtgtgatagtgtatcttttcttacttcctccgttttacaatgtaagtcattctatatctatctagattcattagcatcaatatgaatgtgggaaatgctagaatgacttatattgtgaaacggagagagtacttcattcagtagaacaataacaccgggagtccagatacaattaaggtcgtcacaagtgagtacatctctgatattcctttagcccctcgggtgccgcttccattagcagtttggttagtactaatggtgctattgttaccgttgcagtcaagcactgcgcactcgtttgaaaacaggccagctggatagcttccatgggcgttgaggtagacccacatcgattctgcgcagttggtgctttcgtcgttgatatattggctgaaattgcatgcgaactcgttcagagctgggcagcagaggtcggcaggccatggcgatttgcacttgctggtgatggtcgtgtagttctggttctcaaagctcacagggcagccacccttggcctgaagcaagctcctcctattcatcgatgttcccatcacctgaagcaccccatcggataagatgggaggagacaagaggaggaagaacaagaacacaaggttcagatcagccatggcctgagagaaactcactatagcat

SEQ ID NO: 46000 - DNA, 2571 bp, Oryza sativa
  Clone ID: PAT_MRT4530_4890C.1
ttagttgacagtaacaccgccttgctgatcctctgcatccttgttatcatcacactctttgttactgatctcttcgacgtatgcttccttgatggcaagtctaggatggttgggatttgcatttgcttcgctcctgatggcagccaccgcagcctcagcatcagaatcttcagcgcccacacggtagataaatacctccacttctttgagatgttggaggttgttgatgccaaaatagaaatcatggggttctgccattaaaacgtgaaatagaatctcaagcttctccagctttggcatagctcctttctcaaacgtaaggtatgctccaccattgtgatcgctacaagcaaggacaaactccttaagaaataggaatcctgtgctttggactgtaagctgttcttttgggtcaggttccagccatatttctagactgagtaaggctggcaggtctccaagtgtttccatatcttccttctttatctcacgtaaatttatgctaaggtatgccattttggtgagatacggtttaacccactttggaagttgcaggagatagtagtcagtgatcatgtgaaacaatcggaggaaacaagggatagggaaccaacgttctaagaaatcatcggtactgtgatctataatgtgcaatgattggagtttgtagctgcttagtttacaaagtgaggcgagtaacatctcttcttttgtcttgcacttgctgagtttatcagacaaacttattttgaggtccctcaaactggtcagctcaccaagttctgccactgcgctcgctgagctactgcttatattaatgcctgatagcacctgtagattcctcatattcccaattccatccggtagcttcaacatccgatctccgagaagatgttgtagctttatcaatcggcaaaattcagtgggaaactcttctacgcatgtttggcgaaggtccagcgtcaccaaattttggagctttgcaatttgtgttggtatatgtgatatgtttgaacaacaaaggcttaagtactcaagctggaatagcttgtctatattttccaaatactgctctaaaccatcaaaaccaatgtccacaggttgaaccagacttttgttgatgagctcataaaagtagctctccgcaacatcttccaatttctgcccacagtcttcagagataaagccttcagctatccatcgccatactaccatgtttctttcaataatacaatcctctggaaatatgctcaaatatagcaaacaagtcttgagatagtttggaaggttattaaagctaagggacagtatgattttcattccttctagattttggttcttgtccaatgcaaaaccaatcgattctttcactttctcccactcttccttgataactggtctatttgctaataagccagatatgctaataattgctaatggaagaccgccacatttcttcaatatatctgttgaaacttcctgtaaaatatctgggcagccatcctcatttgtactgaaaattctcttgcaaaatagtcttccagagtgaacttcacttagaggttccatctgataattgcggtcaatgccatttaagcagcatgaccatccaacatcggaaacgcgtgtagtaactataattgtactggaacagtcattatccgggaatgcaaccgtgatagctttccatgccgaaatagaccatacatcatcaattataacaagatacctcttatccacaagtagttctcttagcttttcaataaatttcttttcattccatgtgtcaatatctttgaggaaaccatctttcgtaggcatattgtatgttatatccttgaagatattcttgaaatcgggcttttgtgacactgacacaaatgcatggcagtcaaaatgaactttaaccctacgatatacctcattcgctagagttgtcttcccaagacctccaaaccccacaatagataataccttgcgacactttatcaacctgctctctgcatccaaccaattgacaagttcaacccttgggccatctataccgacaagatggttctcttccgcgaagagagtagccaaccgtggatcaacagaagcattggtattgctagagctactgcaaaaaatatcgtcaagcttgtagctgttcttttgatctctcaccgagataactcgtgccttcagttcctcaatctcgccagcaatattatgcctcgggccaagagttttgagacgttgtatactcttcctaaagaagtcctcgatgctattactggtgcggtgctgctcaccgttggcaccaagttggtgcataaacttgtctatgcagtcctcgatgtcataggcaagctccctcagctcggtgatccaggccttcacctggatgtcagggtcctcgagtgacgcatacttgtggagcgccgcttgcatgttgctcagctccgatcttagggaatggatctcacggcggacacctttcaagcacgcgtacttgtctgcgagcaaggtactgagcttgcccagtagcggccccagtgccccatgtgagacactcaccacggcatccat

SEQ ID NO: 46001 - DNA, 500 bp, Oryza sativa
  unsure (1)..(500): unsure at all n locations
  Clone ID: PAT_MRT4530_48910C.1
tcccnnttgggtnccccccccnaaagggcaaagnnacnccccgntttggatncggggggttcccattttttgcccttcgcttctggancctttcccaancanatgtgggttcgccaggacgggactacccccgggagcggaccctttcccattgtcncacccgccaagtgcttttaaagcgccataatcgtagcccccgttctttgcaagtttaccgaccaacctcgacagcaatatcggcgncaagataaaccgagatgttgggctgcttccgactttgaaaggcccatgtcttcgaaattttttggccatgatgttggtgtgttggggggaggcatgtntaaaactgcaggaaaagtacgatggtatttgtctttaagtagttcggcgttgtcgcgcggaaaaaccgggcaggcggnccacgtattcgggacnttgatgatacaatttagctctgttacccttaaaaaaaaaaaaaaaaaaaaaaaaaaaaaaaaaaa

SEQ ID NO: 46002 - DNA, 174 bp, Oryza sativa
  Clone ID: PAT_MRT4530_48911C.1
tttttggttatatcggaccacactaagattcatttattcatacatttgatcaaattatacgagacgagattcttctttgcgtataaccacacagatgggcaagcccccattttacacatactatatagttcaacacaataacttgcgatcacaacgatctggttgtatgatgac

SEQ ID NO: 46003 - DNA, 411 bp, Oryza sativa
  Clone ID: PAT_MRT4530_48912C.1
atggcggcggcccggaatccgaaaagtttccgtaccgttttcacccctaagagtaagaagggggcgggcagcctcaccctggcatcgtcgtcaattgaggaggtggagggattagctgaggcggtggaggatgcggtcggtgagtggcagaggatgcggtcgatccagtgggatctattctctctagctcatgatagtggacgagctcgaggagacttgccaaccgacggccaccacccaactccatcttctcgtctccgtgcgctagtccctccgtcctcccacctcccatgccacgccaccggcaggcgccacggcattgagctccatgatgacggtgcccatgaccatgctactctaggcgaggggcatgctacggcagtggacttggtgacggagggctcattgtag

SEQ ID NO: 46004 - DNA, 303 bp, Oryza sativa
  Clone ID: PAT_MRT4530_48913C.1
atggatccaaccgcccccgtgctcgtggcggcagatttggccacccccttgctcacaacaacaaacccagcggagaggaggagggacggcgtttgtggcagagatgaggggcggtggtggcaacgtcggctcgattgtcggcttgactacctgaggagtgttggttttctaaaagattacccggttgaagcattagcttgctttagatggtatacgggcggcaatggaatgggttcacatgcccattatagcggataccagattaccggtaatataatccagatgtggcagttagccttgtga

SEQ ID NO: 46005 - DNA, 1530 bp, Oryza sativa
  Clone ID: PAT_MRT4530_48914C.1
ctcggagcagattttgccaagggattagtggatctacaaagagtttctgccagaattgaggggagatttttttcaatctcttgtacacagagtgactatctgaggaggctttctctcagaatgctcaagttggagactgagcctattcaactagggcatcagcaggcagttgatcaatcttccgagtccaaagttggtcagtacccaacctcaatgcttcaacaacagaccagttgtgatcagcagagtctatgcattcaggtagataccaagctccaggagatgccaccgaacgaacacttgctcgaccaagttcctccacgaagccagaagaagctctgcatggatgacaggctaagtgaccttcctgatacaattctacaccatattatgtctctcttatcagcacaggaggttgcacgtacgtgtatcctgtccaagagatggaaggagctttcggcctcagcaccatgccttgatatctgtgtagataagtttggaatggacagggtgcggttcagtgagtttgtagcacatttgctgctatcccgggctcctaattcactgcatacatttcgtcttcactcttttgcaatcgaccatgccagctcttggatcaatcgtgcaattgagctcaaggcacaagtgcttgaattcaccgaatatataagatgggaatctttttacttggatccacagcttatggcttttgcatctcaatacctgaaatgtttgaagctcaccaatgttactctagactccaatgcgtttgaaccgctaaaccatgcatgcccagctttggaaaaccttcagttgtcacagtgcttccttgaggtgcctgagatttgttcagcttcattgaagaagttggatattatggagtgttctcttttgatgaatcttcaaattcagacccctcgcttggtctctttacgcttcaggtgtcttcaatacaaatgttcttcatgcagtaggtatcctgtaattacagcagcagtgactctatgtgatcttccgaatgccgagaacatagacttgtcatgttctgggagacaggttacatttggcagagaaattcaaaagttcccgatgtatggcaaattaacaagcatctctcttggtgaatggtgtctttctgacaagttctctcgattattttgcctccttcgacactcacctgaacttaaggagcttactcttaagcttgaggtggaacgtcaagaccacaatggagaggatgagattcgcttgatggtgggaagatcattttcagccgaaaatcttaagaagatctgcatatctaccatgcaagagttgtccagaaagatcgctaggagacagagttggggaatgctctcacgcttcaacaagaaggataccgcagtctcgacgatcaccatgcctcaagaggtaaaaccagaggcaatggcgtatttggttgcctgcacgcccatccgatctaggtccagcttgtgcaaatcacacctcgaagccaggcttggaggaaacacggaaattggcttaggctag

SEQ ID NO: 46006 - DNA, 573 bp, Oryza sativa
  Clone ID: PAT_MRT4530_48915C.1
atggggttgtgccagtggaggctggagaggcaggaggcggtgtcgaggtgcaaggcgaggcgggacatggcggcggagcatgtggtctacctccgggcgctgcgtgccatgggcgtcgccctgctgcagttcgccagtgtcgatgcagaccatccgaggcagattccgcgatctcgggccgctgccggcacgcgccgccctcacctctgcctccatgccaccgtcggtagcgccgccgtgctgtgtcgcctcgtcttcccccgccgccgcatgcttcagaagaggagggagaagagcgccgagccgccgtcctccgtctcccatcccgatgcatctcgcacgcgccctagcgagatgtcgccaccacacgctgggtacaggcatgcgtcgccgccgcgcccggcagcacaacaccttctctgcaaacaggcacagccgcacagcacctccgccgcgagtttagaggccgggtggcagccggccagggccgtcaccgcccaaggcaagcacagcaccggcagcatcgaagcaccgttgcagctttttatttgtttccctcactacttgagataa

SEQ ID NO: 46007 - DNA, 651 bp, Oryza sativa
  Clone ID: PAT_MRT4530_48916C.1
tgcgtcgtgtcgcgttcgtgctcgtggccgcgtagcggagtacgctgctgcgcacgcattgatttcatcccaccatctcgtggtacgtacacgtccgtctccgtccccatggcgcgcggctaaaacgagctctcgacccccgaaatagcccggcacaaacacgcaccacccgcccgcgcgcctacgcctaccgcgcaggaggcagggcgagcgagcggcctccctccctcgctgctgccgcgcgagcgcgccgacgctgctcgatcttggttttcgcctgtccgggggcgggcgagatgatgaagctgcgttggtggcgggtggacgcgtcggaggtcgcggccgtaacggcgatgggcgtgtgggaggccgtcctcgccggcggcggcaggaggttcctcaagaggaaggacagcgacgccggcgagactggtcgtgcgttggaggagttgcggagttcattgtacaatgaaatgcatagctcagaaggggccaagcgacagcagcagcggttctgtggaccaagtgttgcactgacatttaattttgctgttgctgttggtatcatcatggcaaacaaaatggtgatggggagtgttgggtttaagttcccaattgcactatcgctaattcattacgcgggtgcatttg

SEQ ID NO: 46008 - DNA, 1140 bp, Oryza sativa
  Clone ID: PAT_MRT4530_48917C.1
atgacggcctcccgcaaccgagaaacctccgcgcgcttccatttcaccacgtaccgccgcggcggcgcccacctcgcggggccgctccaagcctccttagacgccaagctcaccgccatctgccacagcctcgccgccgcgccgcccgcctcctccaagaaagccgccgccgccgccgctcacccggactcgcccaaaggctccgcgtcgacgacgaccacgacgtcggagggagacgagtcggcgatctccgcctgttcgcctcctctcccgccgccgccaccgccgccgccggcggcgctccccgagatggcaaaccttgacttcacggaggcgccatgggacgaatccgacgccttccacctctacaagtgtccgtcatgggagatcgactgggactccatcctctcgatgagtcaccacttgtacaaagctaataactctccgtacaatgtggaaaacctgatccggaatttattgaagatattgcttgatccaactgaggaggaggccgagctgacagcttcggaggaggcagggtggaggtggaggcggcgacgagatcgtgtcttggagctcccgaccggcaaccgccatggtgccatcaagttcgggaagcttcagacggcgctggtgtgggggaaactagaggtgaggacgcagcgatcagtgaagactggctgccgcatgactcccaactcccatgtttccacttcctcacacgccgacgcccgatgcccgacgcgcactaacgacaagctccccatctcttcaaacctagcaacggaggcaaggaaggccactacaacaaagacatccgcgacgatggtggctatgctgggggcgagcgcggtgcggggagacgggcggggtcgcctatatatttacaccatggtgggggaggtcgaggaggtggtagtggcggtgcctcctttcgttcccgtgggctgttccaccaccgtgccaccggagagggagctcgacgctaacaccggggtagagagggaggaggcgagaaggccggtgaccacgccggatgttgatggtggtgacgacaacgcgatcgggcaccacggaaggggggcggtggggatggctgaccatggtcgctgtttgggcacccacttcttgccactatga

SEQ ID NO: 46009 - DNA, 2054 bp, Oryza sativa
  Clone ID: PAT_MRT4530_48918C.1
atgaagccgtcgatcgtgcactgcctcaagctgctcatgctgctggcgctcggcggggtcaccatgcacgtccccgacgaggacgacgtggtcgcgtcgctcggggcgctgcgcctcgacggccatttcagcttcgacgacgcccacgccgccgcccgggacttcggcaaccggtgcagcctcctgccggcggccgtgctccaccctggctcggtgtccgacgtcgccgccaccgtcaggcgcgtgttccagctgggcaggagctcgccgctcaccgtcgcggcgcgcgggcacggccactcgctcctcggccagtcccaggccgccggcgggatcgtcgtcaagatggagtccctcgccgccgccgcagccagggcggtgcgggtgcacggcggcgcgtcgccccacgtggacgccccgggcggcgagctctggatcaacgtgctgcatgagacgctcaagcacgggctggcgcccaggtcatggaccgactacctccatctcacagtcggtggcaccttgtcgaatgcgggggtcagcgggcaggcgttccggcatggaccgcaggtcagcaatgtcaaccaactggagattgtgacagggaggggagaagttgtcacctgctcgcacgaggtgaactctgatctcttctacgctgctcttggcggcctgggccagtttgggatcatcaccagggctcggattgctcttgaacctgctccaaagatggtgcggtggatacgtgttctctactcggactttgagaccttcaccgaggaccaggagaagctgatcgcgtctgagaagaccttcgactacatcgaagggtttgtgatcataaacaggacaggcatcctcaacaactggaggacgtcgttcaagccacaggacccagtgcaggcaagccagttccagtcggatggaagagtgctatactgccttgagctgacgatgaacttcaaccacgatgaggctgacatcatggaacaggaagttggtgcgctgctatctcgactcagatacatatcgtccactctattctacaccgatgtcacatacctggagttcttggacagggtgcacacttctgagctgaagctgagggctcaaggcctctgggaagtcccacacccgtggctgaatcttctgatcccaaggagcacagtccacaaatttgcaaaggaagtcttcggcaagatcctaaaagatagcaacaatggtcccatactgctttacccagtgaacagaaccaagtgggacaacagaacatcagtggtcataccagatgaagaaattttctacctggttgggttcctatcttcagcaccatcatcctcaggtcatggtagtgtcgaacatgcaatgaacctgaacaacaaaatagtggacttctgtgaaaagaatggtgttgggatgaaacagtatctagcaccctacactacacagaagcagtggaaagcccacttcggagcaaggtgggagacatttgaacggaggaaacacacgtacgatcccctagcaatcctagctccagggcagagaatatttccaaaggcatcactacctatgtccttgtgacagtatatgctgtgaaaaggcttttgtagagcatatgttgtacaaaaatgtagcgaaaatatcctttgtaaagacgaaatctacggaaggtagcttaaagaacacagcggggcaaccagtagactagaactcaagaagtagtggaagatacctcacaaaagacttcaaagcaaagcagcgtggccttaactctggttgcagctttggaggcaaatgattggaggattacagtggtcctagcaactgaagtccagctgttgttacagcatagagaagagctgtgctacctcaatgatcactaaatcactgactagtgtaactcatgttaagttgtttgtgttcagctaacaacactgcagaaggtagcatcagggtagacccttgattagcaaataacacagcctgttgcatgtgagtactatctgcataaatgcagcagattacattagtttttatgaatcgaatgttatgtttgc

SEQ ID NO: 46010 - DNA, 532 bp, Oryza sativa
  Clone ID: PAT_MRT4530_48919C.1
gggcatcccgaagctcgtccgcccgtcgccgccgtcttcccgtggctcgccatcgccgttagccatcgtctccctccgcgccggccactcgcggtgaggcatccctcccctcttttccccttcctctccctcctagtgccgcgccgccgcttcaagtcatgcgccgtcgccttcggccgccgccgccgcctcccgtgccgccgttcgccgtcgccgtcggccgcgtgccgtcgccactagccatggctggccgaccggctttgatgccgagccgagctcggcggccgcctctaccgccaccgcccgatcggctcagggccgatctgggccgtcggtcccgtggaccggcggtggaccacccgcgtgatcccggtccacattggaccgccccccttgagccactgccgagtggggcccgtgtgccggcgcccttccccctctctcgcgagccaccgaccgattccggctcttccgacgctccggcgtacttcgaaatagtcgccgaggttcctccagcagcagagcaaggcaa

SEQ ID NO: 46011 - DNA, 870 bp, Oryza sativa
  Clone ID: PAT_MRT4530_4891C.1
tcacgccatctcgtttccatccggccatccatccgcacgtttggctctgaaagattctctccccattccccatttccgcacccatgctactcccaaatccccaatccccatcccaaaatcctcgccacctccgccccaaaaattctcgttgccgtcgaccctgtgccacttcgtcatcgtcgagccagcggtgccgctcccttcccttggagccactgttctgcgccacctccctgtggagccgaccgccaccgttgtcttctcgtggagccaatggtcagcactgccaccaaccatctcgtccacggccatctcctcgcttcttgtggctgctgcttgtcggcttctccacacttctccaattgtaggtattttactgctcagattagctttgctttggtctctatacaggtatgattcctactaatttccataaatatttcttctgatatgtttgctacctgtacaatcggcctaaagtgcaaacaacagtcaggttttcctatttctttcataatacatgattccccattgtttcagggatgcatgatagttttatatatcttgctgggattccatttgtttagcagccatatgtggttatagcacatattttcattatttttacacacagcagaatagcatgtacaaagagatattggcctgaccctatgtaattgtacgatgtacatatacctatagtgcaggatgccaatgcaccatgaaagttataaaaatcattctattgctcatgttctctttctcatgttgggatagctcagttattaattttgaaagagcatgtatgtcatgtgtgcatccttgctgtttatccagtccttggtcataatgcatatgtttcctttacat

SEQ ID NO: 46012 - DNA, 268 bp, Oryza sativa
  Clone ID: PAT_MRT4530_48920C.1
acacggcagttttacagcaatatacatctgaactgactgtttgctgatcatttttttggttcagccgatagacactaaacacctatgtgatctaatatgcatatcaaaaatgtgcagcagtttacttgtgatgcaaaaactcaaacagctacggtaacccatgctcagcgtaaggctccgtcttgagaacgaatgctgggcatacgtgtattgactatatgttccacacgcgtatagaatattacaagaaaatagctgattctaataa

SEQ ID NO: 46013 - DNA, 489 bp, Oryza sativa
  Clone ID: PAT_MRT4530_48921C.1
atggctctcctcctctctgccacggtggggcgcggcctcctcttgtcgttggccaccgtgacgcaggcggtgatggtgcccaagttcggctacatccgcaaggccgtcgcggcggcgcgcggtggcatcaccaccaccgtcgagtttgacctcttcacgctgcccggtggcgtcgatgccttcgacaaggccgcgcgctactgctaccgtgccaacttccagctatcagtgcgcaacgcggccgcgcttctctgcgcctctgccttcctcgacatgcagccgccgttggcccggtggccggacgcctccacgcgcccccggtcgtggcggcagggcagggtgccctggttgcggcggcacagcagggcctcggccccggcctcgcgcggcgagggaggcgaagcagcgaggcagccgcccggtcccctccccactcgtggctgcctggcacctctccggcctggcgtggcggcggcggctcccagctag

SEQ ID NO: 46014 - DNA, 170 bp, Oryza sativa
  Clone ID: PAT_MRT4530_48922C.1
atgccggccggggaaccggagctcgagccggtagatgtctcagctagtgctttatctgttcgtggcgtcgtaggctggagctgtatttttgttgcggcgtgggtgcatggcttacgtgcggtgcactaccacggcggcagccatggtcgtggacgctgtgtggcgagctc

SEQ ID NO: 46015 - DNA, 655 bp, Oryza sativa
  Clone ID: PAT_MRT4530_48923C.1
ctaggccagaagggatggaaccggcgtcgagaggagatcatggatcagggaaaatatagcaacgacgacggcatgacgacaattggcggggtcgtctttcttcgcagccggcagcggagataaggcgtcggagaggctgaggtcattcgctctcggtttggtcggcactagagtgaggaatgggaatgagcgatgcagctgggaggagatgaagactcggctcggcgttgccacgtcgaggccatgcgtcgcgcgcgtccagtgccggtcggcaccgcttcctcctcgctctctctttccctcggtgtatcttggtcggctggggaatagacacagagatggggtgacatagggacgatgaaaggtgggtccagggcgatggttgctaggtgtgggtgtgagggatgggtatagggatggcaatgggtcgggtcggccgacccaatgcccgacattgcccgcccgtaccctacccactagagttagcgggcaaaactccgtgcccgtacccatgcccggcgggcgcgggtatgtccggccatgatgtcttcgggtctcgagcaggcgtgtccatgggtaaaatgtcacacccacgcccatgaccatcgggtcgggtatccacggatacccgaagccatgggtaaaattatcatcc

SEQ ID NO: 46016 - DNA, 352 bp, Oryza sativa
  Clone ID: PAT_MRT4530_48924C.1
aaaagggggggagttaatttcttattatttgaaaaaaaaggtaaaaaaaaatttttgtatttttttttaacaaagccaaaatagggggattagcaaagaaaaatatggaaattttttaaaattccgcgacaacaaagtttaaaaaaaagaaaaatggggtgggcccgtttttttttttttttaaaaaaggcaaaaaaaatttttccaaaaaaaaaattggggaaacgggttttttttcaaaaaaatataaccaggtgcctctttaaaattgtaaaatgggtataatatgggaatataagggattttggaggcctaaaagctaaaagtgggattggacgcttattttgaccca

SEQ ID NO: 46017 - DNA, 829 bp, Oryza sativa
  Clone ID: PAT_MRT4530_48925C.1
cactcacctagcttgttagctcacaatggcaggcactaaactcgtagctcttggtttcattgttctcttgagcattggattagccaatgcttcaagagtggcaagatactcaagtgcccaaggatcaggcagtggtagtggagaggggtcaggatctgtgaatggtgggggatccgggggcggaagtggtacgggatctggtcagagtggttataatggtgcacacgcaagtggtggaggcagagggggcggcggtggcggtagccagtatggtggatcagggtctggtagtgggtcaggctcgggctcaggctctagtcagtatagttcaaattattatggctctggtggtgaatattctagtgcaggcggtagcggtggcggtggtggcggaggacaaggcaatggaaattatgggtcaactggacaaggatctggtagcggtactggttctgcccatgggtccgctaattctaactactggcgtggaccaagttatgcaaatgcaaatgctggtggctatggtaatggtaatggctatggacaaaatggtggtagcggtggcggcggaggttcagggagtggctatggtgatgccaatccttaatttcctttatactggaaattatgaaaacttgaagcccaacctagtccgtgccatgtcaatgttgtgaaatttgtttttcttttttttttcacacctgttttatgcatcacgtttcaagaaataaagggcttcatgtaaagtttctgccaaaaaaaaaaaaaaaaaaaaaaaaaaaaaaaaaaaatgaaagaaagaatgggtagaaacggcgactgctgtaca

SEQ ID NO: 46018 - DNA, 1075 bp, Oryza sativa
  Clone ID: PAT_MRT4530_48926C.1
atgccgctcctcctcgtcgccggcaccgtcgtcctcgcgctgctggcgtcaccggcggcggccttcaacatcaccaggatcctcggcgagttctccgacttctccaccttcaaccacctcctcacgcagacgaagctggcggacgagatcaaccggcggcagaccatcacggtgctcgcactcgacaacggcgccgcgggcggcgtctcctcgctcccttccgacgagcagcggaaggtgctctccgtccacgtcgtcctcgactactacgacaccgaaaagctcggcggcatgaagatgaagaaccgctccgccgtgctcaccaccctcttccagtcctccggccaggccaccgaccgcatgggcttcctcaactacaccaaacgctccgacggcatcatggtgttcggctccgccgagcccggcgcgcaggccacgtcccagatggtcaaggtcgtcgtcacccgcccctacaacatctccgtgctgcaggtcaactcccccatcgtgccgcccggcatcgcctccgtcagcaacagcaacaccggcgcgccaccgccccacccggccaagtccagcgcgccggcaccctcgccgtccaagtccaaggggaagaagtcggatgccccggcaccgggcccgtccgacgacgtcgacgacgacaccgccgccgacgcgccgggaccggcggtggatggccccacggcggacgggccggcggcggacggtcctgcggcggatggtccgactgaggcagacgcgccggcgcacgacaagggcgacgtcgcagacgcgccgtccgccgccggcagggcggtggccagcagcgcaggccttggcgtcgttgcacttgtggttctcatcttcccctcagtctcactctgatcaatgctaaaatggtggaggccgagaaatcggaagagtttataaatagaatgaccattaggaaacgatatagtcagggttcactctatcggttgagacgtttgtatcgggggtcaccgaaattccgaaatttcgaaaatttcggtccgaaatttggaaaatttcgagtaaaatttagttgaatttgaat

SEQ ID NO: 46019 - DNA, 653 bp, Oryza sativa
  Clone ID: PAT_MRT4530_48927C.1
tcggcacgaggcatcactctgcttagtatatgatattgcaaagaaagatggatctaatacaattggccaagcagcaagtaaccagttctactttcaattcttaacctattatcagcatcatgagggacaaatgagattacgagctactacgatctccagaagatgggtttctggttctgatagtgtgcaggagcttataggtggctttgaccaagaagctgcagctgctgtcatggcacgcttggtctcatttaagatggaaactgaggctgattttgatcctataagatggcttgatcgagctttgatacgtctatgttccaaatttggtgactatcagaaggaaaccccttcatcctttagtttgtccccgcgtatatcaatatttccccaatttgtttttaatttgaggcgttctcagtttgttcaggtttttaacaatagtcctgatgaaactgcatattttaggatggtattggacagggaagatgtaaccaatgcagtcgtgatgattcagccttcacttatatcctattcatttcaatctgggccagagccagttctcttagatgtaactgcaaattgcagctgacaagattcttttatcggattcttattttactgttgttatcttccatgggataacgattgca

SEQ ID NO: 46020 - DNA, 418 bp, Oryza sativa
  Clone ID: PAT_MRT4530_48928C.1
aaacaaaaaaaaaacaagagggcaagggcggggagaagccagaaaaaaaaggacaaggccactgctaagcgtccccaggaaacaacaggctaagtcaaaagggcgcttcacatacccacaaacacaaccgggccctgggccaaatgccacgaggccaaaagtgcgcaaaagcttccaaaagggaccatcaccgatggggacatgagaagcccaaaagggtggaggcccaaactaaacgcttcgggatcagagcaccggctttactccctggaattagcaggacaattattctgctctgaaatcaaccacaacagaaggacaagggacgcggatctggcccaaacactaaggccggatagaggatcaacgagcgactcaggggattcaaattcattctcggggacaggaaacggaaaag

SEQ ID NO: 46021 - DNA, 2807 bp, Oryza sativa
  Clone ID: PAT_MRT4530_48929C.1
atggagacccgaagcggcggcagcggcagcgccagcggcggcggcggcggcggcaggatgaggctgcggaagacggagtcggcggagatgcggtgggtggtgtctggcggcgcctacgaggaggacgagatcgagagctccgacggcgggggcggcaccccggcggccgcctcgggctcccgcggcggctgctcggactccgacgacaactacgaggaggcggagatgctccgccagcggctcgtgcgcaccggcccgcgcgccgactcgctggacgtcgaggcgcaggacgtcgcaggcatgaaccgccaccaggaaattaccgtaggcaggagtattgtgctggctgttcagacactaggtgtcgtcttcggtgacgttggtaccagtccattgtatgctttcgatgtaatgttcaacaagtaccctattacttcgaaggaggatgtacttggggcactctcacttgtaatatacactctgattctaataccattgctgaagtatactctcattgctttatggggaaacgatgatggagaaggagggacatttgctttatactcgctaatatgcaggaatgcaagggttagtctgcttcctaaccaactacgctctgatactcgtatatcaagcttccaactccaggtgccttcagtagaactggagaggtctttgaagatcaaggagcgtcttgagacttcatctatgctaaagaagctgcttttgatgcttgttctttttggtacttctatggtgatagcggatggtgttgtcacaccagcaatgtcagtgatgtctgctgtcaatggcttaaaggttggaatatctagtgttaatgaaggtgaagttgtcatgataactgtggcagttcttattgtcctgttcactctacaacgatttgggtcaagcaaagtggcgcttgctgttggacctgccttgttcatatggttttgctgccttgctggaataggaatttataacatgaagacatatggttcagctgtattacaggcatttaatcctatgtatatatactattattttgaaaggaacccaacccaagcttggatgtcccttggaggctgtcttctatgtgctactggatctgaggcaatgtttgctgatttatgctatttctctgtcaaatctgttcagcttacctttgtgtttcttgttcttccatgcctgctactgggttacctagggcaagctgcatttcttatggaaaatctaacagaaaatcagcaggtcttctttttatctatcccgaatcaggcattttggccagtggtattcatagcaattctagcagccataattgctagtcgcacaatgacaactgctatattctcaacaataaagcaggccacagctctcggctgttttccccgcctcaagattattcacacttctagaagcttcatgggtcaaatatatatcccaatgatgaactggtttttgctggtttcttgccttgcatttgttacaatgtttgggagcatcaatgagattggaaatgcatatggcatagctgaacttggggtcatgatgatgactacagtcttggtgaccatcataatgcttttgatatggcagatcaacatcattgtagttctgtgttttctcaccctctccctggggctggagttaattttcttttcttcagtattgggcagtgtagcagatgggagttgggttcttttggtatttgctgctgtactgtatttgataatgtacatatggaactacggaaccaagttgaagtacgaaactgaggttaagcaaaaactttcaatggatttgttgatggagctaggttgtaatctgggtacagtcagagtccctggaattggattactttataacgaacttgcgaggggagttcctggaatctttggtcaattcctcgccacaatgccagccattcattcaatgattatttttgtctgcatcaagtgggttccagttcctgttgtacctcagaatgaaagatttctctttcgtcgggtctgtccaaagagctatcatatgtttcgctgcattgctaggtatgggtacaaggacatacgcaaggaggactacatatcatttcagcagcttctgatagagagtctcgagaagttcatgcggcgggaagcccaagagcgctccctagagagtgaccaatacgacggtacagactcagaagaggaggttgcatcagcctcgtcaagagctctcgtcggtcccaatggcagtatcaattctctcggtgttccacctgccgaggcggctggtactaccgagcacccaaccattggatcgagcatgtcgttcgacggatcgctggatgaggcgatcgatgggaggggaagcctcgacgacgagctctcgttcatccacaaggccaaggagtccggcgtggtgtacctcctgggccacggcgacatcagagctcggaaggagtccttctttgtcaagaagctggtgatcaactatttctacgccttcttgaggaggaactgcaggagaggaatcgcggcgctgagcataccgccctcccggatgatgcaggtcgctatgcaatacatggtttaagggccttcagctgttctgcataccattttgtacttcggtggtaagggcactttaactcccattggatagagtggcaagaggttttcaaacaggctgcttaccaccacagaatctatcaaacactaacaagctaatactactgtttaaccgaagccatgagaaaaaagaactagtccattcagcgaccttaacaaaaggtcacttttacctacaaaaaaaaaaaaaaa

SEQ ID NO: 46022 - DNA, 266 bp, Oryza sativa
  Clone ID: PAT_MRT4530_4892C.1
tttcaaagttacatgtttatgaattattgttagctttatcgtgcttctgttgaaaaaaagatctattatttggtcatccattccgctggcattgctcacacctatattccatcgaaaaagccaaaaaaaaagttgaaaaaaagtgactgtacttctgaaaattcggtcaagggaagccgcaaaactgacactttagatgcggcaaatattaagattaattgcaagtatttgactacacaccatgtgcaaaaggagatcgtggagag

SEQ ID NO: 46023 - DNA, 458 bp, Oryza sativa
  unsure (1)..(458): unsure at all n locations
  Clone ID: PAT_MRT4530_48930C.1
cacctcctcctcggctcctccgcctgaatccttctccctcgccgggttagggtttcctcgcctcgccatggcctccttcacctcccagctcggcgccatggcgtgcggcgccgccccctccacctcgnccctcgcggcccggaggagcgggcagctgttcgtggggcggaagcgcggcggcgtcggtgcagatgcgggtgccgcgggcggggcgggcgcggggggtggcgatgcgggtggcgtgcgagaaggtggtggggatcgacctcgggacgaccaacttccgcggtggcggcgatggagggcgggaagccgacggtcatcancaacggcgagggccagcggacgacggccttcgtggttgcgtanacaagggcggggagcggtttgttcgggaagatcgcaaagcggaaggccttgtaaacccgaganaacttttttttcntaaaggtttaatt

SEQ ID NO: 46024 - DNA, 481 bp, Oryza sativa
  Clone ID: PAT_MRT4530_48931C.1
agacgccagcaggaacagcatccaccatatatatccacagagtacaattcgagtgctgaaagttgtagagagaatcaggagtagtaactgggaactgtagactgagagtaatcgttcgactggacgactccactagcatgtgctagtgccttcagttgcgtctgatgatactgcaagtgatcaaggctcatcttcaataccacagcaacattgctgcaacatctgtgaaaagtctcagatttgagccctctggtacggattaagatcatctaatgtgaagttaaaaggacgtggttactgacatgtgggcttcaccatccacaggctcacatgccaatgaccacgtcaagcataagttcacattagaggatctgcttccctacaatagataatactactgatagaagatactaaggtactactacatgtttctatcaacagtcaacatgttcttcctccctgaaaggctgaaatggatgga

SEQ ID NO: 46025 - DNA, 678 bp, Oryza sativa
  Clone ID: PAT_MRT4530_48932C.1
atgtactatcttatcccgagcccaaccattttcgtcacgacccaagctggcatgctgccatttgccactgtgcacgtctgcatcgtccgccaacgagcacgcgcagcaccaggtcgggatcgccgcgagtcgccggcgcaggcgcaagtggcggagcaggccgccttcaggggaagggatcaccgggcgccatgcgagagcctggacgaggcgaggaaggcgcacgcgcgacacgtcaagctcggcgtcgaccgctcgctgcggcacgcgcggccgctcctcgcggcgtgcgcgctcgccgccgactggcccgggagcatggcctacgcggcgtccatcttcgcggcgctcgacgaccctgaggcgttcgactacaacaccctgacgcgcgactactccgcgtcacccgccgctgccgcccccgccgccgctctgtccctcgcctgccaccgccgcctccgcgtcacccgccgaggccgacgctgctctgtcccctgcctgccgcccatgagagagaggaagagtgagagagaagagagaggaagagtgggaggaaaacaggtgggtcccataacttttttaaaaatagaattgctgactggactgtcacgtaggctaaaaccaccgcagattgggtcgagggggggtaattcgtccggtttacatagttgggggtga

SEQ ID NO: 46026 - DNA, 892 bp, Oryza sativa
  Clone ID: PAT_MRT4530_48933C.1
attttatcatactggaagaaatgctcctgctgggggggaaaatacggtcaatccagacattccaattccatgtcatgaggacttgtcagctgttgaagtggtaactgaggagcagttgccacctgctgaaataacagatgttattttacctcaaaaggtacatagctcctcaagcactcctgaagttgcaagatcagatcaactaaaggacgcagcggcttcacaaacccctaaatgttcaattcaagctgtgccatattcaacacctatatcttcaccacaaccactaggccgtcagataatagcagaagaagaacgggctcaattgttgttcggttcatttggttgctgtgaccttaagtattggccttcttacccgacggtggtctgtaactctgatgtaatggccaagtcagtgcctactgtttccaacaagagggggttttcttcatttgttgacaaacccctctatatttcgaaagcttcatcagagcaccgtgcccaacaaagtgcttttacaaatcgttttctcgaatttctcagagggtttagattggggaataccgaagagccttattacaaaggaacagctgcttctatggtttttcttgatcttccaatgatggacgtaaagtttgatcatatcaagatatttgataatgaacttgcacttatgatatgccatgactttgagagaagtaggctagatctgaactatgcagcaaaatcatttatcatggattttagaagtcagttggaagggatgttcatgaagaagtttgaaagcttcgacaacattatagttcgtatagatggcttaccgaaaattgacagattaatgtcacttgaggcttttgtgaaattgcctggaaatcattttgttgaaccaaga

SEQ ID NO: 46027 - DNA, 195 bp, Oryza sativa
  Clone ID: PAT_MRT4530_48934C.1
atggtgctcatcatggcacaacgacgccgcgtgaggtcgcggatcccgttcgcattctgtcctgttttcctgcctaacggccaccttcttcaggagccaggaggaggcggccagcaggcccagcagcactacacacttgagggtgatgttgaatcaggacttaactttagtctctatatttatacactaatttag

SEQ ID NO: 46028 - DNA, 381 bp, Oryza sativa
  Clone ID: PAT_MRT4530_48935C.1
atgcatagaccatcaacgatatccttgcacgaagaagtctctacaaagcgatgcccccaagctggacatgacatagattgccgccacggctcgtcggaagctggagtaaggttttcacccagagagcggttttgccgaaagtcatcggtgtcgcctgacaccaatgactatactgtagatccgcccctgggtaaggaaatgagaggggtcaatgccataacgacgcctccaagaggggagcgacgccaaaaggcattgccatcgtcagctggccaacgtcccggcgaggctttcgccagcgattacccgtccaaacccacacaaccaatccgcacaagaaggatcgtcgccggtctactacatagtctcttcagcgattag

SEQ ID NO: 46029 - DNA, 3452 bp, Oryza sativa
  Clone ID: PAT_MRT4530_48936C.1
atggagtcgctgcccggtggaccgagggggcgtgttttgtgtggtaaaggtggctcgcacataagctgtgatggtccatgtatgaggtccttccatgcaaaaatcggtactggtgaagattcctattgtgatacacttgggtacactgaggcagaagttcaggcaatgaaaactttcttgtgcaaaaattgtgagcataagcaacatcagtgttttatatgtggagctttagaaccttcagatggaccagctgctaaggtgtcgctacagcagcaaaacacacagaggaaggaccatgagatagatactgacattgacacaccgatcagagaccatataaagttccctcgtactccaaacatagaaaaacctgcaagacttctaaagaagtcaaccaaagtggttaagaaaaaaaggccttttagtgagtcagttcctgatcaactttcaacagaacttcgaaaactgccagatatggtttgcattcaagaaagtgatcgagccagaaagattagtgctaggagttcatctgagcaatttgttgtcaaacccgataagaaaaaagccaggttcttgaaagatacaccacagcctgatccatgtctgctcaaggatgcttctacaggcattacaaaacctgcaaaagagcagggaaaactgttggtaactatgccttcatcatctacttctacgaagataccccaaagttcatttcctagagtggatagcgaaacagagaagagggtaatggccttggtggaaagagaagcctcttatttgacattaaaggatatttcaagaaagtgcttgatgccttcaactcatgcatactcgggcaggcaggttgacaggattattgcgactggcaagcttgagcgttctgttcaggctgtaggggcagctttaaaaatgctggaaaatggaggcaatgttaatgatgctaaagcagtctgtgaacctgaagtcttgaagcagcttacaagatggcatagtaagctcagagtatatatatcacctttcatttatggtactcgctacagttcgtttggtcggcattttacaaaggtggaaaagcttgttgagattgttgataagcttcattgctacgtggaacctggtgacacgatagtggacttctgctgtggtgcaaatgatttcagccgattgatgaaagaaaaacttgacaaagtccagaagaagtgtcatttcaagaattatgatcttatccagccgcagaattgcttcgccttcgaaaggaaagattggatgactgtacggccaaaagaattgcctcatggatccaaactaataatggggcttaatcctccttttggagtcaaagcatctcttgcgaacaaatttattgacaaggcattgacctttaagcctaagctcgttatattgattgtcccaaaggaaacaaaaaggttggatcaaaagaagacaccttatgatttgatttgggaggatagtgattgtctttcgggaaaggcattttatttgcctggttctgttgatgttaatgataaagtagttgaagggtggaatgcctctgcaccacctctccatttatggagccatcctgattggacaaggaagcacaggaaagtagctgaggagcataaccacactagcatagggaggatcgcttcccatgttgaagaagataatctatcagataacctccctatgatgaaagaaactgaatcttatggtatacataactctagatcagggaaagaggagaatgcaggacaaacttcatgcaatctcaaagggaccaatctatcagatctccctgtgaggagacaggctgaagctggcaacaaacgaaatgttggaccaggcaaagagaaagagactacagagaagacatcatgcgatgtcagagaggttattctatcagatgatcgtcctgtgaagacacaagctggatatggacaagtgaaagctaaagagtaccatagatccgatagccttcctgtgaagaaacaagctgagactaattaccagcaaatctctcaatcaggaaaggagaaagagcatagcatggatgaaagcaatagcactcataacaggagcaggaaaagaacccctgatcaggttgatgggagcctccctccagaaaaacaagtggaagttgcttatgaggaaagaatggctattcctatcaagaagagtactcaccaagaaaaacaactagatgcaggagacagattaaatgctcatagaggatcagagattatgggtgccaaattcacagaacaagcgaactctgacatgagcatgtcatcctctgactccagtaatgctcaaaacaaatccagaagcggttccccttttattccaattggacaccctgctgataagagtacaggtcgagatagttttattagttatcctccaaaagaacatcttgtctctaagcaggctacttatcagggcagatatttagcaagcaataatgaatgcaacaatgcatttgaagggaagattgatcctccatttcataccaatatcgatgatatctccaggaagttcagccctggtactgacttcgaagtgaacaggcagcatttcactgccccaactggcaacgtgtacagtttgcaatctctaagagatagtgacaggttttataggacgcagcgctcagaagacaggaacactaattctcttgagagcacaactggtgatgcacctttgcatggacaccccacaaggtacagtcgacaagttggtgatgataattatctacaaaccagtagggtcccatcaacattgcatgagcaggcacatccaagaacgcatgttggacatgctgatggttacttacagacaagtcaatactcccttggatcttcaggtgctacatatggtcagcaaacatcttcatatggactccccggtacgagtacaccatatagcattatggacaagtatgctcctggattcttggctccaagtgcacaaagaagctcagttatggacatgtacgccctggttccaagtgcatctggaagctcggttatggacaagtatgctccacctttagaggatacaaactacagtgcacgaggggttccacaatacccgtaccgacagctaggctcttctggtgggggttggcctcgtagctgaccacacttcagtttacctgatcaccgttttgaatgtcattgacggctgatgcagcgcttgctttttttttttccttctgagagatctgctgccatgttatttctgcgttccatttgatgaatactaaagtggatcacttgtacaggaatagaaatctcaccctccaagaaaatgagcaagatcctagcttactaatgtagtgtacactgtgaccctagactgacgaatgcccagattccagtatgctggttgttgggcaagtgggtaatccatatggtttcgaatttttgtgataaaaaaaaaaaaaaaaa

SEQ ID NO: 46030 - DNA, 288 bp, Oryza sativa
  Clone ID: PAT_MRT4530_48937C.1
atggagcagtggatggatttgattgtcgatttgtatgccagcgaaaataccaagcagatcgaagcccacggttttgagttgactccagttgactcagggagcaggcaacaattaagtctcacgtcacgcgctgcgtatggtacaaaccatggtgagagtccgagcactgcacggtcggattgggacccatcggccatcgtcgccggcaatctcggcagacatccgcaactaactattcctccggccggccggccggcggccatctggattgatattaagtactactaa

SEQ ID NO: 46031 - DNA, 1503 bp, Oryza sativa
  Clone ID: PAT_MRT4530_48938C.1
atggattccgacgaccacccgcctgagttcatcatccacgtcgtcgacgacctcgctccgccgccgccgccgccgccgcgagcgcagccggccctcgtccctcctcgcatcctgccgctcccgccgccggcgtttcacggggcagcagtccaacgacgacgacctcggcctcctccaagggacgaggccaccaataatcgcaccctccttttcgtatttcaggtctgcatgttcaccatgatggtaatcaatttgagcatagcgatctatctcacggtgcacccttctcctgaggaaagtattgctgatgaaaggtcaggcgtgcggatgacatgtgtgtttattataagcgccgtccatggagtagtcgagcgcgccgtcgagaagtgccggttcgagaggcgggacgaagctgtaccggacgcggcggccagagcggagctgggacgtggacctggagccaggaacgggtgggaacgggcgattgacgaggatgagctcctggatgcccttgacggcgaggacctggaacgagctcacgagcaggccctggtactggtccatgaagctggaggtatcggagtcggacatgccgacgggaaggtgttcggcgtcgacaaggacgagcgaggtggagcgccaaaccttgcgccagcgggtggagagcgcggcagtgcgtgcggcgtccttgacggggaggcaggagacgatccggcggagagcacgtcggggaggaggctgaggcggtcgacgccgtcgtcgggcaagagcgcggagaggcgggccggagaccggcacatcggggatggcgaagtggatgtaggagaggacggtgccgatggacttgtccatatcctccgggacctggccgcgctgccggaactcggccatgatcgatttagacactacaaatgcgtattcatggacttcgaatacatcagggatgcaagacttaacactggaatagcagattcctggattcataaatacctcggaggtgatccctttgtgcacatgatgttcgaggacactgatgtcgaagtgccaatgccaaatgtagaccttcgtacttcaacaaatggtgcaaaaggaagtactaaaaaatcaagcaactatacttgtaaggaggacattcaattgtgcatttcatggcagagcattagctcagatcctattattggcaatgagcaaccagggaaggcatatttgaagaggatcacagagcactgccatgctaaccgtgattatgagtctgtcggtaatatgggcccgggggcggagtgggggcgggtatgccccgtcccatcggcatgtagccgagcgtgcctccccgtacatgagtccacaaaagtctccatggaattaagagggaatgacagggatgtcccccgtgtcagccggaggacggcgttgggatccacctgggggcaaacgaccgccttgcttccagacgaaggcatggacgacagctcgacccaggacatgtgggcccccatccaatga

SEQ ID NO: 46032 - DNA, 423 bp, Oryza sativa
  Clone ID: PAT_MRT4530_48939C.1
acccacccggccgtcatctccggcgccgccgcgggtgggggtggtggctcggcctccttcatcgtcgccttcgtcggcgtgcagaattgggagaggcacttctgggacgcgcacgcctgcttctactcgtcggagaccggcgagtggagcgtccacatcaacatccacctcgacctcgatgggtaccacctggaggaccgccccgccgccctcgtcggcggcgacacgctctacttcgtcggcaagtcggggatcctcctccggtacaggtatggcctcccgctgcgctgcggcagggacatcctgggccacggcatcacctcggccgacgtgctctcggcgggctgcggctgggagtcctggaccggcacaagctcgccctgtgggacagggaggaggacggtttcgccgccgccgccgccg

SEQ ID NO: 46033 - DNA, 255 bp, Oryza sativa
  Clone ID: PAT_MRT4530_4893C.1
atggcgtgcgtgcccctttctttccctccccttctcttcttcccactcttctcgcgccctcgcagttacatagttcaagtcgtcattcattacttcgacaaacagtctgccgagttcatcaactcagctgctggggccatcaccgtctcctacatcatgcagctactgactggactacttgggagggagttttcagcagtaatatatgcaacacaaagtatatctaatatactttccatcagtggggaagagtag

SEQ ID NO: 46034 - DNA, 1289 bp, Oryza sativa
  Clone ID: PAT_MRT4530_48940C.1
acgcccccaagtccgagcatgccgtcgtcatcgtcgtcgacgaagtggtcggggcgccatttgcggtggctggcctcctccgcccgaatcttggactcctcctcctgtttcccctcatctgcaatgagcctcatcccctggtcggcgagatcctcctccgcatcccgccggacgaccccacgcgcctcgtccgcgcctccgccgtctgcaagcgctggcgccgcgtcctcgccgacccgagcttcgccgcgcgccaccgcgcgttccacccgagggcggcggcggcggcggcggcccccgtgctcggcgtcctccacaacccggccgaccgcgagctggaccgcttcgtcccggccgccgcctcctccttccgcgccgccgccggcgaccgccgcaagcaccacatcctcgactgccgccacggccgcgtcgtcctctacgactacgactcccactaccccaccgacggccacgtcgtctgggacccgatcaccggcgagcagcacaggatccccaacgtgatggatgccttgacccacccggccgtcatctccggcgccgccgcgggtgggggtggtggctcggcctccttcatcgtcgccttcgtcggcgtgcagaattgggagaggcacttctgggacgcgcacgcctgcttctactcgtcggagaccggcgagtggagcgtccacatcaacatccacctcgacctcgatgggtaccacctcgaggaccgccccgccgccctcgtcggcggcgacacgctctacttcgtcggcaagtcggggatcctcctccggtacaggtatggcctcccgctgcgctgcggcagggacatcctgggccacggcatcacctcggccgacgtgctctcggtggtcgacccgccgccgggcgccaagcgccgcctccgcctcggctacaccgtcgtcatggcggcgccggagagcgacggcggcgggctgcggctgggagtcctgcaccgccacaagctcgccctgtgggacagggaggaggacggctccgccgccgccgccgccgcccggtgggtgtggcgcgtggccatcgatctcgagcaggtgctgccatggccggtcgggaataccaagggcaaggagcgggcgtgcttggccgcagttgccgaggaccccaacgtcatcttcgtcggcacggaagaagacggcgtcttcgccgtcgagctcgattcgctgcgcatcaagaaagtgtgcgaattgggcaaatcacaaggccgtttcttccccttcgtcagctactgcgccgagtcatttctg

SEQ ID NO: 46035 - DNA, 1758 bp, Oryza sativa
  Clone ID: PAT_MRT4530_48941C.1
atggcgacgtgcttggacagcctcgggccgctgctcggcggcgcggcgaactccaccgacgcggccaactacatctgcaacaggttcacggacacctcctccgcggtggacgcgacgtacctgctcttctcggcctacctcgtgttcgccatgcagctcgggttcgccatgctctgcgcgggctccgtccgcgccaagaactccatgaacatcatgctcaccaacgtgctcgacgccgccgccggcgcgctcttctactacctcttcggcttcgccttcgcgttcgggacgccgtccaagggcttcatcgggaagcagttcttcgggctgaagcacatgccgcagacagggtacgactacgacttcttcctcttccagtgggccttcgccatcgccgccgccggcatcacgtccggttccatcgccgagcggacgcgcttcagcgcgtatctcatctactccgccttcctcaccgggttcgtgtacccggtggtgtcgcactggttctggtccaccgacgggtgggcttcggccggccggttgacgggtccgttgctgttcaagtcgggcgtcatcgacttcgccggctccggcgtcgtccatctggtcggtggcattgctggcctgtggggtgccttcatcgagggccctcgcatcgggcggttcgacgccgccggccgcacggtggcgatgaaagggcacagcgcctcactggtcgtgctcggcaccttcctgctgtggttcgggtggttcggcttcaacccggggtccttcaccaccatctccaagatctacggcgagtcgggcacgatcgacgggcagtggtcggcggtgggccgcaccgccgtgacgacgtcgctggcggggagcgtcgccgcgctgacgacgctctacggcaagagatggctgacggggcactggaacgtgaccgacgtctgcaacggtctcctcggcggcttcgccgcgatcaccgcgggctgctccgtggtcgacccgtgggcgtcggtgatctgcgggttcgtgtcggcgtgggtcctcatcggctgcaacaagctgtcgctgattctcaagttcgacgacccgctggaggcgacgcagctgcacgccgggtgcggcgcgtgggggatcattttcaccgcgctgttcgcgcgcagggagtacgtcgagctgatctacggggtgccgggaaggccgtacgggctgttcatgggcggcggcgggaggcttctcgcggcgcacatcgtgcagatcctggtgatcgtcgggtgggtcagcgccaccatggggacgctcttctacgtgctgcacaggttcgggctgctccgcgtctcgcccgcgacagagatggaaggcatggacccgacgtgccacggcgggttcgggtacgtggacgaggacgaaggcgagcgccgcgtcagggccaagtcggcggcggagacggctcgcgtggagcccagaaagtcgccggagcaagccgcggcgggccagtttgtgtagtaggatcatatcgatcgtgtccgtttggggaaagtgttttgtgaagtgtgcatatataagctgaggcagtcgtgtgggcgtggtggcacttcagcccatggtggttgtggctttcttttgatatttgcttcctttcttctctgcatttgcacctgtatggatttttgtggctttcttgtacatgtttagacgtgtcctgtttgtatcagtatttaggtcattatgatgttaacgtggagctcggcatatgccatttgggag

SEQ ID NO: 46036 - DNA, 171 bp, Oryza sativa
  Clone ID: PAT_MRT4530_48942C.1
atgaaggcgagcgcactgtgcgctgtggcaaaggtcgccgtcgaccgcgccgacggccagcttgaggcgttcatggggaggaagtttgttagcaatcagctcctcaagtacatagctgacagagggctgatatacaacggaatcctgttgggacgggatgatgccggttag

SEQ ID NO: 46037 - DNA, 304 bp, Oryza sativa
  Clone ID: PAT_MRT4530_48943C.1
aggacaaaaaaaaaaaacaaatggttccgcaaacccaaaaaaaggaaagtaagtatgggccaaacatttaggggggccaagcaaccaaaagctgggggggttttttaaaaggattaagctcaaactcccaaacagggaaacgaagggtgggcccaacccccacatgaagcccaaaagggggaacggccacccaaagggaggaaccaaaaacccggggacggcaaaaaaaaaaaaaaaggacccaaggaagggaccccctaaagactggacccccttaaccccctgggagaacccaagggggggt

SEQ ID NO: 46038 - DNA, 909 bp, Oryza sativa
  Clone ID: PAT_MRT4530_48944C.1
gcacgagggccgccgccgccgccgcattccgttcagggacttctccgccggcgccatggctgccgctgcaaggttcttggcggtcttgctcctcgttcttgctgtcgcggcggcgtcttccgcggcggcgtcgttggctggcggcggcgaccgccacctgcagctggggatgctgtccaccggcggcgagtgccggggcacggtgggggagtgccttgaggggggagacgttaactcgttatgatgagctatctttcttcctctgcctcgtgattctcactctttaacttcttcttgctacggctaccttatttcacttttttcttccttttgacatctttccttgtcattttctcttacctcagcattgtcattatattctcttactcaatctcaacctccaatttacgtttctcgatttcgatttacacttctaattgtgatattctttctcttttctatatttctatctcgcctttctatcctcgccgtcctataagatattttacagcctaccctttttattttttccacgcttaccattctatctaatatcaattatctctttcactcttattgtatatctcgcactttctgctctggcttatatccatcttctctagcttctgtttttctctctatctgctatccttcaattctttttttacttgttgatccttttttatcggcatactgcgtgcgtaatgtaaacttgtatgatattttcactctcttaatctagcatctcatttatctgtttttcgttcgtcctgtctttccaccatacatttatatactctactccatttatctgtgctccaccttcgtcttccttcctgaaactttctagtttcttcccgtctgtctaatatgattattctaactcctgatgcactgcgtgagtgtcct

SEQ ID NO: 46039 - DNA, 231 bp, Oryza sativa
  Clone ID: PAT_MRT4530_48945C.1
atggctgccacccctgcgcctttgcctatatacaagggaaggagacgtttgatgcttcaagtcggcgctttgccgctttccatttccggatggaactatggaagcgttgccaagccgtgcatggttgtcgttaagcacgggacggaatgccgcggagacacggctgacagcgtcgccggtcgccggggaggcggagaagagcaggggaaagcgggagaaataccgttctga

SEQ ID NO: 46040 - DNA, 291 bp, Oryza sativa
  Clone ID: PAT_MRT4530_48946C.1
atgcggccgctgcgcctgtgcgcctcgctgtgccaaagccatggccgtttgcgtggctccgccgcacgaggccgcgcacgtgtcccggggcgcgtgtgggggcccacgagtcagtggcacgtgcgtggcgcatggcccacctgtcagtctctcctctccttccgagtgttgctggtctcgaggaggaacggtgtgtggtgggctttcggcgaccggttggttggtctgggtttacatgtcactgcagggtgggggccacgatggtgtgaggcccacatgtcattgtcgtga

SEQ ID NO: 46041 - DNA, 270 bp, Oryza sativa
  Clone ID: PAT_MRT4530_48947C.1
atgggaggacaatctgctttggggtgtgagagtgtgattcattcatcgggcacggaaaaccaggcacttgatcccagaggcattagaaaattggagcaaggacaacttgacaatgcaaatattataagtacagaaaacacaaaagaggcatacgtggaaaagataacgctgcagtttttaaagatacagcaagcacaagttgacgtaggaggcatttatgtttctaatctactgaacaagctgctagataatattatgcagttcgagtga

SEQ ID NO: 46042 - DNA, 426 bp, Oryza sativa
  Clone ID: PAT_MRT4530_48948C.1
cggacgcgtgggccaaccaagccttcccccaattgttccgttaagtcttacatggttccgaggagcatggccacctttgggggtgtctggtactgaattgtaatagtataatggttcaaatgttaaaaataaagtcatgcatcatcatgcgtgacagttgaaacttgatgtcgtataaatctaaataaaatcacctatttaaatagcaaaaaaattgaccaagaaccgggggactagcaaggacggcaaagcttgttgtagctttttcacaaaaaaaaaaaacaactttttgaagaaacgatgtactcaaccacatgcttaagattatttttttgtaagagcagtgatggaaacaaaaaaaacgggggggccctttttaagggacccattttttctacccggtgttttgaacacaataattttttt

SEQ ID NO: 46043 - DNA, 594 bp, Oryza sativa
  Clone ID: PAT_MRT4530_48949C.1
atgaatcatataataaatccgtttaaaaaaaacttgcatgctaacttagagtctgatagtcccctaactgcaactcatgattttctaaaaatatatatccaagcgaactcccacaggcgccgtcgccgtcgaggccgttagggggagggacggctgtcaccgccgtctccgccgcaccccgccgtcactgcgccgtgccggcgagacaggaaggagagcgggagagggaacgcggacgccgccgtcgtcgccgttgacgctgccacacccgccgtcgccgcaccatgccggcgagaagggagggagaagggaaggaaagtggcgccggtggtgggagagacggcaccggtggcgggggaggcggccggcttgggggagggggagaggcgggagatggggagagggaacggcactgccggagggaggggaggggaagtggcgccagtggggagagggggagggggagaggtggcgttgggcgcgggggtggtggccggctggggggagggggatggggaggaggagggggagggttagggatagggttttcatcaatttggaactgatctgaaccgtcctcggctcagatcgatc

SEQ ID NO: 46044 - DNA, 176 bp, Oryza sativa
  Clone ID: PAT_MRT4530_4894C.1
ccacgcgtccgactacgttacagctggcgccgtctctttgttccctactctcaacatccagaccggccatgggctacttctcaccctataccccccaaactcttcaaccttttcacgatcacccacgggactcaagatccatacgcccgagtaaattacgggagccggctggatcc

SEQ ID NO: 46045 - DNA, 384 bp, Oryza sativa
  Clone ID: PAT_MRT4530_48950C.1
ccggccgggaccaacgcctcctcttttgagccagctgctgtccaccccgcgcacgcctcccccgatacgcataggcataccaggcctcaatcttgctatacaatgtacttgccgctcgctacggacaaggaacatgcccagcagcgcgtgagcgcgctattgcgatctccgaggaggggacgataaataagaggcggggcgaggaggtccaataagtgctggttctgtttctccaccgggtacccgggacacgggatgcagttgatgctgaacgacatccaagatctttaagtcttgaccaacaaaatgtgataaagaatccaagatgaagaggaatcctcgtcaggctaaatgtgcactaaaaaaaaacaagaagctgtggtc

SEQ ID NO: 46046 - DNA, 261 bp, Oryza sativa
  Clone ID: PAT_MRT4530_48951C.1
gtggagaggagaggagatcagggggaggaagggtggccttttcagcagatcggggcggtcggatttaggggaggagcgcgctagcctggatcggcggtgatggatgaggagtacgaccagatcctgctgtggacaggattcacggagggtattatcaacgagctcatcttcgtttatatgcttaaggaacatgacattgacaataactattactatctgggaatatgtacatgagttactgtaactaatatctgtgtgaga

SEQ ID NO: 46047 - DNA, 694 bp, Oryza sativa
  Clone ID: PAT_MRT4530_48952C.1
ttacaggatcaaatcaactggcatgctagcacacccgaaggcgagctttggacctgcactggagttaagcagatctcccaggcatcgtgttttccggacgacgcacttgatggccataacgccggccctgttccactcgtgcatcatctcggcgtccgtcgtcgtcggctcgcggcggggctgcttgcctgtcctcatctcctccgccgacggccgtcctctccgatcgccgccgccggtctcgacgtccagcagcggcgccacgtcattgtcgtccaaggtgggggcctcgccgccggcgcagccaaagcaactcgccgccggagagactcgccggagatacggtggtagcaggagcggcggcgtcttcgtcctcggcctcgagcaagcaacgaggcacggcggcggcggtgacctcatgccgttccctctccccatctcccgcctctccccctcccccaagccggccgcctcccccgccaccggtgccgtctctcccaccaccggcgccactttccttcccttctccctcccttctcgccggcatggtgcggcgacggcgggtgtggcagcgtcaacggcgacgacggcggcgtccgcgttccctctcccgctctccttcctgtctcgccggcacggcgcagtgacggcggggtgcggcggagacggcggtgacagccgtccctccccctaa

SEQ ID NO: 46048 - DNA, 318 bp, Oryza sativa
  Clone ID: PAT_MRT4530_48953C.1
gctgatccgctcgacattgggggcgtcgatctcgcctcggatggtcaccactgtcgccaggtgatgcaggtaggcccgaatctgagcgccaccgtagtcaacggcggcatttccgggccgcgtcgtgacgctgcaagccgattttgacgtcgggatcgtggtagtcatcaatagcctcgtcctccgtcgcgttgcgggccgaccgatcgccagctaaagctgcctttaaccaaacccgcaaaatctaaggggagcgaaagccgcctctaactctttgctaagaagcgattttcggggtgcttccggcgacccacgccg

SEQ ID NO: 46049 - DNA, 387 bp, Oryza sativa
  Clone ID: PAT_MRT4530_48954C.1
tgactcttctctcctcctctaatctcaaggctctgtctcgtcgtcctcgcatctccactcgccatgggcaagattaagatcggaatcaacggtttcggaaggatcgggaggctcgtggccagggtggccctccagagcgaggatgtctagctcgtctccgtcaactacccctttatcaccaccgactacatgagctacatgttcaagttctataccgtgcacatccactggatgcaccagaattttgattctcaggactccaacaccctgtttttgaatgcgtcgccggggtccctccctgagatcaagcacggggacatccctgccgattgtttgggtaccattcacccaggcacttgttctttgagctttaccctcttgagaaag

SEQ ID NO: 46050 - DNA, 336 bp, Oryza sativa
  Clone ID: PAT_MRT4530_48955C.1
atggcggcggggtggcgcgagacgcccgccgcctccgcggccttcccggtggcctacaccgccgtcctcgcgctctacctcctcctcggcgtcttcccgcgcccgcgtggcgccccgccgtgcgaggcgctgctgtgggagctcgccgactgggcggccgtggccccaaacactgtcgtagatgaagtggtcaagattgtctggaaggagcaaaacatgaagtcaattgctctccagaagacaaggtcaatcactgctgtgctgccaaacaaatcagttgttctccagagcgccaggtcaatcactgttgagttcgagaacttgagcgaaaactga

SEQ ID NO: 46051 - DNA, 174 bp, Oryza sativa
  Clone ID: PAT_MRT4530_48956C.1
atgagttttttaggtggtgagagatcgctacgatctactggtcgaggaccagatgtaggcgtatctcgatcacctggagatgaatttttagtggtgagagatcgctacgatctactggtcgagaaccaggtggtgagagatcgctacgatctactggtcgagaaccaggtgtag

SEQ ID NO: 46052 - DNA, 1226 bp, Oryza sativa
  Clone ID: PAT_MRT4530_48957C.1
ttagctccggcatttcgtcctagactcctggttttcatcaagcatgccaaggagctcgcaccactcccagtcccatccttcctctcttggtggcgatggcgtggcaacggcgctgttggccgagggcgcagcgatggtgccggtggccatcgacgagcccccatgaccccctccttcctcgccttctcctcctcctccaccgccttcggcctccctcccaagccctagccaccctcctccgcctctgcctctgtgcccaccaccgcgcagccgcggggcttccgtcgcttcattctcacccgcgccgccacgggccacgacctgaaaccaccgctgccgcccgaggggaccgagaggaggtcgctcgcagtgaggacgggggagctgttcctggggctggcggtgctgctgatgcgcatgggaaggggcggggcggcggtggaggcgaaggacggggtggtgtgggagcagcagcccaaggacgtgggggcggaggttgtatctctcacgatgaaattgtggaggggatgggggagaagaggaggaaggaggtagtagaggctgccagccgcggcccagtgtgatagtctaatggacgagtacacgttcccgttccacttccgcgccgccaactgctcggcgagcttgacggcctcggccgccgtttcagcggcggtggggcaaaccacgtcgacgattcccatctccttggcctccgcggccttgagcttcctgccgcggagggtgacgtcgcggagggcgtgcgcggcggtgatcttggcgcggaggatggccacgaagtagggcgggagcgggaggccgatgtcgatctcgctcatgtagagcacgccgcggtcggcgcgcatgaggcggtagtcgtggcagagcgtgaggaggaacccgcccgcggaggcgtggcccgtgacggcggcgacggtgggcatggggagcgcgaggagatcggcggcgagggggcggagcgccacgacgagctccccgacccgcgagggggggatcccgccagggccgatgtcgagtccgttggagaagaaccgcccctccgccacggtgaccagcgccgcgcccggcccggccgccgccgccgccgccgcgacggatgagacggcggcgcggatggagccgatgagggagtggccgaggcggtgctcgccgtcgccggtgagcgtgagcacgaacacgcggccgcgctgctccagcgtgcacat

SEQ ID NO: 46053 - DNA, 437 bp, Oryza sativa
  Clone ID: PAT_MRT4530_48958C.1
atctttcttgaaatatgctgaacataacgggcgtgtagccacaccagccagtatgagtgaggccttgggcatctcatcggaggaactttcagaccaaaaaagagttgtgccaacaaacatttctcctccaggagctgcccgtagtatgactgttgtaccaccttctccaacgagattgaacctgactgctcacgcagctgcagatcctgtaacctaatggttcatataaagtataaacggtgccgactatccagagaataaatctaagcgctcctttgacagaacggcctgcctattaggactagcgacttagtgaagctgcaaagtctcatatgatgcgaggactctcttttcaagaagaactggcactttgcttggcaaagggctaggattacagacagtatcaaactattcacgaataagaacatgaatagcca

SEQ ID NO: 46054 - DNA, 475 bp, Oryza sativa
  Clone ID: PAT_MRT4530_48959C.1
gggctgcaggaatcggcacgagggccccgccgtcctcggtacttctctcaggcgaatctcacgtccacgttggttcctccgctcttcgccggttcgccccgatgaggtaacttttgcccacgcgtccgcccgaccgtccgcccacgcgtccggtgcttgtcaattggtgccaaagttcagtacaatctgcagaaccaacttataccaaattaaacgaataaaattttgatcaatagaacttcgattcgcattggctagtagcatttaaatgttcagataatatcgagaccactggtagattagattcagccgcagctgatgttcagttagtttcagaaaaaaaattctgggcaagtttcagaattagagctaatatacggcacgattcctctcgcatgagattcacttttttcttttatcttaccaaaaacattacacgccattagttccttctgattacgaattttatggacac

SEQ ID NO: 46055 - DNA, 512 bp, Oryza sativa
  Clone ID: PAT_MRT4530_4895C.1
gtggcacagtcccggcagaaaagttatgcaataaccgtcgccgcgacctggaattcgcagtggatgactttgtgtatcttcgggtcacgccattgcgaggtgtacacaggtttcagacaaaagggaagctcgcacctcggtatgtgggtcctttccgtatcattgctcggcgcggagaagtcgcttaccagctggagctgcccgcctccttgggcaacgtgcatgatgtgttccatgtgtcgcaactcaagaaatgtcttcgagtgccatccgagcaggccgactcagagcaaattgaaattcgcgaagacttgacctatgtggagaggccagtgaaaatcctggacaccatggagcgcaggaccaggaaccgagtaatccgtttttgcaaggtccagtggagcaaccacgccgaagaagaagctacttgggagcgtgaagacgagctgaaggcagcccatcccgatctcttcgccagttcttccgaatctcggggtcgagattccgtttaa

SEQ ID NO: 46056 - DNA, 378 bp, Oryza sativa
  Clone ID: PAT_MRT4530_48960C.1
aactaggtcaactcatacacctgagacgaggccgggcaaccttggtggaactggaggcaatgattaggaaacattagtattccggaaactttaagaggctcagaaaaggaagctaagcggctagttaggcggttagttgaagcgtaagcaggacgtttgctgcttaagaacaactgagaatagctgggagacttacgtcagaaatttgaacaattttgtagttgggggcgatcttgttgataatatttctcatgctgatggtgatgccagttttcaggcattcactaccatgtatgttattccaatagactatgacgtaagatttttaactgtatacttcaatatttggtttgggataaaagtgatatactaacatgt

SEQ ID NO: 46057 - DNA, 958 bp, Oryza sativa
  Clone ID: PAT_MRT4530_48961C.1
acctagtctacaagttcgctatcaacaggcgatatgtcaccctatttctgttgctgttcaacgacgtccttaaataggagtacttgtgctacaagcctaacccagagatagcaccacaaatacctctcttttctttaggtgtttacttcgacagcttcaccaccttcgtttacccattgccatggcggctgagaagcgaaccattgggctcggcatggactactcgccgtcgagcaaggccgcggcgaagtgggcggtggataacctggtgaaggccggcgaccggatcatcctcgtccatgtccttcccaaaggagcagatgccagccacaaggagctctggaagagcaccggctcacctttgattcctctgctggagtttatggagatgaacgtgcaggcgaggtatgggatcaaccccgataaggaggtactggagatcctgcaagctgaatccaagtccaagcaggttgaagtactggcaaaagtttactggggtgatgcaagggagaaactctgtgaggcagtagacgatctcaaggtgaatacctttgttcttggttgcaggggactaggacccttgaaaagggccctacttggaagtgttagcaactatgttgtcaacaatgcaacctgcccggttactgtggtgcgtgcaccaaccgtgtcaaatgcctgattctatgctacatgggactgctggaaattggaatgctgggcttgttttgctgttcatccatcttttagcagagaaccttcatctgagttggtgccattgcaaggattggtctctggctcctgcacttagcttttccatgctattggaatgttattaagttgaatcttcggtgtatttccttctgttacttcctatgtatagttcattactactgtttaatggtgaatgttaaagattgccaaaaaaaaaaatgaattaaaaaaaaaaaaaaaaaaaaaa

SEQ ID NO: 46058 - DNA, 3756 bp, Oryza sativa
  Clone ID: PAT_MRT4530_48962C.1
atgacgcttttcgaggacggcaacaaccagcttgaagttgctctgctcggtggcggtgcccatgaccacacggaacgcaggggcctagaaatccgccgcatcctacccaacctctgtattatgtagccatgtggcccgcaaccagtcccgcggcgccgtaatgggcactccagggtcgcggcaccgaggctgggacccttgatgccttggcagtgcgcccccgcaaaacactgagacctatttctttacttccaccgatgcgagcctcacgggcgaactaggtggcgggttacttcacgcgctagggtcttcactccagtttgatccggtgttttcgtcgcactccagaatatatcaagtgccccgccttgggatcagcactgatgtccttccgcgaggatcccttttaggaaaaactggtaaactctttctccaaacacgtaagagcgcgcttcgatggctgggaatatgcattcttataagccgcagaagagatataggacttgtgtgaagggttctagggtcccaacacaaatgcagggagctcctatgcctatgcagtttaagcaagttaataaacagcaagatccacatcactatgacaatcaggggaaaaagtaaacaaaatataggaaggcgagtgctgtaaagagtataggtgagttagaagagaaggcagaagatcagcaccctaatcaatacacggctaagactggtgatgctccttctggaccaacatcaaagcctatggaccattctactgtaactgctgtgcagtctgcaacagagatgatgggtgccccaaataaacctgatacagcaacgaactctcttcctactggtactgggccttcgcacaatatggagaacacctctggttcttctaataatgcaaagcaaaatggtggtgaaagttcccttgttactcctgctataaacaccgataatccatcagttgcaagtgatgctgggattatcagttcgacttacgtttccccatcgagatcttgaacagctgacactctaaatggagcattagctgaataatggtatggtggacaattgtacaagaattgctgctatacaaattgctaggaggacaaaaagaccttggcatttccagggtgaaattatcttactccagtagaatatatagctagtgaagaagaaccggtcacctatgctaataagtcataagctataatggcgttcaaagctctgcttgaatcatcaaatgttgagtctgattggacatgggatcaggctatgagggtcatcataaatgacaaaaggtatggtgccctcaaaactcttggggagaggaagcaagcttttaatgagtatctaaaccagaggaaaaagcttgaagcagaagaaagacgtatcaaacagcggaaggcacgtgatgattttttagctatgctagaagaatctaaggagcttacttcatcaacaagatggagtaaagcaataactatgtttgaggatgatgaacggtttagtgctgttgagcgtccaagggagcgtgaagacttatttgagagctatcttatggaactacagaagaagacaagtacccagtggagaaaagttcaagaacgtcttgaggatgatgaacgctgttcccgacttgaaaagatcgatcgactggagattttccaagagtatataagggatctggagaaagaagaggaagagcacaagcggatacataaggaacaagtaaggaggcaagagcgcaaaaatcgtgatgaatttcgcaagatgttggaagaacatgtagctgaaggaatgcttactgcaaaaactcgttggcgtgattactgtgcccaggttaaagattcctctgtgtacttggctgtggcctcgaacataagtggttcaatgccaaaagatctgtttgaagatgtaatggaggagcttgagaaacagtatcaagatgacaaagcccgaattaaagaagcagtgaagtctggaaagattcctatgacgacttcatggacactagaggatttcgaaactgctgttacggaggatgatactttgaaaggaataacaaacataaacatgaagcttatttttgatgatcaagttgaaaggctcagggaaaaggaggtaaaggaagcaaagaagcgccagcgtctgggtgaaaatttctcagatcttttgtactcaatcaaggaaatatcagcttcttcaacatgggatgattctaaagcactattcgaagatagccaagagtacaaggcattggacagcgaaacatactctagagagcttttcgaagagtgcgttgtccacttgaaagaaaggttaaaagagaaagagcgcttgagggaggaagaaaaggcaagaaaagagaaggaacgtgaagagaaagaacggaggaaagagaaagaaaagaaggagaaagaacgcaaagaaaaagaaagagacaaggagaaagaaagagaaaaggacaaaggaaaggatcggtcgaggaaagatgagatggatattgatgctgttgatgcagatagccatggctcaaaagacaagaaaagagaaaaggacaaggaaaagaagcataagagacaccaccatgacactgcagatgatgtgagctctgaaagggatgagaaggatgactctaaaaagtctcgtagacatagcagtgatcgcaagaaatcaaggaagcatacccatgcttcggactctgatagtgaaaatcggcacaaaagacacaaaaaggatcgagatagctcccgcagaaatggcacacgtgatgaccttgaagatggtgaacttggagaagatggggagattcattagtcattcgtttctccgctgagatttatcacaatacagtcccccctcctgttttggacatatgaaatggtgcattttgttggcaactataaatgctttcctccagagaaggacaatttctttatggggattatcttcttgtcttgatctggcttgttggaaatggacaataatagccttcattgtttggatgctcacaatgtagtcatgaaggttcttgtactgcaaaacctttgttgcctttagttatcttcttatccccttccctttgtcagtctgggtataggttgtatttgttataggagggggagggctgtaaagtgtttagtggctgaaaaagatcctttagaaggttaggtgcgaaatgcatgcaatgctgaggtttataactgaatttcgttgaatcatctgtgcccagtggccactgtatcctgattagagctcttgatctacaagacttgtgtttctccatggatctcccgtctcctgcattatgttgccattaagcggcacctggctgttgctgtaacaccgaggcctgtctgtgggtgcatggaatgcaaagcacacttggttggaagcatggcaagaggcaaagcctgcccaactcactcattggtcgtgctgctgcagcagtttcatactcgttttgacgtggttttcactttggagttgtttaacatcttgttatttactatgccatctaacatagttttcgtatggtagcagttttgtaatagtttgctgctatttatggtgctttatagatagatgtacttgcagctgacgctgttgatattctcatgaatacattgattctgtaggctatgaaagttggatggctgatactgaaacgataacatgatccatcctggtattatggctgtagattattaactttttttgttggaagggaacaatttcctcaaaaaaaaaaaaaaaaccaaa

SEQ ID NO: 46059 - DNA, 338 bp, Oryza sativa
  Clone ID: PAT_MRT4530_48963C.1
gcggcgccggatgtctagataccgctgcttcgtcggtggacatcggctggagccacacagacgaaccgctcctattgaggtcatggtttggacctacggcgccgatcgctcgagtcacatatcatcatccgccggcagacgggggcggcacgtgcgccggggtgcgcgctgttcttccacaacctgatgagccgggtccagctccagcgcgtcttcctcgacgccaactactgcctcacccaggacctcgacgaggtcctcctcaacgagttcgacgtgctgtggggcgtctgcggggcctccgacgatgacgactacggcgaggatggtgaagggga

SEQ ID NO: 46060 - DNA, 303 bp, Oryza sativa
  Clone ID: PAT_MRT4530_48964C.1
atggctcggaccaatggtgcagtggcagcagcccatagaggcatagagctgctcggttattccttcggccatggaagatgcgaggtggaggcggagggaagaggagccgggagatcgcgatcgagcggccgtggaggcgaaatcatcgagggaccagggcatgttctcagagcttcaaccaaagacctccttaaatttgtgtcatgcctggacaggatagaaaacagatatggtttgtttgttcatgccgtccaggacatgaataacgacgactttgaactgattacaaccagcaaattctag

SEQ ID NO: 46061 - DNA, 732 bp, Oryza sativa
  Clone ID: PAT_MRT4530_48965C.1
cagtaattattttttctagttattttcgacctttggaggtgcaaaatccaaaagatgccgaaccagatcctgggccagtgggcatttggtacggatttgtggcactgcattttgccaggccggcccatcatgccgaaccagaggcattcccagttctttatagggaaaacagagcggctcctcatcaccatgaacctgggaattatagactcacgaatggctcaaccatgggcaatagaaatgcatgggttctcatgatcatcttttaggaggaaccacgaaatatgcatgtttgtgacaaagagagtcgaactaagacatacctacacacctacatgctctcccatagagttaaatagctggaggtttccaccattacatggccccgaacaagccatcacataacattttctttccagctttgaggcaaaatatgaggttcagatgaccctatctgagacggtttgctggttcagcacgacttcagctatgcagtttgatcccacaaaaagctcctgttgtccttcgccttactttgaattctctatcgacctagatgctttccagtcagctgccaatgctctcctgtgctccaaactgctattcttgcccatctccgacaaaccgaggccggatcagcaattgtccgcactttcgggccccccgcgtgagtctcgggcatttgcttaccccgagttgaaaatcccgccggttttctctggcgctcattgc

SEQ ID NO: 46062 - DNA, 340 bp, Oryza sativa
  unsure (1)..(340): unsure at all n locations
  Clone ID: PAT_MRT4530_48966C.1
ttntcttccaaatgcattgacaacttgaattggctggagcatgaacgagctagatgtggcaactaccactaatactttgaaaagaatcattttggggcgtgaagctttttgtttgtacatgaaanagagactgcttgataccagttccacacattgctgttatagagtactgcagttcgactgctgcatatgcagtatgtataataggatttcaattataatcatctctggctggatgcaaatacatctgttcttgcatttagtttgttgtaaaaggcaccttccctttattcagacagtcggttagccttaaaaacaaaaaaaaaaaaaaaaaaaaaaa

SEQ ID NO: 46063 - DNA, 839 bp, Oryza sativa
  unsure (1)..(839): unsure at all n locations
  Clone ID: PAT_MRT4530_48967C.1
agagatctgatctatatatccaggtattatttacatatcaggtgcacttaacatgcatgtacgcttgatctaccaaagatgtcttcagcaagtttattaccatctatcataaaaaataagtatattacaagatgcaacaaagcaaaggtgccactatactgcatatggaaccttaagtgaagtcacctcactgggggttttagagttggagatgcctccattgtgtgtgatgcatattttccacttcggatggctaataaagttttgctgcctcaagcttactgcctttgtttgctaaaccatgaaaccagcacaacaataagagactccaattgcaagagaccttccaggaaatctttagtaggcatcatatgttcaatacaaatatacctgaggttgttagagcaaattatctgctcatgtacgattacactatctctattatcagaaaatcacaagaacttttgttgctgggttttgcattagtacaagtatctggctcctgatttttcttgacgtttatcattttccattctgagctatacgagcaataggctccggattgtagtgatctcctgtgcaagttttacctcttcggcaaaaaataattgtcggcctacggggcaaactattctgtcccctctaactaataatgtctttgaacattttgatcatataccctgccattttatcaaaaattgaggatttattcttctgtcactgacatgtagggtttatctgagggcattgacatgcngaccatgagggtanatcctcaattgtatctaatgggagggcatatgatcaagatccacattaaggacccagctattaaaata

SEQ ID NO: 46064 - DNA, 373 bp, Oryza sativa
  Clone ID: PAT_MRT4530_48968C.1
gttataacttttttctctattcctaaagaaaagtttctattagtacactcaaatcatttatttatgataaagataatattatgtgttcggatattatcttaatgataagcagtttctcgggggttaagtagccgctatcctaggtacatatttgaacttatatttggtgatacttatcatttggcatcattacatcaagtagtttcttagtgctgactaatggagactaactttcttttctagttgcacatggaagcgtgtatatctgattctatgctaggcattctaccttcgtgaaacgctatctaattctctgtcgtgtttaatgtcatctgcatactggatgaggttctgtgatttgctgatgaacaca

SEQ ID NO: 46065 - DNA, 142 bp, Oryza sativa
  Clone ID: PAT_MRT4530_48969C.1
gccagtgttgtccatctcttccaccacccagagccccacctagccgagaccaacagcaggcgtctctccgaggcggcggaggctgcgaccgtgacgcgagcgactcagcgggcgggggccccattggcagcaaggccggggg

SEQ ID NO: 46066 - DNA, 1527 bp, Oryza sativa
  Clone ID: PAT_MRT4530_4896C.1
atgaggtcatccagcgattgcaaggttgtggcggcggcggcgaggaagaaggagaaggaggcggcggcgtggccgtggtcgctgtgggggttcctcctgaccggctgcctcggcggcggcggcggcggagggaagaagaagagcggggggaagaaggtgcgtccccgcggcggcggcggcggcggcctgcggcggctgtcgttcacggacctgacgggggcggcggaccaggacctgtcggtgtcgctggtggggtccaacctccacgtcttcaccgtcgccgagctccgcgacgccacccgcgggttcgtctccggcaacttcctcggcgagggcggcttcgggccggtctacaagggcctcgtcggcgacggcgtcaagccgggcctccgcccgcaggccatcgccgtcaagctctgggatcccgagggcgcccagggccacaaggaatggctggcagaggtgatcttccttggccagcttcggcatcccaacctggtgaagctggtcggctactgctgcgaggacgagaaccgcctcctcgtctacgagtacatggagcatggcagcctcgagaaccacctcttcaaacagattcctgcagtgctgccgtggtcgacccgattaaacatcgcggttggcgccgcgaagggtttggcgttcctccacgacgcagagaagccggtcatctaccgtgacttcaaggcctccaacatcctgctcgattcggattacaaggcgaagctgtcggacttcgggctggccaaggacgggccggagggggacgacacccacgtgtcgacgcgcgtgatgggcacccatggctacgccgcgccggagtacatcatgaccggccacctgacggcgaagagcgacgtgtacagcttcggcgtggtgctcctggagatcctgacggggcggcgcgccgtcgacaagacgcggccgaacagggagcagagcctcgtggagggcgctactcgccggcggcggcgagggaaggcggccgccgtcgcctaccggtgcctcagcgggagccccaagaaccgccccgacatgtccgccgtcgtcgacgcgctcgagccgctgctcgtcgccaccgacgacgtccccctcggccccgtcgtgctgttcgtcgcgccggatcaggaggccgacgccgccgccgccgccgacgacgacgaggacgacaaggcccggcggcggcagcggcggacgcggaaggacgagcagcaccgccgccgcagccgcctccggacgtcgcccaagggcagcccgaggaagcccgccgtcgccgctgcttgccggaacgaggagttctgggtgtggcacgtccccgccgaccacaaggcgagaaagatggagctcccactgcggtgttttcatggcgctaaggtggcggcggtggcggcggcgggtgatggcggagtcgccggccgtgcggctgttccggcgaagggcggcggcggcggcgttgcgcggggggtgaaggtggtgccatacagctcaagtattcgttgttttgtctaa

SEQ ID NO: 46067 - DNA, 723 bp, Oryza sativa
  Clone ID: PAT_MRT4530_48970C.1
atgaagcccgtcgccgccggatccgggtgggacgaggcccatcgccgccagatctggcccagctcctcgtggtcgccgttggtgacggtgaggcggccgggttgccggcggcgccgccgcccgcgtcgccacccactcgtcgtcgtcgtcgtggccgcccactcgtcgtcatcgtcgtcgttgccgcccactcgtcgtcgccgtggccgcccactcgtcgtcggtgtcgtcgtcgtcggggtcggcgccgccgccaccaccacccccggggaggagcggccgcacgtggaggggagtgtcgacggtggcgccgagaccgtgaggggagagaagagagtgagtgatggaaaagagaccacgagcgacagtgtgggtgcctggcggcggcaggaccctggggcggtggtggtgggacagtggggcgacgacgcggccggcggggctcccgaccaccacgggcgacggcagccgagaagcctccccatcaagctcctcaagcggctcctcctcttcgtcgttcttgtcgttggcttcctcgccgctgccgccctcctcctcctcggcggcactggcgcctcctacggtcggggagcgggggacgcggccaccggggacgagcgcttggcacaacataagcgacgaggagctgctctaggcggcgtcgatggagccacggggtaccaggtatcagtcgatatccaggtaccaaggcctgatacctag

SEQ ID NO: 46068 - DNA, 610 bp, Oryza sativa
  Clone ID: PAT_MRT4530_48971C.1
agacattacccgaggagggtgaaaaaaataaagggtaaaaataacaccgaaaatatttaataagaaaattaatacgtaggtacggatgtatatatgaaagtatggacggaaatatatatgtatgtatataatagtatgtatatgtatatctatgtgagtgtatatatatatgtatatatatatatatatatatatatatatatatatatatatatatatatatatatatatatatatatatatatatatatatatgtatgtgtatatatatatatatatatatgtgtgtgtatatatatatatatatatatatatatatatatatatatatatatatatatatacacacacacacacacatgtatatatatatacacacacatgtatatatatatacacatgtacatatacatatacatatatatatatatatatacacatgtacatatatacatgtacatatatatatacacacatatatatacacatatatatatatatacacacatatatatatatatacatgacgactcttctgtacacctagatgtatactcaaacgataacgttggtatgcatttgctttcaaatttttaattttctttccagc

SEQ ID NO: 46069 - DNA, 293 bp, Oryza sativa
  Clone ID: PAT_MRT4530_48972C.1
aattcggcacgaggcggtggatacctaggtacccagagacgaggaagggcgtasaagcgacgaaatgcttcggggagttgaaaataagcatagatccggagattcccaaataggtcaaccttttgaactgcctgctgaatccatgagcaggcaagagacaacctggcgaactgaaacatcttagtagccagaggaaaaaaaagcaaagaragcgatggcatctgtagaataaatgttggwtactgttgtaatttgataattgtttctctyccagaaaaaaaaaaaaaaaaaaa

SEQ ID NO: 46070 - DNA, 429 bp, Oryza sativa
  unsure (1)..(429): unsure at all n locations
  Clone ID: PAT_MRT4530_48973C.1
tacttgggaattttgatgggagtncctgaagatagagacacaggttttacgtgcaagacaggatttgtcaagagcaggaatagtggtcacacgtgnccaatagtaaccaagtgaggtgtttggtatcttagagataagattatatctactcttgttaactatgtccttagttttatagataaatttcttgtgaatcaagtcatctcatctataaaaggaaggactaaatctcttctcattgaccagacatgagtaaacaaacaagtcccctgtctctaaactctaggttattcttgacctacgtccccaaccggtgtgctactttgcctagccgccatttttactttaagttgccaccatctaatctctcttcgatgaatactatcccaattgtgtgaatcaaggttcacaacataaaaaaaaaaaaaa

SEQ ID NO: 46071 - DNA, 450 bp, Oryza sativa
  Clone ID: PAT_MRT4530_48974C.1
atggcgaggcgctatcctcccacccttcctccattggcgaggccttctactcccttgcaacggtgccccaccctcttcgcttgccatttcgttctcgttggcgtcacgtggggatttgggagcatctcggcgtcggtgactaactccaacgatgccaccacctctcccctcaagctcggcggtgccgctgatgcatccgacctaggctacctcccctacctcggctgcagctgtggcctagagcagataagggaaaatcggttggctgggccactggaggcatcgttcgatccccatccctcctttgccgtcgctgttaacaccctcctccacgtatcgccggtcaccgtcgcccgtgacctgtggccttgctcgccacatccgccacatcagccgaaaccaggcactatactaccttgggacctcaagtacattgcttttgtaaattga

SEQ ID NO: 46072 - DNA, 2133 bp, Oryza sativa
  Clone ID: PAT_MRT4530_48975C.1
atgtcatcctctgccagcccatctgctgcgccatcagctgagtatgccgagtccaacaccattaacgccttcttgttcaaccaagggccgatgaccacaactttgattgacattaccatgatcaccggtttagatgtaacctcatcggctaatcccatgagcatgaacagcaaaaatcagtttgacttcagaaccaaaagcataggtggctggtctggctatgtggcggcatatatgggccaaggatctgttactcctcgagagcatgtagccttcttgctaatgtggctcgaaaaatttctcttttgtggatccagttgtggtcctacaaccaactggcaatttgtagccgaagccttagaatcaaagaaagaatttcccttaggcaagattctcctcggctacttatacgaaacattgaacaatgcatcggccaagatagccgttggctcagtagttggtgcaggtggacaatggtggctgctgcaaacctggttgaacctaatggtcatgaaagtcgtcaatcggccatctgtgacagatgctgagttcccattgccagagccgattgcaggagatgatggagaagaacgcactcatcgtagatgcacatcatatggggaatatgcgtccacaccaaccgatgctagagcaaagctatcggccgagctactcaaggattggttctgcggcttctatgaaggctttaagaaagatgcccgagtttggtttccttatgaagactcagcagatcttgaacttccatcagtctttagatttgaagatatcaatcatgaaaagtatcaaaaatccagggaagttcttacagccgcaatcagcccatgcatccttcctgtcggcattcatcaaggaagaaatatccaaacaatcgactcttccccgccacaccaaagtaacagtggcaggaacattgaatattctccaggactaattccgaatggaggtggactatctccccccgttatcggctaccatgcccccaagacttcaactctccttcacggcctaaccagggaaccagccgatgcaggcaagaaaaggaaaaccagatcatcggccgtgagtaccttggccttagctccaaagaaaaaggccaaattcaagaaaactaagccgaccgatgatctgcctgccttggatccatctattgaacaagctctggatgaagaggaaattggtgaagatattgaccagattgtagctgaaatgagtgacacagaaagaacaccatcggcttcacccaagcaaacgcctccaactcctgcccccgttcatttcagaagaaagaagaaaactgctgtgaagaaaaaaccagcagcgacaattgtcaagtcggctccaccacaatcgtcaagtgaccagactccatcggccgtggggagtcatcacatcgaggaggaagaacaaccagcttcttctgctatcccagttttagccgatcttttctcctttgacatcagagattatcttgatgaggcagaagaagatacttcaagcaaagctttagctcccttacccgatgatgtgaagaaaacacttgaagatatctctcatcggctggaagcgtcatcattagataatttggtggtaaactgtgggccaattaggactcggctacatgagatccaagctctaatcccagatgagctagccaatatccttactccagtggtctatcttgagcaacatcaattcaagctagaaaagtccaaattaagactagccgaatgtcgagagcgcaaggatattgaggccacaatccaagccaatcgtcagcttgtgcatgaggagaaatccaaacttgatcagctttcggagagtccgatcaaatccaacattgattggctcgaggctcgcaagattgagctcctggcacaacttcaggaatgcaacgccgagttagatcaggagcacaagaaactagccgatctcccgcggtccatcgaagagcaaaaagcaagacttaaatcggctatcaagaatgttgctgatctgaccaagtctttgaagatcattcctggaactgatgctcaagatgcccaagctattgaagaagtcgaactaattaggcaaagggctatttcagctatccagcaatacttgtctcaataa

SEQ ID NO: 46073 - DNA, 407 bp, Oryza sativa
  Clone ID: PAT_MRT4530_48976C.1
tcgaatacaaagtgggagagagagagagagagaggggatggaaatggcggatgagctggggcacttgctggtgttcgggttcctcttcaacctgggcgtttacatggtggcgccggcgatgaccgacgtgaccatggacgccctctgccccggccaggacgagtgctccctcgccatctacctcaccggcctccagcaagccattacagggttgggtgctcttgtggcgactccgatcgtgggcaacctgtcggacaaatatggtcgcaaggcgttgttgctgctccctgcaactgcatccatccttccgttggttattttagcgtgcaaccggacgaaggccttcttctacgcctactacatcaccaggatggtgacagccatggtcgccgagggcagcatgcact

SEQ ID NO: 46074 - DNA, 1380 bp, Oryza sativa
  Clone ID: PAT_MRT4530_48977C.1
atgtcgtcctccgccagcccgtctgctgcgccatcagctgagtatgccgagcatctttccaacctaattgcgattcccagcttgtcgcatgaaaaccactattttctgggtccaatcggcaatcttgactccactgattttatcattggtgaaaccaataggatcccctttaggctagccaaccctaacctgagccactggaaaaacactttcaagtcttggccatctcttgagaaaaccacccctgagaaaagttggatcacatggtaccagcgcgtatcggctaataagaaagttcactgggatgagattggaatcggccaagcacttgacctaaccatagccaacttagctaaggacgagcccttaatggcagccgcctcttatttttggtccaacaccattaacgccttcttgttcaaccaagggccaatgactccaactttgatcgacattaccatgatcaccggaccccttctgggcagtattgataatattgagttggcaggatttagaagcaaaaatttcgacagatggtggggtgaatggaagttgcacttgtttcatcaatcagcttcgatgtatatgacagatctattccctgatgtcatacctcagaagaagaaaactgctgtgaagaaaaaaccagcagcaacaattgtcaagtcggctccaccagttttagccgatcttttctcttttgacatcagagattatcttgataaggcagaagaagatacttcaagcaaagctttagctcctctatctgacgatctagaagcctcttctttagatagcttggtagttgactgcggatcaattaggacacggctgcatgaagttcaagctctgattcccgaagaattggccgatgtcctaactccagccgcttatcttgaacaacatcagttcaagctggaaaaagccaagctaagactagccgaacgccgtgagcgcaaggagattgaagccacaatccaggtcaatcggcagcttgtgcatgaagaaaaagtcaaactcgatcagctatctgagggtccgattaagtccaatattgatcggctcgaagctcacaagatcgatctcttggcacagcttgaagaatgcaatgctgaactggatatggagcacaaaaagctagccgatctcccaaaatctatcaaagaacaaaaggcaaggctcaaatcgactatcaagaatgttgctgacctaaccaagtccctgaaggtcatctctggaactgatgctcaagatgcccaagccattgaagaagttgaacaaattaggctatccagcagtacttatctcaataactcttgtgtaataggacctagaaatttttgtaatcggctaagatgccttaataccccgctgttttaa

SEQ ID NO: 46075 - DNA, 178 bp, Oryza sativa
  unsure (1)..(178): unsure at all n locations
  Clone ID: PAT_MRT4530_48978C.1
cattcgcgttcttagctggtagtgcagtgacgagcntagagttcttgtggagagtagagagatcattggctgtccaatggttgagctcggtctgttgagcgtgactatcgccggcgacactatgctgttcggcgcgcgtttgatccgtactcgacgggagctgtttctctcaagcact

SEQ ID NO: 46076 - DNA, 1578 bp, Oryza sativa
  Clone ID: PAT_MRT4530_48979C.1
agccgacgatctggttttcctctttttgccggcatcggctggttctctgacgagcccttgaagaagagctgaggtcttgggggcatcatagccgataaccggaggagatagcccacctccatttggaattaaacctagggtatattggatgtctttgccattgttgctttgatgaggaggggaggattctgttgtttgagggacaacatctggaaagaggtctgtcatatacattgaaactggttggtggaataaatgcagtttccattcaccccaccacctgtcaaagcttttgcttctgaacgttgccagttctatgttgtcaatactacccagagggggtccttgaaggctaagcagccgatccatcatcagggtcgatgaaattcctcctcggcattggatcttgtcggcaaagaataagccgattgggagttggcctagtccaaattgtctagctgagctcattgggtggtagaactcataagaaacttggatatttcttccctgatgaatgccgacaggaaggatgcatgggctgattgcagctgtaagaacttccctggatttttgatacttttcgtgattgatatcttcaaatctaaagtctgatggaagttcaagatctgctgagtcctcataagggaaccaaacccgggcgtctttctgaaagccttcatagaagctgcagaaccaatccttgagtagctcagccgatagctttgctccaggatcggttggtgaggatgcatattctccgtatgatgtgcatctgcgatgagtgcgttcttttccatcaactcctacaatcggctctgggaatgggaactcagcttctgtcacagatggccgattgacaactttcatgaccatcaggttcaaccaggtttgcagcagacaccatggtccacctgcaccaactactgagccgacggctatcttggccgatgcattgttcaatgtttggtatagatagccaaggaggattttgcccaagggaaattgtttctctgattctagagcttcggcacctatgcttttggttctaaaatcaaactgatttttggtgttcatgctcatgggattagccgatgaggttacatctaaaccggtgatcatggtaatgtcgatcaaatttggagtcatcggcccttggttgagcaagaaggcattgatggtgtgggaccagaaataggtggcagcagccatcagaggtttgtccttggtggaattagctatggtgagggcaagcacttggctgatccaaatctcatcccagtgaactttcttagtagccgatacgcactggtacgatgtggtccaactcttctcaggggtggttttctcaagagatggccacaacttgaaagtattcttccaatgacccagattagggttggctaatctaaaaaggattctgttggtttcaccaatgataaaattagtggggtcaagattgccgattggaccaaggaaatagtggttttcatgtgacaggctgggaaccacaactagatgggaaaggtgctcagcgtactccgctgatggcgcggtagatgggctggcggaagacgacat

SEQ ID NO: 46077 - DNA, 534 bp, Oryza sativa
  Clone ID: PAT_MRT4530_4897C.1
atgccggcgggcaaggttaagatgatgctggtcccagtggaacagcctccagccctccagcgatcacacagccctgaagttacgaagttgccaacacggcagcacatagcagccaggcgatgtgttggggggcttcgggtgctcgtggacacggttaccctcgacctcgtcggtgggaggaggacgacggcggtggggaagaacctgaggcggcagcgagagagacaggcggtgtcgccggagcagcccttcacagtggggcggaacctcgtctacgtggcgcgtggattcgtctacgtggcgaaaaaggttggtcgagacgtcaagtgggagcggagggataataacgacttggacccggtaggcgccgcgcggtccacgccgcccgccccgcccgccactggcatcattcgccaccaaggaaaggaaaaacataacgggacaagtgccggcgtcgccgggcaatcccttgcgtccacgccccgtatctccacctggcgccgcgccgttcgcgagggtgagatgcgatgctga

SEQ ID NO: 46078 - DNA, 602 bp, Oryza sativa
  Clone ID: PAT_MRT4530_48980C.1
aatatctcgctattacagtgccaaccattagccaaagtatgttgcaaggcatagctcattgccatgttcgatatgtcaacttgcaacttttgagataagggaatcaagcgaagggaatcaagcaaagccgttcaccacacgctgacggtgcgggcccaccagccgagacgagggcccacgttcgcaaatagacccctaaaaaaacttatcccacaaatggtccttagcctctctggcgccgtccccccgccgacgtggcgaggcgatgctgaggagcacacaagaaccaaccatataaaaaataaactcaaacggacgaaatatgtgacctatggaattttccaaagctctaccgaaaaacttctctcctcgaaaacacaatcttgcaagcggaatttggagattctaatatcgccgaacccagtaaagcagagatgaatcggatgtaactttttctatagatgtccgtggatatattatttgtctgattccgagtccggggtggcgccacccatgctggcgccctcctcctgccacgtcgattcgcttgtgccacggtgacaggaggacggcgccagagaggctggacgacggcgccagcc

SEQ ID NO: 46079 - DNA, 1014 bp, Oryza sativa
  Clone ID: PAT_MRT4530_48981C.1
atggcggtcttctccacaaatcatgccgccgtcgccgtcccgctcatcgcgccgaaccgcgctggagtcaccgtcggcgtccccgttcccgcccctccgcccatctcatcgatccacgccgccagagtcgctgtctccgcccccgatccacgcctgtgcgcccctcagatcaccgtcggccggagtcgccgggctcgtcgtcgcaagctgatcccctccgccattgataggaggggaatttacatggttgccctcatgagagggacacttgtatgggcatacaatctcgtggacgatgacgagctggtgaagttggtcagctccggcgcagtggtggaggggcaggccttcgctccgggaaaggccgtggtgccgaaacccggcgaaaaccggacggtggtattcgtcatcttctttgaggaggggcttcgatttccgttcaacatgttgtttccggagatccttcgccttttccaggtggagctcccccagctaagcccatcggcactcgtccgtatcgccatcttcgactgggcgtgccggatcgccgggtttgatccgagcgccgatcttttcggcaccatgttctacgccacagtgaactcgaagacggtggatcgcaattgggtggcgaagtggttctacctctccatccccttcgaggctgggtccgatgcggcgaaagccctccggaggcggcgtagggtgattgcaccgaacaggaagcccaaggtcgccgtcgatggcgccatggaagcccggttcgccttgctgcacaagtcgtggcaagtcgaggtcgatggcttgccgaagctcgtcatgcctgcgggggcgaacgtgttgactcttgctcaggccgacaccgaagcccgaaagttgatcggcgacgtgtcggtcgctgagttcagccagctgctatcgcggcaggcggcaagacgggcaaaccggtgtaggatcgagatgtcaactagaagggggggtgatagtggctcaaatatatctctaggaaagtaa

SEQ ID NO: 46080 - DNA, 2566 bp, Oryza sativa
  Clone ID: PAT_MRT4530_48982C.1
cgggctcacaccggccggcgcccgtgacaactaaccaaccctaatctgggtcactggaagaatactttcaaatcttggccatctcttgagaaaaccacccctgagaagagttggaccacctggtaccagcacgtatcggctagtaagaaagttcactgggatgagattgggatcggccaagcgcttgctctcaccatagccaattctgctaaggatgaacctctgatggctgccgccacctatttttggtccaacaccctcaatgccttcttgttcaaccaagggccgatgactccaactttgatcgatatcaccatgatcactggtttggatgtgacttcatcggctaatcccatgagcatgaacaccaagaatcaattcgacttcaggacaaaaagcataggtggttggtctggctatgtagcagcatatatgggtcaagggtctgttactcctcgagagcatgtagccttcttgctaatgtgcctcgaaaaatttctcttttgtggatccagttgtggccctacaaccaactgacaatttgtagccgaagccttagaatcaaagaaagaatttcccttagcaagatcctcctcggctacttataacaaacattgaacaatgcatcggccaagatagccgtcagctcagtagtcggtgcaggtggaccatggtggctgctgcaaacctggttgaacctaatggtcatgaaagtcgtcaatcggccatctgtgacagaagctgagttcccattgccagagccgattgtaggagatgatggacaagaacacactcatcgcagatgcacatcatatggggaatatgcgtccacaccaaccgatgctggagcaaagctatcggccgagctgctcaaggattggttctgcagcttctatgaaggctttaagaaagacgcccgagtttggtttccttatgaagactcagtagatcttgaacttccatcagactttagatttgaagatatcaatcatgaaaagtatcaaaaatccagagaaattcttacagctgcaatcagcccatgcatccttcctgtcggcattcatcaagaagaaatatccaagtttcctatgagttttatcacccaatgagctcggctagacaacttggattaggccaactcccaatcggcttattctttgccgacaagatccagtgccgaggagaaatcacatcaacgctgatgatggatcggctgcttaacctcccaggaccccctctaggcagcattgacaacattgagttggcgggattcaagagcagaaacttcgacagatggtggggtgaatggaagctgcacctgttttcatcaatcgacttcgatgtatatgacagacctattccctgatgtcataccccaggggatcgactcttcccctccgcaccaaagcaacagtggcagtgacattgaatatgctccaggtctgattcctaatggaggtggaccatcccccctgttattgactaccatgccccaaagacttcaactctccatcacggcctattcagggaaccagccgatgcaggcaagaaaagaaaaactagatcatcggctatgggtactttggccttagctccaaagaaaaaggccaagtccaagaaaactaacccgactgataagccgactgatgatctgcctgccttagatccatccatcgaacaagctctagatgaagaggaaattggtgaagatgttgatcaggctgcagttgaagtgagtgacatagaaagaacaccatcaacttcacccaagcagacatcaccaactccttctgctcgcactcatttcacaagagaaaacaagattgctatgaagaagaaatcggctgcagcaacatctaaaccagctccaccacctcctcctcctccttctccttccgtccagcaatcgtcaagtgaccgaactccatcggctgtgggaagtcaacacattgaggaagaacaaccagctgctcctgctatcccagctttagccgatcttttctcctttgatatcagagattatcttgatgagacagaagaagatacttcaagcaaagctctagctcccttatccgatgatgtgaagaagacacttgaagatgagctagccgacatccttactccaggggtctatcttgagcaacatcaattcaagctggaaaaggccaagttaagactagccgaacgtcgggagcgcaaggatattgaggccacaattcaagccaatcgtcagcttgtgcatgaggagaaatccaaacttgatcagctttcggagggtccgatcaaatccaacattgatcggctcgaggctcgcaagattgagctactggcacaacttcaggaatgcaacgccaagttagatctggagcacaagaaactagccgatctcccgcggtccgtcgaagagcaaaaagcaagacttaaataggctatcaagaatgttgctgatctgaccaagtctttgaagatcattcctggaactgatgctcaagatgcccaagccattgaagaagtcgaacaaattacgcaaagggctatttcggctatccagctgtacttgtctcaa

SEQ ID NO: 46081 - DNA, 313 bp, Oryza sativa
  Clone ID: PAT_MRT4530_48983C.1
agagagcgttagacttgtagtcacctaaaaggttacacataaaaaaaattcacttggagaatccagtttcacaataaaatgggctgtaacatgggatacatcgagtttggtactaagcttcaacacccttagctgtgcatatccaaatgcccagaactaacacgggcgagggctcaccaaaacggtcaatgactgcagcgccattgaaagccaaacacattagactgccccattacctaaaacgccactaagccgcgactcataccccagagcaagccgacattctacacggtccttgcatgtgtaagacgat

SEQ ID NO: 46082 - DNA, 2858 bp, Oryza sativa
  Clone ID: PAT_MRT4530_48984C.1
tgtgacaagcacccacaagacggcggcgccgagcacgagtgcgtgctggctgggaacaacgggttcttgccatcgatggtgttcgcggagagcactgcccactcaccagggttgcacgggtacacagcgcaagcgcaccttccctcgaccttacacatctaaaaaaacttatcccagaaatagtcttttttggggcaccagagtggctggcgccgtcgtccaacgggacggcaccagcctctccggcgccggtccccccgccgacgtggcggggcgatgctgaggagcacacaagaaccaaccatataaaaaataaactcaaacggacaaaatatgtggcctgtagaattttccaaagctctaccgaaaaacttctctcctcaaaaacataatcttgcaagcggaatttggaggttttaatctcgccaaacccggcaaagcggggaagaatcggatgtaaccttttctgtagatgtccgtggatatattatttgcctgattccgagtccagaaataggaatggaggcgaggggtggggtgggggggcggcgccagccatgctagcgccctcctcctgccacgtcgattcgcgtgtgccacggtggcaggaggacggcgccagagaggctggacgacggcgccagccacttagccaccggcaccatccgcttcgtcgccgacgagcccctcttccgctgccacccgccgcctcccctcctgccagatccagcggaggggagggcgctgcctccgccgccgcctgccgcctctcctcccgccagatccggcggaagggagggcaccacctccgccgctgcccaccgcccgctgcctcccctctcgccagatccagcaaaggggagggcaccagctccgccgccgcgcgccgcccgttgcccggccgcctcccctcccgtcggatctggcggaggggagggcgcggcatccgccgccgccgccgggcatccgcggcacctataaggccgatccctatgagggtttttgtagtagtggtggtagtggtgcaggggcacgggaacaagagagcggactatgcccggctcgcggtggcactgcggcaggaccatggcatgccggccgtcgttgtcgctcgagtgtcggcgtgccccgactggctccgcaaagccgtcgcgtgggcatcgtgggagcatggatgcgcaggacatccatctcggtctgaggcagcagcgccaccaccaccctcttcctcggtcccctccgcccgaggcgacgagcttatccatctacttcctcctggcgtttgggcggcagcagcggcaacaccccgcgcagacgccacggtgggcacactgttgatgcgaaaacacgaggcctgggagatctgcttaactccagtgcaggtccaaagctcgccttcagctagtaagaaagctcactgggatgagattggaatcggccaagcacttgacctaaccatagccaactcagctaatgacgagcccttaatggcagccgcctcttatttttggtccaacatcattaacaccttcttgttcaaccaagggccgatgactccaactttgatcgacattaccatgatcaccggtttagatgtaacctcatcggctaatcccatgagcatgaacaccaaaaatcagtttgatttcagaaccaaaagcataggtggctggtctggctatgtggcggcatatatgggtcaaggatctgttactcctcgagagcatgtagccttcttgctaatgtggctcgaaaaattcctcttttgtggatccagttgtggtcctacaaccaactggcaatttgtagccgaagccttagaatcaaagaaagaatttcccttaggcaagatcctcctcggctacttataccaaacattgaacaacgcatcggccaagatagccgttggctcagtagttgatgcaggtggaccatggtggctgctgcaaacctggttacacctgatggttaggaaagttgtcaatcggtcgtctgtgacagaagctgagttcccattgccagagccgattgtaggagacgatggagaagaacgcactcatcgcagatgcacatcatacggagaatatgcatccacaccaactgatgctggagcgaagctatcggctgagctgctcaaggactggttctgcagcttctatgaaggttttaagaaagatgcacagatctattccctgatgtcatacctcagacaatcgactcttcccctccacaccaaagtaacagtggcaggcacattgaatatgccccagggaactagccgatgcaggcaagaaaaggaaaaccagatcatcagccgtgagtactttggcctcatctcaaagaaaaaggccaaatccaagaaaactaagccgactgataagccaaccgatgatctgcctgctttggatccatccattaaacaagctctggatgaagaggagattggcgaagatgttgaccaggctgcagccgaaaagaagaaaactgctgtgaagaagaaaccagcagcgacagttatcaagtcggctccaccagttctagccgatctcttctcttttgacatcaaagattaccttgatgaggcagaagaagatacttcaagcaaagctctagctcctctatctgacgatgtgaaaagaacacttgaagatatctcacatcggctagaagcttcttctttagttgactgtggatcaattaggacacggctgcatgaagttcaagctctgattcctaaagaattggccgatgtcctaactctagccgcttatctcgagaaacatcagttcaagctagaaaaagccaagctaagactagccgaacgctgtgagcacaaggagattgaagccacaatctag

SEQ ID NO: 46083 - DNA, 828 bp, Oryza sativa
  Clone ID: PAT_MRT4530_48985C.1
aagaagaaaactgctgtgaagaagaaaccagcagcaataattgtcaagtcggccccaccacaatcgtcgagtgaccgggctctatcgactgtagggagtcatcatattgaggaggaagaacaaccagctgctcctactatcccagttctagtcgatctcttctcttttgacatcggagattatcttgatgaggcagaagaggatatttcaagcaaagctctagcccccttatctgacgatgtgaagaaaacagttgaagatatctcccgttggctagaggcctcttctttagatagcttggtggtcgactgtggatcgattaggacacgactacatgaagttcaagctctgattcccgaagaactagccgatgtcctaactccagccgcttatcttgaacaacatcaattcaagctgaaaaaagccaagctaagactagccgaacgccgtgagcgcaaggagattgaagccacaatccaggtcaatcggcagcttatgcatgaagaaaaagtcaaactcgatcagttatccgagggtccgattaactccaatattaatcggctcgaagctcgcaagattgatctcttggcacagctcgaagaatgcaatgctgaactagacatggaccacaaaaagctagccgatctcccaaaatctgtcgaagagcagaaagcaagactcaaatcggctatcaagaatgttgctgacatgaccaagtccctaaaggtcatttttggaactgatgctcaagatgcccaagccattgaagaagtagaacaaattaggcaaagggctattttggctatccagcaatacctgtctcaatga

SEQ ID NO: 46084 - DNA, 118 bp, Oryza sativa
  Clone ID: PAT_MRT4530_48986C.1
taatctaaccatgcgtccgctttcatgacagctgtttaaacaacatgtgtggggggaagatccaagtcgagtgccatctcaaagtcgagaagctttcccgctgcttgatatttaagat

SEQ ID NO: 46085 - DNA, 434 bp, Oryza sativa
  Clone ID: PAT_MRT4530_48987C.1
cgtccgcccacgcgtccgaaacaatctttctaatatttcaaattttctatttctatttgttcgtgttgtcaataatggtggcaaatacctcaaagtaagaaccaaatggaacatcatgtgcctgatgctttgtctcatagatctgaaatgagatagtaagtcataatttcattaaagaagaaaaatcaagaaaacctgattcacagtggacctatctgttactaatttaatcttaccagatttgttttgttctttgagaaagaagcacgttgccattctgtcactgcagtatctgggggacataaaggactgtggcatagagacctgaacattactttccggatcttgccgccatacttatctgagggggtccacttgctaagcttgagaacgaaaaatcaatacacttttaaattaaaaaatgttggttatgc

SEQ ID NO: 46086 - DNA, 160 bp, Oryza sativa
  unsure (1)..(160): unsure at all n locations
  Clone ID: PAT_MRT4530_48988C.1
gagaggcttattttnnctgaaggagcagaaaatggccttgagttcacaattgtnagacctttcanttggnttggnccaagantggactttntncctggtgttnanggtcctagtgagggtnttcctnggntttgggcatgtttcantaacantctcctgc

SEQ ID NO: 46087 - DNA, 162 bp, Oryza sativa
  Clone ID: PAT_MRT4530_48989C.1
ctataacttaccatttgtagattacgaaataaaccagagtcgacgtgccaaccaagtaaagacggaccgaaagggaaaacaaaaaaaaaaaaaaaaaaacacggaataacgagcacactcaagcaacaacaacatatgaagagtagggaaaacgcgacccgt

SEQ ID NO: 46088 - DNA, 612 bp, Oryza sativa
  Clone ID: PAT_MRT4530_4898C.1
atggagccgagatcgccgcgccggtttccttcctctccggccgccctctctcgctcccgacgctatataatcgttcctcgtgcttcgctcctccgtttccgccactcgccgcactctctccccgtcggattcgagctcgcgccgttgtcctctctctccgccgtcgccgccgagctccgattcgccgccgtcgtcgccccggatctcctcccgtctcggcgtcacctccttcggcttcgccgcgtccccgtcaacctcgtccaccccttcgtttcgcctgccgaccgtcggagcgccgccgtcctcgtcgatccgaaccgcaccgccgcctctcgccgcttcggtcgccgtttttgtcgccgccgtcgacccggggtgagccgaggaccgccgcttcgcttccctcttctctcctctctctcgggcgccaccccgccgcgccggtggtcgccggcggtgaccatcggggcgcgggcgcgccgcctcccgtcggccgtgccggcgaggccgccttcgggcgcgccccgcggctgccaggtggggcccggccgtcagccgcccgcgcccgcgggtgcggctgacgcgtgggacccatggcgccggccagtgtga

SEQ ID NO: 46089 - DNA, 2133 bp, Oryza sativa
  Clone ID: PAT_MRT4530_48990C.1
atgccttctcttctcttttctctcttctctcttcccatcttcgggccagcgccgggcggaattggtgaccgcggcggtgggccagcacggcagcagagcggtggcgggctgcgggtggaacggacagcgggcgagcgcggcggcggctgtcgcctcgtctgctcgggacctgccgattgcgagatcgggtgcttcgtagcacgattcgtggaccgtacctacgcgtcgtcgcccggcagcggtaattcacgagggatatcctacatggatggcatacagacaagtgactcttcacatcatggaattgtagaaaacagcccatatagaactccctatgatagatatgcagaaggtggtcaacttggtgcttcctggtattttagtagaaaggaaatagaggaaaattccttatcaagaagagatggcattgatttgaaaaaagagtcttatcttcgcaaatcatattgcactttcttgcaggatttagggatgaggcttaaagtgtaacaagtgacaattgctacagccatcgtgttttgtcatcgttttttccttcgtatggcggcacaccatatggcaacggcgacaatcgccacagtttgcatgttcttggcgggaaaagttgaagaaacacccagacccctgaaagatgtcatactcatttcctatgaaatcatccacaaaaaggatgctgctgctgttcagcgaattaagcagaaggaagtatatgaacagcagaaggagcttattttacttggggagcgtgttgtgcttgtaacacttggttttgatctgaacgtgcaccatccgtacaagcccttggttgaagcaataaagaaattcaaggttgctcaaaatgcacttgctcaagttgcctggaattttgtcaacgatgggctacgcacttcactttgccttcaatttaagccccaccatattgcggccggcgcaatcttcctggctgcgaagtttctcaaagtcaagcttccatcagatggcgagaaggtctggtggcaagagtttgatgtaaccccacggcagttggaagaggttagcaaccaaatgttggagctctatgaacaaaaccgtgtggcaccaccaccatcacaagggaatgacactgaaggtagctctgcgagtgtggtcaatcaacgtgcttctgggaaagctccgggatcttctgaagagcctcccacccatgaaaatcacctagcgcccagacagtcgagcacgccaggccaccagggctatgaccaccctcatcctgagaagcagaactcaagccagagggtacctcagaatgatgcaagggatggtactgccaatagcaacgaaggccccaatatgtcatcaacgatggatgcgatgaaaaagatagacaaggataaggtgaaagctgccctggagaaacggaggaaatcgaaaggcgatgttgctaaaaaggttgatatcatggatgatgatgacctaatcgagagggaactggaacatggtgtggaattggctgccgaggacgagaagatcaagcacgagaggaggcagagttggccccattctgcacatcgggaggatcaccaaggcgtcgctcgcctgactgaaaacactgaggaaggtgagttgtccatagacagccaagagtaccgttctccggagcttgacaaccgaaagagaaaggatatgcatgagcacaggaattacgatcgcggtgaaagggaccttaaaaggttaaggtcttgagagtgaaagtgttaatgttcggcacatcacattgaggagcgcgattcgcatagcatcgcatgtgacttgggctatcagatttgtagaacctatttgttgtcactagagcttatgcttatatgtatgtgggagattgaactgtactatatagtttaaaggatggtttccccagagagcgtgtacatgttttagagatgtttaactgttcctgagtcccgacagtgttatgaacattcagaagcagctttaagctgtgaacgatacgaatgagatcatcgcaagacttatatgtatggcccaacgagaaattgttgtaattcggattgctgactcgaggtaatatggaagaaccatgattgttttcctacaaaaaaaaaaaaaaaaaaaaaaaaaaaa

SEQ ID NO: 46090 - DNA, 1101 bp, Oryza sativa
  Clone ID: PAT_MRT4530_48991C.1
ccgcgaagcccgccgcctcctcggcgcggccaaggccgcccccccactcgcccgccgccccgcgccccgtgagccgcgccctcctccaccggcgccgccccctccccctctctttcttgcttggctgcatggatcaatcatggaggaaggaaccaaccacccaattcaggaggaaaaagaatcgagttcttgttttttttcttcttcttcttctctaagtaattattgggagtgatatgatgggcttctgcaatcttcaatcatgtggtattggtgtagataataagttatgatgatgatgatgcacaagagggtttgtcggcaccgtcgggggaggaggaggaggaggaggagccagcgagggctccggtgaggagcaggcggcggcaggaggaggaggaggaggaggccgcgccggggcacgaccggttcaagctcatcaacggcaaggagatttttcaagagaaggcatacctggttggggttgagtgcaagaggagtggaggaagtatgttcagtatagaggaatcacttgaggagctggagcagctagcggataccgccgggctcatggttgtcggctcaacctatcaaaagctttctaccccaaatccaaggacttatattggttcaggcaaagttgctgaaatcaagagcgcaattcatgcccatgatgttgagactgtgattttcgatgatgagttgtcccctggacaattgcgtaacttggagaagtcatttggtgggggcgttcgagtctgtgacaggactgctcttattctggacatatttaaccaaagggctgcaacacatgaagctgctctacaggtcactttggcacaaatggaatatcaacttccaaggttgacaaagatgtggagtcatcttgaacgacagtcaggaggtcaagtcaagggtatgggtgagaaacaaattgaagttgacaagcgcatcttgagaacacaaataagtgctttaaggaaagaattggagtctgtccgaaaacatcggaagctgtaccgcaaccgtcggcaatcagtgcctattcctgttgtttctctggtataatcatgaagttcttctcaaatataatagaaagtt

SEQ ID NO: 46091 - DNA, 3749 bp, Oryza sativa
  Clone ID: PAT_MRT4530_48992C.1
gcaggtacgcttgttctcttaccgtattatctctcttctgatttcctattgtttcctcttttacttttatacatttatgtatccttacacttgtcgttaaacagttaattaatcttgattgtcggagcattcgagagaggaaactgcagtaattgcgtgtgaaccagtatcctagactacctgcactacactgtttaattaatgagctggtaccagagatataggatgttgcttcttttctttacgcatttctcacctgtgtccaagaagaagatccggcccggcatgcattaactcatattcagctaggatttcattttgaaaaatttgaagctgttgacggggtatccttcgatctacgtgtaaagcagcgtaggcagatcatctctgctttttacatgttttgtgcaccgtgtcctcttcttgatagtatattaacttatttaagtgataatggtgagaatcactacgttataccgcttaggtttaacgtcattgtcaacctaagaaggctaaaggtccttaggagggcaattgaccgtagaagaagtgtttcttagagaatcaagatgcagtttagggatgacattttttgttttctgaactgctttgacagtggggaacaatgttgtgtaattgtactgaaaaaccggttggacatcttggagcttatgcatcactaaatagaaaaatagcataatttggattcttactctcttatgcttagcgagatgcaagagaacctttcgctggtttcttattctagtcgcatctcttctcagatatggaatgagatgcagacagatttcttgcccaattttatcctatgtaataccacacagcgagaggttcgatcattaaaaggaacccatcactcttctcagagatcaagcgcctctaccgggaaggcctatttctattgtggatcacatgatttgaccatggcataccagagcatttctggtttgtaccgtgacttttttgggatccctcatatgtttgcagttgttaagcttcttggttccagatcattacctggtattatccgtgctttattggatcatatatcaagtaagataacagctatggtgccaaaaataactgcattgcaagaagcactgcccaaatctattggacttctttcattgatattaaggggaacatgtatgatattgttgttgaaggctttcagcttcttagccgatggactggcaggatatgggagcagtgtgcctggaaattttcgcgcccttgtaaagaaccaccttcagattctcaacatggatcgacaacattttttgactatgaaaaggtagtacgctggaactacactggagaagaacggagggctcttcttgaattaattggttacataaaaagtattggattgatgatgcaacgctgtgacaccttagtgtctgaagccttatgggaaacgatacacatggaggtccaagattttgtacaggataaactagatactatgctccgtacaacatttcggaagaagaaggacctatctaggttgatcctctctgatatgcgaaccctctccgcagattggatggccaacactagcaagggagatccagaacacaactcgttagaaacagaggaaatgagacaaagcacattctacccaaggccagttgcaccaacagctgcacaggtttttattaatactttatcatgtgaaagcttttgcttcagtagctctatgttcttacagtaacaaagggctggaatacctgtggaagatcttaaacagctagagacatttttctataagctcagttttttcttgcatattttggactatacagctacaattggtactttaactgatcttggatttctttggttccgagagttttacctggaatcatctcgtgttatccaggtcagctttccaattgaatgttcactcccctggatgctggttgagcacgtcactgaaacacaggatgctggtcttcttgaaagtgttttgataccatttgacctttacaatgactctgcccagcatgcgttaacttgtctcaagcagagatttctttatgatgaaattgaagctgaggtcgatctttccttcgatcttcttgttgaaaagcttaatgagatcatctttacatattacaagagttgtgcagcaagtactcttcttgatagttcatttacctacttatgtgatgatggtgagaagtacttcgtcaaacccctgcggtttgacgccatattcaagctaagaagagtaatggtcctagggaggacaattgacctaagaagcctgattactcagagaatgaacaaactgtttcgggaaaacattgatttcctactggagcgctttgaaagtggggatctatgtggtgtagtggaactgcaacaactgttggatattttggagcttacgcatcagtcaatatcaaaatttcttgagttggattcttactctcttatgcttagcgagatgcaagagaacctttcgctggtttcttattctagtcgcatctctcatatggaatgagatgcagacagatttcttgcccaattttatcctatgtaataccacacagcgatttgttcgatcattaaaaggaacccatcactcttctcagagatcaagcgcctctaccgggaaggcctatttctattgtggatcacatgatttgaccatggcataccagggcatttctggtttgtaccgtgacttttttgggatccctcatatgtttgcagttgttaagcttcttggttccagatcattacctggtattatccgtgctttattggatcatatatcaagtaaggtgagttgtctaagctgtcatgcacatgaaggggcactaacccatagcccaaaatttatttaagtggaagagcacaagaagcactgcccaaatctattggacttctttcatcatgaaatattgacttgggaagcaaaatcagaagtgaaaactgaagttcttcatgatctcaaggaaattgggagtgctttgtattggatgagccttctggatattgttttgagacaaatagacactacacagttcatgcagtctgctccatggttgggattgattccaggaaatgatgggcaagtgaagcatgcatactctgataatactccatttaccactttgttaagtgctgccaccaatgcagttgcatcaagtcctgcatgcccaaatccatcttcatttcttgtcatggcaaagcaaggtctactctacaaatcaaacctaaactctgggagtgtgcttgagtatgctcttgctttcacgagtgctgcgctggataggcattacagtaaatggagtgcaactccaaagacaggatttattgacatcaccacatcaaaggacttttatcgtgtttttagtggtcttcagtatgtaagctacttggaagagagcatcaatccttcgaggaaacaagaaatgttgggtgactctgtagcttgggctggctgtacaatcatgtatttactgggacagcagcagcattttgagcttttcgacttctcttaccaatttctcaacgtggcagaagtagaaaatgcaacagtttcactttatcaatatggttacgagggtatccttgaagcgatgaggaaagccaggaggctcaataaccatgttttctccatgttgagagcatggatccggtcgccagccggacggagtcagcaggccgccgccacaccctcttctcctctccctctccatgagcacctcgctcagtgc

SEQ ID NO: 46092 - DNA, 226 bp, Oryza sativa
  Clone ID: PAT_MRT4530_48993C.1
gaggcataactagacgggcatttatatatatgtacaatgtagaaccgtacagggacatatattttcggaaatgttgaggaaattttttcatcatgtgtacaagggatcttttgcttgcgctatgagttgcactataaagcttaacgtagaaaatatatgtagttgtatgtgactgtactaaaggatggttagagatgctcctatgagcaatttcaccactcttgac

SEQ ID NO: 46093 - DNA, 747 bp, Oryza sativa
  Clone ID: PAT_MRT4530_48994C.1
atggcggtgttttatcaccgccagcgtcacagacggaaacggagtacacgactccgaatccgatgcgaggagaagccttcgcctcttcatatggcaggcgaaggccgcggccgcgtcgtctctcgtctctcgtgcggcgcgcgcatggcttctcctcctcccggcgacgacgaggcggcgagggctctcgcgctggagcaatgcgagagggacttcaacgcggtgatcgaccgcatgctcaacctcaacctcgacggcgatgacgccgccgcctcctccgccgcttctcccgagcctccggcaccgcaagccgcgcccgcacccgaggtcgccgccgccgccgcagtcgacggtgcagcacggggcgaccgcgggtactgggtcgagaccatgatgcgcgagctgtgggccgccgcctccatggacgacgccagggagcgcggcgccagggtgctcgacgcgttcggggccgctgtcggcgctggcaccgccgcgaggctggacgccgcgtcgaggcagatcgggttcctcaagagggcggtgctgttccaccaccggctgcggaccgcgcaggagaaggcgcagcgggagctccggtggcagctcgacgactacagggagcaggtgcggcggctggaggcgtccaactacgcgctgtccctgcacctccggcaggccgacctgcgccgcggcggcggtggcggcggcgccatgccccacggccccggcaacccggagatcttctga

SEQ ID NO: 46094 - DNA, 1455 bp, Oryza sativa
  Clone ID: PAT_MRT4530_48995C.1
cccgcgtcgctcctagggcaggggcgacacgggaggcgacccagccgccgccgccacaccacccccactgccctccttccacctcgccgccgcccgagcgggccgccggaaaccgcgcggccgcaaggacggcggcggcgtggccttctccccccccaaggtcgcggcgtttggagcccacgactccgacctagctccggggcggcgacttcggcggctgcgatgtcgagatcaacggtggcgcatggtgtcggcgaggtggcggcgccgacgacggttgaagaggtgggcaaccgggccgacgacgatgacgaggcggcggtgctggctcccacgctctcctgcgcggatctggtgcggggggataggccgccggcggcggtgatgcgcgtggaggcggcggggccgagctctgaccccagcagcgaggcggcgggggcgcgcggcgctggggcggcggtggctgaaggcggcggggacggagctggccgagggcgcggaggcggcagcggtggtcccgtggctgcgacggcgcagtgcctggcggcggcggcggtgccccccagatccgcgcctctcgaccggatctggagggtggcggcagttggcgacggcggcagcggtgtggcgacgatggtggcggcaattggccggcggcagttggtgatggcggtctctctggacgccggcagcagttggcgacgacaaccgcggtgtgatggcgtcgggcagctagctgctcggtggtggagggcgacggcgcggcggcagtttgcggaggcggtggttggcgtcggtggcagcggtgacggcagctgcgactctggaggcggtggcaacgtcggcggcgaggaaggagttgggtgcgagagaagtgcagccgatggtagcggaggccggctcggcgcgagaggcgcaggcggcggagatggaggccggcttggcgcgagaggcgcggccggtggagggaggccggattggcgcgaggcgcgtccggtggaggaggccggcttggcgcagagaggcgcggccggtgatggaggaggcgacctaggtgtgaggaggagctgccggtgggtgtggcgcggtcttcgacgcatgaaggctggccggcgggggacgccggtgcaggggtcccacatgtcggcaaagcttgtgtggtggtggagcatcggcccaacgacggcaaatccacccgcgtcaggctcggcaacagtggatctagactcccaagaccctgtggttgcagacctgatgctcctgaggccggtgacggcggattcaagctatggaggtcacatcgctgtcttcacgatcgtggtcattgtcgtcatcactagtgtcgtggtggtggtggccacgttcatcgtcgcaggcccaattgatgtccctttgcctcctaaggcccaccaagttggtgtgatcgacggtgccgatttttataggcagggctaa

SEQ ID NO: 46095 - DNA, 387 bp, Oryza sativa
  Clone ID: PAT_MRT4530_48996C.1
atgtgtgatgccccccgagtgcccagggaccctacctacctccacctgcgacagctgctgctgctgcgtgaaggcacgcccatgacgaacctaggacctcgtcttcagtgtcgccatcacccggcagcacatgagcacacaacaactttgatcatcatcatcaccattgttatgcatcttatccggtggagattggagaaactgattgagatcctcctcgttgtcgtcgtggatggaaggaggccttctttctttctccgcgtcagcaggctgatcgctcagtttcggtccaaaagcaaaagagagagagacatcgcattctcagattctccgcatcgtctgtggtacaggaaatttgcgtggaaaaattggtcgccgagcaggtga

SEQ ID NO: 46096 - DNA, 1735 bp, Oryza sativa
  Clone ID: PAT_MRT4530_48997C.1
atggcctccgcggccgcggccgccgccgccgccccaaagtcgccgactttgatgcgaggcattcagtcacggggtttctggtccgccggcgagtgcccagtgacacctggtccgggtatagttacatgctactcgatcaactgcaactactaggtggccccggagggtatcctacattactgaagatgggagagatagtcagttctgctatcgttcatgagacagtgaacaggatcatatctgggttgattgacaagtgtgagcgaaaatcaagtgcgcgggaacacttggacaggttagagatggcacagatcaagttggagcttgcacttgagacatccaagaagtggcagatcattagtgacctttcctaagcgaattgccgttgctacgttggcagaagaagctgaaacgtgttgctgaagagtgtgatgacacaatacgcatgtgcaggcagcgtgtccaggaagaacaagaggccaaacaagtagcaagggattccttctttcctaggcgaattgcccatgccaccaagtcactgatatcgtccatcttttatggcaatatcgacgagccgactagatctaccgttcgaagattcgagtggtttgcagatggagctaatgactttctgagatctgtggagtctggagggacaccgcgtcgttacttgttcttcgaccctcttattgggcaccttcttgcaggtgaaatgctagagtacaaattggttcagggaaacaagcaacatttgttttggatacggcccaataacattgcagagaggatagaaggtatggtgttcttcgtttacaatgatggcactgcacctgaggataacttttttcttggtatgatactacagatttcagagagtacaaacatagttggcactataattaagtgcttgcagttgtttgctcctcatttcgagtctgtaactgaaactgtcaggaaagaacttactctgctacctacacaagacttctcctggataccacattctcgtttataccattgggacaaccttcacagtatagctaccgaatggttccgcccaaacccagtgtgttgcaagcatcatgatcagaaggtatgtggtagtggcaacatgaacatgatagaattaccagacttctctctagaatcagttattcaagtgaatttgcagtgccatgttgcactgcctgggttcagagaacggggaacaattgtcgagggcaaatcttctctcaaagaatatctgcgtggaccgcatctgaatgttctacttgcctatacgcctcacggatcttcagaaagcctattcccatcagtcgagggttctgtgatagaggtgattaatgctaatgagcagcattgcttgcatacaaatattgccttgcaacaaatggaagagatcatgttgccgagggccgtagattattttcatcagaatgcgaaagcgacagtgtatcagatgctttggaagcctaaacatggtgttgcatatcttcatgctgtgaaggcgaccgtgaacattctgagcacacggaggaccattcgaggagctaggaaatcaaagctgttgcgacaacaggatcataagatgcatcatcgcacagatggaatctctgacttcctcagcctttgggctgcgcacgcacctgtccagcttcagggctcaatccttgattgggttcagaaagagaaggaagtacaattagcagctcctctactgcgcttgaaattttag

SEQ ID NO: 46097 - DNA, 3885 bp, Oryza sativa
  Clone ID: PAT_MRT4530_48998C.1
atggcggatccagcgagggggagctcgggaagcgcgttcctttaccctcaactcacatcaaccaactacactagttgggtgatacgggtgcaggcaatgatggaagatcaaggcgtatgggaggcgatcgagccggcagccggagcggctgtcgacccgaggaaggacaagaaggtgaaatcccatcttctccagtcactgccggaagatctcttgatgcaggtggcaaagaagcggacggcaaaggaggtttgggactgtctcaagacgaggttcgtcggggcagacaaggtgcgcgacgcgcgcctgcagactctgaaaggagaattcgccagcatggtgatggaggccggggagtcgcttgaccagtacgctggccggatcaccatgatgggggtccggcactctgctctcggcgcgacgttgaacgacgccgccatggtgaagaagctgttcgacaccgtcccggagaagttcgtcagcctcgtcgtagggatcgagcaattctacaacgtcgatgacatgccgttcgaggaggcagtgggccgcctcaaggcgtacgatgagcgggtgcgcaagaagaaagcggcggctagcggagtgaccgccgacggtcaggtgctccttactaaggccgagtgggaagcgcgcttcaagaaaggcaggggagaaacctcgtcgccacaaaagaacaagccctctggtgagggggcgaaccgcggccaggccaggcgcagtcgtggcaggggtcgcggacgcggcggaacgcagagcagcggtggcggctccggcggcggtggccgcgacaagagccacatcaaatgtttcaactacgaagagttcggccactactcaacgcagtgcccacatccgaagaaaaagaaagccgaagcccatcttgtgcagacggacgatgccggtccagctctgctcctcgcggtgacgaaggcggtgcagaacgcgccggggcagggcatggactgtgggctggtcgtgcacgaggagcgtgtatggcctcgcctgatgctggcagagaagggagcagctgctggtgatctatggtacttggataatggtgctagcaaccatatgactggggatcgacggaagttccgggagctggacgagaccgttacaggggtggtcagattcggcgacgcctcatcagtacagattatggggaagggtttaatccttttcgcatgcaagaatggtgaccagtggctgcttgatgacgtctactacatccccagcctctgctgcaacatggtgagcttagggcaactcactgaaactggccaccgagttgtgatggataatgatgaccttgaggtgttcgacaaaaatccctggcgcctggtgataaaggtgaggagaacctcgaatcgtttgtaccggattgagttgcaactagcgtcccctgtgtgcttgctgaccagtctcggcgatccggcgtggctgtggcacgcgcggctcggacatgtaaacttccagacgctgaaactcttggtggacaaggagatggcagcgggagttcctcaagtacatcatcccaaccagctttgccaggcttgcctcatggcgaagcagatcaggcagccattccctgcgatggcgaattatcgagcagaagcgccactcgagctactgcacatggacctatgtggcccaatcacaccgtcgacgtttgccgttaatcgttattttctgttgattgttgatgatttttcgcgttggatgtgggtgtttgttatcaagacgaaggatcaagcactggagatgttcgcaaaattcaagccgctggccgagaacacggccgatcactccatcaaaacactccggacagaccacagtggcgagttcttgtccggcgagttcgcgcgggtgtgcgatgaggccggcatcgagcgacatctgacggcgccgtactcaccgcagcagaacggcgttgttgaacaccgcaacagatcggtgatggcgatggcgcgctccctcctgaagggaatgtctgttcccggcaggatgtggggggaggcggtgcggcacgccgtgttcctgctcaaccggctgccaaccaagtcgatgggtgaacacactccgttcgaggcatggacggggaagaagccacacttaggacacttgcaagtgttcgggtgtactgcgcacaccaaggtgacaactccaaatctgaagaaattggatgatcggagagaggagaattccaccgagtttgtggtagaggaacctgttggcgagcagcagccggcgctggcagaacagtctaccacggtggaggcgtcactgagcacggccggcagcgacgacggcccgctgcggtacaggagtctggcggacatcatgctagaggcgccacgcgtagacttggtggatgaagaggatggtgaagcattgctcgcagagacggaggagccgtcatcgtaccgcgaggccgcaggggagccggcgtgggtcgacgcaatgcagaaggagctggaggccatcgagaagaactcaacgtggtcgctgtgcacattgccggtgggccacaaagcaatcggactcaagtgggtgttcgagttaaagaaaaacactaccggggaagtaatcaagcacaaggcatggctggtcgcaaagggctatgtgcagaggcacggtgtagactttgaagaagtgttcgccccggtggcgaggttggatacggtgcgtaccatacttgctgtcgcagcggaccgaggttggcgggtgcatcaccttgatgtcaagtcagcttttctcaacggggagctagaagaagaggtgtatgttgcccaactggaggggttcattaagaagggacaagagcaccttgtgctgaaattgagcaaggcactatatggcttgaggcaggcgccacgggcctggaacatttgcttggacaagagtctgaaggaacttgggtttatgcggtgcaagcaagaacaagccgtatacactcgaggcagaggagcagaagctatgattgttggcgtttacgtcgatgatttaattgtgacaggggagaatcctgccagggtagaagcattcaagaaacaaatgatgggggagttcgagatgaatgatctagggctcttgagttattatctgggaattgaggttggacaagttcctgttgatccaaagacacagcttcaaaaggatgcagatggacaccctgttgatgctattgaatatcggcgtgtgatcggttgccttcggtatttgctgcatacaagaccggacctgtcatatgctgttggagtggcgagcagattcatggagcatcccaccatgacgcacttgaaggcagtgaagcaaattctcaggtatttgaaggggacaatcgactgtggccttgtgtataccgcaggaattggtgagatcacaatcacggggtacactgacagcgatctagccggagatgttgatgatcgtcggagtacaggaggtatggcgttctatatcaacaacagtttggtggcatggagctcgcagaagcagaagacagtaactctttcttcttgtgaagcagaattcatggcagccactgcagctgcctgtcatgcactttggctaagggcattgctgggagagctactcggtgaggaggcaaaattggtaaagttgtttgttgacaacaaatcagctattgctttgatgaagaatcctgtttttcgtgggaggagcaagcatatagatactcggtatcaattcattcgtgagtgcatcgaaagaagacagattttggtcgaatttgttcgttcagaagaacagcgtgcagatgcgctgacaaaagggttgccggcggcaaagctagtgacggcaaggtttctgcttagagttcgtgatcttggagaacgccaggcctaa

SEQ ID NO: 46098 - DNA, 669 bp, Oryza sativa
  Clone ID: PAT_MRT4530_48999C.1
gcttgtaatttgatttaattttgttggcacgcttttgcatgacctgcaatgtgtacatattgatcatgtccatactgaattactcatttcttccctagcaaaaacagaaaaaagaagtggctggctttgtattcatatactcctacttgatattaatagaagaaaagagcttttataccatcttgagaatttacaacagtttacttactgttactggcactttcgaatggacgccattatcactatcttgagaatttacaacagttttctttaggtgttgagatgatgaaatcagaaaagaagagaaagcgatttttagaggaaattttcgtttcagagtttgctcctgctctcgccattcttctccggcctcgcccgagtagaggtcatccactgcctccctatcgccaccagctcgccggacgccttcctccgcacctccaccacggcggccgtcagcttccccttccggtgcgccaccctcccatccatctccacctcctcctgcgcgcgcaatcatcattcgccggagaagagcgggttaatggcggctggccgattcacaggagaagagagcaagatgaagatgatgatccatggaggaaccgtacgccgtgcgcggccggggagaagaaggacatggcctggctgatggtgaacctgtgcacg

SEQ ID NO: 46099 - DNA, 1896 bp, Oryza sativa
  Clone ID: PAT_MRT4530_4899C.1
tttggtttgcactgtgatcaacgaatcaaatcaaacagtgggttggattaaagaagacgagacctgataagatattttctgatctgatcttcgttgtgctgtgaattatgaattgatcgctctctcactctgcatctcactgaaacaaacagagtacagggatgcatgcattagacaaaacaacgaatacttgagctgtatggcaccaccttcaccccccgcgcaacgccgccgccgccgcccttcgccggaacagccgcacggccggcgactccgccatcacccgccgccgccaccgccgccaccttagcgccatgaaaacaccgcagtgggagctccatctttctcgccttgtggtcggcggggacgtgccacacccagaactcctcgttccggcaagcagcggcgacggcgggcttcctcgggctgcccttgggcgacgtccggaggcggctgcggcggcggtgctgctcgtccttccgcgtccgccgctgccgccgccgggccttgtcgtcctcgtcgtcgtcggcggcggcggcggcgtcggcctcctgatccggcgcgacgaacagcacgacggggccgagggggacgtcgtcggtggcgacgagcagcggctcgagcgcgtcgacgacggcggacatgtcggggcggttcttggggctcccgctgaggcaccggtaggcgacggcggccgcctccctcgccgccgccggcgagtagcgcccctccagcgccgggtccatgatccggatgagccggagcgggtcgcgcaggcacggccgcgcgtactccacgaggctctgctccctgttcggccgcgtcttgtcgacggcgcgccgccccgtcaggatctccaggagcaccacgccgaagctgtacacgtcgctcttcgccgtcaggtggccggtcatgatgtactccggcgcggcgtagccatgggtgcccatcacgcgcgtcgacacgtgggtgtcgtccccctccggcccgtccttggccagcccgaagtccgacagcttcgccttgtaatccgaatcgagcaggatgttggaggccttgaagtcacggtagatgaccggcttctctgcgtcgtggaggaacgccaaacccttcgcggcgccaaccgcgatgtttaatcgggtcgaccacggcagcactgcaggaatctgtttgaagaggtggttctcgaggctgccatgctccatgtactcgtagacgaggaggcggttctcgtcctcgcagcagtagccgaccagcttcaccaggttgggatgccgaagctggccaaggaagatcacctctgccagccattccttgtggccctgggcgccctcgggatcccagagcttgacggcgatggcctgcgggcggaggcccggcttgacgccgtcgccgacgaggcccttgtagaccggcccgaagccgccctcgccgaggaagttgccggagacgaacccgcgggtggcgtcgcggagctcggcgacggtgaagacgtggaggttggaccccaccagcgacaccgacaggtcctggtccgccgcccccgtcaggtccgtgaacgacagccgccgcaggccgccgccgccgccgccgcggggacgcaccttcttccccccgctcttcttcttccctccgccgccgccgccgccgaggcagccggtcaggaggaacccccacagcgaccacggccacgccgccgcctccttctccttcttcctcgccgccgccgccacaaccttgcaatcgctggatgacctcatctccgccgcgggctatacgcagctagcatgcgccgtcgccgtcggcggcggggcgagctcgtcggcggcgagcgagcggagctgatcggagaagacgcgggggtttgctttttggttggcgatttggtaatgtgcg

SEQ ID NO: 46100 - DNA, 210 bp, Oryza sativa
  Clone ID: PAT_MRT4530_489C.1
atggcatggtcatttaaggagaaaatatatctgccatgcgacaaaaatgaacctctgaccaatcatgtgcgagtacaaggattggacggaccacaaactgagccacaaactaagccttacccactagacatgtggaagtacggtagtgctttgcaacagaggcctgagcttaatccttatagtggccggggtgcaacttcccacaactag

SEQ ID NO: 46101 - DNA, 348 bp, Oryza sativa
  Clone ID: PAT_MRT4530_48C.1
atggagatccaatatgagcttaattcggatagggatccaaataggagtcctaggggccttggaggcccgagtgatggatcctatatattcgtgaggggtgtgaccagcggaggtattgcatcaccgtgggagtacggcgaggaaaacgcacgaggaggagaaggtcgagccggtgcgatcgactacttcctctacatcgacgcgcgctacttcgcgagagttccttcgacttctcagcgtcttcttccgctgcgcagcgcgtcgagtggtaacgatctatgatctaatactggggatcctccagagtcgacctgcaggcatgcaagcttgagtattctatagtgtcac

SEQ ID NO: 46102 - DNA, 1485 bp, Oryza sativa
  Clone ID: PAT_MRT4530_49000C.1
atggcgttggttccggtgacggcggatccagcgagggggagctcgggaagcgtgttcctttaccctcaactcacatcaaccaactacactagttgggtgatacgggtgcaggcaatgatggaagatcaaggcatatgggaggtgatcgagccagcggccggagcggctgtcgacccgaggaaggacaagaaggcaaaatcccatcttctccagtcactgccggaagatctcttgatgcaggtggcaaagaagcggacggcgaaggaggtttgggactgtctcaagacgaggttcgtcagggcagacagggtgcgcgacgcgcgcctgcagactatgaaaggagaattcgctagcatggtgatggaggccggggagtcgctggaccagtacgccggccggatcaccacgatgggggtccggcactctgccctcggcgcgacgttgaacgacgccgccatggtgaagaagctgttcgacaccgtcccggagaagttcgaggcagtgggccgcctcaaggcgtacgacgagcgggtgcgcaagaagaaagcggcggctggcggagtgaccgccgacggccaggtgctccttactcaggccgagtgggaagtgcgcttcaagaaaggcgggggagaaacctcgtcgccacaaaagaacaagccctctagtgatggggcgaattgcggccaggccgggcgcggtcgtggtaggggtcgcggacacggcggaacgcagagcagcggtggcggctccggcggtggtggctgcgacaagagccacatcaaatgtttcaactgcgaagagttctgccactactcaacgcagtgcccatatccgaagaagaagaaagctgaagcccatcttgcgcagacggacgacaccggtccagctctgctccttgcggtgacggaggcggtgcagaacgcgccggggcagggcatggactgtgggcttgtcatgcacgaggagcgtgtatggcctcgcctgatgctggcagagaagagagcaactgctggtgatctgtggtacttggataatggtgctagcaaccatatgactggggatcgacggaagttctgggagctggacgagactgttacaggggtggtcagattcggcgacgcctcatcagtgcagattatggggaagggttcaatccttttcgcatgcaagaatggtgaccagtggctgcttgatgacgtctactacatccccagcctctgctggaacatggtgagcttagggcaactcactgaaactggccaccgagttgtgatggataatgatgaccttgaggtgttcgacaaaaatccctggcgtctggtgatgaaggtgaggagaacctcgaattgtttgtaccggattgagttgcaactagcgtcccggctagtcgatccatcaaaacactccggacagaccgcggtggcgagttcctgtccggcgagttcgcgcgggtgtgcgatgaggctggcatcgagcgacatctga

SEQ ID NO: 46103 - DNA, 3030 bp, Oryza sativa
  Clone ID: PAT_MRT4530_49001C.1
atggcgttggttccggtgacggcggatccagcgagggggagctcgggaagcgtgttcctttaccctcaactcacatcaaccaactacactagttgggtgatacgggtgcaggcaatgatggaagatcaaggcatatgggaggtgatcgagccagcggccggagcggctgtcgacccgaggaaggacaagaaggcaaaatcccatcttctccagtcactgccggaagatctcttgatgcaggtggcaaagaagcggacggcgaaggaggtttgggactgtctcaagacgaggttcgtcagggcagacagggtgcgcgacgcgcgcctgcagactatgaaaggagaattcgctagcatggtgatggaggccggggagtcgctggaccaggatcgagaattctacaacgtcgacgacatgccgttcgaggaggcagtgggccgcctcaaggcgtacgacgagcgggtgcgcaagaagaaagcggcggctggcggagtgaccgccgacggccaggtgctccttactcaggccgagtgggaagtgcgcttcaagaaaggcgggggagaaacctcgtcgccacaaaagaacaagccctctagtgatggggcgaattgcggccaggccgggcgcggtcgtggtaggggtcgcggacacggcggaacgcagagcagcggtggcggctccggcggtggtggctgcgacaagagccacatcaaatgtttcaactgcgaagagttctgccactactcaacgcagtgcccatatccgaagaagaagaaagctgaagcccatcttgcgcagacggacgacaccggtccagctctgctccttgcggtgacggaggcggtgcagaacgcgccggggcagggcatggactgtgggcttgtcatgcacgaggagcgtgtatggcctcgcctgatgctggcagagaagagagcaactgctggtgatctgtggtacttggataatggtgctagcaaccatatgactggggatcgacggaagttctgggagctggacgagactgttacaggggtggtcagattcggcgacgcctcatcagtgcagattatggggaagggttcaatccttttcgcatgcaagaatggtgaccagtggctgcttgatgacgtctactacatccccagcctctgctggaacatggtgagcttagggcaactcactgaaactggccaccgagttgtgatggataatgatgaccttgaggtgttcgacaaaaatccctggcgtctggtgatgaaggtgaggagaacctcgaattaccgcggtggcgagttcctgtccggcgagttcgcgcgggtgtgcgatgaggctggcatcgagcgacatctgacggcgccgtactcaccgcagcagaacggcgttgttgaatgccgcaacagatcgatgatggcgatggcgcgctccctcctgaagggaatgtctgttcccggcaggatgtggggggaggcggtgcggcacgccgtgttcctgctcaacctgctgccaaccaagtcgatgggtgaacgcactccgttcgaggcatggacggggaagaagccacacttaggacacttgcgagtgttcgggtgtactgcgcatgccaaggtgacaactccaaatctgaagaaattggatgatcggagtgagcagttcgtgtaccttggcatcgaggaagggagcaaggctcaccggctatttgatccacgacgccgccgaatccatgtaagtcgcgacgttgtatttgatgaaaacacaccttggcagtggagtgctgctgtaggagaggagaattccatcgagtttgtggtagaggaacctgttggcgagcagcagccggtgccggcagaacagtctgccacggtaccgttcacgcccacacccggcttgacatcaacacactctgccgaggtggaggcgtcaccgagcacggccggcagcgacgacgacccgctgcgggagccggcgtgggtcgacgcaatgcagaaggagctggaggccatcgagaagaactcaacgtggtcgctgtgcacattgccggcgggccacaaagcaatcggactcaagtgggtgttcaagttaaagaaaaacactgccggggaagtaatcaagcacaaggcatggctggtcgcaaagggctatgtgcagaggcacggtatagactttgaagaagtgttcgtgccggtggcgaggttggacacggtgcataccatacttgctatcgcagcggaccgaggttggcaggtgcatcaccttgatgtcaagtcagcttttctcaacggggagctagaagaagaggtgtatgttgcccaatcggaggggttcattaagaagggacaagagcaccttgtgctgaaattgagcaaggcactgtattggcttgaggcaggcgccacgggcctagaacatttgcttggacaagagtctgaaggaacttgggtttgggagaatcctaccagggtagaagcattcaagaagcaaatgatgggggagttcgagatgagtgatctagggcttttgagttattatctgggaattgaggttggacaaggtgtgaatggaatcacacttaaacaaactgcctatgcaaataaggttctgtcacagttcgggatgttggactgcaattcgacctcagttcctgttgatccaaagacacagcttcagaaggatgcagatggacaccctgttgaagcattcatggagcatcccaccatgatgcacttgaaggcagtgaagcaaattctcaggtatttgaaggggacaatcgactgtggccttgtgtataccgcaggaagtggtgagatcacaatcacggggtacactgacagcgatctagccggagatgttgatgatcgtcggagtacaggaggtatggcgttctatatcaacaacagtttggtggcatggagctcgcagaagcagaagacattagctctttcttcttgtgaagcaaaattcatggcagccactgcggctgcctgccatgcactttggctaagggcattgctgggagagctactcgagtcctga

SEQ ID NO: 46104 - DNA, 517 bp, Oryza sativa
  Clone ID: PAT_MRT4530_49002C.1
cgacccacgcgtacgaaaaaaaaaaaaaaaaagcataacgatgataccaaaaaaaagagaaatttaaataaaaaactgataaaaaaacaaaagagagggtaaaaataaaaagaaatgaactacttaaaaaatataacagggggggttgtttttaaagaataaaatttttctgccgtttctttaagacctaaaattttttattaggtgcgcctaaattaaattatcggggcgcagttttaaaacgtgccgtgtgagaaaacctttgttaaagcaaaattaaatgtgttgaaaaaatcccctttttgtaccttgggggtaataggagaaaagacaaccccgatggccttttcaaaaaattggacctcattgatggcaaatgggaacgccctttgtggacgcctataaaggagtggtggtggtgggtttacccgatggaatacaattactttgtgagggccctattccccattcttttgcgtttttaccctttctttacggccaaggtacccgggttttt

SEQ ID NO: 46105 - DNA, 220 bp, Oryza sativa
  Clone ID: PAT_MRT4530_49003C.1
agtctcacgcacaattagagaatgaatatagcatgaaaacattgtgggcaaaaacaaatgaccccattgtaacaggggcagttcgatgggagagcaaaggccattatagggctggcgggtatatgctccagaaccctagcttaaaaattgatagaggattctggtgaaaaaaatatttgctctggaaatatatgtcgctttggatgcaggcatagcttca

SEQ ID NO: 46106 - DNA, 1447 bp, Oryza sativa
  unsure (1)..(1447): unsure at all n locations
  Clone ID: PAT_MRT4530_49004C.1
gtgtgggctgtataataattaattacagtatgttcatgtaaatttgtttgtttgtttgtttatgttgttcgatatgtataattatgtacaataattaatcgtggagaggctcactaaactcataaaaaaaaaaaaaaaaaaaaaaaaaaaaaaaaaaaaaaaaaaaaaaaaaaaaaaaaaaaaaaaaaaaaaaaaaaaaaaaaaaaaaaaaaaaaaaaaaaaaaannaaaaaaaaaaaaaaaaaaaaaanaaaanaaaaaaaaaaaaaaaaaaggggatggtggccgagcaccccacgccaccacagccgcaccaaccaccgcccatggactccaccgccggctctggcattgccgccccggcggcggcggcggtgtgcgacctgaggatggagcccaagatcccggagccattcgtgtggccgaacggcgacgcgaggccggcgtcggcggcggagctggacatgcccgtggtcgacgtgggcgtgctccgcgacggcgacgccgaggggctgcgccgcgccgcggcgcaggtggccgccgcgtgcgccacgcacgggttcttccaggtgtccgagcacggcgtcgacgccgctctggcgcgcgccgcgctcgacggcgccagcgacttcttccgcctcccgctcgccgagaagcgccgcgcgcgccgcgtcccgggcaccgtgtccggctacaccagcgcccacgccgaccgcttcgcctccaagctcccatggaaggagaccctctccttcggcttccacgaccgcgccgccgcccccgtcgtcgccgactacttctccagcaccctcggccccgacttcgcgccaatggggagggtgtaccagaagtactgcgaggagatgaaggagctgtcgctgacgatcatggaactcctggagctgagcctgggcgtggagcgaggctactacagggagttcttcgcggacagcagctcaatcatgcggtgcaactactacccgccatgcccggagccggagcggacgctcggcacgggcccgcactgcgaccccaccgccctcaccatcctcctccaggacgacgtcggcggcctcgaggtcctcgtcgacggcgaatggcgccccgtcagccccgtccccggcgccatggtcatcaacatcggcgacaccttcatggcgctgtcgaacgggaggtataagagctgcctgcacagggcggtggtgaaccagcggcgggagcggcggtcgctggcgttcttcctgtgcccgcgggaggacagggtggtgcggccgccgccgagcgccgccacgccgcagcactacccggacttcacctgggccgacctcatgcgcttcacgcagcgccactaccgcgccgacacccgcacgctcgacgccttcacgcgctggctcgcgccgccggccgccgacgccgccgcgacggcgcaggtcgaggcggccagctga

SEQ ID NO: 46107 - DNA, 2234 bp, Oryza sativa
  Clone ID: PAT_MRT4530_49005C.1
ccgggccccgggcgcgcaccgacggcgagtagtaagtaaggctaagcgtcccgctccccccttctcgattgttctcgatctgcggcggcggcggcggcggcggcgatggccgacggcgggaagcccccgacgccggagaagaagtcgtgggccgacgtagaggaggaggaggaggccaaggcgaaggcggccgcggcggcggaggcggcctcctcgtcttcgtcgaacgagccggcggtggacgcgcaggcaaagcagattgaggcgctgtctctctccgtgccggaggagcatggcggcagcggcggcggcggggacgaccagggcccgcctctcctcgacgactcggatgagtcccaaatccaagccgtgacctcgggcggcacggtgtacgagtcggcggcggccttcgaggatctgaagctgacgccggagctgctcaaggggctccacgacgagatggggttcagccggccgagtaagatccaggcggtgaccctccccatgatcctcacgccgccatacaaggacctgatcgcgcaggcgcacaacggctccgggaagaccacctgcttcgtcctcggcatgctcagccgcgtcgaccctaaccggaaggtcacgcaggccatctgcatctgccccaccagggagcttgcccagcagaataaatcggtgcttatgagaatggggaagtttactggcattacctgtgcatgtgcgatcccaccggctcagaaagattatgtgccgatcgctaaaatgccaaagattactgaccaggtggtgatcggcacttctgggacacttatgaagtggattaatcataagaagatcttgacaaatgatatcaagatacttgtgtttgatgaggcagaccatatgcttgccgagaataatggtggcttcatgatgattgattttcttactcgaagtggcataccaaagattatctatggcctgtatacacaattagaagagattcattcatatggttatgttttacatttggatggcttcaggagtgattctgaaaggattatgagggatatacaaagaagcgctggtggctgtcaggtgcttctcttttctgcgacattcaatgagagagttaaagattttgttacaagggtcattaaggatgggaatcaaatatttgtgaagaaggaagagcttactttggaaaaagtcaagcaatataaagttcaagtccctgatgaaagggcaaaaatagcagtcataaaggacaagatttttgagtttggacaaaaagttggacaggttatcatttttgttagaacaaagcaaagtactaaggatgtccacaatgctttgacattagaggactatgtatgctcctcgattcaaggatcccttgaccaatcagagagggaaaagataatacaggaattcaaaaatgggtacaccaaggttcttatatcaactgatgttcttgctcgaggtttcgaccaagcacaggttaacctcgtcatcaattatgacatgccaatcaagtttggcacaagagatgaacctgattatgaagtgtacctgcacagaattggcagagctggtcgctttggccgaaaaggagctgttttcaacttgctatgcggcgaaacagataacactgtgatgagaaagattgagacctacttccagcacaatgttcctgaggttcgtaattggcaaagcgaggaagattttgaaagagctctgaaggatgccggcttggttgagtaacaccattggaaatatggcatcagatgcgctcttcacttgtgacgaacaggcgcgtgatatttaccagctgaaacagcttctaaagcaaagcaatcgagcttcttgagctcatccttggttattatgtcgagagctgtgaattctgttaaagggactcatccaaacaattttgatgctatgagcttatatgaagcaaaggtgttccttcgctatttcgtgggaacttgttgccaggactagatctacacttgcattatactctgttacttcgtgtacttaactgggaacctgttttggtttttatggctttgtcgtcgagatgcggtcaccggtgtacgttacgcccttgtgaaaaaactggaaacctctttctgggtcagtgtacttgtacacttgcgccattgtttagttgcatgtacgatgtttctttctgcgtcagctgtaagtgtacacttgatttattgtttagttccatgaaaaatgttctttttccc

SEQ ID NO: 46108 - DNA, 465 bp, Oryza sativa
  Clone ID: PAT_MRT4530_49006C.1
aagctgcacggctgcatgcaccgccccggaatccccggggacgccccacgcgtttttcatacacctggccgacataaaccccaagggaggattacaaaaaaggatggggataccaaccgctgcctctgcctcatcctgacaggttacacactcctcatgaacctccaccatctgctcccgcgatgccgcatcatactaccagtggcccgccgcgctcaactccatcgtccgccacgagaggctacatcaggccgtggcgcatgctgccgtggctgtgggagttgtacgacgcaggccatggaccagcaccaagctctgcttccagagccgctagctctcactcctattgaaaaactacaccagagcatattgagaaaacgctaggcaaacatatcagcaacacgagccaatataatgtctcatatacagcataatttggagtacttgagtaaccatccacacttt

SEQ ID NO: 46109 - DNA, 284 bp, Oryza sativa
  Clone ID: PAT_MRT4530_49007C.1
catgggatgcctagcgcgcaagccgtattgcactgccttccgccgctaatacggccgccttgtgctaccgctaaccccactgcactgcgctgcctcctgccactaatcgcaccgccgaggccaccacagttatgtgcgaaagtatatgtggagggggctgagcacaaaagtgttgtctacgtggcacgtcacgttggcagtcaaacatggtcaaaggacgattggaccaggggtgtagcaggtaggggatgtgttcttgttttgtgtttgaaaagttttgcttc

SEQ ID NO: 46110 - DNA, 297 bp, Oryza sativa
  unsure (1)..(297): unsure at all n locations
  Clone ID: PAT_MRT4530_49008C.1
aaaaaataaacaaaaaacatcccgggtcggggcccaagaacagaacaggggggggggaaaaangaaaggcattcactcccacccacacaaagacccctctccaggggggggactcgcattagtcccacttacatgaaacaacaacccccccaagcggttggacggaaaccgagcaaaaagaattagctgacagttgcggcagcatgcagggtagggccctccaaaagttgccactgcccaaattaccctaactggggaccaaaaggcccccaagggaggccaggcctcctattcctc

SEQ ID NO: 46111 - DNA, 997 bp, Oryza sativa
  Clone ID: PAT_MRT4530_49009C.1
acctctacaaacgaaaacacacaaaactcattgtgtagcaacgtttgttcaaatatataacaaaatgcttagtaaaccggttaagaccgctgttatcggaggtaatatcccctatgcaaagtgcctttatccctggtagaatgattactgataatgctttgattgccttcaagtgcatacatgccatccaaaagggtccggtcagaaattctcccttttgtgcgtataagttggatctagctaaggcctacgatcgtgtggactgggatttcttggaaagtgccttaatcaagcttggcttttgcagtcgctgggtgaagtggattatgacttgtgtgacttcggtaaggtattctatctcttttaacggcaatcagctggaacctttctctccctcccatgggctgaggcagggggatcccttatcccccaaccgtttcttgtttgttgcggaggaactgtcatgtactctcaacaatgaagtggaatcagggaacttacgtgagttgaaggtatgtcgaagagcgccagggatatcgcatttgcttttcgctgacgacagcctgttattttttgaagcgagtgcccagcaagcttcggtggtgcagcatgccctccgtctgtaccgagattgcacaggtcagctcctcagccaagctaaatgctctctattggttaatgaaaattgtccagatgaggtatttacagatcttaaggagatgttaaatattcaaacccatggttttgagagctagtatctgggactacccactttagagggtagaatgaaagctgaacggtttaagttgagtaaagaacggttagcaaaaagaatgaatagctggtctgagaagtttatgtctgggggagctaatgatgtgcttatcaaatctttggcataggcaattcctatacatgaaatacaagccgatatgctatcctatttcagcatcgactcgagaacaactaaatcctagccattcttctaccaaagccc

SEQ ID NO: 46112 - DNA, 2527 bp, Oryza sativa
  Clone ID: PAT_MRT4530_4900C.1
aaaagaaaatcctaaaagaagttctttttccccccccccttccctcttgggccggctcggcccacttctccctccctctctctctctcctcccccgcggcccatcggcctccccgcgcgcgcgcgccgctgacaggcgggcccgcccgccgctctcgctgacgggtggggcccacctgtcatcgccttcctcccgccgcgcccgccgccgcgcccgtgccctagcgccgccgccgccgcggattgcgccgcatcccgccgtccccgcgcgcattaaagagaggggaatcactccccgtgattccctctcccgtttcccccgatttcccctctctctctccctcggatccgtccggattcatcccgtaatcctcgccggcgacatctatggagcccgagatccccgcgcccgtttccttcctctccggccgcgttctccccctctcggtgctatataattgctccccgagctccgctcttccgtttccgccgctcgccgctcgctctcgccgtcggatccgtgctcgcgccgtgctcctctctctccgccgtcgccgccgaccttcggctcgccgccgacgtcgctccggtcctcctcccggctcggcgccacctccctcggcatcgccgcatcgccgtcgacctcgtccgcgcctccgtttcgctcgccgaccgtcggagcgccgccgtcatcgtcatcccgagccgcgccgccgtctccctccgctccgtccgccgttctcgtcgtcgtcgttgtcccggggtgagccgtggaccgtccccttcgtttcccccttccctcctctctctcgggtgccgctccgccgcgccgttggtcgccggcggcgaccatcggggcgcgggtgcgccgctcccgtcggccgtgccggcgaggccgccttcgggcgcgccctcgcggctgccaagtgggcccggccgtcagccgcccgcgcccgcgggtgcggctgacgcgtgggacccacggcgccgaccgccgccagccgcgtgctcccggtccaccgtggaccgagaggctgacgcgtgggccccactcccgtggacccgggcaaatgaaggctacacgagctgcggcccgatggctgacaatgagaaaggcaataaggtcagaagtcaggacattggtacctcaagctcccgagtgaatgaagcaccagacaccagttgtgtggcagtggtccaacacctgattaaccagaaccaattgcttatagagatactacagcagcatcggatgccaattttgaacccgagtcagatgcaacctcaagtgcagttggaggcagtccaagcactcacaccacaagtcagcgcaccgccaacatcccagaaggcccctcatgccatgccacatgttgacccaaaagaagcaagtatcatctgttttatgtgtgatgagcaagggcactacgcaaggaactgtcctcagcagaaaagaaaagcaccaatgcgaaccgaagatgaagtccgtaagatgatcattaccagcacagaatggcctccaccaggaatgacagaacatcagagaagaaattccttccgaggtgcacaacagttgacagagcatcttttagctaatggaggtagagtgtctgatagtgaagattcagatcaagtctcctcagatgatgaagataaaatagaacttaaggcatgctctcgttgtggagaaatcggtcatgttgccagctcgtgtgcctctacatgcgttcattgtgaggaagaccatccacccgacaggtgtccaacgagcaggatcacttgtttcttttgtgaaggaactgatcatgtaccaaaagattgtcaattcagttttctgctgacgaagaagatggccaaccaacccgccagttccaacggagagaagcatcaaggcaacacaaatcctcgccaagattccagcttcagcctaactccagtgccaggatagaggaaacaaaatgagaaaagaaaatgccgagtccgggaagatatctgttgcttcaattgtcaaggaatgggtcatttcgccgacaagtgcccaaaaccgagaaacgtagctgccagcacgtcagtccacgcaaacccccgcaatcagaagcttgctcctcaacgaattgtcatccatgcatcccgaagcagtcctataacccgcgttgcaacagctccaattccaatgagtgcactaccacaaggtgtcaatgctcaatttcagccccagcaaagaattgtcgtagatggaagaagttgtgtctctccccgacctactccaggccgagccaagggcaatcaacctccggagggcgataccaagcagaagaccgtcatccgcttcaaccagcaatcagaaggaagcttctcctgtgaatgatagcattatgcagtcctatcacatcatcacagaaccaatcaaggatgcagtcactagaacaatgccagctatatctctccagaatcaaaatgagcagccatgtttgtggttttcagtccgctacttatcatggggtaatcgaaagtttgcagcaataatg

SEQ ID NO: 46113 - DNA, 189 bp, Oryza sativa
  Clone ID: PAT_MRT4530_49010C.1
atgaccatcggcacgaagaacatggccactgcaaccttcctcatcgttggcatggcgattatgtatactgtaactcctggatctagcactgtctctgattccgtcgggcgcgagctcgaggaggaaggctaccctgttgtcgactacgagtcagaccttcagaccgccatgtcgacagcagttagatag

SEQ ID NO: 46114 - DNA, 953 bp, Oryza sativa
  Clone ID: PAT_MRT4530_49011C.1
ctgcaggaattcggcacgaggtgcattgctcctggtgcatgtatgcttcctctgcctcctctcctctcctctcctctcctccccatttctcatcttctctctctttctctcttactccaatctgatctccattgctcaccttcctagtagcttagctgatctcaatggcgacaatggcgagctcaggagcagcagcagcagccatggccgtgttcttggcaatggcgctggtgttgagtggcactgaggccaggttcctgtccaacaacatcactgtggttggctctgtctactgtgatgcctgctccaacaacactttctccaagcacagcttcttcttgaagggggccagggtgctgatccagtgcagcttcaaggtgaactccaccatggccgaggagctgtccctggaggcggagcgcaccacggaccagaacggcgtgtacaagctcgacgtgccggccgccggcggcttcgactgccgggagggccacgacctccggtcggcgtgccgcgccacgctcgtccggagctcctccgccgcctgcaacgtcccgggcctccggggatccacgcagcacatcgccctccgctcccgcgccaccaacgcctgcttcctcaacctcaacgcgctcaacttccgccccgccaagcgcgacgccgcgctctgccacggcggcgatggcgccggcgccggcggcggcgctgcgttcggctcgtcgctcttcttctggccgttcttgccgctcttctggccgccgtaccggctcccgggcggcggcggcgggacggtgtcgttcccgtggccgttccccgtgccggactggctggtgccattcctgcggccgccgttcttgccattcacgctgtaccagccggcgccggcgggctccgcgccgccgccgttctaccgcttcccgccttcccaagaagcatcaccatctcagccttag

SEQ ID NO: 46115 - DNA, 504 bp, Oryza sativa
  Clone ID: PAT_MRT4530_49012C.1
atgacgatgcaacaaaggagctggcttgagcccaaggtcaacgatcacgacaaggaaaaggagctgaataagggcgacaaggcacaggcacttgctatcaaaggcgagctaggttggggtcttgctgtcaagccttttgcccgagaggttgagatactgaagatggccaagccggccgagggattcaaagttatggtcgaaagagttgccagagagcttgagcgagttgagaaactggcggcgggggcggcggtcaacggcaagacggtggcttgggcggaagggaagaagaagaaggtgatggtgaaggcgagccaatcctacatcgactacgtgctctcacttccaccgtcgaaggtgcccttcccctcgctcctagacgacttcccctccggccttcgtgggaagcagatccccacacggttgctggcgatgaagccacagctgaaaggacgccatgctgacatttcgttagctgccaagtttcaaacaaacaggagatga

SEQ ID NO: 46116 - DNA, 434 bp, Oryza sativa
  Clone ID: PAT_MRT4530_49013C.1
tttttttttttttttttttttttttttttttttttttttttttttttttttttttttttttttttaaaaacaagggggccaaacatcatttccaaaaaggcacaaaaaataagcccgacaaataaaaaaccaagggggggaaacaaaggccccactaatttctaaccccatttttttttagggggcacatcaccaaacattcaaggccactgacacacaaaaagaaagctaggcggcgccgggcccgtaaaaaaaaaaaaaaaagcaagccggggagctttaaattttggcgtccccggacccgggaaggttgttgccggaaaccttaaaaaaaaaacgggaggggacattgtttttttccaaccgctccatcgccggggggaccaaacccattttgaggacctcccccccgggaaggaagccgggccccccgg

SEQ ID NO: 46117 - DNA, 333 bp, Oryza sativa
  Clone ID: PAT_MRT4530_49014C.1
ggtaaccatcagaatcaattgacaccattggtaggtgaaaaggacgacggcaccgctgctcgcgggaaggagatcggcacgggcggcagcgggcgtcggcgagctcgcaaggagacctccgggagtcgaggccgaggggacggagagattgacttccgcaaggagtatgcggcggaagcagcctgcaccgccgctcgcgtcgcggtgattggccccaagccccaggcggcgccgcggcgggcgaaggagacgggacgggtgtcgaggcagccaggcaggccagggacggcagcaagatcgataaagaaggccacaatcgcaaggagtcgatag

SEQ ID NO: 46118 - DNA, 645 bp, Oryza sativa
  Clone ID: PAT_MRT4530_49015C.1
aacacaagaacagatttcatcagcactcatcaacacaagaacagattccatcaacacaagaacacaagaaaatgccgacacaggaagggcagggtgccgccgtcgctgccaccgtcgcagggccaccaggtcgccaccgcctcccctcccatcccctcccctcacgctggatccgggacgcccgaccgccgccgcctcccctcccgctggatccagcagaggggagggcaccgcccctgcccaccgattccccacccgccgggagggagggcgccgccgcccactaccgtcgagccctcccgcggcctcatggcgagggagacgagacgaggggcggagaggcgccgccgcctgttgccgctcgcggaaggagagagccgccgacgccgaggagtagatcgctggccgccgctccccggcccgtcgcgcaccgctgctcaccgggtgaaagacgccgccggccaggtggagggagccgaggcggaggcactggccgccaagggtagggcgctgccggctggggggagggcgccgtggcgagcgacgccaccatgggttgggggagggtgggagggacgagatggagggcgtcgtcggctgaggagagaagaagaaaaagaaggaaagggaagatgcgcaatggag

SEQ ID NO: 46119 - DNA, 472 bp, Oryza sativa
  unsure (1)..(472): unsure at all n locations
  Clone ID: PAT_MRT4530_49016C.1
ccaagntataagttctgtgttttgggtaatnactaaagttgccccgcgtatgcactgtgtggctttttctgcctttatatggatgactcatggattgttatgaacgacggcgtagccttgtatgagttggtccctcgagggaaggtaantaagggattttttcgtttgatcccccccattgagtgccagaagtgcccacaaaggggtggccgttggtaaaaggtggtagtggtcgtgtccccgtcgcccccgtgagtgtgtgtgaccacagtgtcgtgagtcgacgtcaaacaagtgtgtagccactggtgtgtagcgcgaaagcgtatcccaggtaatgtcgtgtgaaaaagtgccaccgggtgcccctgtnacatgaaagaatttgagncaaactttttcaatgtttgctcattatcgtaccaaggatgaagaaaagacgaaaattgtacatcnaagtagnanaaaaaaa

SEQ ID NO: 46120 - DNA, 501 bp, Oryza sativa
  Clone ID: PAT_MRT4530_49017C.1
atgcaaggcagcgtgcgtccctctcgccgacagaggagcttggcgtctctctccagtgctgctcgtcgctccgtccacgtccacctcctttctgacgtgaagaggacgtcaaggcacatgggcgacgagctcaacagtggggaggcagggctgcgggctcgaacctcaaagatggggagatacgggggcggcgagcgtccctccctccgacactgctcatcgctctgcccacatctgcctccctttctccggcgcgaagaggacaacgaggcctatggcggtgtggaggcacaagggtggcggggagacggtgagaggggtgggcgacggggacatgctggggccgtgtgctcggcgacagggagatgctggggtggcatgctcctcctcctccacttgtctatagtggccacaatgatgaggactgatgttctccttgaaccaaatctagcaagttgggaacgacagttgtgcgctcaagttactgcgccgctgatgtga

SEQ ID NO: 46121 - DNA, 4425 bp, Oryza sativa
  Clone ID: PAT_MRT4530_49018C.1
atggctgaccccttcgtcgccgacgaccagaccgacgccgacttcttcgacaagctcgtcgacgacgacgacgacctctcccccgcccctgcccctgcccctgttcccgcccaacagtcggcggaggcggccttgcttccagctctttccgacctcagcctcgccgacgatgacacagacccttccccggctcctcctcccgtcgaggccccgccggagggtgcctcaccggagtcggggaagggcgccgtccacacaacggtcaagcaggtccagtgggcctcatttggaggcgccgccgacgatggggctgatccgttcagtgatctgtctggaggcgccgctgatgacggatttctcgggaccatggccgggaaccagagcttccagacctccgtcattgggagcgtgggggcatcagctcacgggatctttggcgggagccagagcttgactgccgaggtgacagatcaggattttttcggtggtacctccgatcagaacaccgatacccagcagcagcagctggagcagagcggaagcagtgctttcgactccacagatcccaagtatttggagagcatttatcctgggtggaaatacgacgaggcgacacagcagtggtaccaagttgacaattctgatacgcacggtaacgccacccaggtggacaccagcactgagaatatccagcagcagcagcttgccgcttcttacatgcataatccgacacagtcatcgctagagacaattgcggaggagggtacgacgacagggagtgtatcgacatggggacagggtggcacctcggagtacccaccaaacatggtattttacgccgagtacccaggctggtactttgataccaacacacagcagtggcaatcgcttgagtcgtaccagcaggcagtgacagctagtgctgttcaggatggagcaaacaatggtgtcgttgcctcttctgctgagacaaattatagcgtcaaacaaaccgaagatcttcctgcccacaatcaggtggcccaacataactctttctctaataactatagttatcagagccagtggcagacaaattcatttagtaactctatgcaacctgaaagtgcaacagctagtctgccagatagtttccagagccttggtcagcatgctatttctgaatctttcaattcctctacaaatagtcaagttagttttaacaccgctgaaaccgctacaagccattatggcaacgtgaacttagattcgtcaagtactcagggtggctacaccgcaagtggtggtcaacaaactggttacaagggcttcgaacctttcacaggtcatcaggctggttacaaggggtttgaaccttctacaggccaccagacaagtcataagttatttgatccatcagcaggtaaccaaaacagttacaagccatttgaaccttccactggtcaccaccagcacaaggggtttgagccttccacaaatcaccagggtgattacaaggcatttgagccatccacacataaccagggtggttacaagggattcagtccttccacagttcagcagcctggttacaagggatttgaagcttctacaggccttcaaactaatttcaagggatttgaaccttactcaggtcaacaggctggttacacgggatccctaccttctacaggccaccagtctagttacatggggtttgagacttcttcaaaccagggttatggtgatgccaacaatgttgcaaatagtcaaggctttgttccgatggagagcatgtacggaagccataatcaagctcatacaaacccccaagtgcctttgtcaaacagttatctcagtgttgataactccaagaatttctctcagcaacaatttcttggtccaaatgcttcacacttgcaatttgggcagtccccacatgaagagaggtcatcagctggacgtccaccacatgctttggttgcttttgggtttggaggcaagcttatacttatgaaagaaaccaactcaatggccacaaactatgactctgggaatcaggggaattctagtggcacagtatcagttcttaatttatcagaggtggtcacggacaaagctgatgctttaagcgccagtaacggtagcgcacttagttatttccatgctttatgtcgtcaacctgttcccggccctcttgttgggggaagcgctgcatcaaaggatgtgaacaaatggcttgatgacatgattgcactgtatgaatcatcgactagtgaattccagaggggtgatcctcgcaagttgcttatttctttgctgaagatactatgccaccactatgggaaactgcgttcaccttttgcttctgacccatcacatgaggacacagacggtccagaaatggcagtaactaagctcttttcatcttgtaagagaagtagctttcaaatgggcgatttcggatcccatgtccgttgcatgaagaatattccctctgaaaatcagatgcaggctgttgcacaagaggtccaaaatcttctagtttctgggagaagaaaagaggcccttcagtgtgcccaagaaggtcaactgtgggggcctgcaattatacttgctttgcaacttggtgataagttttacgtcgatactgtgaagaaaatggcccactgccattttctatctgggtcacctttgcgaacattgtgccttctcattgctggacaacctgcagatgtttttaatgcagacaacaacatcagtagcaattatggttctcaacagcctatggagcctagtcctaatggcatgttggatgactgggaggagaatttggctatcataactgcaaataggacaaaaggtgacgacctagttattacccatcttggagattgcctttggaaagagaaaaatgaggttgcagctgctcattcgtgctatttagttgctgagttaaatattgacccttactctgaaagtgcaaggttatgtctccttggtgcagaccaccttaagtgccctcgaacttttgccagccctgaagccattcagaggacagagatttatgaatatgcgaaggtgcttggtaattctcaatatatcctgctaccctttcagccatataagctgatatatgcatacatgcttgcggaagtgggaagggttgctgattctttgaggtactgtcaagcatctatgaaggtgctgaaagcctctggccgtgccccagaattggaagcatggaagcaattattttccaccctggaggacaggatacgcactcaccagcagggtgctgttagtgatagggagagttacactgcacctggggctacaaagtttgcaaatagccaatcagtaatgaccatgtcatcgttaatgccatctgcatcagtgcagtctatgagtgagatgtcagatagtggcaggaagattgcacacaacagaagtgtttctgaaccggacttcggcagaaccccgaaacagggtgctggatcggacagcacacagagtactgctccaggatctggtagttcacgctttggttggttaggctccacactacagaagacaatgggatttgtttcaaaatcccaccggcaggctaaattagggcaacaaaacaagttttactatgacgaaaagctaaagcgatgggtggaggaaggtgctgagattcctgccgaggagcctcctctccctccacctccatcaaaaccctcattccagaatggtgtggtagactataaattaaatggccccatgagtgcaagtcatactcccaatggattcatggaagggaaatcttcaacttcttcagagcatggttcgggaatgccaccaattccgccaagccagaaccagttttctgcccgtggacggatgggtgtccggtccagatatgtggacacattcaacaagggtggaggaggaggagcagtcccatcctataacaagccagctgttgcatctgtgacaccacccagtggtgccaaattctttgtgcccactgcggctgttgttgctgcagagcagatgcctaaccaaacagcggaaacacatggtgaaaccttccgtccagatgagcgttcatccccagctgaaacgtcattttcttcacccccaccagcaacacaattttcagcaccactgatggtgcctaccattcagcggtatccgagcatggataacatcactaccccgaacaatggatccggattatcatcgggaagtaacagcagctcattctcaagatcacgagcagcatcgtggagtggaacttactctgaacaaattaatgctgtggcaggtgctagatctcctgaccagcagaccatgccatcgcccctcatgcctgggaagcagtcacatagtcgttccaacagcaactcatctgttcagttcaacagtttgacagaggatcttcatgaggttgagctctga

SEQ ID NO: 46122 - DNA, 273 bp, Oryza sativa
  Clone ID: PAT_MRT4530_49019C.1
atgaagttaagcatgaaacggtccccgtacaaccatacttgtcgtgtgggtatagacctagcggagtaaatagctgagcggaggcggtacccaagccgtagtggttttcttgatgtgtgtgaggcaggccctacggtggggcagccattggtaggaccgcgaggggcgggtgcctacagttgtgtcgccatcggtaggactgccatgtgtaaacctaaacttaactataacttaatgcatgttataaccgactagcttctctatgataactga

SEQ ID NO: 46123 - DNA, 1079 bp, Oryza sativa
  Clone ID: PAT_MRT4530_4901C.1
gggagtgggcgtcgcgcggccggccgggacgagcccacgagccagaaaaaaaaggaaaaaaagagagtcgtagttcgcctcttcttcctcctctcgttctcgcggcggcggcggagatggcgtcgttctcggaggctcccccgggcaaccccaaggccggcgagaagatcttcaagaccaagtgcgcccagtgccacaccgtcgacaagggcgccggccacaagcaaggtccaaacttgaatggtctgtttggaaggcagtcaggtaccacccctggttattcctactctacggccaacaagaacatggctgtgatctgggaggagaacacactttatgactacctgcttaatcctaagaagtacatccctggaaccaagatggtcttccctgggttgaagaagccacaggagcgtgctgatcttatttcctacctgaaggaagcaacctcttaaaaggagtggagctgtcgtaacatgagacaatcggacaattcattctacagttaaataaaaatatttagacatctgggtcgctctggttttacagggtgcaatccacgagacaattatcttgttatattttgttcttatggtttatgggttccatatcttaggtttagcaggaaaagtctttcacagcttttgctttaactgctggaaaacaccagtattttgatcaccagtcggtgagactggattgcatcccttttggaaaaatactgagatccttaaatttgtgatattttgatccattgcatttgctaaaaaaaaaaaaaaaaaaaaaaaaaaaaaaaaacaatgagggggccccggaccaattcgcttatgggattttatacccccctattgccggtttaaagtgggatgggaaaccgggttcccaattattcttgagcaatcctttccagtggttatacaaaagccgcccatcctttcaacttgtcacctatggaatggacccccttccgcataaccgggggtggggttcccagtaccgtttttctgccttgcctcttttttttctttttacacttcgtttccaaatatagggtcttggtctttgttctccccctaaag

SEQ ID NO: 46124 - DNA, 4545 bp, Oryza sativa
  Clone ID: PAT_MRT4530_49020C.1
atggctgaccccttcgtcgccgacgaccagaccgacgccgacttcttcgacaagctcgtcgacgacgacgacgacctctcccccgcccctgcccctgcccctgttcccgcccaacagtcggcggaggcggccttgcttccagctctttccgacctcagcctcgccgacgatgacacagacccttccccggctcctcctcccgtcgaggccccgccggagggtgcctcaccggagtcggggaagggcgccgtccacacaacggtcaagcaggtccagtgggcctcatttggaggcgccgccgacgatggggctgatccgttcagtgatctgtctggaggcgccgctgatgacggatttctcgggaccatggccgggaaccagagcttccagacctccgtcattgggagcgtgggggcatcagctcacgggatctttggcgggagccagagcttgactgccgaggtgacagatcaggattttttcggtggtacctccgatcagaacaccgatacccagcagcagcagctggagcagagcggaagcagtgctttcgactccacagatcccaagtatttggagagcatttatcctgggtggaaatacgacgaggcgacacagcagtggtaccaagttgacaattctgatacgcacggtaacgccacccaggtggacaccagcactgagaatatccagcagcagcagcttgccgcttcttacatgcataatccgacacagtcatcgctagagacaattgcggaggagggtacgacgacagggagtgtatcgacatggggacagggtggcacctcggagtacccaccaaacatggtattttacgccgagtacccaggctggtactttgataccaacacacagcagtggcaatcgcttgagtcgtaccagcaggcagtgacagctagtgctgttcaggatggagcaaacaatggtgtcgttgcctcttctgctgagacaaattatagcgtcaaacaaaccgaagatcttcctgcccacaatcaggtggcccaacataactctttctctaataactatagttatcagagccagtggcagacaaattcatttagtaactctatgcaacctgaaagtgcaacagctagtctgccagatagtttccagagccttggtcagcatgctatttctgaatctttcaattcctctacaaatagtcaagttagttttaacaccgctgaaaccgctacaagccattatggcaacgtgaacttagattcgtcaagtactcagggtggctacaccgcaagtggtggtcaacaaactggttacaagggcttcgaacctttcacaggtcatcaggctggttacaaggggtttgaaccttctacaggccaccagacaagtcataagttatttgatccatcagcaggtaaccaaaacagttacaagccatttgaaccttccactggtcaccaccagcacaaggggtttgagccttccacaaatcaccagggtgattacaaggcatttgagccatccacacataaccagggtggttacaagggattcagtccttccacagttcagcagcctggttacaagggatttgaagcttctacaggccttcaaactaatttcaagggatttgaaccttactcaggtcaacaggctggttacacgggatccctaccttctacaggccaccagtctagttacatggggtttgagacttcttcaaaccagggttatggtgatgccaacaatgttgcaaatagtcaaggctttgttccgatggagagcatgtacggaagccataatcaagctcatacaaacccccaagtgcctttgtcaaacagttatctcagtgttgataactccaagaatttctctcagcaacaatttcttggtccaaatgcttcacacttgcaatttgggcagtccccacatgaagagaggtcatcagctggacgtccaccacatgctttggttgcttttgggtttggaggcaagcttatacttatgaaagaaaccaactcaatggccacaaactatgactctgggaatcaggggaattctagtggcacagtatcagttcttaatttatcagaggtggtcacggacaaagctgatgctttaagcgccagtaacggtagcgcacttagttatttccatgctttatgtcgtcaacctgttcccggccctcttgttgggggaagcgctgcatcaaaggatgtgaacaaatggcttgatgacatgattgcactgtatgaatcatcgactagtgaattccagaggggtgatcctcgcaagttgcttatttctttgctgaagatactatgccaccactatgggaaactgcgttcaccttttgcttctgacccatcacatgaggacacagacggtccagaaatggcagtaactaagctcttttcatcttgtaagagaagtagctttcaaatgggcgatttcggatcccatgtccgttgcatgaagaatattccctctgaaaatcagatgcaggctgttgcacaagaggtccaaaatcttctagtttctgggagaagaaaagaggcccttcagtgtgcccaagaaggtcaactgtgggggcctgcaattatacttgctttgcaacttggtgataagttttacgtcgatactgtgaagaaaatggcccactgccattttctatctgggtcacctttgcgaacattgtgccttctcattgctggacaacctgcagatgtttttaatgcagacaacaacatcagtagcaattatggttctcaacagcctatggagcctagtcctaatggcatgttggatgactgggaggagaatttggctatcataactgcaaataggacaaaaggtgacgacctagttattacccatcttggagattgcctttggaaagagaaaaatgaggttgcagctgctcattcgtgctatttagttgctgagttaaatattgacccttactctgaaagtgcaaggttatgtctccttggtgcagaccaccttaagtgccctcgaacttttgccagccctgaagccattcagaggacagagatttatgaatatgcgaaggtgcttggtaattctcaatatatcctgctaccctttcagccatataagctgatatatgcatacatgcttgcggaagtgggaagggttgctgattctttgaggtactgtcaagcatctatgaaggtgctgaaagcctctggccgtgccccagaattggaagcatggaagcaattattttccaccctggaggacaggatacgcactcaccagcagggtggatatggcacaaaccttgcccctgcaaaattagttggaaagattttcacctcactcgataaatctatatcgcgcatgatgggtacaccttctgctccacttccgccattgccacagggtgctgttagtgatagggagagttacactgcacctggggctacaaagtttgcaaatagccaatcagtaatgaccatgtcatcgttaatgccatctgcatcagtgcagtctatgagtgagatgtcagatagtggcaggaagattgcacacaacagaagtgtttctgaaccggacttcggcagaaccccgaaacagggtgctggatcggacagcacacagagtactgctccaggatctggtagttcacgctttggttggttaggctccacactacagaagacaatgggatttgtttcaaaatcccaccggcaggctaaattagggcaacaaaacaagttttactatgacgaaaagctaaagcgatgggtggaggaaggtgctgagattcctgccgaggagcctcctctccctccacctccatcaaaaccctcattccagaatggtgtggtagactataaattaaatggccccatgagtgcaagtcatactcccaatggattcatggaagggaaatcttcaacttcttcagagcatggttcgggaatgccaccaattccgccaagccagaaccagttttctgcccgtggacggatgggtgtccggtccagatatgtggacacattcaacaagggtggaggaggaggagcagtcccatcctataacaagccagctgttgcatctgtgacaccacccagtggtgccaaattctttgtgcccactgcggctgttgttgctgcagagcagatgcctaaccaaacagcggaaacacatggtgaaaccttccgtccagatgagcgttcatccccagctgaaacgtcattttcttcacccccaccagcaacacaattttcagcaccactgatggtgcctaccattcagcggtatccgagcatggataacatcactaccccgaacaatggatccggattatcatcgggaagtaacagcagctcattctcaagatcacgagcagcatcgtggagtggaacttactctgaacaaattaatgctgtggcaggtgctagatctcctgaccagcagaccatgccatcgcccctcatgcctgggaagcagtcacatagtcgttccaacagcaactcatctgttcagttcaacagtttgacagaggatcttcatgaggttgagctctga

SEQ ID NO: 46125 - DNA, 455 bp, Oryza sativa
  Clone ID: PAT_MRT4530_49021C.1
ctctccgccactcagcaaatcggaggggactcgactgctgtattctctctcttcagccatcggaaaaatatttttcccaacaatagtctatactaggaattttgaaatattggaagctataaggtatttatatgtggctgtgaaaaatgatttttctctaaatatattacaaagttatataaaccttccaaacgaattgaatttttttccaacaatttttttacagcataaatatttttcctacaattgttttatacaacttctgaaaattaaaagataaatcacattttcattggttctcttatagtaacttttagctacacaggggcatatattggtttttgtggacaatatgatggtcaactgacattgaccaccagaatggcaaaagaggatggggcactaatggagtagtggtaaaagagagaaatgcaaaattttgatggcggagagaa

SEQ ID NO: 46126 - DNA, 1002 bp, Oryza sativa
  Clone ID: PAT_MRT4530_49022C.1
atggaggcaggccacaagccatctgatgcattggatcgccggcttgctccgctgctgctgctgggagtgggacacgccgccgccgccgacgatggcgacggcatgtccgtgtatagcctgccacggggtgagatgctgcatcttccgtgccttcacccggggagcgcgttcgtcagagaccaccgaatctgggccacgccgcagggctggctgctcatggcgcgccgcggctctccggagaccttcctgtgggaccctttcaccggcaccaggatcggcctgtcgcccgaccacgacggcaccgtcctcgccgtagaccactggcggcgccggtgcctcctgtcgcgccgccgccccacggaccccggctgcgtcgtgctcgtcgtcgacctagaagacacggtgctctggcattgccgtccggcgcccgccggccgtggcaacggcaccgacgaaccaccaccaccaccaccagaagaagaagacgaccagcaatgggcgaggcacgagtacctccagcccggcacgcctcaccacgagcaccgcgacgacgtcctccgcgcgatagggcggctcacggcggtagacggcagcaagctcctcgtggacctcgtcgatcaccgcctcgccgtgctcgagctgtcgtcgcaggagcccgtggtcaccgtggtcgccgcggagggcgtctcggtggcgtgcacgtccaactccactaaccttgtggaatcggacggggagctgtactgcgtttggtttagatacccgatccgatgcctccggatcgttgcgcgcgtcagcgtctataagcttgattacatggcggcgaagggatcagcgacatggatgaaggtgaagtcgctcggtggacgaaggtcgtttttcatcggtcaagatagaattggagcgtcgttcgatgcggaggaagctggcctaaaaccgaattgcatctattattactggttgctgaacaacagagctgctttttctgtatacaagaattaa

SEQ ID NO: 46127 - DNA, 495 bp, Oryza sativa
  Clone ID: PAT_MRT4530_49023C.1
aataaaaaggctatgtatatcttatctagcaaaacgaaggacaaaaaaacaaaggcccaaaaaatcaaaaaagaaaaacacacaaacccaaacacgacagacaaaaaccgaaggagaggagaggaaagaaaacagtaaaagcacgcaaacacaaacacaaaaaggcggagcaaaacgcaaagacacttcaccaacaaccaccctgagcggcacataatgcacaacaagaccgtcggaaaaaaagaggaacgcctcctccgacaaaacgaaaatgctgcagcccgccacaccaacaaaaacctggggacagacaaaaccaaccagacgggagagaacgaccccctcaaaaaaagcaacagcacaaaccacaagcggggagccagagcccggaacagggccaaccgtccccgggggagggggcacaacacccgggcccgtaccaaaaaacaccacaatcgtgcaggggaaaacaaacaccacttccaagcccagcaa

SEQ ID NO: 46128 - DNA, 380 bp, Oryza sativa
  Clone ID: PAT_MRT4530_49024C.1
cccacgcgtccgcccacgcgttcgtccacgcgtccgaaaaaaaataaaaaactccaaactaaatatacctgggtgcaaactgaaatgctacaaaaaccggcaatgcggcgccctttatagaggatccactcttacccccgcctacttgccaggttatcaatcttctatgatgtatcctaattccattccatgccttctgttttaaatactggaacagaaaaaacccaggatcatcaaacttatatagcacaatcacattccctttttggaacgatacgaatagccaaaaggccatatccatttgccttatctatcaatatttacatctaaatggagatggcaacctgctctgaaggttagcaataagatctgctggtgtt

SEQ ID NO: 46129 - DNA, 381 bp, Oryza sativa
  Clone ID: PAT_MRT4530_49025C.1
atgcaggatattgacgtggcgtcgctgctcaacctctcgaagcgccccgtcgggcagatgaccatcgtggaggtcggaagcgttggcctcattgttgacgtgatcaacgtcgttgccaaggccgaggcgcagcataacatagtggccatcctcttctacctctcatcgaacaacccggacgcatcccgaagcacgaccaaccagggcagggccatcgccgcgggcaccgtgtcagccctcgccgccttgctctccaccgaccgcgacgacctcgccagggacagcattgcgctgttgtcgaggatagccaagaagccatcgagcatcatggccgtcctctcgcagtcgggcctcgtcgcccacttcgctgcgtcgttgtag

SEQ ID NO: 46130 - DNA, 374 bp, Oryza sativa
  Clone ID: PAT_MRT4530_49026C.1
cctgggactacgtgctggctcgagaaggcttgacgaggactcggaacggcgcgcgagcgttctcgccgaagcggtcgcagcggcaccctaccatactctatgagcatcacaggctgcatgccggctcaatcgtcgtagcgctgggaggatgcgatggcgagacaccatcgcggcgccgcagatttgggaacaaagcatcggatgatcgtcgcttcagcatcccacggacgatgggcccagatgctaaagcccaggatgtgtgcccgacgtacactgctcgaataagaccgatcttgggtcggcgcccccgaagcccctatcgtcccgcgggccagaaaaatccgggactagccgcgatttcgagtcccggctag

SEQ ID NO: 46131 - DNA, 792 bp, Oryza sativa
  Clone ID: PAT_MRT4530_49027C.1
ttttttttttttttttcgcactccgcattccctccgtagaaagggtgaagtagtgagactgtggatcttatcgacaacaacaatggttcgatccagtagacaatgctaggattttagaaagaagaaaaaatgggattggtttacccatgctcattcttcagctgtgcaaccaagttgtgtactcctagcctgcaatccaatgacatgtgtgcaataatggtatatcagaatctcctctgtgttccagttccaaattcctcaacatgtgcacaggacccaatgtgcacaactaaaatatcaaaattcagaccggaaaagtaaggaggtgttcgcaatgcatcctgcaggaatttcattgtggtgagaaccgagcgttgctcggttggctagcatcgctggtgagcgagcagcccgcgcgggttcgatccctgggatcgtcacccgcgcgtctcaccgggatttattcccaaataaatttccagctctcccgtgccagcgccacaatagtagagtgacgtcctcgtcacgcacaaggtccttaggtggctttgtgtatctcattagcacgtgtgtgtatagttgataggtctagcatgcgtgtaggggtgtgggtgtgtgtgcgtggtggagtgcgtttgcacgtaatgttcagatactacagcttgtactcaaagtggagagctctcaaaaaaaaaaaatctaaagattctcttagagagagtataatagcagactaatagctagctataaatatatttaaaaaaaaaaaaataaaaaaaaaaaaaaaaaaaa

SEQ ID NO: 46132 - DNA, 555 bp, Oryza sativa
  Clone ID: PAT_MRT4530_49028C.1
atggaagggtctgaggagcatggtgagacctcaaaggcacccctgagcaggggggtcagtaaaggagtgtctatactcgatgttatacttcgctttgtcgcgatcattggcaccctcgcgagtgccattgccatgggcaccaccaatcagacgctgcctttcttcacccagttcatccggttcaaggcgcaatacagcgatctcccaactctcacgttttttgtggtggcaaactctattgtctctgcctatctcatcctttcactcccactgtcaattgtgcacgtcattaggagcagggctaagtatagcaggctcatcttgatctttttcgatgcggcaatgctagctctggtgaccgcgggggcatctgctgcagcagctattgtgtacttagcacacaagggaaatgccagagcaaactggcttgctatttgccagcagtttgattccttctgtgagcgcatctctggctccctgattggctcatttgcagccatggttgtgctggtactgctcatattcctctcggctattgcattagccaggcgatag

SEQ ID NO: 46133 - DNA, 2342 bp, Oryza sativa
  Clone ID: PAT_MRT4530_49029C.1
ggctcaaacttcatgcagaccagactgtcctgtttaattgataactaaatgaggagatgagcaccataaatttgtaccaattaacgctcatatgaacagtgcaacagatggcacagttcatcgaggacattttgcatttctcaatagccaacaaacaatccccaactgtttgcgaaaatggccacagtgaaccaagaatgaggcaatttcttgttgccattcagccattctacctttaatatttcttcctgtaaattctagtgttgagttgctcatcactacaaatacaaggtgaaaactcacttactgcctacaacatcaaaatcctaccacgctatctaaaagtattgtgtcatcaacaaaattcgtctgtttcagcagaagcaacagtatcacgtctaaaagttgtactgttggctagcaaagttaaagaccatctctgatttagcctggtctcaagcatccaccagggagcaagaatctgaacttgtctgcgttcttgatcaaataggaaggcagatgaacagcagatcctgactttggtatgggtcccatcttcttgaagagatccttgaatgtgtactcttcaggcagcatgtcaaacaggtcctccccattacatatgaccctctggattctgtctggatttaggaagctgtcctgcttcacccggtctgcgtggctatatgccttcatcttgaaagcaaactccttgatgtccttgaagcagaagctacaatgccagcctgcatcagccagcagaaggttgctctgacgggagtggcggtacaatgtatgctcagtgaacacatgtgctgtggccctccagctgttgtagtctataggaaattcaaaggagtacatatagttcttcagctcgagatgcatgacttgcggtattccatcacaccacttgagcaactgcaccgtctcagggctagggatctcatcagcatcagccatgatcaatacatcccccacagcaatgcctgatcttcgcagcagcatattaagcgcacgacggtggccggcctcaacatggaagggctgacggtgagaaccgggatccatttccatgacaggaagcatgtcatacacaatcttggagccagcgaatgcaaagcgattgatattttccaagaaagagagtgacttcgggatgccagtgaatgtggcattagcttcaaggatgacaaacctgtcaacatacggaaggagctcaccgtagcgaatttctagaatatcaagttcattactgaagaggacggcgtcaaagacacggcgaggggtggggaggataccccaaccatggagctgacagagctgcggcatggagatgttgggggcatagtagtgtgggatgcggataaatggcttaggtggtgtgtcccacagtggccgcagaagcgcgggggctctatggaaatactgtgccaaaacccttgagctctccaccctcctctgtacgcatcttccggcggcgcaccaggcggcgtcgagggcggagtgggagacagcgccagggacgtggttcgggcggcgagggcggtgcagctcctggcggcgcagtcggcaaggacctaggggggggggggggggcagcgagcagaccaacacccatttttgtccttccattcctctccaaatcaagtttctgcagcaaccggtgcaaactaaagatggcgggattcggcagcctggcacccaagaccaagaactttgtggtggctggaggactgtctgctttcgtcctcggcgtgtattactacaccatgagagcggtgggaggcacagatgagctgcaggtcgccattgataagtttgaagacatgaagaaaaatgatgctgggaactcatccaccgcgggatcctaagaacagggtttagaattggctccatatccgcctctatactgaactgtggttttgtacaataatggctcgatctaggttgtgcttatgctttgacgttaagctggaaatttttgactgaatcgactatattaaaacctccccggagttgctgggctgagagcgttttggactggtgctcgcacgcggcgctatccatttttattcacatgacattaagaaagagctttctgtgattgaactttaactaggttttttttgccttttgtatttagtattgtttcaatggtagttatcctctggaaatagctgtttcaagtatatttagctatgcctttttcttcacggtgttgatttggtgagtagagaatctgctatgtttgctactaatattatagttctgcccttcaatgaaatgtaaacaatgtgaattgaggttaatgtacgatagttggcatgtgactaggtgag

SEQ ID NO: 46134 - DNA, 1101 bp, Oryza sativa
  Clone ID: PAT_MRT4530_4902C.1
aaatgattttataaaaagaaaagctctaaaaagtcccctttccctccctctccctcttgggccggctcggcccatctccctccccctccctctcctctccccgcggcccattcggcctctccccgcgcgcgcgccactgacgggcgggcccgcccgccaccctcgctgacgggtggggcccacctgtcatccccttcctcccgccgctcccgccgcctcgcctgcgccctaacgccgccgccgccgcggattccgccgcatcccgccgtccccgcgtgcaataaagtgggggggaatcattccccgtgattccctctccctttccctctatttttccctctctctctctcgttcaaacgggcggatttgcccccgcaaacctcgccggcgccattgatggagcccgagatcaccgcgccggtttccttcccctccggacactctctcccccttccaaccttatataaaccctccccgcgcctacctcgcccgtttccgcccttgccgcaccgtctcctcgccggaatagagctcgcgccggcgctctctctctccgctgtcgccgtcgagctccggtccgccgccgtcgccgccccgtaccacctcccacctcagcgctgcctgcttcggttcaacgggatcctcggcgacctcgtccacccctccgtttcgctcgtcgaccgccggagcgccgccgtccccgtcgacccgagccgcgccgccgccttcttccgctccggccgccttttcgtcgtcgccgtcgacctagggtgagccgtggaccgccgcctcgtttcccccattccctcccttctctcggccgccgctccgccgtgcctatggccgccgccggtgaccatcggggcgcgggcgcgccgccacccgccggccgcgccgccgtggccgccttcgggcgcaccgagcggctgacgcgtggcgctcacggcgccggccggtgcgagcccaggtgcgcccggtccaccgtggaccgtgaggctgccgcgtgggccccactcccgtggacccggtccgcgcgccccgcaccttcggaagatccactcttcgtggaagttgaagccgacggttgggaaagcgagcaag

SEQ ID NO: 46135 - DNA, 607 bp, Oryza sativa
  Clone ID: PAT_MRT4530_49030C.1
ctttctctatcaccggcggagataaggcgcggcctcttccatgggcggcggcgggcgagctcccgtttccccacctgcttccccggcgccgacgaatacgacgacgccgatggcgacgggtttgaggatgccaccggtgcagcgattgggtgtcagctgcgcgggagcagggcggcggcggcgcgctgggccccagggcgcaagcggccgtgactggcggcggaggcacgcgggagcagggcgtcggcggcgcgcggggccacagggcgcaagcggcggcggcgtcgaggagggcgtcggcgcgcggggccatagggtggaagcggcgccgtggaggagggcatcgtcggcgttgggccttctccgtggcggcgaggatctcctccgtcttcgccgcgcgcctcgtcttgagcccaggggcaaatggctcggtatggcgaggtgtggccctctgcccctaccccctacccccttctcgtactcctccggacagagcatggcggcaggcagaagtagcaagtcggcaggttggagcagccaaggggcgccggtcgccggtcgccggggtcctgggagcagctgcggggtgcggtctgtagcacagtag

SEQ ID NO: 46136 - DNA, 314 bp, Oryza sativa
  unsure (1)..(314): unsure at all n locations
  Clone ID: PAT_MRT4530_49031C.1
cggacgggngtatctacgatttacagtaccttcaaaacactgtttctcttgggtatcangatgaaatcaggtaatcatggattaactgtttctnctatcgccagcttcattaacggntacatgcagggattatctgattatccggggaatgtccaacttgacttcagttgccgttggtcacangtaaaaattgacatgtccaatcattaatccatccattatattattgattacaaagagctgtcatttttcaaacttcaaatctatatggnttttgggctcaatcatgtcggggngctaactcaagatccgtt

SEQ ID NO: 46137 - DNA, 606 bp, Oryza sativa
  Clone ID: PAT_MRT4530_49032C.1
ctaaaattgaaaccatgccactcccatccctttttccgtctcctctctcacgccgtctccgttcccgtcctcatcccccttccgcgaggaggcggaggccgccccgcgactaccaccggagggctcgggagccaccgccaccgtcctcaacgccagctgcagtgagaggtctatggagctgtcgctaccgccgtcctcgacaccatccacacgggagggctcgggagtcatccacattggagggctcgggagccgccgccgccgtactcgacgccatctacgacgggagggctcgagagccgccgtcgccgcctctgtcctcgatccatgatgggaggtctcaggagctaccgccaccgccatcctcgacgccatctgcggcggcaggtctctggagctgtcaccgtcgccatcctcgatgccatccgtgcggtagggctcgggagccgccgccgctgtcctcgatccgcgacgggaggtctccggagctgccgcctctgccgtcctcgatgccatccacggcaggagtgctcgggagccgccgccactgtcctctttgcagtcgcgccggatggaggaaaagatggggagatgaaactcctccat

SEQ ID NO: 46138 - DNA, 816 bp, Oryza sativa
  Clone ID: PAT_MRT4530_49033C.1
atgaagcaaagtgggaaagggtcatacactaagttatactccattcgcacacaagtaatgaatatgaaccattggcaagcaaagcaatacgtgtactattcccaactaataagaagcattgaacatgatgcagaattacagaatgaagtatttcacactgaaaaactgcacataagcaaaagtgttaaagactgtataaacatacaaacttacatcacatcttcaggaagttcatcctgtgttggtgcattgctgctgctgctgcaatacgccttgttctggagccgcatggaagtcatcgatgtagccgaggatcttgtccaagtagatcgcggcgatggtgagaagacagcaagggccctgttcggtggcggtgttagcggccacgacgacgtccagggcagagaagatgccgagaggagtgaggcgggcgaggtcgccgcggacgtcaccgacgaggaggagctgccggcaagagtcgccgctgtagagggcgcggtggtgaagacggaggcgaggaaggcgggaggagtcgccgccgacgtcaccgacgagaacgcgttggcggtgagagtcgccgccgcagagagcgagtcggtgacgatggagacgagggaggagcgggaggtcgccgacggggaggcgcgggaggtcgcggaggcgagggaggtcgccgcggacgtcgccgacgaagaggcgctggcggtgagcgtcgccgctgaagagggcgaggtgttgacgaagaagacggtggaagcaggaggagttgccgcgggcgtcgccgacgaggaggcgccggtgagaatccgggcgtga

SEQ ID NO: 46139 - DNA, 1125 bp, Oryza sativa
  Clone ID: PAT_MRT4530_49034C.1
atggaaggggcccacaagctcaatgccaagctcggcgacaacggcgacacccagttcagtttggacgagaagcaggaggtcgtcgacagcttccgcggcacccgcatgtggtggaaactgtccaaggcttccgatgactattccttgtatggacgtaagatccaacggcgcaactacatgctggtatttcacaagcgccaccgtcagctcgtgcaagactcatatctccctgaaatcctccagcaagggcgcgcgctcaccgccaagaacaggcagaggcgactgtacacccaccacgagaaccatatgagcacgtggacccacgtcccgtggaagcacccggcgacgttcgacacgctcgccatggaccccggcaagaaggatgagctcatagaagatctcaagatgttccagaagggaaaggagtaccactccaaggtcggcaaggcgtggaagcgaggatacctgctatacggtccgtccggaacaggcaagtccagcacgatctcagcaatggccaactttctcaaatatgacgtctatgacctcgacctaacgaccgtcacgaacaacaccgacctgcggaacctcttcctccagacaacagagcaatccatcatcgtcattgaggacattcatgcgatggaattggaggataaacgcatgagcacagacttccagtggtactatgaaagaaagaaaataacgctgtcggggctgctcaactttattgatgggctgtggtcagcatgtggcggtgagcggatcatcgtgctcacaaccaaccacgttgataagctcgatccgggactgatccgccgggggaggatggacaagcacatcgagatgtcctactgccggtttgaggccttcaaggtgctcgccaacaactacctagacatcaccgagcacccattgttcaccaaaatccaacgactgctcgacgagactgatatgacgccggcggatgttgcccataacctcatgcctcagggcaagaggaagaggaacacgaacaaatgcttgacaggattaatacaaaagctgaagaaggccaaactggaatctggaacgcgcctctcccgaggccgagtcctaccgacaggccatcaaggtataatctaa

SEQ ID NO: 46140 - DNA, 168 bp, Oryza sativa
  Clone ID: PAT_MRT4530_49035C.1
atggaggagctgttcatgcaggtgttcgaacggcgggactgggtggcggcgcagttgcggcagcaggtggagtcctacgaccagtccctggcttgcgcgctcttggcgccggccgcccccccccgccgtggctcctcccgtcgcgccccgttgcgccgcaggatttaa

SEQ ID NO: 46141 - DNA, 639 bp, Oryza sativa
  Clone ID: PAT_MRT4530_49036C.1
atggccgtttgcttttccgtccacgtcgtccccccacgatggaacgcggctctctctgcgcctcgccaacttttttgtggggagtcgcagccaggcgccgcgttgagcgcatgtggagctcgtgggcatggcgtcgttcccccaagtttccccttgcaccctcgcctcactctcgctctctcctcagtcttgtcgcaccgcgcctccttctccgcttcgtgcgtccgccggcgctggggtcagaacgaggagctgcggggcggaggggttggcgccacgcccgacaccgttggcatcgccaccatttccatcccgatcgggtttgccgcccccggccggcgacggcgcgaggcggaggaggccggggaggatgacaacgatagagagaggcagagagagcggtggagctagtccgccgtcagtcaaccgccgttcgttgtcggccaccccgcgtgccgcttgccgtccgccaccgcacccggcaccggcgaggtggacggcaacgagcgcaccgtccctgccgcgtggtccggggacgccgggccggctgcctccaaggttccaagtccccaacggtgggagtcccgcacgtacgcgttgcggcgatcgcatttcgcccgatgccacgattagatccat

SEQ ID NO: 46142 - DNA, 531 bp, Oryza sativa
  Clone ID: PAT_MRT4530_49037C.1
aagaaaaacccttttacctgggaaaccccaccaaaaccccaatggttaaattcaccggaaaaaagccggggaccttaaaatacaaaaaattaaaccggggtaccccccaaagcccccaaaccaaccactggttaaataaatgaaaaaacaccgggttaaattaacaataattaagccacaccccaacccaccttatttgggggggtttttttggggaccaaataaaggaagggaaccccccgggggaaagggtccggtggtttcggaatttacttgccccactttgaatcggggcaagaacaagttgggccccaatttgaagccgcggtttccctcgcgggggggaacctcttaaaaggggtttttttgggtttaaacattaacaaccccaaagtgggacccttttttaaccaccgggttttggtaaaaaaagcccaattggcccacttggcccaaaagggccaaaaattaaataacctaagggggggagaagtaaacccctggggtggttaatcccgaacccggggtcca

SEQ ID NO: 46143 - DNA, 576 bp, Oryza sativa
  unsure (1)..(576): unsure at all n locations
  Clone ID: PAT_MRT4530_49038C.1
ctccgcagagtttgccgcttctctagcctagcaccaaaggaaggaaaccaaccgagaggccaggcgaggagaggagaggcgaggagaggaggaggaggagggaggagaagcatgacagagcatctcactatccacatccctcatcccgcgatccaggccggcaacgcgtgctgggagctctactgtctcctgcacggactccaccccgttggtcncttcccagccatacaacggctgctgaccaacacgatccgctcgacactttcttcagcgcgacgctccctggcaagactcttcccaggcccatctttgtccatctgcccccactgctctctcccaggggcccacttcgacgccccgtcgggtcttccaccctggcaaccttactcctgctcgccgggctgcttctccaccttctcggcgctccctttccctgccgaccgcgtcatggtgctcctccctcccctccggtggccacctcacccatggctactacaccgcggtcgggaagaatatctccgcgacgctcatctacttcgacagcctcccctacagggtgagcgccggccccggggt

SEQ ID NO: 46144 - DNA, 353 bp, Oryza sativa
  Clone ID: PAT_MRT4530_49039C.1
cccacgcgtccgcccacgcttccgctcacacatccgggcatggttctggtgggaaattccgcgatggctgccgccgctatctcctccggcgggcgcgcggcgcgggcgttcgcggaggtgctgttgtctccggctccagcagtggttgcttatgctcgtggagtccctgatgcccatactgtacgtccgtgcgaagcccgtcggggacctgcatgccgagctggtttgcgccgcctgactcgtactccttcgtgatggctgaattgcatgccgtcgtgatgggtaaataatatagatagtcataggcgatcttattaatacatgcaaatactggataatagatacttgagact

SEQ ID NO: 46145 - DNA, 315 bp, Oryza sativa
  Clone ID: PAT_MRT4530_4903C.1
ccctgcgccgccgccgttccggtcatcgtcatcgctcaggaaggccaccgtcgggatcgccaagtcgtcgccgtcctcgtccgccccttcgccaccgtcggagaccgccggagcatcgtcgccgttgtcgacccgatctccgccgtcgcttcttcctcgtcgccgtcgccgtccgttggtcttccgccgtcgcttgggtcgccgtgccgccgttcgctggcaagcgtgcgccgtccgagccgtccgagccgccgagccgccgccgccggtggtgacgtcatcgccgacgtcatcgtcgccctcttccatgagccg

SEQ ID NO: 46146 - DNA, 2354 bp, Oryza sativa
  Clone ID: PAT_MRT4530_49040C.1
tttgtttttttattaaaaaacgcaaacccaaatcatcagcgtgctcgaaacaaatgaattgtgcacagttcaaaacataaagatttatgaactttagcagttctgttagaagcttgctggtaccattcaggtaacattgacaaaaattgcaagtgctcccatgaagaaaatgcttttgcagcagaggaagaaaacagaaaattctaggcatgggaaaccccagtggcagaatgtacatcatactcattatttgaaatgcttccgcttaaatgctcaaaacattttaatgaaagtaagaaacagtggtccctcagttgacaacatcaaggaccagcttgcgtgacttcaggacggaccacctcatgcgacggtagtatgcggcttggagaagtgcaagtgacagtaggaagatccatttcactcccatcagtttcctctcttccatctcaggttcagctgcccatgacaagaacgaaacgacatccttgcccatctgggcttcagtggcaggagtaccatcttcatattcaacagctccatctataagcatcttgggcatagctatggcaccaccagggaagtagggattgtaatgcaaaccctcacggatctgaacaccggcaggtggatcacggtaaccagtaagaagagcaaacacatagttctggccattgtgccttgccttcgtgataagactgagatctggtgggtatgccccaccatttgcaaaacgggctgcttgctcatttggatatggttgtgggaaccggtcacttaacttaccaggacgtgtgaacatttcaccctcatcattaggaccatcaaccacctcaatctcagcagccatagcctttgtttcttcttcagtgtaggccacaccaaccaaatctcggtacgaaattaatgacatggaatggcaagaggcacacacttgtgtataaacttgatgtccacgccgaatagatgcatggtcataagagctaagaatgccagcatgtggccagggatattcagctgctgccaaaccatgctcagcttcatctgcagaagctattgtagcaaagcttaaaagaccagaagcaccaactccaagaagagccaatgctctcagtccagcggaggattcttcatgctttatccggaacgaggatagcagagatgagcctgaggactgattatggagtgttctccgtaggagctggttaatgccccgaccagcagccatccaggatactgcatcaaatattgaaaacggaaggggaggaggtgggtgccctagccctagctcagcctcagctcggtcgtccgccttaccgggagggggaggaggaggaggaggacgaggaggcgagcacgagcggaggcgcgtgaagatagtgaaagacatatggtgcaaaacttttatctaacacctcatctaggccataactcacaaattgcagtattctaatcagtgtgtttacaagaaaatatacaaaaagaagtgtaccagatacgccagtgacctcgatgagtcttctggtggagcccacatagacctttaaggagggctggttgttgaagttaccgttattgttgttgttgttgcctccttggtagaacgggcagggctggttccacccctggtcttctttgggatgatagccattgttccccatgaacatggcttcttcacgaatgtcggggcagtcgttccccgagtgtccagtgttcgggttgttcttctcctgatcatctagcttcttcatcaggaggtccagctttgcggccagcatttttgtctccttgacagtatgcatgccatgctgatgggtctggagatgttcttcactgcagctcatgttcgacactatcttctcgatgagatcaacggcccctttgaccgtgttgtaaaactcctggaagcttgatattctcctgcggagggcatttgtcttgcccatcaggaagaattttgagaggaacgcagtggagcacttgtcccatgtgttaactgcaacccgattcgtgtaaaaccactgcttcacttttcccaggagtgagaaagtgaacagacgcagcctaatggtgtccgggctgacacccttcatggtgtaggtgctgcagatctctaggaactgctgcaagtgagcacttgcgtcctcatttggcctgccacaaaataggcttgcatgcgccatagtaatcaggctgctcttgagatcgaagtcagtgtctccgaggttaacctgtggcccgacgggcacattgtcagcggacggagcagcgaactcacgaagtgtcttctcagccatattccagtcatgcactatcctgttttcataccctgttttcatgacacaaaggttagccat

SEQ ID NO: 46147 - DNA, 705 bp, Oryza sativa
  Clone ID: PAT_MRT4530_49041C.1
atggcggcgtctgaccgtgtggcggcggggtctgtgggtggagtggcggcgtggggagggaagcgggtccggcggcggtggcggccgggccggaaggaagaagcggcgccgctggcatgtggaggaaggaaggaggcggcgccggcgtggaatgagggaggcggccactgccaggccgaaaggaagaagcggcgccgccggcgtgtggaggaagggaggcggcgccagcatggaatgagggaggcagtggcggcgtcggcgcaggcgcgcagaaggagcgaggcagcggcagcggccgatgcgcggaggaagaaaggcggcaggcccgacggtagagctcgagcggctggatctggcgagggaggggcgacggcaacggcctgcgcggagggaagaggagggggtggcggtggtcggcacgcggagggaagaggacggggggcggcggcggtggctagcgcgcggagggaagaggagggaggcggcggcgattgcggcgcgcagaggaaagaggaggcgccgccggtgcgcgcgatggttggatccggcgatggaggaaggggctacggctggatccggcgaggggcgacgaggagtggaggcagtgctccacagatgtcggtcggcgccggctcgccctctcgccgttcccggccttctctgcaactgtggaggagaggagaagaagggagagttaagagataa

SEQ ID NO: 46148 - DNA, 453 bp, Oryza sativa
  Clone ID: PAT_MRT4530_49042C.1
cgacgtcgacggagactgcctccccggcctgctggattaaaacggattaattcatttcccacccatctccacaaattaaaagtttacacctctctattcccttcgttgaatatataacgttaattatttcaaaaatgaattaaccaacgtcgtacataaaagaacagagagggagtacatatgtgtacatgcatggagatatacacacacacacacatatcacagattcacaatattatatatgttgaaatttggtaataaggatattgatctgtgctagccaactagttcatctctgaattggaactgaaatagaaaggatcgagtacgtaggtgcagaccaaatcagtcttactagcgtgtgtgtgtcattaagtgtcatgcatgcataattgcatctatgtaataaagtcaaattagtagccaaaaaaaaaaaaaaaaaaaaaaaaaaaa

SEQ ID NO: 46149 - DNA, 424 bp, Oryza sativa
  Clone ID: PAT_MRT4530_49043C.1
tcgtctgattccgatacgcactacaaagaggacggggaagatgaacgatggaggctgtacccggcgaggcagacgctgcggctgatgacgcctgcgaggtgccgtcgcctccgacgtcagggatgacagaggaggtgaaggacgcggaggaagcacctgagccggggaggcgccaaaggctgatgcgggggaggagaagaatgcggagggtgacaaagagaaggaccagggctagcagacagcaactcccggttgatcgctgaagatacctgctctatcgctgtgccacggcctcctgtaacactatgagatgcagccttttgaactttatagcatgggctattcaacactaagttcggatacatcactcgtttctgcttaagacattatttataagctttcgcagcgtaccgggggcaaatat

SEQ ID NO: 46150 - DNA, 719 bp, Oryza sativa
  Clone ID: PAT_MRT4530_49044C.1
cccacgcgtccgcaacttccaaggtcaccattggttggagaagattgcttcattctcgttgaatacccactgaaaacagacatggccgaatcatgtggaagccttataaaagtagctgacaggaggtttggtaggacaaacttgctaatttatgggccaacctgggctgagaagaagaggagatcttgagatgatttgtgagacattgaggtatgctaattactggaaaggaacgctgtctcgacagtgtcaccgcactcttgaacagcaacgagtggctcagctcctctcgaaactatcaacagtgaaattcatggaacatcctgtggagatgatggactactgtctagtacactggaagattgtatgagggagagacagagagtacttctctttcattatagttcaccaatccacatcccagaagaagaaaatgatcactggctcactgcgtttcaaggcatcagcatcaagccaccatgcgatagtgacctatctccacgttgctacgagcctgactctatctagcattgtaggtcatgcctcgccggtgatatgatctgagccgtacatttatgcattcagacattcagtacactggctctagctgcacaggcatttgtgtgctcaatctccatagaacaacatgattatgttgcttattgatcggtggatgccataagtttataagcaaaatctgcttttttttttttcttccc

SEQ ID NO: 46151 - DNA, 375 bp, Oryza sativa
  Clone ID: PAT_MRT4530_49045C.1
atggcggtcgtcggcggctcgccgccggcgaaaggcgggcagtacaatccaagttatcagaacttcaaaattgtggatcccaaagtcttcatggcagctcagactttagaacttcaaagcaggactactcgtatatcatccaaatgcatgtcattgtttagtcagagcttgctggtttcagccatggaaggagagttatggaggacaaagaagacgatcactcagaggcgtcttcagaggagcagctctacgagttgccaagaacaagaggacggccttttgtcagtgctcccagcccggcgtatgaagcttccgacaggccagtgcctcaaggctcgaatcctctgcataatcgatgaggtttcttcttgctga

SEQ ID NO: 46152 - DNA, 709 bp, Oryza sativa
  Clone ID: PAT_MRT4530_49046C.1
ttcctgtgaggctattctcaccaagacatcagccttgcaacataagctggagaagagcatgagcagattggtgaatctgaggagcttggcgatgccgtcatacaaagaattgaggatacccactgactggatgcttgattcagggattgcttccaagcttgcaaaggtgtacgtgaagagagccctcaaggaactagacagggaaacagggggtgaggctctccttgctcaaactgtgcatttcgcctacagggttcaccagtttgctggaggacttgactgcgaagcaatgcgcctatttgaagatctgacaaagcggcctcacaaggcctcctctcccctgagctttctgaagatgaattgaaatatacatcattcacaagcatcaaaattaattgctgatgagatgagatatatgtggcttgtcaaaaggggtgatggaaaaactaatgcggtgactctttttgtatacgtacatataatctactactactagttctttaaaaacacgttagagagattactccaatgtgaataataaagattaatctcaatatggtacgcatccattgatgtactgagatatcatgaagacaataccagaaatacaatactttgtatctgataatgcagttcacttgtaacctacaacacaccaacagttgtgtatccacagcccaagtgttgtcctccaaaaaaaaaaaaaaaa

SEQ ID NO: 46153 - DNA, 529 bp, Oryza sativa
  Clone ID: PAT_MRT4530_49047C.1
acctataaaaagattaatggcatatgatataacaagcactacaaatagataattaatggacatgcaggttgaaattgctgcctgagttaatgaaaccgaagctaaattgtctgcaaatcaaataactaaagtctactgtatagacggtacacaacaacttgcaagcaagaacacccaacttttctccctgaaccaaagcctggataacaggtgcatcttcacttggattcactaggcagtagccactggacgttgagttctctacaaggtcaaaccaaactaatcaaactttggcaccatttctccacaaagtttctacatcaacacttctataattgtcaggtacacccagtcctgttcagcacttgagatattttttcttagaacacattaattaaagttggacgccgccccaagtgttgaattctgaaactctgaattaatctaccaggagatgagcacacacaggaactagctttttcctgcatgatgattattcaaaagaaaaattcatgattccacattacta

SEQ ID NO: 46154 - DNA, 905 bp, Oryza sativa
  unsure (1)..(905): unsure at all n locations
  Clone ID: PAT_MRT4530_49048C.1
ggccgccccttttttttttttttttttctacaagccaagggtttctacagtaaatatcttttgcagatatacagtttccagtcaaagctacagcctctttctacagtacctttttggcatgggttccaccctctgatgagcatatcagttggggtggttgaatggagaaataggtaacaaatgtaaggtaagcgcagcttaataatacatagaccttgaaccacacagacgaaaaaagagataggtacaagaagaagcctgtcgagctgactattgcaatgaaattagcaaggcactccggtgtggatacatccccttcagttccttcatcagggaagtggccttgcatgaaaaaatctgacagaagctggtccttctgcctgaacctctctatcatccaatcggttacttcatcttctgacgttggaatgtcacagagcttaacagttctgatgtggatgtggacttcagaaggatcggtgccatatataatatccagaaaatctggcaggcgatgcttatacgctattgtgacatcataaactgcatctagggagctcttcaactcttgcaaacagcaaaggaacccctttgtctttggaagaagaacatttttaagtataggcagaccatgctccgaagcatattcttgactcttgatgcatttcttctcacataatcctctcgcctgctctgctcgccagatggagatcgccgcccctcccctgttcagccgcgactcgtcttggcggcgcaaggagcggaggagacgggagattttctttcttttacgccacaaagggaaggggaagacactcgggccgcgtatggctaatgggattaggagggtgggaatttttttttttttttttttttttttttntttccccggccggcctcgnnag

SEQ ID NO: 46155 - DNA, 1558 bp, Oryza sativa
  Clone ID: PAT_MRT4530_49049C.1
gcacaagccaagggtttctacagtaaatatcttttgcagatatacagtttccagtcaaagctacagcctctttctacagtacctttttggcatgggttccaccctctgatgagcatatcagttggggtggttgaatggagaaataggtaacaaatgtaaggtaagcgcagcttaataatacatagaccttgaaccacacagacgaaaaaagagataggtacaagaagaagcctgtcgagctgactattgcaatgaaattagcaaggcactccggtgtggatacatccccttcagttccttcatcagggaagtggccttgcatgaaaaaatctgacagaagctggtccttctgcctgaacctctctatcatccaatcggttacttcatcttctgacgttggaatgtcacagagcttaacagttctgatgtggatgtggacttcagaaggatcggtgccatatataatatccagaaaatctggcaggcgatgcttatacgctattgtgacatcataaattaagagtaagacctccaatttttcacagaaatgaaaacggatatctgcatctagggagctcttcaactcttgcaaacagcaaaggaacccctttgtctttggaagaagaacatttttaagtataggcagaccatgctccgaagcatattcttgactcttgatgcatttcttctcagtataatcagtgccctcagggaaaacggccaaccagagggggtctctggggtccttaaatgctgacagtttgttctggataattgcttcatcaatctcccatttccgttctactgggataaactcaaaaatgtgaaatgcccagctaaaaacaggcaatttcatcaagctgctcttaaggatgtacttgatatatcctaaatagcctttcctcaatgcaagatcccacaaatacatccagtcaacctcagtcctgtggttggcaaataacaagacacgcttttttggaagtacactttcaccagagaaaaccacattggtcttgttgatcttctcaaacaagaatggccataaagatagccacattccaaacagaacagaggtcgcctttctactgtaatgcacgctgactagccgaacaaggaaagtagtaataggggctatgaaaactatcaatgtgaatgctgttgacagtatgatcaccacacatgctacaccgcggcatcgtctcatgggagtcaatggacggtgctttgacccattgttcagagtgagtgggctagcatgctgcactttcttctgtcctccattgacattatgtccttgggagccacttgaaccattcatcttctacagctaagaactgaacctactcaaagttcaaagctagggtctcgaattatctaaacatcctgtagggtaggagaaacgagaacataatcctctcgcctgctctgctcgccagatggagatcgccgcccctcccctgttcagccgcgactcgtcttggcggcgcaaggagcggaggagacgggagattttctttcttttacgccacaaagggaaggggaagacactcgggctgcg

SEQ ID NO: 46156 - DNA, 476 bp, Oryza sativa
  Clone ID: PAT_MRT4530_4904C.1
catataaacataaaatttttttttttttaacaaaaaaaatatcacttgtacaacataaacttttacatatattttgttatacttctcctcatcctaaagggggcaacacgccaaaaataaatccaatttttctacccattttgtccaccccctaaaaacaaaacataattgcattgcccaaaaaaaatttcagccaaattacccacaagggggaaggtaccttccccaacattttaacccccccacacaggcaaattcccaggggcgcatgaaaaacgacggaaaaaccaaaccctgtacggggaaggttcacaaaaaaaacctgtaaaggggaaaaaaaaccttgccccaaaaaaaggccccctggaggcttttcaaggccccgttttaattaaaaaatcccaaaaaccaaaaatcatgggtggtaaaaaaaacccccgggaagaacccctttgaagagatccgccgactagccc

SEQ ID NO: 46157 - DNA, 1422 bp, Oryza sativa
  Clone ID: PAT_MRT4530_49050C.1
atgtcgtcgtccctgctcactgacctcgttaacctcgacctgtcggagagcacggacaaggtcatcgccgagtacatatggattcatctaattctgaatcatcatcaattccttttcatggttgttctcctagtctccttatcccagaatgccggatctttacttagtattttacatttaaaagaggttaatcacacgttgtctggacctgttgatgacccaagcaagcttccaaagtggaactttgatggctccagcaccggtcaggctaccggtgacgacagtgaagtcatcctccaccctcaagccatcttcagagacccattcaggaaggggaagaacatcctggtcatgtgtgactgttatgcgccgaatggcgagccgattccgacgaacaaccggtacaatgcagcaaggatcttcagtcatcctgatgtcaaggctgaagagccatggtatgggattgagcaggagtacacccttcttcagaagcacatcaactggcctcttggctggccactaggtggctatccaggccctcagggtccgtactactgtgcggcgggagccgataaatcgtacgggcgcgacatcgttgatgcccactacaaggcctgcctgtttgccggcatcaacatcagcgggatccaacgcagaagtcatgccggggcagtgggggagttccagattggccctgtcggttggcgtctccgcaggggatcatgtctgggtggcacgctacattcttgagaggatcactgagattgctggcgtcgtcgtgtccttcgaccccaagcccattccgggagactggaatggcgccggtgctcacaccaactacagcaccaagtcgatgaggagcaatggcggctacgaggtgatcaagaaagcgatcaagaagcttggcatgcgccaccgtgagcacatcgccgcctacggcgacggcaacgagcgccgcctcaccggccgccacgagaccgccgacatcaacaacttcgtctggggcgtagcgaaccgcggcgcgtcggtgcgtgtcggccgggacaccgagaaggacggcaaaggttacttcgaggacaggaggccggcgtccaacatggacccgtacctggtgaccgccatgatcgccgagaccaccatcctctgggagcccagccacggccacggccacggccaatccaacggcaagtgaggaggagtcgcctcgcccgggttgatgaactgctttctcgcgttctgggtttcatggaaatctgtgtgtgtgtgttctctgacgctggtgctgttagaaacttccaataattcagaaataactgcgatgtgctctcaaatttctcatgaggccatcacctgcagcatctcatgaaatagatctattgcaatgacaataccaatggcaacgcaaaattttatggtacctcc

SEQ ID NO: 46158 - DNA, 334 bp, Oryza sativa
  unsure (1)..(334): unsure at all n locations
  Clone ID: PAT_MRT4530_49051C.1
cggacgngtncgaggncgtgtggggggcattgtaagtggcagattggccttcctgccacgntccantnaaatccagccccgcttcgcacggattcntctgcanagnattcancccgccgcccgttgggaagggagcttcgaggcggccggccgcggcgcgtcggccgggccggcttggccgttggcacgggcccttgggggcttnccnccctaacgtgggtcggggcgggcggcgggcgcaggcgccgcttgcnagcttggattctaacttaaaggcgttcagtcataatccggcacacggtagcttcgcgccactggcttttnaaccaagcgc

SEQ ID NO: 46159 - DNA, 822 bp, Oryza sativa
  Clone ID: PAT_MRT4530_49052C.1
atgatccgcgggcgcacggccggttttgtaacacgtgccgccccgcggccgttgccgcgccgatcccgacgcgcatctgccgttgccgcgcgccgccgcccatggccacccgcgcgcgcggcgccaccaccaccgccagctagcgccaaattaagccagcgccaaggcgaatctccctccgctcccgctccccccgcgcgcccagatgctgcgccacgcgagttggatcgatgctctcgctcggctaaaattcctccaccgctgcacgaggggtacgtatggtgtgtggaccgtgtggtggtggtcttttcctatgagttcgaacaagtgtacgccattaaacttgtttacaacaccataaatttgttcggaaccatgagcaagcaagctgccaagggtgatggtgggcagcacaccattgagattttgatatcaaccgttcgaagtagtctcacttcgattaatctaaccagcatcaatcagtcaagagagagggatggagagagagacgaccatcagactgaaaagactttgatattggtcgagatcgaggagctcagggccccgttttccaagctccctaggcccatatacgtggcctatacgttcttgtccatcggcctattagacaaggaccagaagcaagaaggcctgcattgcgccgctcgattcactcgtctcgtctgccgccggccgccctttcgcatcgctggtcgccagagtggccttaccgtcatccggcccgacccgccggcttgtttcgtgctgagcggcgaggaccgtggcttccgccagtcatgtcgcaggtggactgctagtgta

SEQ ID NO: 46160 - DNA, 483 bp, Oryza sativa
  Clone ID: PAT_MRT4530_49053C.1
gtgttgaagaaaaaagttgatttattattttttattaaaatttgacgatgaggctatctaagtaattcatacaagcatagatattgcaaacttacaaaaagaggcctaaaacaaaagtgcagactgctagatggaaacaggccgaattagctgacgcttcatcaaagtcaagaacacctgggaggggctagcctttaaacaactccaagatagtaccaccactcggggagatgtagctcactctagctaccagcccaagcttctgaaccgcagcacctgaggtaacaccgagcgacgatagttgtggctcccttagaggaagtaagatcagcccactactagggagtggtgtcagagaccactggaaacttatcaaactcaaagactcccataaaagcggtccaaaagatagtgtaacaggtgtccaatgcttaggtgaaaattttgaccgcatctggaccaacatcaagacccatccaacca

SEQ ID NO: 46161 - DNA, 396 bp, Oryza sativa
  Clone ID: PAT_MRT4530_49054C.1
atgccacctaacgcccacctctgcacaccatcatcatcgtcgtcatctcaggagtcaggccgtcggccaaagccacgaccccctcaccagcgcgccaccgtctaccccatctctgtctactgcagcatagggcgacgcaccattgtgtgtcctccactacgacccaagctgttgcgatcacacctaccagcgtcatcgaatgccaggccagccaagcccgttgtcgacccgcttgccatcgagcaacccacgcctatggtcgtgcatccaacaccaggctggcatagcccacttgccaccaacaacgatgattgccacattgtcactgccatagtccgctgcccaagggttcaacaagccaccgcgaccccccaatctaatccctcgtcagagtga

SEQ ID NO: 46162 - DNA, 350 bp, Oryza sativa
  Clone ID: PAT_MRT4530_49055C.1
atggaagatctcaattaaggtaacgaagacaatttttacaaaatcttcagcgctctactataccaattcagtattaaccacgagcaaaaatgatacatttgctaatttctccttcctcgctacaccatatgcatgaaacatctgcctgtcaattgtctaacaaaaaatgggcactgtccacgtttacacgtaacaaaaattaacaccacaaaaatggaatctgaactatgcaacacaaacattacagatttttcatcaccctgtatatacaacactagcaagtcaacaaccccccttttattaattggatttggaaacccaatttattatcttatatacaaaatcatttt

SEQ ID NO: 46163 - DNA, 174 bp, Oryza sativa
  Clone ID: PAT_MRT4530_49056C.1
atgaggagtccttccctgtcgaggaccctccccctgttggtggtgttgcagcagccggtggtgcccatgacggcgggtgtggcctggatggtgtgcacggaggagatcgcggtagcggacgccgtggatgtgccgcgccgatttgctgaccagcgacgacgctgccgtggctag

SEQ ID NO: 46164 - DNA, 636 bp, Oryza sativa
  Clone ID: PAT_MRT4530_49057C.1
atggctgtcactacctatcacatacctctacaagcacacaacaatcgaagtggagagagtgttgacaaccccggcactcctccagactcccctaaaaagaaagccaacatctccggcacttctccggaacatcctcggagagaatgccgacatctgagtgccacgtggaaggcggtggcgaggggtgcaacccctggttcggccgaaccagggaaactgcttttgttcaccgaccttccctgggagactatcaggaccgtcaacactgatccagggattgatacagggaaacataataggttttggtttccgaaatcggggactgacacaggcgatgcgacgcacgaccctcatggaccggcgcaccgcagctccacttgtcacagccttcctctttggtggcatcttgttagtgtggagggcttgagagtttgcgttcgataccccacgaacggcgccaatgttagaacaaaatccaacagttatcgaacgagacaaagtgtgtatctaataccggtattatattctttcttctgccccctctctgaggggcaggctacatatttatgtgggccagtgtttcggggcaacccgggtggccgacaagtgacccccaccttcgggattaatcagtaa

SEQ ID NO: 46165 - DNA, 1173 bp, Oryza sativa
  Clone ID: PAT_MRT4530_49058C.1
atggccacggccacggccaccacgacgactaggaactccgcctccctcggccacggccacgccatcgcggtgcacccggtgccgggctccctatgcgtggccctgcgccgctctcccctccaccgcctccacgccgcggctgcctccctcgactccggcgacccgcccgccgcgctccacctcgtctccgcctcgctcaacccaccacggacgaagcctcatagtgggcttggtgcagatgaaggcttctggcaatgtggacacttgagggaacaagggctagatgccaagcactcgatggccttcatccgagataagaaggcggagtcaatggtggcaagagcttgctccagatctgcacgggtgacggggcttcagtggagtttgccggtgtggagtggttggtgcgggtggatctccgccatggtcagttcggtgggttggaaagctggtgatccagtcctcaggaggtatgggcatgccacaattcaggcttaccgccggactcttcatgtcagactgctttggcttgtggacaatgggccatggctgcacctctcaaatctcaccaccaccgattatggacttgcgagtttttggctatacgagctcaagaaagcactgacggatgcggacgccctgctggagaactggaggtgtgagatcctgcgagcggagagtatcggaagccgcggcacagccacaaaggtacggcggaccttctctggtgtcctggatcccctcaaggttattcctcgtcatagcaaggaattcgacgtggcgctacaggaggagctggcggatgtgtttgtctcaatagtggggatgggtgggattgggaagaccacgctagctcagatggtctacgacgacgatatagttcagcagcacttccctgtgcgtttgtgggtgacggtctctgaagacttcgataccactacaattttgcaagggattgttggtccatcaatccagggcactgatgatggttgtggaattggacagctaaaaggcctgaaccttgagggccagttagagatatataatctgaagaatgtcaagaggattgaagatgtgaagggatgcggagaacttcgctcggtctgggtaacgcacggcgccaatcaccctgattccgtgcgctgtggagggcatgcctccgacgccccgtaa

SEQ ID NO: 46166 - DNA, 496 bp, Oryza sativa
  Clone ID: PAT_MRT4530_49059C.1
atatttacgtataaatactaatacgtgctaatcatagtcgcaaccaagccaattagctgccgtctccgtcgacgctgaaagcgatcaggaaaaaagcgcaagttgaatgcgagaaacatagttgatcttctctagtttaccctcatatatatatatatatatatatatatatatatatatatatatgtgtgtgtgtgtgtgtgtgtgtgtgtgtgtgtgtgtgtgtgtgtgtgtgtgtgtgtgtgtgtgtgtgtgtgtgtgtgtgtgtgtgtgtgtgtgtgtgtgtgtgtgtgttacttccttccgcacaagcagcacgaggagcactacccctacccgtactacggcgcgccgcagccggtgatgagctgcattttcttttttttttctttttccttttttttttcttcacttcctctcttactgttctaattaactagagcatgtaattgtaatgagacacgccaaattatatatgtttttctcttatcatttt

SEQ ID NO: 46167 - DNA, 1117 bp, Oryza sativa
  Clone ID: PAT_MRT4530_4905C.1
atgagtagagtgtccactagttggggttttgtttaatctagggtgaacaagccgaggggaggggcgcgtggaccgggtccacgggggtggggcccacgcggcagccccacggtccacggtggaccgggcgcacccgggctcacaccggccggcgccgggggtcccacgcgttagccgcacctaagggtgcgggcggctgacagccgggccccacgcggcagccgctcggtgcgcccgaaggcgaccacgccggcgcagcggcgggaggcggcgcgcccgcgcccctatggtcgccggcggaagccataggcacggcggagcggcggccgagagaggggagggaaggggggaaacgaagcggcggtccacggctcaccccgggtcgacggcgacgacggaaacggcgaccggagcggaggaaggcggcggcgcggctcgggtggacggggtcggcggtgctctggcggtcggcgagcgaaacggaggggtggacgaggtcggcgaggatgcggcgaagccgaaggaggcggccccgagggggaaggtggtccggggagacgacggcggcggaccggagctcggcggcgacggcggagagagagagcgacggcgcgagctcgattccgacggggagtgagggcggtgagtggcggaaacggtggagggaggcacgaggagggtttatatagggttgggagtgagagggggtggccggaggagggggaaacgggcgcgggagtcccggccgccattaatggcgccggcgaggttaggggaggagtttccaaacgaatccgagggagagagagagggaaaaatggggggaaagggggaggggatcccggggaataattcccccctattgattgcacgcggggcggacgggggcggcgggattcgcggcggcggcggcgctagggcgcgggcgaggcggcgggagcagcgggaggaaggggatgacgggtgggccccacccgtcagcgagggaggcgggcgggcccgcccgtcagcggcgcgcgcgcggggaggaggccgaatgggccgcgaggagaggagagggagggggaaggagatgggccgaggcggcccaagagggagaggggggaaaagggacttt

SEQ ID NO: 46168 - DNA, 608 bp, Oryza sativa
  Clone ID: PAT_MRT4530_49060C.1
gcacgaggaactcctcccccccttccccttctgttgggccggtatggcggggccgggtgcggcggcgaccggacgaggcagcgagacctcctcctggtcgtcgtcctcgtcgtgcacgtcgtcgctcggctccgtcaatgacagtgccgtcgtcgcgtgcgtcgtcaaggcagcgagcgggcgtcgtcaaggcagcggacgtcgtcgtcgtctctgcggggaacgtccccgccgccagccacttcctcaccgccatccacaaccaccctctccacgccctcgccgctgcccctcgccacgctgctcctgggccacctcctctcgcgccgtcgcgtccgcgaggccgcctccgtcgtccgctggatctgccgcccgaactccccgcagcggcccaacaacgccaccttcaccttcgtcgtcgcggcaggcgggctcgacggcgacgacggcgaccgggcgagcgtggcgtggtgacgactagcgaggcggcggcgagcgggccccgcccagatccgacgagttgcggcggccggttgcgtgcgggccggcgatttccgctttttttttttttttgtttcgtgcgggcggaataatttgaccgcacagga

SEQ ID NO: 46169 - DNA, 264 bp, Oryza sativa
  Clone ID: PAT_MRT4530_49061C.1
atggctgcatctgtgtccgccgtcatctgggcaacaattcaacaaagctctgcatcagactgcatgcatggcacggccgtacaagccatggtggaggagaggagtgatgtcagcgtgacagccgtcgccgcggcgtcagatgtagcagttgccccgccctcagatctagccgtcgtcgcgccgccgccattcttatggtgtgaggtcgggacagagacggttgagcatatggactgcacttggcatgagctcctcgccgggtaa

SEQ ID NO: 46170 - DNA, 588 bp, Oryza sativa
  Clone ID: PAT_MRT4530_49062C.1
atggcaccgtggtggaatgcccttccgtcggacccgctgtggaattcctcgttcgtggggcaccgggatcaaggatccttggttacactcaggagatcacagatgcaccggtttgaccgcacggagacctccggtctgattggcgaagtagcttcggtctacccgcacatcgcgctgatgtcgcttgtcgttgccgccattctaaccgccttaaagccaccgctcccgtcggtggtgcttgaaagagtccgttttggtgctggccttcttcaggtcgtcaagttcgccttggcgcgcggtgcttctcttcttcatcgtcaggtcgtcaagttcatctttgtggtacgtgtttctcttcttcaggccgtcaagtgtgtcttagtggaagttcaagttcgtcttggtggttctctgctcttttccggtcatcttggtgtctcggtgctgcccttcaacttcattgccaggttcggtgctggtcttcttgagttccgagagttctcggtggtcgtgtgtcgtgaagcgtcaggtcccattgttggaacttggaagctccttgaagaagaacgtgtcccggttttgaggtag

SEQ ID NO: 46171 - DNA, 632 bp, Oryza sativa
  unsure (1)..(632): unsure at all n locations
  Clone ID: PAT_MRT4530_49063C.1
nnnnnnnnnnnnnnnnnnnnnnnnnnnnnnnnnnnnnnnnnnnnnnnnnnnnnnnnnnnnnnnnnnnnnnnnnnnnnnnnnnnnnnnnnnnnnnnnnnnnnnnnnnnnnnnnnnnnnnntgtgcggtcgaggcagtgcactttcctggtgggagtattccctctatgttggggcgcctcatttttttttttttttttttttttttttttttttttgtcaaacaagaggaaaagtctgtgctaattttacaaggcagagttcatagagatcattaaccgtacatattcatttcagaaatcaatcaaacggatattcctcagatgtctgaattggctgaggcaatcgtgctacacatggtttgcttcctacttgtgcggacagcaggagagaagaagaaattgacagcaggcgagcctagcagaggaggaagaaaggaagaagaacaaactaacctggacatcgccgtgcagaccgtcgtgtttgccgcaacggcaaagcccctgcggctgcggcgaccttaatctcaattttgtccccgccaccgccgtttccgccaccgacggtcggaaccctcccgctaccgttcacccttccgtgctgctgctgttgctgcttgagcttccttccgatct

SEQ ID NO: 46172 - DNA, 550 bp, Oryza sativa
  unsure (1)..(550): unsure at all n locations
  Clone ID: PAT_MRT4530_49064C.1
tttcgacaagactggaactccacgcggtggcggccgctctataactagtggatcccccgggctgcacgaattcggcacgacgtgttcatggaccacttcacgaatgactacaacgacaaccaccccaacgtcacgcacgtctcggtgattggcaacgctggtggtgacaactggaactccatgactgatgctgacaaggctcctttcgtgaccaatgctgacaagctcaacgctgactacaccaacaatattgacgcctacaacaacaagcatgcatgaggcccggctacctcaggcgactctgacaagtccaactccgacgtgaacaccacgactacggcatctgtgacaagggggggcccggtacccaattcgccctatagttgagtcttattacaattcacttggccctcgtttttacaactctttgactgggaaaaaccttggcgtttaccccaactttaatcccccttgcaaccacatcccccctttcccccagctttggcctttattaaccaaaaaaggccccccacccnattccccttnccca

SEQ ID NO: 46173 - DNA, 850 bp, Oryza sativa
  Clone ID: PAT_MRT4530_49065C.1
ccccttcgcgctcgcaccccgaggcccccggaaacagaaagaaatcgcactcatggcgaagccgcagcttcttctggtcgtcgccgccgccgcactgctactcgtcgttgcagcctccgccaagaaatccggcgacgtgacggagctccagatcggcgtcaagcacaagccagaatcctgcagcattcaagctcacaaaggcgacagagttaaagttcactaccgtggaaaacttactgatggaacagattttgattctagctatgaaagaggtgacccaatcgaatttgagttgggcactggccaagtgatcaaagggtgggatcagggcattctgggcatgtgcgttggcgagaagaggaagctgaagatcccttcaaagctcggttatggtgctcaagggtcaccgccgaccatccctggtggagcgactctcattttcgataccgagcttgttgctgtcaatggcgagccagccagcaaatccgatgaggacgatgatgacagcgagctttagatagccaggatggttcacatcttacgcgccaaaacaaagtctagttgtcgaatcaaatagtgagtagtgaaatgcaatgcatttcaaattcaggaccccatagagaaatcaactctctttttttttcaccatgaccttatctgctattttataacataagcttctatttaacttttagcctttctgaacaattgcatgatctgtgatgcatcttttgttccaaattgtagacttgttttgcgcttcgttttgtttggaaaataaatacaaacataactgctgtgccggtttggcttctatgtgtgatatagcatccgaattgtatgaagttcc

SEQ ID NO: 46174 - DNA, 580 bp, Oryza sativa
  Clone ID: PAT_MRT4530_49066C.1
atggcgagtcttcctcctgctccgaaggaggtgcttgaggcagcatggggacgaaggggagccaggcgtgcattgccattggatccagaggctgcgtcctccgcttacggagatgcgggatcgccgagaggagtggagaagggggcaggcggttgatggggaggaggacgtggcggcggtggcgggtggaggtgacgcggcggagagggctggtggcgaggagaacgtggcggcagtgacgggtggaggcgcgacgacgtgaggcgactcgctggagaagggagcgggggaggaggatggctaccgagggggctcacaaggcggcgtggagatgcgggcgggggagaaggtggcgatggcggggagacgggcttcgacggagggagcggagaaggcaacggcgctggagggggaggagacgcgaggacgggcgacatagatggcgagggagatggacggcgacggaggcggggatggaggggaatggcgtcgggatggagtgaaatggcgacgatgcgatacgaatccataggatagggatagggtgagtaagagactgataatatacgataatacccta

SEQ ID NO: 46175 - DNA, 597 bp, Oryza sativa
  Clone ID: PAT_MRT4530_49067C.1
atggcgccggtgatgagctcgccggggcagcaggaggcggtggcgtcgcccacggcggcgccgaccgctgccaggccgtactacgggtgcgtgttctgcaagcgcggcttcaccacggcccaggcgctcggcgggcacatgaacatccaccgccgccaccgccaccgcgccatgccgtcgcggcggcccacggccaccggcacaacgtcgatggtgtcccgggacgacgtggactgctataaccagcaccgctacctggagtactctcctcctcctcctaccccggcgccaccgccggtgacatctccgccgatgagcagcagcttcgccgccacgtcctacgccggcggcacggcaacggtggccggagtggacggggaagccatgcgcgctgcaggtagcagtgatagccatatcagggagctgagcctgcttggtggcgcagactctagtactgatcgtgatcatgacttgcacctgcgcctcgggcgccatggccgcggcggcgacgggtcgccgcgcacgccagaaggctcgccggagaggaagccggacctggacttggagctcaggctcgggcgccgtcctcggcattga

SEQ ID NO: 46176 - DNA, 529 bp, Oryza sativa
  unsure (1)..(529): unsure at all n locations
  Clone ID: PAT_MRT4530_49068C.1
cttgatggcgacgtcacggccggtgaggaggtcgacgccggcctccccgctccccttgcttgcctacctcatccctcgatggcggtgccgcctccgtgcctgtggcttctgcaatggcggacgagagcaatgngcggcggcgcgtcnccagtcgccagccgccgtcgtcgtgtcgcccgtcgatggcccacgaggatcgtcggttttcacaacggcaagaccttcaaccaggttgagatcaagcctgagattgattggccactacctcgcagagttctccatctcgtacaagccagtcaagcacggtaggcctggtattggtgctacccacttcctcacggtttatccctctcaagtgagagatcatctgcagctgtttgcgcttccagtatgtagcttgagctgtcgaacaaggaactccaaagtactttattaatagcgtgtccaccgagcagccactttttgaaccttggttaatctgatgttatttccccagatattttgaagttatatccaacatgttatttct

SEQ ID NO: 46177 - DNA, 397 bp, Oryza sativa
  Clone ID: PAT_MRT4530_49069C.1
aagatcctggcacaaagtacatgatgccacgaaggtcccttgcctgtgaggattttgggagggaaagacctaatgtgggtgtcacaaccatggaggagtactgccaagttgatgggtggaaaagatgacattgaaaatgggcaagcttttggggcatcggatacaaacactggaccatggtggaacaaagtgcattaacgagcatctgccgtgccccgagttaacgcaacattgctgtgcgctggtggtctccgaaagcgagctgaggaggtatcaatctgccatgatggggttataaaccacaattctaaaagacgatgtagaggactattggtatggttcatgataaataaatgggcactgccagaataatttacctgggaaaaaaaaaaaaaaa

SEQ ID NO: 46178 - DNA, 1078 bp, Oryza sativa
  Clone ID: PAT_MRT4530_4906C.1
atgcgttgactagaggaaagctacattacaagcccagccgttgcccacgctggcttgtgggctgacgtcagcacgggggaaggaggcgcggcgccgacatgcggggcccaccggtcagcggctcagggggggcggttcaccgtggaccgggaccacgcgggtggtccaccgccggtccacgggaccgacggcccagatcgccctcggggctgatcggacgggcggtggcgacccggctcggctcaagaccggccaagcggccacggcgacggcgacggcgcgcgcacacgcgaacgcgttgccggcgacggcaaccggcggcggaggcgacggcgcaaaggcgacgcgaaggcggctgcgctaagcggcggctaggaaggagagggaggggaatagatgggagaggaaacctcaccgagggtggccggcgcggaggaagacgacggcgaacggcgacggcaagccacgggaggacgacgacaacgggcggacgggattcggggtgccctaaggaaggagaagagagagattagagggagggagatgaaccacggcgaccggcatccatggccgaaggcggcggtagaggttgaactcaccggagcgcgaggggatgcgaattccggcgacgaaactcgacggggaaggggcggccggggtgccggacgtggccgggagaggcgagatttcgccggccaacgtggggagtgggggaggagagagaggtgggattcgaaaatcgaatcccggccatctcgggcgcgggcgcgggcgcgagagagaggggaaatgggtgcgggagatgcggcgcacgcgcggacgtggctgacgtggcccggaggaggcggaggcgtggacgcggcggcggttgcgggcgcggcggcgccggctggaggaaggagacgggcccgacaggtggggcccacctgtcggcgtcccggggagagagggaggggcggcttgggccggcccacaaggaggagggcgcgcgcggcggggtggactgggccgacggcccaagaagaggaaaaggaggggaaaggaaaaaaagaaaagaggaaaagaatttccctgggat

SEQ ID NO: 46179 - DNA, 343 bp, Oryza sativa
  Clone ID: PAT_MRT4530_49070C.1
ctcttgtgttcttcaactccggcagtggcacgtaccacaccggcatcgccagagggcgaagacgacacagcaccaagaccagcttaggtagacccccccagggaggctctctccttggctaaggaggaacgtgctccaccttggggcgctggcgggggcgagcgcctccactgatgaaacgggggctgctggccgatggctaagacatggcgcccggttgataagccagcaaggtcttgtgacatacgagaagctttcagaaccgcacccgaatccaaaaccaaagactgatcctagaccgacgccataacctgatgccaagccagatccggagcgaaaacca

SEQ ID NO: 46180 - DNA, 305 bp, Oryza sativa
  Clone ID: PAT_MRT4530_49071C.1
ccggccgggacccagacacataagacacctccatggggggtacaactccaagaacactccctccttatccgtactgctctgcactgatacgacggaactagcctcagtacacggccatcaactctgacgctagtggtgcttgaaggcgctactccggctgcaggaggtaaggaagcacaaagacagcgaagtcgacgggggggcaaaagcgtaccacaaggaggaacagtacaaccccagcccatgatggagagagactccatcagctagtacttcaaagggaagcaaggagaccagctttaagc

SEQ ID NO: 46181 - DNA, 1141 bp, Oryza sativa
  Clone ID: PAT_MRT4530_49072C.1
atggcgatcggcgggtgtccgatctacgtcagcgacaagccggggaaccacaacttagaactgcttaggaagctcgtactacccagcggctccgggcttcgggtgcgcctccccggccgccccacccgcgaatgcctcttctccgaccaggcgcgcgacggcgcgagggtggccaagaagacgcatgtgcacgatgcggcgcccggaacgctcaccggcgccgtgcgcgctgacgacgtcgacgccattgcgcaggtcgccgatgatggcgacggcgacgacggctgggatggggaggccgtggcgtacatgcaacgggcgcgtgagctggtccggctgccgtgcgacgccgtactgccggtgacgctcggggcgctcgattacgaggtgttccacgtctgccccgtccgcgctatcgcaatggcgccgggaggcaccgtcgttgcgttcgcgcccgtcgggctccttgacaccgtcgacgccaccgccgccgccgtggcgctcagggtgcatggttgcgaccattttggcgcctacttctcgcggaggccggcgaggtgcacgctcgatggcgccgacgtggggttcacctacgacggcgacacgaggacatgctcacagagggacccgcgtcggattaatttgagccaagggaaaactgtgatggctccggcctgcgtctccgacgagcacgccgtcgcggtgtcggcggagcggctgtggaaggcgttcatggacgcgtccactttgcccaaggcctgcgccggcttcgtcgacgacattgcggtcgaggggaacggcggtccgggcaccatctacaccatgaagcttaaccccgccgcgggtgtcgggagcacatacaagacccgggtggcggtgtgcgacgaccgcagctcgcgtcctaaagtcggaggtgctcgaggcagaaagcaaggtgggcaagctcaagtcgcactcgacggagacgaagctggaggccaccggcgatggctcctgcgtggccaagctcaaggtggagtacgagctcgccgacggcagctcgctgtcgccggagcaggagaaggccatcgtcgacggctacttcggcatgctcaagatgatcgaggcctacctcgccgctcaccctgccgaattcgcctga

SEQ ID NO: 46182 - DNA, 434 bp, Oryza sativa
  Clone ID: PAT_MRT4530_49073C.1
tttttattcagcccgacggccattgacaagggagctatgaggccggcggaccgtggagagctaccacgcccgggtcgcgcatcaggctcgggccctagcgggaccgcgcggctatcgacattactcagcgaccggctggatgcgacgcactgtctagctaacgatggatgctgactgagcggctggtatgcatagtgccgcgcaccacacggtgggccaccatggctgtgaaagcaaccctgatgaccattggcgagaatcaaccgaacgtgcagtactagggggagatcactaaggaggacggccatcaggtacggatatctaacctggctacgacggtctacgctgaactcacggttcatatcggtcggtggtcaggagaactcttgctgagctctgattcacaacgaccggatgagcctatgtcgagggat

SEQ ID NO: 46183 - DNA, 3053 bp, Oryza sativa
  Clone ID: PAT_MRT4530_49074C.1
cccgcccgtccgcccaaagcacaagcacaagcagctctagctagctacaggcatcagtggtcagtagagtgatcagttgcaactagctagctagttagattatatcttcagtgatggctccggcctgcgtctccgacgagcacgccgtcgcggtgtcggcggagcggctgctccctctcttttgaggagggcaccgccatttagttaattagtagttgttaattatcttcactaaccttaattaccctcacgcaaagcactctctaatcctcctcggcgctcgcataatcttgtatccctcatctcagattatcatcacctcgccgtgttagaaaaaagggagtaagttcgttttatcgtcggatttggtgagagttcgccggagtagaagaagatgacggtgacgccgcagatcacggtgagcgacgggaggctggcggtgcgggggcggacggtgctgaccggcgtgccggagaacgtgacggcggcgcacgcgtccggcgccgggctcgtcgacggcgccttcgtcggcgccgacgccggcgaggccaagagccaccacgtcttcaccttcggcacgctccgggaatgccggttcatgtgcctgttcaggttcaagctgtggtggatgacgcagaggatgggctcctccggccgcgacgtcccgctcgagacccagttcatgctcatcgaggtccccgccaccgccgccggcgacggccacgacggcggcggcgacggcgagccggtgttcgtggtgatgctgccgctgctggaggggaagttccgcgcggcgctgcagggaaacgacgacgacgagctccagatatgcatcgagagcggggataaggcggtgcagacagagcagggcgtgaacatggtgtacatccacgctgggaccaaccccttcgacacgatcacccaagccatcaaggcagtggagaagcgaatgcagacgttccaccacagggacaagaagaagatgccgtccttcttggattggttcgggtggtgcacatgggacgcgttctacaccgacgtcaccgccgacggcgtcaagcagggcctccgcagcctcgccaatggcggcgcgccgccgcgcttcctcatcatcgacgacggctggcagcagatcggcaccgaggacgacgacacggacgaacaccccgccgtcgccgtccaggagggcgcccagttcgccagccggctcaccggcatcaaggagaacgtcaagttccagagcaagaacggcggcgccggcgaggacacgccggggctgaggatgctggtggaggaggtgaagggggagcacggcgtccggcaggtgtacgtgtggcacgccatggccgggtactggggcggcgtggcgccggcgccggcgatggagcggtacgaggcggcgctggcgtacccggtgcagtcgccgggggtgacggcgaaccagccggacatcgtcatggactccctctccgtgctcggcctgggcctcgtccacccgcgcaaggtgctcgacttctacgacgagctccacgcctacctggcgtcgtgcggcgtcgacggcgtgaaggtggacgtgcagaacatcatcgagacgctcggcgccggccacggcggccgcgtcgcgctcacgcgcgcctacaaccgcgcgctcgaggcgtccgtggcgcggagcttcccggacaacggctgcatctcctgcatgtgccacaacaccgacatgctctacagcgcgcgccagaccgccgtcgtccgcgcctccgacgacttctaccctcgcgacccggcgtcccacaccatccacgtcgcctccgtcgcctacaacaccgtcttcctcggcgagttcatgcagcccgactgggacatgttccatagcttgcacccggcggcggagtaccacggcgcggcgagggcgatcggcgggtgtccgatctacgtcagcgacaagccggggaaccacaacttcgatctgctcaggaagctcgtcctccccgacggctccgtgctccgggcgcgcctccccggccgccccacccgcgactgcctcttctccgacccggcgcgcgacggcgagagtttgctcaagatatggaacctgaacaattgcggcggcgtggtcggggtgttcaactgccagggcgccgggtggtgcagggtggccaagaagacgcgcgtgcacgacgcggcgcccgggacgctcaccggcgccgtgcgcgccgacgacgtcgacgccatcgcgcaggtcgccggcggcgacggcggaggctgggacggggaggccgtggtgtacgcgcaccgggcgcgtgagctggtccggctgccgcgcggcgccgcgctgccggtgacgctcggggcgctcgagtacgaggtgttccacgtctgccccgtccgcgccatcgccgcggcgccgggcggcgccgccgtcgcgttcgcgcccgtcgggctcctcgacatgttcaacgccggcggcgccgtcgaggagtgcgccgtcgatgccgcagccgccgtggcgctcagggtgcgcgggttgcggccggtgtcggcgcctacttctcgcggaggccggcgaggtgcgcgctcgacggcgccgacgtggggttcacctacgacggcgacacggggctcgtcgccgtcgacctgccggtgccggagcaggagatgtacaggtggaacctggagattcacgtctaggatgctgctgctgccacgtggcggtgcgatctttgccctctggtgttcgtggctgagacattcccagccgttggatcattgccattgatggtttgcagcagagatggacggaccgatggagagattgtgatgtgccctcttacgacttgcaacgcggtagagggagtatgctttgctacatctaaaatgaaagaagaaaattatagtatgcttttgtcatgttatggcttgtaaaatgcaataatatgatgtaatgctatggtttatgtattattattagctgataaataaaggatggtgctcccttaaaaaaaaaaaaaaaaaaaaaaaaaaaaaaaaaaaagggggggggaggcctcgtgccg

SEQ ID NO: 46184 - DNA, 3099 bp, Oryza sativa
  Clone ID: PAT_MRT4530_49075C.1
atgacggtgacgccgaggataacggtggcggaggggaggctggtggcgcatggccggaccatcctcaccggcgtggcggacaacatcgcgctgacgcacgcctccggcgccgggctcgtcgacggcgccttcgtcggcgccaccgccgacgagcccaagagccttcacgtcttcaccttcggcaccctccgggatttgaggttcatgtgctgcttccggttcaagctatggtggatgacccagcggatgggcacgtccggccgcgacgtcccgctggagacacagttcatgctcctcgagagccgcgacggcggcggcggcggcgaggcggtgtacgtcgtgatgctgccgctgctggaggggcagttccgggcggcgctgcagggcaacgaccgcgacgagctcgagatctgcatcgagagcggtgacaaggcggtgcagacggcgcaggggacgtacatggtgtacgtgcacgccggggccaatcccttcgacaccatcacccaagccgtcaaggtggtggagaggcatctgcagacgttccaccaccgggagaagaaaaagttgccgtcgttcttggactggttcgggtggtgcacatgggacgccttctacaccgacgtcaccgccgacggccctctctctcgaggcgggcaccgccaggacaagcagctctagctagctacaggcatcagtggtcagtagagtgatcagttgcaactagctagctagttagattatatcttcagtgatggctccggcctgcgtctccgacgagcacgccgtcgcggtgtcggcggagcggctgtggaaggcgttcatggacgcgtccactttgcccaaggcctgcgccggcttggtcgacgacattgcggtcgaggggaacggtggtccgggcaccatctacaccatgaagcttaaccctgccgcgggtgtgggaagcacatacaagacccgggtggcggtgtgcgacgccgcaagtcatgtcctaaagtcggatgtgctcgaggcagaaagcaaggtggggaagctcaagtcacactcgacggagacgaagcttgaggccaccggcgatggctcctgtgtggccaagctcaaggtggagtacgagctcgaggacggcagctcactgtcgccggagaaggagaaggacatcgtggatggctactatggcatgctcaagatgatcgaggactacctcgtcgctcaccctgccgaatacgcctaagatgaagaggaatactgcctctatccagtatatcccacctagagtgagtgataattaaataatgagagccgcagaaatgtccaaattctcgtggcgtttgagtccgtgagagtaatttcgtgctttaagtttgtggttgtgtttatgtgcctttctatggtcgtattcagtgttaaagttatcattttgcttcatcaatgggtgaataaagagaggcaagtctgaatgtgttctgctaaaaaaaaaaaaaaaaaaaaaaaaacatagacgacgggtggcagcagatcggcagcgagaacgaggaggatgaccccggcgtcgccgtccaggagggcgcccagttcgccagcaggctcaccggcatcaaggagaacgtcaagttccagagcaagaacggcggcgccggcgaggacacgccggggctgaggatgctggtggaggaggtgaagggggagcacggcgtccggcaggtgtacgtgtggcacgccatggccgggtactggggcggcgtggcgccggcgccggcgatggagcggtacgagagggcgctggcgtacccggtgcagtcgccgggggtgacggcgaaccagccggacatcgtcatggactccctctccgtgctcggcctgggcctcgtccacccgcgcaaggtgctcgacttctacgacgagctccacgcctacctggcgtcgtgcggcgtcgacggcgtgaaggtggacgtgcagaacatcatcgagacgctcggcgccggccacggcggccgcgtctcgctcacgcgcgcctaccaccgcgcgctggaggcgtccgtggcgcggagcttcccagacaacggctgcatctcctgcatgtgccacaacaccgacatgctctacagcgccaggcagaccgccgtcgtgcgcgcctccgacgacttctaccctctcgacccggcgtcgcacaccatccacatctcctccgtcgcctacaacaccctcttcctcggcgagttcatgcagcccgactgggacatgttccacagcttgcacccggcggcggagtaccacggcgcggcgcgggcgatcggcggctgcccgatctacgtcagcgacaagccgggtaaccacaacttcgagctgctcaggaagctcgtcctccccgacggctccgtgctccgggcacgcctccccggccgccccacccgcgactgcctcttcgtcgacccggcccgcgacggcgcaagtttgctcaagatatggaacctgaacaattgcggcggcgtggtcggggtgttcaactgccagggcgccgggtggtgcagggtggccaagaagacgcgcgtgcacgacgcggcgcccgggacgctcaccggcgccgtgcgcgccgacgacgtcgacgccatcgcgcaggtcgccggcggcgacggcggaggctgggacggggaggccgtggtgtacgcgcaccgggcgcgtgagctggtccggctgccgcgcggcgccgcgctgccggtgacgctcggggcgctggagtacgagctgttccacgtctgccccgtccgcgccatggcggtggcgccgggcggcggcggcggcgcgttcgcgcccgtcgggctgctcgacatgttcaacgccggcggagcggtggaggaatgcgacgtcgtccgtgccctcgacgccgcaggcgaggccgaggccgaggccgaggccgccgtcgtgcgccttagggcccgtggctgcggccggttcggcgcctactcctcccggcggccggcgcggtgcgcgctggacgccgtggaggtggagttcagctacgacgccgacacggggctcgtcgcgctcgacgtccccgtgccggcacatgagttgtacaaatggaccgtggagatccaggtctag

SEQ ID NO: 46185 - DNA, 642 bp, Oryza sativa
  Clone ID: PAT_MRT4530_49076C.1
tagtggatccccgggctgcaggcaaatcatagcttttcagctgctaatcgctcagacatggttgtcggtgctgttctcaacaacttaaccgcacttacggagctgcacctagccgggaatgagatcaccaccacaggctggatttccaatttgacgtccctgcaggttattgacatgtccagcaataaactacatgagctcaacggtatttgtggcctccatcaactaaaatatcttagccttggttttaacatgatacaaggagtaattaatccatgcttggggaaattgcagcacctggtatacttggacatgggatcaaattttctcacaggtgagattggacaatatttactaagcaacttaacccaagtagaagaagtacatcttggggacaacaatcttactggcacatttgacttctcgtctttggctaacaactctgagctccacaacatcgtcctctcgaacaactgcaaactagaaatcgaaacggagcttgtaaggtggacaccgttgttccagctcgaatacttgaatctaagcaatactattgtcaacaagagaaagcaaacgggatcatccccaactttttctgtcagcccaagtgagcctctctgggattgatctctccatatgttc

SEQ ID NO: 46186 - DNA, 516 bp, Oryza sativa
  Clone ID: PAT_MRT4530_49077C.1
atggatgtaagaatgcatttcttcatggtgatttgcaagaggaagtctacatgcagctccaccaggtatgatagacttctgagcctatctggaggcaacaaggcatcaatgttcatggaagtgactacatacactggtcaacaaggagatcagttggctagcgatcaaccaatcacggtctgtacacgattgcaccaggaaaagaacaagccctgctacaaaattcatggagacatatggactactacgccgcaaccttactatgttaattctgaatttcgtgccaaggaagtggatgaacatctagacgatggtcacgaaatcgcgacgacaaggcggaaatattggagagccatcaatgaagaacttagacatcattcaagtgaaaaaatcagaatgcttctccaacacatagataagaaaatacaatcagctattaatgaaggtcgattgcatgttgaactccagaaaagtcacatgccatggataaccgatttgataagagaaatggtctag

SEQ ID NO: 46187 - DNA, 1294 bp, Oryza sativa
  Clone ID: PAT_MRT4530_49078C.1
gtttgcctactccatgttcatcattcagctcgagatctgaaagaaactactccaatttatactaatagtatgtgtgtagataggaaaatgatggagtactcgttgttgggataggcttatggcttgcatgccccaggagctgcatcaaccctacatggaccctctttggattgaagggagctctgcatcttttgtcaccctcgagcagctttactgttctggatttccatcgttctcctcttgagtcttcttgacttagcgctttttttttctttttttaaaagaaaaaataacttttttttcaggattgtgctccatgcgtatgagcatggtggtgatgatgtatgttgccagatagcagtagtattaatattgttgcaggtgtggtggagggtactaggaatttaggtggtagcagtacatacttggtcaccagtatctagtgcccttttccttgttgggaaaaaaagttgcttctatcgccatgcttatccttcctctttcggctcttctttgcacagcagctctagatcttttggtttcctgctctactggaatctgataatgctggatgcttcagaacttaggaggcttttagggctgaaacgttcaacctagttctccctatttcatcatctgcaagtatatatctttattagtttgttctatgggtagcctttgcgtatttaaagcgatttatcacttcgccgatgaatctagtttgctgttctctgaaattgctggagttcaatccttgtttgctcttgaagtcttgatagtttgcttagtgatgcactgatgaacctgtgtatatccttttcagatgaccacaaccaactgattcctattgcagctaactcaagtgtggaactagctttacgcttgaagctttcattcagaaaaaaaatagcctgcttaagtcaatttgtgctttcatgcacattctacatacggagtagtttgtgttttgactgttggggcttgaaggtgtttgttttatttcctcaattttgtgtgttatttttccactttatagccatgccacttgtctaatggatccttgtgtaatgtaatctgtactttccgctcggaatagggacttgatgccatggccaaatttcttcgttacctgtctgattgtgcaaaatgatcttgatgggttgttgtcaaaccgacatctaacctgtcttttggactatttgctgtaaactttgataggtttgacgaactgtacttccatgtgaccgatgaccatgcctggcttggtttaataaaaaaaacccatttcagcctg

SEQ ID NO: 46188 - DNA, 174 bp, Oryza sativa
  Clone ID: PAT_MRT4530_49079C.1
atggaggccacattgataatagtgctcaacttcctacttactggtgcaatcgtctttaagggtgtcgacagtgaactaggattaattaaaattgtgctccacaatggtcatgagactatggagttccatttattaaaatcatatctatcttttaagaacaatgataataagtaa

SEQ ID NO: 46189 - DNA, 1143 bp, Oryza sativa
  Clone ID: PAT_MRT4530_4907C.1
atgaatataatgtccactagttagggttttgtttattctagggtgaacaagccgagggagagggcgcgcggaccgggtccacgggagtggggcccacgcgtcagcctctcggtccacggtggaccgggagcacgcggctggcggcggtcggcgccgtgggtcccgcgcgtcagccgcacccgcgggcgcgggcggctgacggccgggcccacttggcagccgcgagggcgcgcccgaaggcggcctcgccggcacggccgacgggagcggcgcgcccgcgccccgatggtcaccgccggcgaccaccggcgcggcggagcggcgcccgagagagcggagaggagagggaagcgaaagggcggtcctcggctcaccccgggacaacgaggacggcggaaacgacggccgaagcggaggaaggcggcggcgcggttcgggatgacgagggcgacggagctccggcggtcggcgggcgaagcgaaggggcggacggggtcggcgacaacgcggcgaagccgatggaggtggcgccgagtcgggagggagcccggagcgacgtcggcggcgtaccggaggtcggcggcgacggcggagagagaggtggacgtcgcgagcacgaatccgacggcgagagcaagcggcgaacggcggaaacggaggagggaggcacggggagcaaatatatagcgccgagagggggagagcgcggccggagagggaggaaacgggcgcggagatctcggccgcccttgaagacgccggcgaaacttgcgggattaactccgaacgaatccgagggagagagagagggaaaagcgggggaaacgggagagggaatcgcggggaatgattcccccctcattatggcgcgcggggacggcgggatgcggcggaatccgcggcggcggcggcgctagggcacgggcgggcggcgggagcggcgggaggaaggcgatgacaggtgggccccacccgtcagcgagggcggcgggcgggcccgcctgtcagcggcgcgcgcgcggggggaggccgatgggccgcgggggagaggagagagagggagagaagtgggccgagccggcccaagaagggaaggggggaaaagaagacttcttttagggttttctttttataaaacctttt

SEQ ID NO: 46190 - DNA, 390 bp, Oryza sativa
  Clone ID: PAT_MRT4530_49080C.1
atggaccatcatgcatgggccatgaaaatctatggcccattttcccccgcgcttctccgttcttcggcccacataaacacactggcggcccgcgcgcacggcgcaccgcgagccctcgcaaagcaaagcatggcctcgctcgctcgctcgcccgcgcctccagcgattgtcgtcgagacgtctcgccgtctcgcgatgaagcgaaaggctttttgtccgctgcgcggctgcgcgcgggcgtcggtttcagccgcggtgtcgccgcgcgcgccgcggccggccggtgtgtcggtgcgcggccggatttttccggctcataaaaccccggggttggctatcagctacgtcgtcgtcgccgaggcgatgattgatgtcgggtgtcacgattga

SEQ ID NO: 46191 - DNA, 1254 bp, Oryza sativa
  Clone ID: PAT_MRT4530_49081C.1
cgactcctatagggcgattgtgtacatcgaggccggccgggaggaaggaacgaagcaaggcgcttaggcgcacgcacgcacgcacatctctcgagcccctcaccctccccttcttcctcctccttccgccgcattgctcgtcgccggcggcgaccaaccctacccctctctctccctctcgagcggcggcggaggcggtttccggtagtggcggcggcggcggggacaggaagaagccatgtgcgatttggtggcgagaacggggcggcaccagcagcgctacgagcatgggcgtcgactcgtggccgggtgcataccttttagatataaagataacaatgatgaaacttctgatgatggacacaagaaacttgtggaagttctcatgatcaactcccagagtggatctggtctcctatttcctaagggaggatgggagaatgatgaaactgttgaagaggcagctgctcgtgaagctattgaagaagctggagttcgaggagatttagtgcaattattgggcttctacgacttcaagagcaagacgcatcaagacaagttctgccccgaggggatgtgcagagctgcggtgttcgcgcttcgagttaaggaagagcttgcctcctggcccgagcagagcacccgcaagaggacctggctcactctcagtgaggcggtggagcggagccgttacccatgggtgcgagaggcccttacaacgggtttcaccacctggcatgagaactggagcaacggggacgaccatgtcgacccaagttcaagatgaccgcacctcaagcatcagggccaggggtcatgctctcttttaccatgctagtggtttcagaaacatgaccatttcggcgtatgtgtgctccctgatgcttcagtagttccgatcgccctatattactacctaggatgggaccaatcttagttctggaaatgtcgagatgggaccaatcttagttctggaaatgtcgagaatcgctggaattgtaagttttaattgattctcgctgctaccattatcagtcctcttggttctttatttctttttacaccatgcagtatcagctggtgtgttgccccttgtgtgtgcgcaaaaatacctgaaatcaaagaaggctttgtggatcaataagatacaatgctccttctgagttggcttgttcgtgagcactggtctccaaaagaatattgcagaaagggggtaaagaaatcctgatgttctttgtcaaaaaaaaaaaaaaa

SEQ ID NO: 46192 - DNA, 1199 bp, Oryza sativa
  Clone ID: PAT_MRT4530_49082C.1
cccacgcgtccgcccacgcgtccgccgtccctctctcatcatcatcattcatcaatcgtcgcctgatcgcctccagcgaaattcttcctccatttctctctccatcgaatctcatcccagcagcagcagcagcagcagcagccgccatggattccaaggcggacgcggagtcagccacggccagggccgcccgtcgtgtcgccgcccgtctccgccaacccctacgtggtctccgccccctccgctcagccgcccgccaagagcgccagggagaatctccgggagaagctcgacgtggtcgggaggaggttcggggacgccgcgcgcaagaccgagggcatcgtcggcgacatctggcagcatctgaaaactgggccaagcattgctgatacggcgatggggaggattgctcagatatccaaggtgatagctgaaggtggatatgacaaggtgttccaccagacgttcgagtgcctgcctgatgagaagctcaagaaggcgtacgcatgctacctttcgacctctcatggcccaatcatgggcgtcttgtacatctccactgccaagattgcattttgcagtgacagtcctgtggcgtatgtcaccgaggataataagaaccaatcttccatctacaaggtagttgtacccgttgctcagctaagatcagtcactcctacggcaagccagcagaacccagcagagaggtacatccaggtggtttctgtcgacaaccatgacttctggttcatgggcttcgtcaactacgacggtgccgtgaagagcctccaggaggcccgttcgtggcggcaaggcttcacttcaccatcacatgtattttttgtgaacatcgccgttacatgtattgatctgtccgtcgttcgtcatgcatcactgggaattcgcatgtgtcggtgtgttaaattgtctgtacagatcgctccccttgctgtgtatattggctgaaatttgtgttgcatatgcattcatgtattgtatgtagtgtgtggactagatgtgtacaaatactggattgattgttggcttgatgctccattaaagcctttctgttcgttgttcccattctaagttcaatcacatgatgagttgacgattgctgttgaatatttttggcattcccggagttgaaaaggataagaagttaaattagtgaaaaaaaaaaaaaaaagtagaaaagt

SEQ ID NO: 46193 - DNA, 318 bp, Oryza sativa
  Clone ID: PAT_MRT4530_49083C.1
aaccttttgtatggacttcatgaagacttgtaccgtgtgaaacataggccttacatccagcccacacacgctaatggcctatcagataatgaggttggtgatgaatgatagcgcgctcatattgccgaaacaatgaatcaggggggtctatgccaccgaccgtgcacaacaagttccgtctgcgccggctgctgaaaggcttcaatgactgttggaccttccatgtatctatcgttgcgaccaccgatgagagtcgccattagcatgaccgttgtggaccttacttttgatgggagttgtaccccaccacgattcact

SEQ ID NO: 46194 - DNA, 801 bp, Oryza sativa
  Clone ID: PAT_MRT4530_49084C.1
ctattctggttcatgtacggcgaacagcacaaagggcggaggcgcccaggcttcgttccccaattgggccctgtcgtgcttgcctatcgtctccgctcccggtgcgccgccggcgagccgcagccgccgcccccctctccgcgccggcggcctcctccgccctctctgccgccagtccccggccgatcccatcgccagtcggcgggcggtctccccgcgggtggggtgggggcgggacggacgatgaagccggtggtggggatcgtggtgtcgaacaagatgcagaagtcggtggtggtggccgtcgaccgcctcttccaccacaagatgtacaaccgctacgtcaagcgcacctccaagttcatggcgcacgatgagaccgaggactgtaacatcggcgaccgggttaagcttgatccttctaggcccttgagcaaaaggaagcactgggttgttgccgagattcttcgtagagctaaggtgtattctccatcagctgctgcagcagcagtttctgctcaacctggtgccacagttcaacaggcagaagctgctagcaaatcataaacatagactcctcttctgcaataaatggacactttttcgggattttcttttatgttgtgtaactgtagtatcatctttgtggctcccttcaaatgcactcgtgtttttgaaccatgtgaatggtggttatcaactcactgagggtgcatcttcaaatacttcgaaattcatggatgcaacagaccatatccatatgtagaacggaatcttctattatgaattgtattcatccaa

SEQ ID NO: 46195 - DNA, 504 bp, Oryza sativa
  Clone ID: PAT_MRT4530_49085C.1
atggcggtcgttccgagaccccatggcaagcagcgagagtgcgctgagcgccacgaggaggagcagcgccgcccgtaccaccgtaatcacgtgagacggcagtggcaagaccaattacatctacaaacggctccaggaagcaagcagtcggatataaaacaatgcaagatcaatggttatccatcaaaaaaggtgcagatagccagcgtgtatgatactatgatgcttatgatcagcactaaatcactctgcccaagcacgcaaaacaccgtcaccagagaatccccgatccccaagcctaggggggaggccgtcgtgcacatggacgtggcggcgaagacgggctggtccacctgcagtgagaagccgctccacgtccaagggttgccggccagctccctcatctcgttcgccctcctccgctccggatctgaggagggggatggcggggtggggcggcacgtcaccgccgggatcggccggaggagcgacagaagggcgtag

SEQ ID NO: 46196 - DNA, 723 bp, Oryza sativa
  Clone ID: PAT_MRT4530_49086C.1
ctcctctgcagcttatacaagtccaaattagacgcgagcgagcaatcgagcttggtgttgagttgtactcctacttgttccagtgtataaatggaggcctggcttggttgggagacgatggagtcaatcaagaagaagctcttgagttaagccagctatagcttcttcttcctctctcgatcgctactctttctctccgctccatttccttctttgatctccatcaggctaattaattatacatatatagagagatagagagaagaagaagaagaagaggaggagagatgaagaagcaggagaaggaaggaggaggaggaggaataagcaaggtggtgagggagcacaaggccaggctctacatcatccgccgctgcgtcgtcatgctcctctgctggcatgactgatccaatccaatccaatccatcaaccaacccatatgcagcaatgccacctcattctagctagtcctgaattcttcatcagtcgtcgtttatcatttttttctcttcttcttgttgtaattctctatcttcttcttcttctgatcttcaagcccgcttatatccattagctcattaccaagcttgtatatatgtctatttagtcttctaaccaatgatattatagcaagctagatatatagcttaatatttaaaaaaaaaaaaaacaaaaaactaaaggacaagccaatgcaaaaagaaccaaatccatgaaaacgag

SEQ ID NO: 46197 - DNA, 237 bp, Oryza sativa
  Clone ID: PAT_MRT4530_49087C.1
gagtataatgtacacacatttagaaggatgcagatgctattcgttattactgcatgtacagcaggaggctcatgcccaaaatgatgcgcataatacactcatgtaagttgttatgaggcccataattgaagccgatgcaagcaactcactggcctcctacgagtctggacacagagttccttgaatatgcgtttgcctgtcagatggatgatacgatgatggttatgattctgggac

SEQ ID NO: 46198 - DNA, 390 bp, Oryza sativa
  Clone ID: PAT_MRT4530_49088C.1
atggcgcagctcgccatggccgccaccgggcaacccctcccggggaggtgcgacgatctgggtttaccggggccgtgcaccgccgacgagtgccgcggcatgggcggcgactccactagggcctcctgcaacaacgccggcaagtgttgctgcccggcgaggaacgccctggtctgcgagcgttacgatcactgcagggaccgcatcgacggatgcaggaagaaatgcgaggatgactgggctctcagccccgccggagcctactgcaaggatggctccggcaatgtcagggacagctgctgctgccgtcccaatgcgaccgtcgccgtcgacgacgacgtcgaccaccatcgccgtatccaccttcaccagctcgatctccgtcgttga

SEQ ID NO: 46199 - DNA, 451 bp, Oryza sativa
  Clone ID: PAT_MRT4530_49089C.1
gtaagcccaaagtcatcatcggcttagagtcagtatcgacttcagagttatggaatcagtcgatgggagtcgtcaaatcgccagcaaccgtgctttcgatggacataatctctagcctgcttcttaattgccaataagggtttcatcggggtttcagccgatgagttatctggacgttgcatcagcttataagaattgcatccgattgctaattggattatgttattgttatattatattattgtcaactgattgcctttatatcattatttacatcaagtatcagaatctatattggacatatagccgatagctcaaaaccctatcgctatcggctgggtcaaactgactggcacgcccgcatatcatcatatttggacctgcgctggagttaagcatatctcccaggccaatgtgtgtttttcgcatcaacaacgatgtgttttataaa

SEQ ID NO: 46200 - DNA, 222 bp, Oryza sativa
  Clone ID: PAT_MRT4530_4908C.1
atggagagtattgaaatccttcaatgtcagagtttgtcgaccttgggtggcctaggagcacttgcttccttgaaaatactgaaaatacagcagtgcactcatctaactgctacatcttcagaaacttctgcctcactagaagacttgtatctaatggatctgaaatgcttgagttgcctcaggaatggttattgcagaatagttctcagttggaacatatag

SEQ ID NO: 46201 - DNA, 753 bp, Oryza sativa
  Clone ID: PAT_MRT4530_49090C.1
ttttttttttttttttttgatggcattgcaggaaagcattagaatcaatcaagcagagctaatcaagagctctggaagataatgtcggtacattcgtccatgttcgtgttagggattacatacattaacaacaatagcaattctctccaaaaactattgcgtgtcctgagaagaactagacagcccgcaaggcggcaagcgacgttgtgttcttgttggctgccaagccatccgtggatgatacagttcaggtgattttaatctgcacaaagctggtagtctcatctttgcaggagggggctaggaaaaatctgagcctttggatgcccaccatttgttactgcgagagctacgcacgcgctgaaaccatctctcccaagaagcgttctctggaccaatggtgacaggaagaagcgggtcggattttccctctgtacttgtgatcactccttggcatgcagcagatgccggttccatggtttcaagctcgttcagttcatcctgcagcgactggagctcctggtcgaggcgggcgatggcggcggagaggcggtgcttcccgacgtaccccacgctcctcatcgccgcccctccccccacatccgtcggtcgccgccgctgctgctgctgctgctgaccggaaaccggcctcgccgccctccgctccacctcctcctcctcctccgcgtcgtcccgcagatgattccgccgcggcggctgctgctcctcctccccgttcgcctcccccctcat

SEQ ID NO: 46202 - DNA, 174 bp, Oryza sativa
  Clone ID: PAT_MRT4530_49091C.1
atgtatcacccaccgtatttctacggcgggatgcccatgatgctaccagctctagtcattgccgtcgctagcgttgagcacgtcgcggtggacgccctctacgtcgccgtcaacatgcactaccccggcatcgtccacggcaccagccaggaccaggccagcctaagggattaa

SEQ ID NO: 46203 - DNA, 1170 bp, Oryza sativa
  Clone ID: PAT_MRT4530_49092C.1
tcagcatacagactctacattttctgttagaagatcaggttccacgaaacgcctatccgatattagactggtcagggcttgaatcaatgaatgcggatcaaaaataatgcccgtctttccatcgtgtatagagtccacagtaaccacatgaaagattcctttagaagacaagttttttatatccaaaggaatttggcctccttttggtaccaataaagcattcacatagtctttgggaagattctttagacttttgtcaggatatccatatgtacggtttagagaatcagtaatggcagtcacaaagccagaagcaggcaacccagttgtttctctgtcatgcgacccattcaaaagaagtaccttcggaatggatcttgatgctatagtttcaccaatgccacgcaataccaatgatggacagactgatgtaaagagtgatcccatagcatatacaatgcagtccaccttacttaactgctccaaaactgtacggttagcttcaggaaatacctcatgcaacaggttgctgccttcacttgacatgtaaaagacacgcttaatccttgaaggaagtgcactacatgaattacaatccttgttaacaacttctttacgtccattgcttggatgtgatatttcattttgacctcggatgatagttccatcccatagttcgcatcccagtgtaagcctgtcatttgtggatatcactggaagaacaagactttcagcagggatctgtgacacacgtgagaacaagaaaatcgcagcatccagagactggaagaatatgcgtgccccagcaaaaaagaaattcccaatgctgccattggtgaagcaaaacatttcagctgaccgtcgaagtatctcattatggaagtagactaaaaaggcacgtattgtttctctgtatggctgtgagacaccatcccacaaagcgtgctctccttctacaatctggtacctgtcaagtacacaaccaagcactcgcacaatctcagctgtgcttccaccatcatcggaaacaggaagaacatgtgcaactcgagtcgtcactttcttcagctcttctacaacaccattaaaagcggttcctcctgagaagacgagcagcgacgggggagcaaccgccgcagcggcagcgtcggctccggaggcggaggccat

SEQ ID NO: 46204 - DNA, 597 bp, Oryza sativa
  Clone ID: PAT_MRT4530_49093C.1
ttattttcgtttttctcgatgagttcttatttcgagttgggctgcatcggcttcgatcaccgacgaggggtaaggcttgttatggctgtttgcatcagcagggctagggcctcgacactctaatcttatcgatgtaaacactaagtcgtgcttagaaccataatctctagcccgctttttgattgtcaataagggtttcatcggggtttcagctgatgagttatcaggacattgcatcggtagctgcttgtcctcaatttgttctgcaacctgccttcctccaactccttcaccttcaccttcaccttcaccatgcaaatctatcacctgccttttgcctctcgatctagagcaagcttgcaaataccctctcttaatcaaatattgctcataatattcctcccaataccaaaaatcacatccagtaccattccgctggtgacttgggcaggtgtaaaagatgcgtccgtagttctcggacgtctttgccttacgccgaacgatcgtcttcaactcgcattgcgggcattgaatcagagggagcgcaggcttccccatccgccaagacgacaccgatgcagtatatcccccatccat

SEQ ID NO: 46205 - DNA, 373 bp, Oryza sativa
  Clone ID: PAT_MRT4530_49094C.1
tgttcccccagcttaatcgactcactataggaaactgtacccccagtaccgtccggaattcccggtcgacccacgcgtccgctccccatgtcgaacattggtgaggcccatgcgttgccgtggcgcggccagcccgcggacgagcaagtctggcaagactgctgccggcagctcgccccgtcgacgacggctggtgcaggtgcgggcgctcgatcacatctgtcaggcatttacagggaagctcggcgccaccgaggccggccaccccatggcccgaggtgtttcccccgcttcccgaagaagggaacttggagcgccgcgcgacctccgcgttctgccacttgaccatcccccaatgggccctgttgtgtct

SEQ ID NO: 46206 - DNA, 372 bp, Oryza sativa
  unsure (1)..(372): unsure at all n locations
  Clone ID: PAT_MRT4530_49095C.1
gtgatgcccaaccgggtgtncgtncgaacnctcgtcggcggattctgttcagaggagatggtcgcagcgcttatnctgtagtggagcgtgtggtcagcgatgggagtgtgtcgagcgaccaatgctacaatgtgctgcttatttncctgtggagggttgggatggatggtgaagctgaagggcttgtncagaggatgatgaagaaaggggtgcggctgagccctcttgcggccagtgttatggtcagagagcttttgcaataaggaataggctattgtgatgcttgctactggataggagtcatggagagaacggggtactctgtgacacttnatgtcaacaantggttttgtttgcttaggcctgtgtgtt

SEQ ID NO: 46207 - DNA, 671 bp, Oryza sativa
  Clone ID: PAT_MRT4530_49096C.1
gcacgaggcccacttttcatctccccctatatcttctctgcctttcccaccgccggaggaagacgaggcgccgggtgaaggaaaccgaggtgacggcgcttggcggaggaagctaaggtatcgagcggagacggagtcaggcggagcggcagcagcagctcaagaagtagtggcgccgggtggagggagccgagccgtcgggcccatgcggcgacgacactaggcggagcggcggctagatccaccggtgtaccacccttcctctcctcccccaaagcagcggcgaggtcggcggcgcgggtgtggatctggaggtgacgagggcgtcccaagcgacgaaggcaacagctcgacgtcggcgccacctcacctttttcacccctcttcttcgtctgtggccacggcgtcgtgtcgccggtgcgatctgaagcgctcctcacctcatcgccctcctccactgtccaatatgctcggcagcgtggagcgcggggatggcgacaaagtgcctctcctcggtcctctctctcccttcctgtggtaacatttggctccgcgttcttcagagcaacaaaatagttcgacgtgtggtggaatctccaacctatctggctcgggctgaatgccacgtcaatgcacgtatacgggccccacaggataggcccacggtccat

SEQ ID NO: 46208 - DNA, 214 bp, Oryza sativa
  Clone ID: PAT_MRT4530_49097C.1
atggtggccagaggcgatggatatggcggcgactttgggtacgcggggaagacggtgctcgggcggtggtttgcgggaaatggagtggtggtcgtggtgcggagtggcatggcgaagccggaggctctggtggtgcagcgcggtggcggcactagcggcagtagggcttgcccagaatacgacagcaggcggtggagctcggggttgcggcggg

SEQ ID NO: 46209 - DNA, 344 bp, Oryza sativa
  Clone ID: PAT_MRT4530_49098C.1
ttttatggctattcctcttagagatccatatgcaaatatgattaccacattgatttcaaatggatctagcgtcttcatgccaactctaatttggatgatgttggatttgttggagatcttatctcatcacctttcaaacgtatccagtctaatatcaaaattcatctcgaggaacatcaaccgcacatcacggttggtacaatatcgtttgtggtgttgcgattgcacagcgttctgaacttgttctagttggtagccacgtcgcaaacatcacagccaatcaaaatgagagttatcccctcaccagaagatcaggccacaagagagaccacaatcacctctcc

SEQ ID NO: 46210 - DNA, 620 bp, Oryza sativa
  unsure (1)..(620): unsure at all n locations
  Clone ID: PAT_MRT4530_49099C.1
ggggctgcaggaattcgggcncgggctcaagtctagattagatagatggtttaagtctatagcaaacagcaaagntagtctnttccaaagctttngctgcgcgaccgggccccaatctcgcacaggccccagccctgtccgtgattacccctccttcaatgcgacgcctctatgggggtagcggcgaccccggctggtgccgtccggtcttcccgcggcgccccgcccggccgcaattttaatatgtcggttaccgaatcattagttttgggacccgacagtttcctatatgcaggtaattttcagggcaacatattggcttcgacagtgggttcaactaccaaagtatgaggaagatggagttttcctgaatgttgcatgtcgtaatcttgaaaccatggttatgcaacttttcgcccaccatggatggagattcacccatagactggaatattgttttccttgtcatgttaggtcttctttaaattttggttggttgccttgctttattttggactacgtctttttaagtttgcctactttttgtaataattgcctgtagctcttcggaataaagcccgggatgttacattccattattaaaaaaaaaaaaaaaaaaa

SEQ ID NO: 46211 - DNA, 326 bp, Oryza sativa
  Clone ID: PAT_MRT4530_4909C.1
ccggcggtcttcaccgacggcgaaggggcgcacgaggacgggttcgcgacggcgaccacgatggcgacctccccgatcgacggagacgactggagcgacggcggagcacggctggagcggcggcgacaacggcggcgcgaggctacacggggctagggctctatcggcaacgacaggcgaaggcgagggtggcgacgggtagcggcgactccgggggtccttttaaaggggctaggaggcggcggcgaaggcccacgatgaccggcgacgctatggaaacttcggggttcggaggaaagagaccgatccgattcgacctcgaataa

SEQ ID NO: 46212 - DNA, 1862 bp, Oryza sativa
  Clone ID: PAT_MRT4530_490C.1
gcacgagggcccgcggcaatcttgagcacacagccacacacacacaccatatcgctcaagttccaatggaggtacaggaactagtaccgtcgccatggccgtcgtcctcgtccttcctagtgctcgtgctggccaccttgctcttcgtcgccgccttcctccggcggcgacagggagcgcggcgcaagtacaacatcccgccggggcctcgcccatggccggtgatcggcaacctgaacctgatcggcgccctcccgtaccgctccatccgcgacctctcccggcggtacggcccgctcatgtccctccggttcggctccttccccgtcgtcgtgggctcgtcggtggacatggccaggtacttcctgagggccaacgacctggcgttcctggaccggccgaggacggccgccggcaggtacaccgtgtacaactacgccggcgtgctgtggtcgcactacggcgagtactggcgccaggcgcgccggctgtgggtcacggagctcctcagcgcgcggaggctggcgtcgacggagcacgtccgtgccgaggaggtgcgcgccatgctgcgcggcctgagccgccgcgcgggcgccggcaccgccgtggtgctcaaggagcacatgctcatggtgacgctcaacgtcatctcgcgcatggtgttcgggaagaagtacatcgtcgaggagggggagggttcgtcgccgacgacggcggaggagttcaggtggatgatcgaggagatcttcttcctcaacggcgtgttcaacatcggcgacatggtcccgtggctggggtggctggacccgcaggggtacatcgggaggatgaagaggctgggcggcatgttcgaccggttcctggagcacatcctggacgagcacgtcgagcggcggcggcgagagggcgacgggttcgccgccagggacatggtcgacctgctgctgcagttcgccgacgatcccagcctcaaggttcccatccagcgggatggcgtcaaagcattcattctggagctgatcacgggcagcacggacacaacatcggtgtcggtggagtgggccatgtcggaggtcctgaggaatccgtccgtcctcgccagggccaccgacgagctggaccgcgtggtcggccgccgccgcctcgtcgccgagggcgacatccccaacctcccctacctcgacgccgtcgtcaaggagagcatgcggctccaccccgtcgtgccgctcctcgtcccgcgcgtctcccgcgaggacgccttctccgtctccgtcgccggcgccgccgctagctacgacatcccggcgggcacccgcgtgctcgtcaacgtgtgggccatcgggcgcgacccggcggtgtggggggacgacgcggaggagttccggccggagcggttcgccgccggcggggagcgcggcggcgtggacgtgaaggggcaggacttcgagctgctgccgtttgggtcggggcggcggatgtgcccggggttcggactggggttgaagatggtgcagctgacgctggcgaatctgctgcacggcttcgcgtggaggctccccggcggcgcggcggcggaggagctgagcatggaggagaagttcgggatatccgtctcccggttggtccagctcaaggccattcccgagcccaagctcccggcacatctctatgatgaataattcatgcactgacgggccgcatgcatgtatgctcgtatgtgcgctctctctctctctctctgagttcatagttatattttactgcagagtacttgtttatttatcgatctacacgcagatgataaacggagtacagtataatgaaaaaaagtttttctttttttttaaaaaaaaaaaaaaaaa

SEQ ID NO: 46213 - DNA, 233 bp, Oryza sativa
  Clone ID: PAT_MRT4530_49100C.1
ggcaaaccaaaatttttttaaaagttgggaccggcacaaaaattttcaccggcccttaaaaaaaatgcccacgttcggattgggggaataagagttcttcaaagaaaacaaaggggagggttccgggagaattcaaactggttccgggattcgttcaaacagccaggttgcacgatcgattattcgttgggttgcatgcaaagttcctacttaacgttttaacaaattaaccg

SEQ ID NO: 46214 - DNA, 2153 bp, Oryza sativa
  Clone ID: PAT_MRT4530_49101C.1
tgcggaccgacgaggccgcgaacaccaccggcgttggcgttaacaaaggccaatgatcagcaagtttttggctacctcctatcgcctctgtcaagggatgtcatgatccaagttgccatgtggaaaacagcgactgaagcatggcgagcaattgagaagatttactcctcttgcactcgcgcgaggtcagtgaacacttggctcgccctcatcaacaccaagaagggaaccatgaaggttgtagagtacgttgccaggatgaaggcccttggcaactagatgggagtaggtggccggccccttgatgaggaggatctagtccagtacatcatcaccggattagatgaagatttcagtccaatcgtctccactctgtgcacaaagactaaacctatgacagttgggagttgtactctcaactcctcaactatgaaaccctacttgacctttaccgcaacaccagtcaagggggggctgccttttgtcacaaattgcggtaggggcattggcagacacgatggcggcaacaactccggcagcagcgacaggggcacgtcgcaaggacacggtggtggccaaggacgcagccgaggacacggcacaagaggaccggacaagcgtcccacctgtcaagtctgcttcaagcgagaacacatagcaatcgactgctggtatcgctttgatgaggactatgttgcggatgaaaaactagcagcttcagccactaattcatatgttgtagatacaaattggtatattgatacatgtggtacggatcatatcactggtgtgctggagaaactcaacacaaaggagaagtacaacagcggcgagcagattcacaccgctagcgatgcaggtattgatattagtcatattggtcatactactgttcatacccctagtcataatattcatttgaataatgtgctatatgtgccacaagcaaagaaaaacctcatttctgctagtcaattagctgctgataattctgctttccttgagcttcactttaaattattttctttaaaggaccaggtaacgaaggacattctggttaaagggagatgtaggcatggtctctgtttgatcactaagtcctttggccggtcgtccaacaaacaagcccttggagccgtcaagctatctctatccaggtggcacaactgcttaggtcgctcatttcttcctattgtcaagcaagttactagtaaaaaaaaatctccaatgcttagatgagtgagccaatcagtttgtgtataatgcttgccaaaaagcgaagagtcattagctaccttatgttaggtttaccagtgtgtcttaatctcctctcgaacttgtgttttctgatgtctagggacttgctctagagtctgttgggagaaataaatattacgtgagttttattgatgactttagtaagtttacatggatatacttgctaagatataaatatgaggttttgagaagtttagagaattacaagccttggtagaatgaatgtttgatagaaaaattattgccatgccggcttattggggaggagagtaatagatgctcaattcctttttctctaaaataggaatcgatcatcatttgtattgtccacatatatacccatcgacagaatgggttagctgaacggaaacactatcacattgttgaagtgggtctttctcttttgtctcatgcatcaatgcatcttaagtcctgggatgaagcttttgttgcggctacttatctcataattgttcaaccgaaaaccagactcgtccctaagagtgtttgattgtgcttattggcctcatcttcaccactataatacccacaaactttagttccactccaaacaatgtgtttttcttgggtttagtactcgccaaaaaggttttaaatgccttgatatatcttcaagtcatgtttatatttctagggatgttgtctttgatgagaacatttttcctttctctacccgtcattcaaatgcaggagcaagacttaggtctgaaatattgctagtgccatcatccttgataaatcatgacacaagaggattgctcaacacaagattaaaattgatgtgcacaactatgccatctccgtgagaccctttagctctgcatgctgcacacaccagattgtgaaaaaaatat

SEQ ID NO: 46215 - DNA, 216 bp, Oryza sativa
  Clone ID: PAT_MRT4530_49102C.1
atgcaagtgaagaaagtaccaagagaggagggctggtcagaccgcagtagtgtgggtggtcagaccggctgcgactctggcggctctagatcaccatcccagagcacagccaccggcatccaggaggccagtcagaccggggttaacccgacggtcagactagccaaggcatgccggtcataccggcttgaggccatcggtcattacccctcttaa

SEQ ID NO: 46216 - DNA, 546 bp, Oryza sativa
  Clone ID: PAT_MRT4530_49103C.1
atgaccaaaacggatccaagggaacaacaaccgcacgtcgaattcattggcagggcacataaaaaaggacaacattgtcaaagcagatccgcccctatcgcggtggcgccgttcgcaaaggccacgaccgttgccgcctccatcggggaagcgcagctgcgccgttcgttccgcatccgacggatagagcaaaatcaaggtggcctatcggactcattcctctccatccaactcctgattcaccgtggtcgtcggccgctcgctgccgacgtcgtctcctccggcgcaggcgggggtggagctgatccccgaggaagcccctcccctcgccgccaccatccccaccaggcctcgcccctcgtctccatccccaccagacctccatgccgcatcccgcatagaggtcagggcctgccgcctgcctcgacgacgtcgccttcaccgagcctttcgctaaacccactcgggactctagtacaccttgcatacgagtgtcgtcttgctctcaccgacgatggagacgacagacaagggcaccgccggtga

SEQ ID NO: 46217 - DNA, 3327 bp, Oryza sativa
  Clone ID: PAT_MRT4530_49104C.1
atggccgaacgggcagtggcgcacaacctctctccgagcgctagcggtgacgatggagagcagaacccgcgccgtcgagctcgtactccaccgtccccctctcgccgaagtcttgggcgggaggaggcgctcgaggaggtcgaaagatccgcgacctcgccacccgcgggcaatggagaaggacggcgagacggggagcgtcgcctcctcgtctacggcgatggcagcacgccccagggcgcgctccaggctgcgggcgcgctcctgcgtcacccgcccgtcgtccccgatccagagactccagcccgacgttggctggacgacgtggccgacttggtcatgacggcgcagcagcgcctaggcaccggcgggcggtcctccgccaccaaggcctctggcgctgctaccgccggctccgtgtcgtcgaggcggagggcgcggcgagcggcggctgttacccgccgttcgtccgccattccctcgccaacgcctccgacccaagaagatgtgcgtgggggaccggatgcccgcctcaatatcgagcaccggcgcaatggtcgtcgtgctgcccacgcaacggagggcgcttcctcgtccggagcgccacttcggtccgggcacgggggccagcctcccgtgtccccggtaggcggtgccggctgtcgagcctttgtggcgagccttcggaacgtccgttggcccccaaggttccggcccaccatcaccgaaaaatacgacggaagcgtcaaccccgccgagtttctccagatctatacgaccgggattgaggccgccggggggaggggggtgcggcacaaccgcatgctcgaaaagattgcctccaaggagccccagaccaccgcggagctttttcagctcacggaccgtgtggctcgcaaggaggaggcctggacctggaactcctccggttccggtgtggcagcttcggccgcccccgggtccgccgctcggtcagggcggcgggacaggaggaggaagaagaggtcggcccattccgacgacgagggtcacgtcctcgccgtcgagggcgcttcgcgggccacccgaaaggggaggcctgcgagcgacaaaaagaaggaggccggcgctcccagcagggagcgcccgaccggcaagtggtgttccgtgcacaacacctccctccacgacctcgtggactgccgcgcggtcaaaagtttggctgagcggacgaggaagtgggaggaggagaggaggcaggagcgccgtgagggcaaggccccggtggctcccgccggcaaccgacgaggtgaggccaagcagaaggccaccgccgaggacatcgacgatggcgacgatgacctggggttccaggagcccgaggccaccgtcgccaccgtcgatgggggagcgtgcgctcacgcttctcgccggagcctcaaggccatgaagcgagagcttctggccgcggcccctacccatgaggcgacgcggcgggcgcggtggtcagaggttgccctcaccttcgaccagaccgaccactcgccgtgcgttgctcggggaggacagatcgcgatggtggtttcccccaccgtttgcaatgtgaagttggggcgtgtccttatagacgggggtgcagccctcaacatcctttcccccgcagcctttgacgccatcaaggccccggggatggtgctccggccgtcccagccgatcatcggtgtgacgccgggacacacttggccgctaggtcatatcgacctcccggtcaccttcggtggttccgccaacttccgcacggagcgggtgaacttcgatgtggcggacctcagtctgccctacaacgcggtcctggggaggcccgcgttgatgaagatgccgggccccggtggccccattaccgtccatggcgacctcaaagtcgcgcttgcttgtatggagcagcgcgcggaccacctcgccgcggcgtccaagcccgcgggtggcgacgagaggctcagcacctccgtcccagccgccccgaggcagcggatgatcacgtgcgacgaggtcccggaagacgcgctcgtctccttcctgcgggcaaacgccgatgtcttcgcctggagaccggcggacatgcccggggtccccagggaggtgattgagcaccgtctcgccgtgcggccgggcgcaaggccggtccggcagaaagtgcggcggcaggccccggaacgtcaagccttcatccgcgaggaggtggcgcgacttctggaggccggattcatccgtgaggtcatccatccggagtggctggcgaacccggtcgtcgtccccaaggcgaacggcaagcttcggatgtgcatcgactacaccgacctcaacaaggcatgtcctaaggacccttaccccttgccacgcatagatcagattgtcgactccaccgcggggtgcgaccttttgtgttttctagatgcatactctggttatcatcagattcgcatggctagggaggatgaggaaaaaactgcatttattacccccataggaacttattgttatacgacaatgcctttcgggttaaagaatgcaggtcctacttttcaacgtactactcgaatttctttgggtagccagttaagacgcaatgttgaggcctatgttgatgacttggttgtgaagacgcgcaaccaagagaccttactctcagacctagcggaaactttcgaaagtctccgctccgcccgcataaagctgaaccccgataagtgcgtgttcggcgtgcccgcgggcaagcttctcgggttcttggtctctgcccgaggcatcgaggccaaccccgagaagatacgagctatagagcggatgcgcccccccagcaagcttagggatgtgcagtgcgtcaccggctgcatggccgccctatgtcggttcatatcgaggctgggagagaaggcgctacccctatttaagctcctcaaacgcttcgggccgtttacctggacggaggaggctgagcgggccctcactcagttgaaggtatacctcagttctcccccggtcctggtcgccccgaagccagatgagccgttgctactctacctggcggcaaccccgcaggtggtcagcgcggcgttggtcgtggagcgtgatgaggacaaccctcactccgcgcacccccactctgtgtcgactagacccgggagagagcagggaggagaggcccccgagccgaacagcggcccgaggcccccaacggccggagctggccctccgcctgtttgtccgatggtgccaggcgcccccgacccccaggatggccccggggccactgcgggaaggccgcgcctgtcgccctccgaccccgag

SEQ ID NO: 46218 - DNA, 4521 bp, Oryza sativa
  Clone ID: PAT_MRT4530_49105C.1
atggccgaacgggcagtggcgcacagcctctctccgaacgctagcggtgacgacggggagcagaacccgcgccgtcgggctcgcaccccaccatccccctctcgccgaaatcttgggcggggggaggcgctcggggaggtcgaaggatccgcgacttcgccgcccgcgggcaacgggggaggacggcgagacggggcgcgtcgccgcctcgtctacggcgatggcggcacgccccagggcgcgctccaggctgcgggcgcgctcctgcgtcacccgcccgtcgtccccgatccagagactccagcccgacgttggctggatgacgtggccgatttggtcatgacggcacagcagcgcctaggcgccggcaggcggtcctccgccaccgggacctctggcgctgccgccgccggctccatgtcgtcgaggcggagggcgcgggggggcgtgcggcacaaccgcatgctcgagaagatcgcctccaaggagccccaaaccaccgcgcagctttttgagctcgcggaccgtgtggctcgcaaagaggaggcctggacctggaactcctccggctctggcgtggcagctccggccgcccccgagtcagccgctcggtcagggcggtgggacaggaggaggaagaagaggtcggcccgttccgacgacgagggtcatgtcctcgccgccgagggcgcttcgcggtccccccgaaaggggaggcctgcgaacgacaaaaagaaggaggccggcgctcccaacagggagcgcccaaccggcaagtggtgtaccgtgcacaacacctccctccacgacctcgcggactgccgcgcggtcaaaagtttggctgagcggacgaggaagtgggaggaggagaagaggcaggagcgccgtgagggcaagaccccggcggctcccgccagcaaccggcgaggtgaggccaagcagaaggccaccgccgaagacatcgacaatggcgacgatgacctggggttccaggagcctgaggccaccgtcgccaccgtcgatgggggagcgtgcgctcatgcttctcgccgaagcctcaaggccatgaagcgagagcttctggccgcggcccctacccatgaggcgatgcggcgggcgcggtggtcagaggttcccctcaccttcgaccagaccgaccacccgccgtgcgttgcccggggaggacagatcgcgatggtggtttcccccaccgtttgcaatgtgaagttggggcgtgtcctcatagacgggggtgcagctctcaacatcctctcccccgcagcctttgatgccatcaaggccccggggatggtgctccggccgtcccagccgatcatcggtgtgacgccggggcacacctggccgctgggtcatatcgacctcccggtcaccttcggtggttccgccaacttccgcacggaacgggtggacttcgatgtggcggatctcagtctgccctacaacgcggtcctggggaggcccgcgttggtgaagttcatggcggcggtccactacgcctatctccagatgaagatgccgggccccggtggccccatcaccgtccatggcgacctcaaagtcgcgcttgcttgtatggagcagcgcgcggaccacctcgccgcggcgtccaagcctgcgggtggcgacgagaggctcagcacctccgtcccggccgccccaaggcagcggatggtcacgtgcgacgaagtcccggaagacgcgctcgtctccttcctgcgggcaaacgccgacgtcttcgcctggagaccggcggacatgcccggggtccccagggaggtgattgagcaccgtctcgccatgcggccgggcgcaaggccggtccggcagaaagtgcggcggcaggccccggaacgtcaagccttcatccgcgaggaggtggcgcgacttctggaggccggattcatccgtgaggtcatccatccggagtggctggcgaacccggtcgtcgttcccaaggcgaacggcaagcttcggatgtgcatcgactacaccgaccttaacaaggcatgtcctaaggacccttaccccctgccacgcatagatcagattgtcgactccaccgcggggtgcgaccttttgtgttttctagatgcatactctggttatcatcagattcgcatggctagggaggatgaggaaaaaactgcattcattacccccataggaacttattgttatacgacaatgcctttcgggttaaagaatgcaggtcctacttttcaacgtactactcgaatttgtttgggtagccagataggacgcaatgttgaggcctatgttgatgacttggttgtgaagacgcgcaaccaagagaccttactctcggatctagcggaaactttcgaaagtctccgctccgcccgcataaagctgaaccccgataagtgcgtgttcggcgtgcctgcgggcaagcttctcgggtggtcagcgcggcgttggtcgtggagcgcgacgaggacaaccctcgctccgcgcatccccaccctgtgtcgactcgacccgggagagagcaggaaggagaggcccccgagccgaacggcggcccaaggcccccgacggccggagctggccctccgcctgcttgtccgacggtgccaggcgcccccgacccctaggatggccccggggccactgcgggaaggccgcgcctgtcgccctcggaccccgaggtcgtcggcacagaagccgagtgcgccccgcgcggcctctcggacgaagagcgccctggagatgcggcccctggcgaagaggatcggccccgccgaaaggaagttgcgccattatttccaggcgcatcgagtcacggtggttacgtcttaccccctcggccaaatcttgcataaccgagagggtactggacgggtggtgagatgggcaatcgaactctctgaattcgatttgcgctttgaaccacgccacgcgatcaagagccaggccctcgccgactttgtggcggagtggaccccagctcccgagcctgtctccacccccgaggccagctcgggcccctcgcagctgcctcacaccgcctactgggtgatgcagttcgacggctccctgtctcttcagggcgccggtgcgggggtcacgttgacctcgccgagcggagatgtcctcagatacctggtccgcctcgactttcgggcgaccaacaatatggcagagtacgagggactccttgcgggactcagagtggcagctggactggggatccgccgcctcctggtgttaggcgactcccagttggtcgttaaccaggtctgtaaggagtaccagtgctctgacccgcagatggacgcttacgtgcgccaggtgcggcgtatggagcgccatttcgatgagatagagcttcggcacgtgcccagacgggataacgcggtcgccgacgaactctcaaggctcgcttcctcgcgagcccagaccccaccgggcgcctttgaagaaaggcttgcccagccgtcggcgcgacccgaccccctaggggggacggacgcgcctgaacggcccccgaggcccgtcggagtccaggcctcggggcccgaggggagcgctcccagctcccctagattgattgcttggatcactgagatccaggcgtacctcgcagataagactctacccgaggaccgcgaagggagtgaacgcgtccggcgcatctccaagcgctacgtgctggtggaagggaccctctatcggcgcgcggctaacggagtcctcctgaagtgcattcctcgggaacaaggcgtcgagcttctcgccgatgtccatgaaggcgagtgcggagcccactccgcctcacgcaccttggttggcaaggcctttcgccagggtttctattggccgacggctctcaacgatgcggtcgacctggtccggcggcgggccccgggcgggttcgagtatctgtatgtcgctgtcgacaagttcactaagtggcccgaggcttatccggtcatcaagatcgataagcactccgcgcttaaattcatcaggggcatcactgctcggtttggggtgcctaaccgtatcattacggataacggcacccagttcactagtgagctcttcggtgactactgcgaagacatgggcatcaagctctgcttcgcctcccccgcccaccccagaagcaatggccaagtggagtgcgccaacgcggaaatcctcaagggcctcaaaaccaagaccttcaacatcctcaagaagcacggcgactcgtggatcgaggagctgccagcggtgctctgggcgaaccgaaccacgccaagccgagcaaccggggaaacgcctttcttcctcgtctacggcgcggaggcggtcctcccatctgagctcaccctgaggtcccctcgggtcaccatgtattgcgaggctgatcaagatcagcttcgccgagacgacctcgactatttggaagagcgaaggcggcgcgcgtccctccgagccgcgcgctaccagcagagcctgcggcgctaccatcagcgccacgtccgggcctga

SEQ ID NO: 46219 - DNA, 5121 bp, Oryza sativa
  Clone ID: PAT_MRT4530_49106C.1
atggccgaacgggcagtggcgcatagcctctctccgaacgctagcggcgacgacggggagcagaacccacgccgtcgggctcgcaccccaccgtccccctctcgtcgaaatcttgggcggggggaggcgctcggggaggtcggaggatccgcgacttcgccgcccgcgggcgacgggggaggacggcgagacggggcgcgtcgccgcctcgtctacggcgatggcggcacgccccagggcgcgctccaggctgcgggcgcgctcctgcgtcacccgcccgtcgtccccgatccagagactccagcccggcgttggctggatgacgtggccgacttggtcatgacggcgcagcagagcctaggcgccggcgggaggtcctccgccaccgaggcctctggcgctgccgccgccggctccacgtcgtcgaggcggagggcgcggcgagcggcggccgttacccgccgttcgtccgccattccctcatcaacgcctccgacccaagaagatgtgcgtggggggtcggatgcccgcctcgatatcgagcaccggcgcgacgctcgtcgcgccgcccacgcaacggagggcgcttcctcgtccggagcgccacttcggtccgggcacgggggccggccccccgtgtccccggttggcggtgccggctgtcgagcctttgtggcgagccttcggaacgtccgttggcccccaaggttccggcccaccatcaccgaaaaatacgacggaagcgtcaaccccgccgagtttctccagatctacacgaccgggatcgaggccgccgggggtgacgacagggtcatggcgaatttcttccccatggccctgaagggcgaagaagcggacttgcacgcggtacagcgaagggacgatgagtctcttcgctcgtacattcagcggttctgtcaagtccgcaacaccataccgtgcatccctgcacacgcggtgatctacgcgttcagggggggcgtgcggcacaaccgcatgctcgagaagattgccttcaaggagccccagaccaccgcgcagctttttgagctcgcggaccgtgtggctcgcagggaggaggcctggacctggaactcctccggttctggtgtggcagctccggccgtccccgggtccgccgctcggtcagggcggcgggacaggaggaggaagaaggggtcggcccgttccgacgacgagggtcatgtcctcgccatcgagggtgcttcgcgggccccccgaaaggggaggccagcgagcgacaaaaagaaggaggccggcgctcccagcagggagcgcccgaccggcaagtggtgtaccgtgcacaacacctccctccacgacctcgcggactgccgcgcggtcaaaagtttggctgagcggacgaggaagtgggaggaggagaagaggcaggagcgccgtgagggcaaggccccggcggctcccgccggcaaccggcgaggtgagaccaagcagaaggccaccgccgaggacatcgacgatggtgacgatgacctggggttccaggagcccgaggccaccgtcgccaccgtcgatgggggagcgtgcgctcacgcttctcgccggagcctcaagtccatgaagcgcgagcttctggccgcggcccctacccatgaggcgacgcggcgggcgcggtggtcggaggttgccctcaccttcgaccaaaccgaccacccgccgtgcgttgcccggggaggacagatcgcgatggtggtttcccccaccgtttgcaatgtcaagttggggcgtgtcctcatagacgggggtgcagccctcaacatcctttcccccgcagcctttgacgccatcaaggccccgaggatggtgctccggctgtcccagccgatcatcggtgtgacgccggggcacacctggccgctgggtcatatcgacctcccggtcaccttcggtagttccgccaacttccgcacggatcgggtggacttcgatgtggtggacctcagtctgccctacaacgcggtcctggggaggcccgcgttggtgaagttcatggcggcggtccactacgcctatctccagatgaagatgccgggccccggtggccccatcaccgtccatggcgacctcaaagtcgcgcttgcttgtatggagcaacgcgcggaccacctcgccgcggcgtccaagcccgcgggtggcgacgagaggctcagcacctccgtcccggccgccccaaggcagcggatggtcacgtgcgacgaggtcccggaagacgcgctcgtctccttcctgcgggcaaacgccgacgtcttcgcctggagaccggcggacatgcccggggtccctagggaggtgattgagcaccgtctcgccgtgcggccgggcgcaaggccggtccggcagaaagtgcggcggcaggccccggaacgtcaagccttcatccgtgaggaggtggcgcgacttctggaggccggattcatccgtgaggtcatccatccggagtggctggcgaacccggtcgtcgttcccaaggcgaatggcaagcttcggatgtgcatcgactacaccgaccttaacaaggcatgtcctaaggacccttaccccctgccacgcatagatcagattgtcgactccaccgcggggtgcgaccttttgtgttttctagatgcatactctggttatcatcagattcgcatggctagggaggatgaggaaaaaactgcattcattacccccataggaacttattgttatacgacaatgcctttcgggctaaagaatgcaggtcctacttttcaacttactactcgaatttctttgggtagccagataggacgcaatgttgaggcctatgttgatgacttggttgtgaagacgtgcaaccaagagaccttactctcggatctagcggaaactttcgaaagtctccgctccgcccgcataaagctgaaccccgataagtgcgtgttcggcgtgcctgcgggcaagcttctcgggttcttggtctctgcccgaggcatcgaggccaaccccgagaagatacgagctatagagcggatgcgcccccccagcaagcttagggatgtgcagtgcgtcaccggctgcatggccgccctaagtcggttcatatcaaggctgggagagaaggcagtacccctatttaagctcctcaaacgctccgggccgtttacctggacggaggaggctgagcgggccctcactcagttgaaggcgtacctcagttctcccccagtcctggtcgccccggagccagatgagccgttgctactctacctggcggcaaccccgcaggtggtcagtgcggcgttggtcgtggagcgcgacgaggacaaccctcactccgcgcatgcctaccctgtgtcgactcgacccgggagagagcagggaggagaggcccccgagccgaacggtggcccaaggcccccgacggccggagttggccctccgcctgcttgtccgacggtgccaggcgcccccgacccccaggatggccccggggccactgcgggaaggccgcgcctgtcgccctccgaccccgaggtcgtcggcacagaagccgagtgcgccccgcgcggcctcttggaccaagagcgccatggagatgcggcccctggcgaagaggatcggccccgccgaaaggtgcagcggcccgtctacttcgttagcgaggctcttcgggacgccaagacccgataccctcaggcccagaagatgctttacgctattctgatggcttcgaggaagttgcgccattatttccaggcgcatcgggtcacggtggttacgtcgtaccccctcggccaaatcttgcataaccgagagggtactggacgggtggtgaaatgggcaatcgaactctctgaattcgatctgcgctttgaaccacgccacgcgatcaagagccaggccctcgccgactttgtagcggagtggaccccagctcccgagcccgtctccgcccccgaggccagctcgggcccctcgcagttgcctcacaccgccttctgggtgatgcagttcgacggctccctgtctcttcagggcgccgataagactctacccgaggaccgcgaagggagtgaacgcgtccggcgcatctccaagcgctacgtgctggtggaagggaccctctatcggcgcgcggctaacggagtcctcctgaagtgcattcctcgggaacaaggcgtcgagcttctcgccgatgtccatgaaggcgagtgcggagcccactccgcctcacgcaccttggttggcaaggcctttcgccagggtttctattggccgacggctctcaacgatgcggtcgacctggtccggcggtgcagggcgtgccagttccacgctaggcaaacccatcagccggcccaggccctgcagaccatacctctttcgtggccgtttgctgtctgggggctcgatatccttggtccgttcaggcggaccccgggcggtttcgagtatctgtatgtcgctgtcgacaagttcactaagtggcccgaggcttatccggtcatcaagatcgataagcactccgcgcttaaattcatcaggggcatcactgctcggtttggggtgcctaaccgtatcattacggataacggcacccagttcactagtgaactcttcggtgactactgcgaagacatgggcatcaagctctgtttcgcctcccccgcccaccccagaagcaacggccaagtggagcgcgccaacgcggaaatcctcaagggcctcaaaaccaagaccttcaacatcctcaagaagcacggctactcgtggatcgaggagctgccagcggctgatcaagatcagcttcgccgagacgacctcgactatttggaagagcgaaggcggcgcgcggccctccgagccgcgcgctaccagcagagcctgcggcgctaccatcagcgccacgtccgggcccgatcactctgcgtcgacgacctcgtcctacgccgcgtccaaacgcgtgctggactgagcaagctctcaccaatgtgggagggtccgtatcgagtgatcggcgtcccccggccgggctccgttcggctggccacgggcgacggcacagagctgcctaacccgtggaacatcgaacaccttcgtcgcttctactcctag

SEQ ID NO: 46220 - DNA, 4443 bp, Oryza sativa
  Clone ID: PAT_MRT4530_49107C.1
atggccgaacgggcagtggcgcacagcctctctccgaacgctagcggcgacgacggggagcagaacccgcgccgtcgggctcgcaccccaccgtccccctctcgccgaaatcttgggcggggggaggcgctcggggaggtcgaaggatccgcgaattcgccgcccgcgggcgacgggggaggacggcgagacggggcgcgtcgccgcctcgtctacggcgatggcggcacgccccagggcgcgctccaggctacgggcgcgctcctgcgtcacccgcccgtcgtccccgatccagagactccagcccgacgttggctggatgacgtggccgacttggtcatgacggcgcagcagcgcctaggcgccagcgggcggtcctccgccaccgaggcctctggcgctgccgccgccggctccatgtcgtcaaggcggagggcgcggcgagcggcggccgttacccgccgttcgtccgccattccctcgtcaacgcctccaacccaagaagatgtgcgtggggggctggatgcccgcctcgatatcgagcgccggcgcgacgctcgtcgcgccgcccacgcaacggagggcgcttcctcgtccggagcgccacttcggtccgggcacgggggccggccccccgtgtccccggttggcggtgccggctgtcgagcctttgtggcgagccttcggaacgtccgttggcccccaaggttccggcccaccatcaccgaaaaatacgacggaatcgtcaaccccgccgagtttctccagatctacacgaccgggatcgaggccaccgggggtgacgacagggtcatggcgaatttcttccccatggccctgaagggtcaggcgcggggttggctaatgaacttaccacccgcgtcggtccactcttgggaggatttgtgccagcagttcaccacgaacttccagggcatatatccgcgcccaggcgaagaagcggacttgtatgcggtacaacgaagggacgatgagtctcttcgctcgtacattcagcggttctgtcaagtccgcaacaccataccgtgcatccccgcacacgcggtgatctacgcgttcagggggggcgtgcggcacaaccgcatgctcgagaagatcgcctccaaggagccccagaccaccgcgcagctttttgagctcgcggaccgtgtggctcgcaaggaggaggcctggacctggaactcctccggttctggtgtggcagctccggccgcccctgggtccgccgctcggtcagggcggcgggacaggaggaggaagaaggggtcggcccgttccgacgacgagggtcatgtcctcgccgtcgagggcgcttcgcgggccccccgaaaggggaggcctgcgagcgacaaaaagaaggaggccggcgctcccagcagggagcgcccgaccggcaagtggtgtactgtgcacaacacctccctccacgacctcgcggactctgccgcgcggtcaaaagtttggctgagcggacgaggaagtgggaggaggagaagaggcaggagcgccattcgcatggctagggaggatgaggaaaaaactgcattcattacccccataggaacttattgttatacgacaatgcctttcgggttaaagaatgcaggtcctacttttcaacgtactactcgaatttctttgggtagccagataggacgcaatgttgaggcctatgttgatgacttggttgtgaagacgcgcaaccaagagaccttactctcggatctagcggaaactttcgaaagtctccgctccgcccgcataaagctgaaccccgataagtgcgtgttcggcgtgcctgcgggcaagcttctcgggttcttggtctctgcccgaggcatcgaggccaaccccgagaagatacgagctatagagcggatgcgcccccccagcaagcttagggatgtgcagtgcgtcaccggctgcatggccgccctaagtcggttcatatcgaggctgggagagaaggcactacccctatttaagctcctcaaacgctccgggccgtttacctggacggaggaggctgagcgggccttcactcagttgaaggcgtacctcagttctcccccagtcctggtcaccccggagccagatgagccgttgctactctacctggcggcaaccccgcaggtggtcagcgcggcattggtcgtggagcgcgacgaggacaaccctcactccgcgtatccccaccctgtgtcgactcgacccgggagagagcagggaggagaggcccccgagccgaacggcggcccaaggcccccgacggccggagctggccctccgcctgcttgtccgacggtgccaggcgcccccgacccccaggatggccccggggccactgcgggaaggccgcgcctgtcgccctctgaccccgaggtcgtcggcacagaagccgagtacgccccgcgtggcctctcggacgaagagcgccctagagatgcggcccctggcgaagaggatcggccccgccgaaaggtgcagcggcccgtctacttcgttagcgaggccctccgggacgccaagacccgataccctcaggcccagaagatgctttacgctattctgatggcttcgaggaagttgcgccattatttccaggcgcatcgggtcacggtagttacgtcttaccccctcggccaaattttgcataaccgagagggtactggacgggtgggcgccggtgcgggggtcacgttgacctcgccgagcggagacgccctcagatacctggtccgcctcgactttcgggcgaccaacaatatggcggagtacgagggactccttgcaggactcagagtggcagctggactggggatccgccgcctcctggtgttaggcgactcccagttggtcgttaaccaggtctgtaaggagtaccagtgctctgacccgcagatgaacgcttacgtgcgccaggtgcggcgtatggaacgccatttcgacgggatagagcttcggcacgtgcccagacgggataacgcggtcgccgacgaactctcaaggctcgcttcctcgcgagcccagaccccaccgggcgcctttgaagaaaggcttgcccagccatcggcgcgacccgaccccctaggggagacggacgcgcctgaacggcccccgaggcccgtcggagtccaggcctcgggacccgaggggagcgctcccagctcccctagattgattgcttggatcactgagatccaggcgtacctcgcagataagactctacccgaggaccgcgaagggagtgaacgcgtccggcgcatctccaagtgctacgtgctggtggaagggaccctctatcggcgcacggctaacggagtcctcctgaagtgcattcctcgggaacaaggcgtcgagcttctcgccgatgtccatgaaggcgagtgcggagcccactccgcctcacgcaccttggttggcaaggcctttcgccagggtttctattggccgacggctctcaacgatgcggtcgacctggtccggcggtgcagggcgtgccagttccacgccaggcaaacccatcagccggcccaggccctgcagaccatacctctttcgtggccgtttgctgtctgggggctcgatatcctgggtccgttcaggcgggccccgggcgggttcgagtatctgtatgtcgctgtcgacaagttcactaagtggcccgaggcttatccggtcatcaagatcaataagcactctgcgcttaaattcatcaggggcatcactgctcggtttggggtgcctaaccgtatcattacggataacggcacccagttcactagtgagctcttcggtgactactgcgaagacatgggcatcaagctctgcttcgcctcccccgcccaccccagaagcaatggccaagtggagcgcgccaacgcggaaatcctcaagggcctcaaaaccaagaccttcaacatcctcaagaagcacggcgactcgtggatcgaggagctgccagcggtgctctgggcgaaccgaaccacgccaagccgagcaaccggagaaacgcctttcttcctcgtctacggcgcggaggcggtcctcccatctgagctcaccctgaggtcccctcgggtcaccatgtattgcgaggctgatcaagatcagcttcgccgagacgacctcgactatttggaagagcgaaggcggcgcgcggccctccgagccacgcgctaccagcagagcctgcggcgctaccatcagcgccacgtccgggcccgatcactctacgtcgacgacctcgtcctacgccgcgtccaaacgcgtgctggactgagcaagctctcaccaatgtgggagggtccgtatcgagtgatcggcatcccccggccgggctccgttcggctggccacgggcgacggcacagagctgcctaacccgtggaacatcgaacaccttcgccgcttctacccctag

SEQ ID NO: 46221 - DNA, 370 bp, Oryza sativa
  Clone ID: PAT_MRT4530_49108C.1
attggcaatgcacaacaccaaattgcatagaccaggtatagaacccgcacagagagacacactcacggaacagatcttgccctctatacgatacgcagagcatacacacacgcgtggcagacgaagacgtacatacatgccgctcacgtacatacatagactgaacacgcgtacgcgcacgcacactattcctgaaagacacacatgggaaagaacatatctagcttaggtgcaggacatgtgtgtgcatgacaacactgtgcggaggtgctcaatcgtgggggacgaagttaggggtgcacgatcaggccgtggtgctgacagggccggatcagtgttcggtgcggctctcgaggcggcccttgcttga

SEQ ID NO: 46222 - DNA, 5340 bp, Oryza sativa
  Clone ID: PAT_MRT4530_49109C.1
atggccgaacgggcagtggcgcacagcctctctccgaacgctagcggtgacgacggggagcagaacccgcgccgtcgggctcgcaccccaccgtccccctctcactgaaatcttgggcggggggaggcgctcggggaggtcgaaggaaccgcgacttcaccgcccgcgggcgacgggggaggacggcgagacggggcgtgtcgccgcctcgtctacggcgatggcggcacgccccagggcgcgctccaggctgcgggcgcgctcctgcgtcacccgcccgtcgtccccgatccagagactccagcccgacgttggctggatgacgtggccgacttggtcatggcggcgcagcagcgcctaggcgccggcgggcggtcctccgccaccgagagcctctggcgctgccgccgccggctccatgtcgtcgaggcggagggcgcggcgagcggcggccgttacccgccgttcgtccgccattccctcgtcaacgcctccgacccaagaagatgttccggccccaccatcaccgaaaaatacgacggaagcgtcaaccccgccgagtttctccagatctacacgaccgggatcgaggccgccgggggtgacgacagggtcatggcgaatttcttccccatggccctgaagggtcaggcgtggggttggctaatgaacttgccacccgcgtcggtccactcttggaaggatttgtgccagcagttcaccatgaacttccagggcatatatccgcgcccaggcgaagaagcggacttgcatgcggtacagcgaagggacgatgagtctcttcactcgtacattcagcggttctgtcaagtccgcaacaccataccgtgcatccccgcacacggggtgatctacgcgttcagggggggcgtacggcgcaaccgcatgctcgagaagatcgcctccaaggagccccagaccaccgcgcagctttttgagctcgcggaccgtgtggctcaaaaggaggaggcctggacctggaactcctccgattctggtgtggcagcttcggccgcccccgggtccgccgctcggtcagggcggcgggacaggaggaggaagaaggggtcggcccgttccgacgacgagggtcacgtcctcgccgtcgagggcgcttcgcgggccccccgaaaggggaggcctgtgagcgacaaaaagaaggaggccggcgctcccagcagggagcgcccgaccggcaagtggtgtaccgtgcacaacacctccctccacgacctcgcggactgccgcgcggtcaaaagtttggctgagcggacgaggaagtgggaggaggagaagaagcaggagcgctgtgagggcaaaaccccggcggctcccaccggcaaccggcgaggtgaggccaagcagaaggccaccgccgaggacatcgacgatggcgacgatgacctggggttccaggagcctgaggccaccgtcgccaccgtcgatgggggagcgtgcgctcacgcttctcgccggagcctcaaggacatgaagcgagagcttctggccgcggcccctacccatgaggcgacgcggcgggcgcggtggtcggaggttgccctcaccttcgaccagaccgaccacccgccgtgcgttgcccggggaggacagatcgcgatggtggtttcccccaccgtttgcaatgtgaagttggggcgtgtcctcatagacgggggtgcagccctcaacatcctttcccccgcagcctttgacgccatcaaggccccggggatggtgctccggccgtcccagccgatcatcggtgtgacgccggggcacacctggccgctgggtcatatcgacctcccggtcaccttcggtggttccgccaacttccgcacggagcgggtggacttcgatgtggcggacctcagtctaccctacaacgcggtcctagggaggcccgcgttggtgaagttcatggcggcggtccactacgcctatctccagatgaagatgccgggccccggtggccccatcaccgtccatggcgacctcaaagtcgcgcttgcttgtatggagcagcgcgcggaccacctcgccgcggcgtccaagcccgcgggtggcgacgagaggctcagcacctccgtcccggccgccccaaggcagcggatggtcacgtgcgacgaggtcccggaagacgcgctcgtctccttcctgcgggcaaacgccgacgtcttcgcctggagaccggcagacatgccaggggtccccagggaggtgattgagcaccgtctcgccgtgcggccgggcgcaaggccggtccggcagaaagtgcggcggcaggccccggaacgtcaagccttcatccgcgaggaggtggcgcgacttctggaggccggattcatccgtgaggtcatccatctggagtggctggcgaacccggtcgttgttcccaaggccaacggcaagcttcggatgtgcatcgactacaccgaccttaacaaggcatgtcctaaggacccttaccccctgccacgcatagatcagattgtcgactccaccgcggggtgcgaccttttgtgttttctagatgcatactctggttatcatcagattcgcatggctagggaggatgaggaaaaaactgcattcattacccccataggaacttattgttatacgacaatgcctttcgggttaaagaatgcaggtcctacttttcagcgtactactcgaatttctttgggtagccagataggaagcaatgttgaggcctatgttgatgacttggttgtgaagacgcgcaaccaagagaccttactctcggatctagcggaaactttcggaagtctccgctccacccgcataaagctgaaccccgataagtgcgtgttcggcgtgcctgcgggcaagcttctcgggttcttggtctctgcccgaggcatcgaggccaaccccgagaagatacgagctatagagcggatgcgcccccccagcaagcttagggatgtgcagtgcgtcaccggctgcatggccgccctaagtcggttcatatcgaggctgggagagaaggcgctacccctatttaagctcctcaaacgctccgggccgtttacctggacggaggaggctgagcaggccttcactcagttgaaggcgtacctcagttctcccccagtcctggtcgccccggagccagatgagccgttgctactctacctggcggcaaccccgcaggtggtcagcgcggcgttggtcgtggagcgcgacgaggacaaccctcactccgcgcatccccaccctgtgtcgactcgacccgggagagagcagggaggagaggcccccgagccgaacggcggcccaaggcccccgacggtcggagctggccctccgcctgcttgtccgacggtgccaggcgcccccgacccccaggatggccccggggccactgcgggaaggctgcgcctgtcgccctctgaccccgaggtcatcggcacagaagccgagtgcgccccgcgtggcctctcggacgaagagcgccctggagatgcggcccctggcgaagaggattggccccgccgaaaggtgcagcggcccgtatacttcgttagcgaggccctccgggacgccaagacccgataccctcaggcccagaagatgctttacgctattctgatggcttcgaggaagttgcgccattatttccaggcccatcgggtcacggtggttacgtcttacctcctcggccaaatcttgcataaccgagaaggtactggacgggtgggcgccggtgcgggggtcacgttgacctcgccgagcggagacgtcctcagatacctggtccgcctcgattttcgggcgaccaacaatatggcagagtacgagggactccttgcggggctcagagtggcagctggactggggatccgccgcctcctggtgttaggcgactcccagttagtcgttaaccaggtctgtaaggagtaccagtgctctgacccgcagatggacgcttacgtgcgccaggtgcggcatatggagcgccatttcgacgggatagagcttcggcacgtgcccagacgggataacgcggtcgccgacgaactctcaaggctcgcttcctcgcgagcccagaccccaccgggcgcctttgaggaaaggcttgcccagccgtcggcgcgacccgaccccctaggggagacggacgcgcctgaacggcccccgaggcccgtcggagtccaggcctcggggcccgaggggagcgctcccagctcccctagattgattgcttggatcactgagatccaggcgtacctcgcagataagactctacccgaggaccgcgaagggagtgaacgcgtccggcgcatctccaagcgctacgtgctggtggaagggaccctctatcggcgcgcggctaacggagtcctcctgaagtgcattcctcgggaacaaggcgtcgagcttctcgccgatgtccatgaaggcgagtgtggagcccactccgcctcacgcaccttggttggcaaggcctttcgccagggtttctattggccgacggctctcaacgatgcggtcgacctgatccggcggtgcagggcgtgccagttccacgccaggcaaacccatcggccggcccaggccctgcagaccatacctctttcgtggccgtttgctgtctgggggctcgatatcctgggtccgttcaggcgggccccgggcgggttcgagtatttgtatgtcgctgtcgacaagttcactaagtggcccgaggcttatccggtcatcaagatcgataagcactccgcgcttaaattcatcaggggcatcactgttcggtttggggtgcccaaccgtatcattacggataatggcacccagttcactagtgagctcttcggtgactactgcgaagacatgggcatcaagctctgcttcgcctaccccgcccaccctagaagcaatggccaagtggagcgcgccaatgcggaaatcctcaagggcctcaaaaccaagaccttcaacatcctcaagaagcacggcgactcgtggatcgaggagctgccagcggtgctctgggcgaaccgaaccacgccaagccgagcaaccggggaaacgcctttcttcctcgtctacggcgcggaggtggtcctcccatctgagctcaccctgaggtcccctcgggtcaccatgtattgcgaggctgatcaagatcagcttcaccgagacgacctcgactatttggaagagcgaaggcggcgcgcggcgcgcgctaccagcagagcctgcggcgctaccatcagtgccacgtccgggcccgatcactctgcgtcgacgacctcgtcctacgccgcgtccaaacgcgtgccggactga

SEQ ID NO: 46223 - DNA, 3720 bp, Oryza sativa
  Clone ID: PAT_MRT4530_4910C.1
atggtggaagctgctgctattgcttttgccaagagctcagccatttttgttgggaagaaagttgcagagacagtgatcagttatgttgtgaacaaagcccttgatcgccttccgctggagaatgaggatttgaagactaagttgaagagtaagctctccaaaactcaagcaatgttatatggcattactctgcaggagatccaggacaaccaagggttggttgaatggctttggcagttccgcgatgccatacaggaggccgaggatgcacttgatgagcttgacttctttgacttggagaaggtgtgcaatcggaaggcagaatcttcatcatccttggtccctaaattcatgagattgcagctgtctgtaagttctaataactccaacagcagtagaaagaatctcaagaatgctctgatgaggttagaatctgtctttgatgatgctgcaaatttccgagtggtaactgggcatggacttcacacttcccctcaacgtaatgaagggcgcatacaagatacgaccaaccgaaatgagacaacgagagtgttagcaacacctgtatttggaaggcagaaggaaaaagatgagataattgaatggctgggtgttgaggctccagggagagatagcaaactctcagtgtgtgcaatagtgggtgggggtggtatggggaaaacatctcttgctcagcttgtctgtcaagataagaaggttcaggatcatttcggcgacatgattatctgggtgcatgttcccaagcgctttgaacctgtagtgttggtggcaagaatgttggaatccattaacaggaacagagttactgcatcttctttggacatactgcaattagatctcactaaagagttggttactaagagatttttactggttctggatgatgcatgggaggatggggaaaatgagctatgggggcaatttttatctcccctgaggaacattattgcaccaatgggaggtagaatcttgctcacgacccgaatggggtcagtggctgatgctgttaaacgccaaatgccatcaaatgaatataaatgtgttgtactggggggtttagatcacagagatattatgcagatcttgaaccatcatgtgcctcctaatgaagatttggaacttcgaagtgtagctgaatggattgtacacaacctcgaaggatgtccttttgtagcaaaagtgattggtcagtacctcagagacaacactgatcatagcaattggaatgacttcttaaataaaaaagtatgtcatttagacgatattgcacctagggttatggagatgctcaggttgagctatgaagatctaacctcagaggtgcagctttgctttcagtactgcagcatatttccatcccattacaaattcaggatggaagagcttaccgagatgtgggtgagttcaggattgatactgcaaagcacaaaggggaacagtggccaggagaaaattgctcgggaacacttcaatattctgttgaaaaaatcattcttttcactgatacccagagaattacatcccgatccttctacagattactatgtcatgcatgatttgatttatgaattgtcatgccttgtttctagcgaggaattctcaacatttaaagtcaccaaatgcaatactgctgatgtatctgaaagagtacgtcacctatacattgaagggataaattctgaagctatcaatgttatatccaagtccaagtacctccgtactcttattatagcgaatgaggaatggccacttaaggcaggactggctgataatcttaagaaagcaatgaagggcataacaagcttgcggctcttaaagtttgatggacatggatggtttgacataaatgatgctattgcggaactaaagcacttaaggtacatctgtatgtctgctactaacaaaagcaatctgaataaattgtttaaactcttccacctggaggtccttaagctactgaagatagaaggagaagaacaggcgagcgtcagtgatttatgcaatctagctaacttgcagaaactgtatcttccaaaacctgcattatccagagtccctcatattggaagactaactaatcttcgtgagttgaatgggttgagcgtgaagaaagaagaaggacacaaaatatctgagctgaaggacttaaagaacctccggaaagtctttgtgtttgatgttgagaatgtaagcaactgtagtgaagcttccttggctgaattgagcaataagaatgatatggaactgttatctttggagtggtcaaatcaacataataggattaatgagcgaattcttgatacagttgttccttacaaacgtattaggcatttaagaatttctggttataagggtgttttgcctccactgtggattcgaaggaaagtccttaccaaattggtacgcttgaagattgttggatgtcctaaatgggatgatctcccttccttcgcgagtctatctagtctgaagcatgtcttactggaggacctaccaaatctgaaatgcattgggggacctgatggtgatggattgcctcctttcttggttaccttagttgtaaaagaatgcctagaactgttgaatttacctcatctaccttatagtctaaagcatctggggataaataaagttggaatatcttgtctgccaaccagtagtcagatggcattacaaaacgtgtctacagtggatccacagctgtgcagtctccatgtagattcttgtcctaatttgttgtccttcggatcatgtattgtagaagagcaacactacaaagctcttactagcttgaaagtcatcggctgcagcatgctcgagaagctcccaagtgaagaacattttagaagaatatccacaatggagagtattgaaattcttcaatgtcagagtttgtcgaccttgggtggcctaggagcacttgcttccttgaaaatactgaaaatacagcagtgcactcatctaactgctacatcttcagggattccggtagcaccagctatgcggtcttctcttgtgcttgacacccttgaaattgatgaccatcttttgcttcttcagaatccatttagaaacttctgcctcactagaagacttgtatctaatggatctgaaatgcttgagttgcctcaggaatggttattgcagaatagttctcagttggagcatatagaaataaacaatgcaaatctgctcagatcactgccttcaactatggacactttgcactccctgaggagtctggttctgtgtaatgctcccctcctcgagacacttcctgctatgccccccaatctgtgggctcttcaaataagtggttgttgcactcgtttaaaggcaagagaatattccatctcacccctagaagagaagatggttcctaactctagtggccttatttggcaggctggggttgttcttacacacaagaagtgtgcaagtatcagagggtggttagggctttgttgctcaacgccgatggagagtcttccctcttggtggtgtgatgctcgcaaagcaatcaagaagcgggacaggagagcttttgatgcgggcatcatcttggtgacatggctaatttggaaacagcgcaatgctcgtgtctttgaggggcatacagtgttgccagtgaatctttgtgccgcaatcgaggatgagtggaaattgtggcaagaagcgggcttgacttcctctctttga

SEQ ID NO: 46224 - DNA, 2677 bp, Oryza sativa
  Clone ID: PAT_MRT4530_49110C.1
atggcacagcagcaagccggtgcaagaggcagcaagctggagatcgtcgccgcccggggaggaagtggcggcagcagcagcgccggcgatgcggaggcgccgccgttggacgtcctgaggcaggactccctctaccgcgacgcgacgcggccggcccacggccaccatggacaggagagctggatgaggacgctgcggctggggttccagtgcgtgggaatcctgcacgccgacctcggcacgtcgccgctctacgtgtaccagaacacattcaagtacggcatcaagcacgaggacgacatcatcggcgtcctctccctcatcatctacagcttcgtgctattcaccatggtcaagatcgtcttcatcgccctccacgccaacgacgatggcgacggtgggacatttgctctgtactcgttgatctcgcggtacgccaaggtgtgcctgatcccaaaccagcaagccgaggatgagctggtgacgaggtacaacgaccacgggaagccgccggcgacgctgcggagggcgcagtggatgaagagccagctcgagaagaagcccgccaagattgccgtcttcttcctcaccatcttcgccaccgcgctggccatcagcgactgtgtgctaaacccttcagtctctgtactttcggcggtcaacggcttgaaacttagagcacctcatctgacaacagacgaagtggtctggatcacggtgggaatactggtggtgtttttcgcagtgcaacggtttggcactgacaagattggctacacatttgccccggttgttgttgtgtggctgttactcatctcagggattggcatctatgacttggtcaagtacgatgtcggtgtcttgagggcgttcaaccccaaatatatcatcgattatttccgacgaaataagaaggacggatgggtccagctcggtgaagttcttcttacatttaccggcacagaagctctctttgctgatttaggatacttcagcatcaaatcaattcagttaagctctacctttgtcttgctcccatcagtgttatgcacctacattgggcaagcagcatacctaaggaaacacatggatcagcagcacatacaaaacgctttcttcaattccattccaagacctctgttctggccaatgttcgttctcgctatcatgacgtcagtcatcggttgccaagccatggtgtcttgtgcctttgcaaccatgtcacacttgcagacactgaattgtttcccacggattaagatactgcacacatcaaggcgttattcaggacagttgtacagtcctgaagtgaacttcttcctctgcctactttcctgtgtaatcaccttaagtttcaggacgacaggtttcattgtcaaagcacatgaaatttgtgtggtccttgtgatggttatcacaactatcctgatgactatagtcatgcttctcgtatggaaagtaaatatttggtggatcgttctattctttgtcgtcttcatgtcaacggagaccgtctacctatcagcagttctctacaagttcacaaaaggaccatacatgcccttggctatgtcagctgttctaatggtgatcatgttcgtgtggcactacgtgcatgtgaagcgatacaagtttgagcttgaacataccgtatcacctaataaggtcagagagctccttgaacggcgtgatctaaagagggttcctggtgtggggctcttctacactgaattggtgcaaggcatcccaccgatattccctcaccttatcgagaaaatcccgaccattcactcggtgatcgtgttcatctctatggagcacttgcctatccctcatgtcgatgtctcggagcgcttcctcttccggcaagtggagcccaaggagtgcatggtgtttcgatgtgtcgcacgatatggatatcgggatactctagagatggctgatgactttgtcaccactcttgtcgagtacctccagtactatatccgggacctaaatctatacaacacggttgagccactcaagatgagctgcccaagcattagaattgatagtttttcctgggatagacgaccctcagggcatggcatttatgccgaggagatgcttacaccaatccaatcattttctgagctcacaatgcatcctgttggtatgagcagccgattagcgcaattccaaacaactaagatgagccttgaagagatgttgaagattgaggaagaccaaaagttgatccaacgagaagtggacaatggtgtggtttacatacttggggagagtgaagtggtagcgaaaccacattccaacttgcttaagaaagttgttgtaaactacatattcaactttctgaggaaaaactctcgaaaaggagagaagatgttgtctattccacgccgcaagttgctcaaggttggaatcacgtacgaaatataaacatgccaacaatcagtaagatggtggcttatacacaaggggtgtagatttgtcgagcaagcatatatcatgcatgcagggtttgcttacttgcaaatgtacttggattttgtttgcttgtgtgactctccatgataggaaaaaaaataaaagaattacatgcaaggaaaaaaaaaaaaaaaccaaaactcgagactagttcctcgtgccgaaaaaaaaagggggggcctgcagcccgggg

SEQ ID NO: 46225 - DNA, 4860 bp, Oryza sativa
  Clone ID: PAT_MRT4530_49111C.1
atggcgaatttcttccccatggccctgaagggtcaggcgtggggttggctaatgaacttgccacccgcgtcggtccactcttggaaggatttgtgccagcagttcaccatgaacttccagggcatatatccgcgcccaggcgaagaagcggacttgcatgcggtacagcgaagggacgatgagtctcttcactcgtacattcagcggttctgtcaagtccgcaacaccataccgtgcatccccgcacacggggtgatctacgcgttcagggggggcgtacggcgcaaccgcatgctcgagaagatcgcctccaaggagccccagaccaccgcgcagctttttgagctcgcggaccgtgtggctcaaaaggaggaggcctggacctggaactcctccgattctggtgtggcagcttcggccgcccccgggtccgccgctcggtcagggcggcgggacaggaggaggaagaaggggtcggcccgttccgacgacgagggtcacgtcctcgccgtcgagggcgcttcgcgggccccccgaaaggggaggcctgtgagcgacaaaaagaaggaggccggcgctcccagcagggagcgcccgaccggcaagtggtgtaccgtgcacaacacctccctccacgacctcgcggactgccgcgcggtcaaaagtttggctgagcggacgaggaagtgggaggaggagaagaagcaggagcgctgtgagggcaaaaccccggcggctcccaccggcaaccggcgaggtgaggccaagcagaaggccaccgccgaggacatcgacgatggcgacgatgacctggggttccaggagcctgaggccaccgtcgccaccgtcgatgggggagcgtgcgctcacgcttctcgccggagcctcaaggacatgaagcgagagcttctggccgcggcccctacccatgaggcgacgcggcgggcgcggtggtcggaggttgccctcaccttcgaccagaccgaccacccgccgtgcgttgcccggggaggacagatcgcgatggtggtttcccccaccgtttgcaatgtgaagttggggcgtgtcctcatagacgggggtgcagccctcaacatcctttcccccgcagcctttgacgccatcaaggccccggggatggtgctccggccgtcccagccgatcatcggtgtgacgccggggcacacctggccgctgggtcatatcgacctcccggtcaccttcggtggttccgccaacttccgcacggagcgggtggacttcgatgtggcggacctcagtctaccctacaacgcggtcctagggaggcccgcgttggtgaagttcatggcggcggtccactacgcctatctccagatgaagatgccgggccccggtggccccatcaccgtccatggcgacctcaaagtcgcgcttgcttgtatggagcagcgcgcggaccacctcgccgcggcgtccaagcccgcgggtggcgacgagaggctcagcacctccgtcccggccgccccaaggcagcggatggtcacgtgcgacgaggtcccggaagacgcgctcgtctccttcctgcgggcaaacgccgacgtcttcgcctggagaccggcagacatgccaggggtccccagggaggtgattgagcaccgtctcgccgtgcggccgggcgcaaggccggtccggcagaaagtgcggcggcaggccccggaacgtcaagccttcatccgcgaggaggtggcgcgacttctggaggccggattcatccgtgaggtcatccatctggagtggctggcgaacccggtcgttgttcccaaggccaacggcaagcttcggatgtgcatcgactacaccgaccttaacaaggcatgtcctaaggacccttaccccctgccacgcatagatcagattgtcgactccaccgcggggtgcgaccttttgtgttttctagatgcatactctggttatcatcagattcgcatggctagggaggatgaggaaaaaactgcattcattacccccataggaacttattgttatacgacaatgcctttcgggttaaagaatgcaggtcctacttttcagcgtactactcgaatttctttgggtagccagataggaagcaatgttgaggcctatgttgatgacttggttgtgaagacgcgcaaccaagagaccttactctcggatctagcggaaactttcggaagtctccgctccacccgcataaagctgaaccccgataagtgcgtgttcggcgtgcctgcgggcaagcttctcgggttcttggtctctgcccgaggcatcgaggccaaccccgagaagatacgagctatagagcggatgcgcccccccagcaagcttagggatgtgcagtgcgtcaccggctgcatggccgccctaagtcggttcatatcgaggctgggagagaaggcgctacccctatttaagctcctcaaacgctccgggccgtttacctggacggaggaggctgagcaggccttcactcagttgaaggcgtacctcagttctcccccagtcctggtcgccccggagccagatgagccgttgctactctacctggcggcaaccccgcaggtggtcagcgcggcgttggtcgtggagcgcgacgaggacaaccctcactccgcgcatccccaccctgtgtcgactcgacccgggagagagcagggaggagaggcccccgagccgaacggcggcccaaggcccccgacggtcggagctggccctccgcctgcttgtccgacggtgccaggcgcccccgacccccaggatggccccggggccactgcgggaaggctgcgcctgtcgccctctgaccccgaggtcatcggcacagaagccgagtgcgccccgcgtggcctctcggacgaagagcgccctggagatgcggcccctggcgaagaggattggccccgccgaaaggtgcagcggcccgtatacttcgttagcgaggccctccgggacgccaagacccgataccctcaggcccagaagatgctttacgctattctgatggcttcgaggaagttgcgccattatttccaggcccatcgggtcacggtggttacgtcttacctcctcggccaaatcttgcataaccgagaaggtactggacgggtggccctcgccgactttgtggcggagtggaccccagctcccgagcccgtctccgcccccgaggccagctcgggcccctcgcagctgcctcacaccgcctactgggtgatacagttcgacggttccctgtctcttcagggcgccggtgcgggggtcacgttgacctcgccgagcggagacgtcctcagatacctggtccgcctcgattttcgggcgaccaacaatatggcagagtacgagggactccttgcggggctcagagtggcagctggactggggatccgccgcctcctggtgttaggcgactcccagttagtcgttaaccaggtctgtaaggagtaccagtgctctgacccgcagatggacgcttacgtgcgccaggtgcggcatatggagcgccatttcgacgggatagagcttcggcacgtgcccagacgggataacgcggtcgccgacgaactctcaaggctcgcttcctcgcgagcccagaccccaccgggcgcctttgaggaaaggcttgcccagccgtcggcgcgacccgaccccctaggggagacggacgcgcctgaacggcccccgaggcccgtcggagtccaggcctcggggcccgaggggagcgctcccagctcccctagattgattgcttggatcactgagatccaggcgtacctcgcagataagactctacccgaggaccgcgaagggagtgaacgcgtccggcgcatctccaagcgctacgtgctggtggaagggaccctctatcggcgcgcggctaacggagtcctcctgaagtgcattcctcgggaacaaggcgtcgagcttctcgccgatgtccatgaaggcgagtgtggagcccactccgcctcacgcaccttggttggcaaggcctttcgccagggtttctattggccgacggctctcaacgatgcggtcgacctgatccggcggtgcagggcgtgccagttccacgccaggcaaacccatcggccggcccaggccctgcagaccatacctctttcgtggccgtttgctgtctgggggctcgatatcctgggtccgttcaggcgggccccgggcgggttcgagtatttgtatgtcgctgtcgacaagttcactaagtggcccgaggcttatccggtcatcaagatcgataagcactccgcgcttaaattcatcaggggcatcactgttcggtttggggtgcccaaccgtatcattacggataatggcacccagttcactagtgagctcttcggtgactactgcgaagacatgggcatcaagctctgcttcgcctaccccgcccaccctagaagcaatggccaagtggagcgcgccaatgcggaaatcctcaagggcctcaaaaccaagaccttcaacatcctcaagaagcacggcgactcgtggatcgaggagctgccagcggtgctctgggcgaaccgaaccacgccaagccgagcaaccggggaaacgcctttcttcctcgtctacggcgcggaggtggtcctcccatctgagctcaccctgaggtcccctcgggtcaccatgtattgcgaggctgatcaagatcagcttcaccgagacgacctcgactatttggaagagcgaaggcggcgcgcggcgcgcgctaccagcagagcctgcggcgctaccatcagtgccacgtccgggcccgatcactctgcgtcgacgacctcgtcctacgccgcgtccaaacgcgtgccggactga

SEQ ID NO: 46226 - DNA, 5256 bp, Oryza sativa
  Clone ID: PAT_MRT4530_49112C.1
atggccgaacgggcagtggcgcacaacctctctccgagcgctagcggtgacgacggggagcagaacccgcgccgtcgagctcgtactccaccgcccccctctcgccgaagtcttaggcgggaggaggcgctcgagggggttgaaagatccgcgacttcgccgcccacgagcgatggagaaggacggcgagacggggagcatcgcctcctcgtctacggcgatggtagcacgccccagggcgcgctccaagctgcgggcgcgctcttgcgtcacccgcccgtcgtccccgatccagagactccagcccgacgttggctggatgacgtggccgacttggtcatgacggcgcagcagcgcctaggcgccggtgggcggtcctccgccaccaaggcctccggcgctgctaccgccggctccgtgtcgtcgaggcggagggcgcggcgagcggcggccgttacccgccgttcgtcagccattccctcgtcaacgcctccgacccaagaagatgtgcgtagggggccggatgcccgcctcagtatcgagcgccggcgcaatggtcgtcgtgctgcccacgcaacggaaggcgcttcctcgtccggagcgccacttcggttcgggcgcgggggccagccccacgtgcccccggttggtggtgtcgactgtcgagcctttgtggcgagccttcggaacgtccgttggccctcaaggttccggcccaccatcaccgaaaaatatgacggaagcgtcaaccccgccgagtttctccaggtctacacgaccgggatcgaggccgccgggggtgacgacagggtcatggcgaacttcttccccatggccctgaagggacaggcgcggggttggctaatgaacttgccgcccgcgtcggtccactcttgggaggatttgtgccagcagttcaccatgaacttccaaggcacatatccgcgcccaggtgaagaagcggacttgcatgcgcggttctgtcaagtccgcaacaccataccatgcatccccgcacacgcggtaatctacgcgttcagggggggcgtgcggcacaaccgcatgcttgaaaagatcgcctccaaggagccccagaccaccgcggagctttttcagctcgcggaccgtgtggctcgtaaggaggaggcctggacctggaactccaccggttccggtgtggcagcttcggccgcccccggatccaccgctcggtcagggcggcgggacaggaggaggaagaagaggtcggcccattccgacgacgagggacacgtcctcgccgtcgagggcgcttcgcgggccacccgaaaggggaggcctgcgagcgacaaaaagaaggaggccggtgctcccagcagggagcgcccgaccagcaagtggtgcaccgtgcacaacacctccctccatgacctcgcggactgccgcgtggtcaaaagtttgactgagcggacgaggaggtgggaggaggagaggaggcaggagcgccgtgagggcaaggccccggcggctccctttggcaaccggcgaaatgaggccaagcagaaggcccccgccgaggacatcgacgatggcgacgatgacctagggttccaggagcctggggccaccatcgccaccgtcgatgggggagcgtgcgctcacgcttctcgtcggagcctcaaggccatgaagcgagagcttctggccgcggcccctacccatgaggcgactcggcgggcgcggtggtcggaggttgccctcaccttcgaccagaccgaccacccgccgtgcgttgcccggggaggacagatcacaatggtggtttcccccaccgtttgcaacgtgaagttggggcgtgtcctcatagacgggggtgcagccctcaacatcctttcccccgcagcctttgacgccatcaaggccccggggatggtgcttcggccgtcccaaccgattatcggtgtgacgccggggtacacttggccgctaggtcatatcgacctcccggtcaccttcggtggatccgccaacttccgcacggagcgggtgaactttgatgtggcggacctcagtctgccctacaacgcggtcctggggaggcccgcgttggtgaagttcatggcggcggtccactacgcctacctccagatgaagatgccgggccccggtggccccatctctgtccatggcgacctcaaagtcgcgcttgcttgtatggagcagcgcgcggaccacctcgccgccgcgtccaagcccgagggtggcaacgagaggctcagcacctccgttccagccgccccgaggcagcggatgatcacgtgcgacgaggtcccggaagacgcgctcgtctccttcctgcgggcaaacgccgacgtcttcgcctggagaccggcggacatgcccggggtccccagagaggtgattgagcaccatctcaccgtgcggccgggcgcaaggccggtccggcagaaagtgcggcggcaggccccggaacgtcaagccttcatccgcgaggaggtggcgcgacttctggaggccggattcatccgagaggttatccatccggagtggctggcgaacccggtcgtcgttcccaaggcgaacggtaagcttcggatgtgcatcgactacaccgaccttaacaaggcatgtcctaaggacccttaccccctgccacgcatagatcagattgtcgactccaccgcggggtgcgaccttttgtgttttctagatgcatactctggttatcatcagattcgcatggctagggaggatgaggaaaaaactgcattcattacccccataggaacttattgttatacgacaacgcctttcgggttaaagaatgcaggtcctacttttcagcgtactactcgaatttctttgggtagtcaaataggacgtaatgttgaggcctatgttgatgacttggttgtgaagacgcgcaaccaagagaccttactctcggatctagcggaaactttcgaaagtctccactccgcccgcataaaactgaaccctgacaagtgcgtgttcggtgtgcctgcgggcaagcttctcgggttcttggtctctgcccgaggcatcgaggccaaccccgagaagatacgagctatagagcggatgcgcccccccagcaagcttagggatgtgcaatgcgtcaccggctgcatggctgccctaagtcggttcatatcgaggttgggagagaaggcgctacccctatttaagctcctcaaacgctccgggccgtttatctggacggaggaggctgagcgggccttcactcatttgaaggcgtacctcagttctcccccagtcctggtcgccccggagccagatgagccgctgctactttacctggcggcaaccccgcaggtggtcagcgcggcgttggttgtggagcgcgatgaggacaaccctcacctcgcgcatccccaccctgtgtcgactcgacccgggagagagcagggaggagaggcccccgagccgaacggcggcccgaggcccccgacggccggagctggccctccgcctgcttgtccaacggtgccaagtgcccccgacccccaggatggccccggggccactgcgggaaggccgcgccagtcgccctccgaccccgaggtcgtcggcacagaagccgagtgcgccccgtgcggcctctcggacgaagagcgccctggagatgcggcccctagcgaagaggatcggccccgccgaaaggtgcagcggcccgtctacttcgttagcgaggccctccgggacgctaagacccgataccctcaggcccagaagatgctttacgctattctgatggcttcgaggaaattgcgccattattttcaggcgcatcgggtcacggtggttacgtcttaccccctcggccaaatcttgcataaccgagagggtactggacgggtggccctcgccgactttgtggcgaagtggaccccagctcccgagcccgtctccgcccccgaggccagctcgggcccctcgcagctgcctcacaccgcctactgggtgatgcagttcgacggctccttgtctcttcaaggcgccggtgcgggggtcacgttgacctcgtcgagctgtgacgtcctcagatacctggtccgcctcgattttcgggcaaccaacaatatggcagagtacgagggactccttgcgggactcagagtggcagctggactggggatccgccacctcctggtgttaggcgactcccagttggtcgtcaaccaggtctccaaggagtaccagtgctctgacccgcagatggatgcttatgtgcgccaggtgcggcgtatggagcgccatttcgacgggatagagcttcggcacgtgcccagacgggataacgcggtcgccgacgaactctcaaggctcgcttcctcgcgagcccagaccccaccgggcgcctttgaagaaaggcttgctcagccgtcggcgcgacccgaccccctaggggagacggacgcgcctgaacggcccccgaggcccgtcggagtccaggcctcgggacccgaggggagcgttcccggctctcctagattgattgcttggatcgctgagatccaggcatacctcgtagataagactctacccgaggaccgcgaagggagggaacgcgtccagcgcatctccaagcgctacgtgctgatggaagagaccctctatcggcgcgcggctaacggagtcctcctgaagtgcattcctcgggaacaaggcgtcgagcttcttgccgatatccatgaaggcgagtgcggagcccactccgcctcacgcaccttggttggcaaggcctttcgccagggtttctattggccaacggctctcaacgatgcggttgacctggtccggcggtgcagggcgtgccagttccacgccaagcaaacccatcagccggcccaggccatgcagaccatacctctttcatggccgtttgctgtttgggggctcgatatcctgggtccgtttaggtgggccccgggcggtttcgagtatctgtatgtcgctgtcgacaagttcactaagtggcccgaggcttacccggtcatcaagatcgataagcactccacgcttaaattcatcaagggcatcactgctcggtttggggtgcctaaccgtatcattacggataacggcacccagttcactagtgagctcttcggcgactactgcgaagatatgggcatcaagctctgcttcgcctctcccgcccaccccagaagcaatggccaagtggagcgcgccaacgcagaaatcctctag

SEQ ID NO: 46227 - DNA, 1866 bp, Oryza sativa
  Clone ID: PAT_MRT4530_49113C.1
atggaggttttccagggcgtgcagttcgcgcggctgcggaactggtgggaggagacgtacgtcacggccgacgaggacgggaggtcggtctaccactacgccccagaccgccaccgcccggcgcacgaggcaatctgggcggtgcagatggtcctcgccggggcgcccccgacgcagtacgtgctcctccgcggcgcctacggccgctaccttggtgccccggacgccgtcgtgcgccgctggccgctctcctgctgctggcccgcccccgtcgtcggccagcgcgacttcgaccagccggaggtcgacgccatcatgtggcgtgccgtcaggcgggccgaccacgtcctctgcctgcacgacaagtccggccgctacctgcgcggcaaactgggtaccctggttctcggtgaccgccccagactcaccgtcggcgatggccgcctcaacgacgacgagaaggcgttgcggtgggaggtgcttcccgtcctcccgaatccaggcaggccggagctcccgatctccattgtgcctgaggccgacttggtcgggcgcctcgtcaaggcgtgcttcctcccgctgcagcgggagatccagttcgtggaggccgacgacgacggcaacatcggcgagggacaagaagtctgggattcgtttcagtaccaggggaggtcggtgcagctcctgagaaacgagctcgaggaccgtgtgggctacgccatcacggtgtgcgtccgcgccggccgccatgggcagcacagccctctgctcatcaacctgcctcacagccgggagaccctgcacatcgtcgttctcaggcgcaacagcgaagtctcgccttcctcgccacgccacgccacgccgcgccgcgccacgccacgccacgccgagaagccgaggagtagcaagccactcgccgccgcgcgcgcatcaccggcgcaccatccgcggcgggccgcgatgcaggttttccatggtgcgcagttcgtgcggctgcggaacttgtgggaggagacgtacatcaccgccgacgaggacgggaggtcggtctaccactacgacccaggccgccgcccctcgcacgaggcgatctgggcggtgcagttggccgtcgccggggagcccccgacgcagtacgtgctcctccgcggcgcctacggccgctacctcggtgccccggacgccgtcgagcgccgctggccgctctcctgctgctgtcccgcccccgtcgtcggccagcgcgacttcgaccagccggtggtcgacgccatcatgtggcgtgccgtcaggaggaccggccacgtcgtctgcctgcacgacaagtccggccgctacctgcgcggcaaactgatgagtaccctggtttgcggtggccgccccagcctcaccgtcggcgatggccgcctcagcgacgacgagaaggagttgcggtgggaggtgcgtcccgtcctcccgagtccaggcaggccggagctcccgatcgccactgaggccgacttggctgagctcttcgtcaagatatgcttccccccgcggcggcgggagatccagttcgtggcgcccgacggcgacggcaacatcgtctgggattcgtttcagtaccaagggaggtcggtgcagctcctgagaaacgagctcgagaaccgtgtgggctacgccatcacgatgtgcgtccgcgccggccgccatgggcggctcaccccgctgctcatcaacctgcctcacagccgggagaccctgcacatcgtcgctctcaggcgcaacagcgaagcaccggtgctgtttgggcactgtctaactgcatatttctctgctatgactgcagcggatcatcggttgacattcccagatccggatgcatcgtga

SEQ ID NO: 46228 - DNA, 5010 bp, Oryza sativa
  Clone ID: PAT_MRT4530_49114C.1
atgcccgcctcgatatcgagcggcggcgcgacgcgcgccgcccacgcaacggagggcgcttcctcgtccggagcgccacttcggtccgggcacgggggccggccccccgtgtccccggttggcggtgccggctgtcgagcctttgtggcgagccttcggaacgtccgttggccccaaggttccggccccaccatcaccgaaaaatacgacggaagcgtcaaccccgccgagtttctccagatctacacgaccgggatcgaggccgccgggggtgacgacagggtcatggcgaatttcttccccatggccctgaagggtcaggcgtggggttggctaatgaacttgccacccgcgtcggtccactcttggaaggatttgtgccagcagttcaccatgaacttccagggcatatatccgcgcccaggcgaagaagcggacttgcatgcggtacagcgaagggacgatgagtctcttcactcgtacattcagcggttctgtcaagtccgcaacaccataccgtgcatccccgcacacggggtgatctacgcgttcagggggggcgtacggcgcaaccgcatgctcgagaagatcgcctccaaggagccccagaccaccgcgcagctttttgagctcgcggaccgtgtggctcaaaaggaggaggcctggacctggaactcctccgattctggtgtggcagcttcggccgcccccgggtccgccgctcggtcagggcggcgggacaggaggaggaagaaggggtcggcccgttccgacgacgagggtcacgtcctcgccgtcgagggcgcttcgcgggccccccgaaaggggaggcctgtgagcgacaaaaagaaggaggccggcgctcccagcagggagcgcccgaccggcaagtggtgtaccgtgcacaacacctccctccacgacctcgcggactgccgcgcggtcaaaagtttggctgagcggacgaggaagtgggaggaggagaagaagcaggagcgctgtgagggcaaaaccccggcggctcccaccggcaaccggcgaggtgaggccaagcagaaggccaccgccgaggacatcgacgatggcgacgatgacctggggttccaggagcctgaggccaccgtcgccaccgtcgatgggggagcgtgcgctcacgcttctcgccggagcctcaaggacatgaagcgagagcttctggccgcggcccctacccatgaggcgacgcggcgggcgcggtggtcggaggttgccctcaccttcgaccagaccgaccacccgccgtgcgttgcccggggaggacagatcgcgatggtggtttcccccaccgtttgcaatgtgaagttggggcgtgtcctcatagacgggggtgcagccctcaacatcctttcccccgcagcctttgacgccatcaaggccccggggatggtgctccggccgtcccagccgatcatcggtgtgacgccggggcacacctggccgctgggtcatatcgacctcccggtcaccttcggtggttccgccaacttccgcacggagcgggtggacttcgatgtggcggacctcagtctaccctacaacgcggtcctagggaggcccgcgttggtgaagttcatggcggcggtccactacgcctatctccagatgaagatgccgggccccggtggccccatcaccgtccatggcgacctcaaagtcgcgcttgcttgtatggagcagcgcgcggaccacctcgccgcggcgtccaagcccgcgggtggcgacgagaggctcagcacctccgtcccggccgccccaaggcagcggatggtcacgtgcgacgaggtcccggaagacgcgctcgtctccttcctgcgggcaaacgccgacgtcttcgcctggagaccggcagacatgccaggggtccccagggaggtgattgagcaccgtctcgccgtgcggccgggcgcaaggccggtccggcagaaagtgcggcggcaggccccggaacgtcaagccttcatccgcgaggaggtggcgcgacttctggaggccggattcatccgtgaggtcatccatctggagtggctggcgaacccggtcgttgttcccaaggccaacggcaagcttcggatgtgcatcgactacaccgaccttaacaaggcatgtcctaaggacccttaccccctgccacgcatagatcagattgtcgactccaccgcggggtgcgaccttttgtgttttctagatgcatactctggttatcatcagattcgcatggctagggaggatgaggaaaaaactgcattcattacccccataggaacttattgttatacgacaatgcctttcgggttaaagaatgcaggtcctacttttcagcgtactactcgaatttctttgggtagccagataggaagcaatgttgaggcctatgttgatgacttggttgtgaagacgcgcaaccaagagaccttactctcggatctagcggaaactttcggaagtctccgctccacccgcataaagctgaaccccgataagtgcgtgttcggcgtgcctgcgggcaagcttctcgggttcttggtctctgcccgaggcatcgaggccaaccccgagaagatacgagctatagagcggatgcgcccccccagcaagcttagggatgtgcagtgcgtcaccggctgcatggccgccctaagtcggttcatatcgaggctgggagagaaggcgctacccctatttaagctcctcaaacgctccgggccgtttacctggacggaggaggctgagcaggccttcactcagttgaaggcgtacctcagttctcccccagtcctggtcgccccggagccagatgagccgttgctactctacctggcggcaaccccgcaggtggtcagcgcggcgttggtcgtggagcgcgacgaggacaaccctcactccgcgcatccccaccctgtgtcgactcgacccgggagagagcagggaggagaggcccccgagccgaacggcggcccaaggcccccgacggtcggagctggccctccgcctgcttgtccgacggtgccaggcgcccccgacccccaggatggccccggggccactgcgggaaggctgcgcctgtcgccctctgaccccgaggtcatcggcacagaagccgagtgcgccccgcgtggcctctcggacgaagagcgccctggagatgcggcccctggcgaagaggattggccccgccgaaaggtgcagcggcccgtatacttcgttagcgaggccctccgggacgccaagacccgataccctcaggcccagaagatgctttacgctattctgatggcttcgaggaagttgcgccattatttccaggcccatcgggtcacggtggttacgtcttacctcctcggccaaatcttgcataaccgagaaggtactggacgggtgggcgccggtgcgggggtcacgttgacctcgccgagcggagacgtcctcagatacctggtccgcctcgattttcgggcgaccaacaatatggcagagtacgagggactccttgcggggctcagagtggcagctggactggggatccgccgcctcctggtgttaggcgactcccagttagtcgttaaccaggtctgtaaggagtaccagtgctctgacccgcagatggacgcttacgtgcgccaggtgcggcatatggagcgccatttcgacgggatagagcttcggcacgtgcccagacgggataacgcggtcgccgacgaactctcaaggctcgcttcctcgcgagcccagaccccaccgggcgcctttgaggaaaggcttgcccagccgtcggcgcgacccgaccccctaggggagacggacgcgcctgaacggcccccgaggcccgtcggagtccaggcctcggggcccgaggggagcgctcccagctcccctagattgattgcttggatcactgagatccaggcgtacctcgcagataagactctacccgaggaccgcgaagggagtgaacgcgtccggcgcatctccaagcgctacgtgctggtggaagggaccctctatcggcgcgcggctaacggagtcctcctgaagtgcattcctcgggaacaaggcgtcgagcttctcgccgatgtccatgaaggcgagtgtggagcccactccgcctcacgcaccttggttggcaaggcctttcgccagggtttctattggccgacggctctcaacgatgcggtcgacctgatccggcggtgcagggcgtgccagttccacgccaggcaaacccatcggccggcccaggccctgcagaccatacctctttcgtggccgtttgctgtctgggggctcgatatcctgggtccgttcaggcgggccccgggcgggttcgagtatttgtatgtcgctgtcgacaagttcactaagtggcccgaggcttatccggtcatcaagatcgataagcactccgcgcttaaattcatcaggggcatcactgttcggtttggggtgcccaaccgtatcattacggataatggcacccagttcactagtgagctcttcggtgactactgcgaagacatgggcatcaagctctgcttcgcctaccccgcccaccctagaagcaatggccaagtggagcgcgccaatgcggaaatcctcaagggcctcaaaaccaagaccttcaacatcctcaagaagcacggcgactcgtggatcgaggagctgccagcggtgctctgggcgaaccgaaccacgccaagccgagcaaccggggaaacgcctttcttcctcgtctacggcgcggaggtggtcctcccatctgagctcaccctgaggtcccctcgggtcaccatgtattgcgaggctgatcaagatcagcttcaccgagacgacctcgactatttggaagagcgaaggcggcgcgcggcgcgcgctaccagcagagcctgcggcgctaccatcagtgccacgtccgggcccgatcactctgcgtcgacgacctcgtcctacgccgcgtccaaacgcgtgccggactga

SEQ ID NO: 46229 - DNA, 375 bp, Oryza sativa
  Clone ID: PAT_MRT4530_49115C.1
aatatcctccccaacacccatctcagaaagcactggcaatgcagagttacaacctgcttcatccaacccgccagaaaactcagaagactcagccacagaagagaaaaggctgctgctggtttccccagaccagttgacactttgagacccatcgtcagatgctgcactcataagcacaacaagagacagagagctggtagaggtttcacccttgaagagctcaaggctgccaagctcggtgccgctttcgccagatctgtcggtatctctgttgaccacagaagaaagaacaagtctgtcgatgctttccaagccagcgttcaaagactttcggactataaggaaagactcgtcttgttcccaagaaaggacggt

SEQ ID NO: 46230 - DNA, 6318 bp, Oryza sativa
  Clone ID: PAT_MRT4530_49116C.1
tcatcccccgttctctcgttttagccccatcccgagcctccccgtggtccctagctccctccccaccgtcgccctctctctcccacgtcgccggccgcctccagccgccggtgccgcctcgaccgtgcgccggccggccgcgccgtcgcctcctccagcgtcgccgccacctcctccaccccggcttgccctccgtttcgcgaggtgacccccggagctgccttcccgccgtcgccctcctcttttctccgcgccggccacctccagccgcacctcccgcctcacccgtgcaccctccggctgcgccgtcttctccctcggcctcgcagccacctcctctccctcggtcagccctccgtttcgcggggaaagcaccggagacgcgtcctcgccggcgtccagtggcgtcgccaccacttctccgtctccggccggctgctgttcgtcgccggtgcgccgaccgacgtcgccgtctcctccgttgacgtcgcagtgccgtcctctctcccggccaggccacggcgtcgcccgaatttcgccggaacgccgtcgtctccgcgccggcctctccttcctcctcgtcggctcgtcgccccgctgcaccaccaccttcaccaacgtcgcagcggcgtgttccacgccgtcccctcctccgctcagccgctgctgcctgccatcatcgtttcatcgtcgtctccgatcgttctcgtcgtcgacgtcccatcggtcgcccggctcgtcgtctcgcggcgccgcctccgtcgtcggcatcgcagcggcgtggtcctcgtcgtcctcgtccccgtgcagccgctgccggctgtcctcgtcgcctcctcgccggtcccggcaaaactcaactggggtctgagccttggtcctctaactccatcttcagctcagaagcactacacttctgaaaagggggaataatagcaaggctgagtacaaccaccgtactcagcaagccacaccaacgatgcagacgtgcaaggggaacacaaggacggtttcacccccacccctcaaaaggcagtgggcggtcccctcttgcgccgcagtgaatccggcagctggacaaccagacaccccggccgacccaactccatcacgcccaccctcgccaccggtgcctaggaaagggtcgagctatacttcagatcaagcagttacccactcccgcttgtggcaagcgcttaaatcaattatgacgtcatccgacggggaagaggtggcgccggcaagcgggcccaccggtcagcggcacaagggagccggtccaccgtggaccaggaccaccgaggcggtccaccgccggtccacgggaaccgacggcccggattggcccaaagccgaatcggacggccacgaggcggcgcggctggggcacgggcacggcacagccggcctggtcgagcgatagcgcgcggcggcgtgcggccagacgaccgccggcgacagcggcgcgtcgcggcagcgggcacggggagcggcggaggagggaaaaaaaaggagaagggacggtggggattctcaccgaggacggcgacggcgagacgaccacagggaggcggctggcggcggaaaggatggcggcgactggcacgagaggcggcgggaacggcgttccggcgacacccgaccatggcggagacgcggccgagggccggcggggccctcgagatgacgaagccggaggaggtggcggcacaagtcggcgtcgaccggagaggcggcgcgacgcggctgtactcggcggtggcggcggagagagatggtgaacgcggcggcggcgttccaggggcagggaggggaaacggagtaggggccggggtgcggcgaggaacggcgatgccgatggcggtggtagcgcagcgcggcagcgacgggagcggtggtggcgcgcgactggaggtgacgagaggcagctgtggctcgggtgcacggtggaggtggtgtttcggcggagttttgtggaaacggagcggtggccggtgtgcggcaaagagcggcggagccgaccggtgcaagcggtgcggcgcggcggcggctacagcgacggcggcgtgcagccggagctcgccggaaagcggcagagcgcgggagcaacgaggggagagcggttgggctcggggaggagaaatcgtggccggacgtggcagatttgaagcggcaacggccggcgacgtgggtgacatcgtgggcgaagtggggctcgattcggcgccaaaaattggggaaaaacgggggaggaggtggaggagagggatggctcccggtcccacgcgagagagggctcgaggaggccgggaatggtggcgacgtgggcggttttcggcggccatggcagttgccggcccgggctggaggttggggatgacagtcaaaagtttggctgagcggacgaggaagtgggagaaggagaagaggcaggagcgccgtgagggcaaggccccggcggctcccgccggcaaccggcgaggtgaggccaagcagaaggcccccgccgaggacatcgacgatggcgacgatgacctggggttccaggagcctgaggccaccgtcgccaccgtcgatgggggagcgtgcgctcacgcttctcgccggagcctcaaggccatgaagcgagagcttctggccgcggcccctacccatgaggcgactcggcgggcgcggtggtcggaggttgccctcaccttcgaccagaccgaccacccgccgtgcgttgcccggggaggacagatcgcgatggtggtttcccccaccgtttgcaatgtgaagttggggcgtgtcctcatagacgggggtgcagccctcaacatcctttcccccgcagcctttgacgccatcaaggccccggggatggtgctccggccgtcccagccgatcatcggtgtgacgccggggcacacctggccgctgggtcatatcgacctcccggtcaccttcggtggttccgccaacttccgcacggagcgggtggacttcgatgtggcggacctcagtctgccctacaacgcggtcctagggaggcccgcgttggtgaagttcatggcggcggtccactacgcctatctccagatgaagatgccgggccccggtggccccatcaccgtccatggcgacctcaaagtcgcgcttgcttgtatggagcagcgcgcggaccacctcgccgcggcgtccaagcccgcgggtggagacgagaggctcagcacctccgtcccggccgccccaaggcggcggatggtcacgtgcgacaaggtcccggaagacgcgctcgtctccttcctgcgggcaaacgccgacgtctttgcctggagaccggcggacatgcccggggtccccagggaggtgattgagcaccgtctcgccgtgcggccgggtgcaaggccggtccagcagaaagtgcggcggcaggccccggaacgtcaagccttcatccgcgaggaggtggcgcgacttctggaggccggattcatacgtgaggtcatccatccggagtggctggcgaacccggtcgtcgttcccaaggcgaacggcaagcttcggatgtgcatcgactacaccgaccttaacaaggcatgtcctaaggacccttaccccctgccacgcatagatcagattgtcgactccaccgtggggtgcgaccttttgtgttttctagatgcatactctggttatcatcagattcgcatggctagggaggatgaggaaaaaactgcgttcattacccccataggaacttattgttatacgacaatgcctttcgggttaaagaatgcaggtcctacttttcaacgtactactcgaatttctttgggtagcaaattaggacgtaatgttgaggcctatgttgatgacttggttgtgaaaacgcgcaaccaagagaccttactctcgaatctagcggaaactttcgaaagtctccgctccgcccgcataaagctgaaccccgataagtgcgtgttcggcgtgcctgcgggcaagcttctcgggttcttggtctctgcccgaggcatcgaggccaaccccgagaagatacgagctatagagcggatgcgcccccccagcaagcttaaggatgtgcagtgcgtcaccggctgcatggccgccttaggtcggttcatatcaaggctgggagagaaggcgctacccctatttaagctcctcaaacgctccgggccgtttacctggatggaggaggctgagagggccttcactcagttgaaggcgtacctcagttctcccccagtcctggtcgccccggagccagatgagccgttgctactctacctggcggcaaccccgcaggtgagagcagggaggagaggcccccgagccgaacggcggcccgaggcccccaacggccggagttggccctccgcctgcttgtccgacggtgccaggcgcccccgacccccaggatggccccggggccactgcgggaaggccgcgcctgtcgcctctgaccccgaggtcgtcggcacagaagccgagtgcgccccgcgcggcctctcggacgaagagcgccctggagatgcggccccaggcgaagaggatcggccccgccgaaaggtgcagcggcccgtctacttcgttagcgaggccctccgggacgtcaagacccgatacccccaggcccagaagatgctttacgctattctgatggcttcgaggaagttgcgccattatttccaggcgtatcgggtcacggtggttatgtcttaccccctcggccgaatcttgcataaccgagagggtactggacgggtggtgagatgggcaatcgaactctctgaattcgatttgcgctttgaaccacgccacgcgatcaagagccaggccctcgccgactttgtggcggagtggaccccagctcccgagcccgtccccgctcccgaggccagctcgggcccctcgcagctgccccacaccgcctactgggtgatgcagttcgacggctccctgtctcttcagggcgccggtgcgggggtcacgttgacctcgccgagcggagacgtcctcagatacctggtccgcctcgactttcgggcgaccaacaatatggcggagtacgagggactccttgcgggactcagagtggcagctggactggggatccgccgcctcctggtgttaggcgactcccagttggtcgttaaccaggtctccaaggagtaccgatgctctgacccgcagatggacgcttacgtgcgccaggtgcggcgtatggagcgccatttcgacttgatagagcttcggcacgtgcccagacgggataacgcggtcgccgacgaactctcaaggctcgcttcctcgcgagcccagaccccaccgggcgcctttgaagaaaggcttgcccagccgtcggcgcgacccgaccccctaggggagacggacgcgcctgaacggcccccgaggcccgtcggagtccaggcctcgggacccgaggggagcgctcccagctcccctaggttgattgcttggatcactgagatccaggcgtacctcgcagatatgactctacccgaggaccgcgaagggagtgaacgcgtccggcgcatctccaagcgctacgtgctggtggaggggaccctctatcggtgcgcggctaacggagtcctcctgaagtgcattcctcgggaacaaggcgtcgagcttctcgccgatatccatgaaggcgagtgcggagcccactccgcctcacgcaccttggttggcaaggcctttcgccagggtttctattggccaacggctctcaacgatgcggtcgacctggtccggcggtgcagggcgtgccagttccacgccaggcaaacccatcagccggcccaggccctgcagaccatacctctttcgtggccgtttgctgtctgggggctcgatatcctgggtccgttcaggcgggccccgggcgggttcgagtatctgtatgtcgctgtcgacaagttcactaagtggcccgaggcttatccggtcattaagatcgataagcactccgcgcttaaattcatcaggggcatcactgctcggtttggggtgcctaaccgtatcattacggataacggcacccagttcactagtgagctcttcggtgactactgcgaagacatgagcatcaagctctgcttcgcctcccccgcccaccccagaagcaatggccaagtggagcgcgccaacgcggaaatcctcaagggcctcaaaaccaagaccttgaacatcctcaagaagcacggcgactcgtggatcgaggagctgccagcggtaaacagctgcgcatgcatctgtttggtgaatcctgaaattataaatagttag

SEQ ID NO: 46231 - DNA, 252 bp, Oryza sativa
  Clone ID: PAT_MRT4530_49117C.1
atggaggagtgcgagctcatgttgctcgtccaggtcaccacattcgcgtgctgcagcttcgtcatcgggttccgcgcggatggattcgccgctgagctcgtgtggggccgcgacgcgatcgcgaacccttgccaccgctgtcgtcagcagcctccccgacccaccgatgccatcgacatctccgccgactacatcaaccacttcaagagccagtacacacatggcggccgtcgccaggtgctcggcgtttga

SEQ ID NO: 46232 - DNA, 115 bp, Oryza sativa
  Clone ID: PAT_MRT4530_49118C.1
agcctcttcatgcacgcagagactacagaagctcaaggggggggccaattcaaagctagcgggaggggcgcaaagactacagcggtacgcaaaggtgcagtcaacggattggcag

SEQ ID NO: 46233 - DNA, 108 bp, Oryza sativa
  Clone ID: PAT_MRT4530_49119C.1
atggctgcgacctttgttcctggggagctgccgactgatcgctttccagtcggcacccttgttgtgccactcgctttagtgcatcgcaccaccgagtctcatgtgcct

SEQ ID NO: 46234 - DNA, 4890 bp, Oryza sativa
  Clone ID: PAT_MRT4530_4911C.1
atgttcaaggccttgttcttgatggtggatgaggaggagcccttgcagttggagacggagataaaccaagaaacaaggaccaagaaccaaaccctaggtaggataggaagaagagaggagaaggaagagagactcaaaagtgagaaggtggccagcggaggagacggtcgccggaggggagagcgccgcgtcgtcggagcgccgtcgaatcccagtcacgtccgtgtcaaggagcaaccactgtccgagggcgctaagtcagttgcagaagacgctggagatgatgctgattccggaaggagggaagatgaacttgaagcagctgaaggagaagtggtgcgccgtgcaacaaggcccgtcaagataaacctgaagtactatgggcctgactgggccgtgatgtcgcaggagagtaaacttgatgtcttgttgagaactattgaggagaatgagaagaagagaatggaggcggaggcgaggactcgggatgatctcgctgatctgaagaagatggtggagatttgtcttcccaagatggaggagaaggtggaaaaactcagcgagtccgtgcagacactaagccacaagcatcacaccgatctgagtactagtcttcctcctatgacttgccctaagtttgatggtgagaacccacagatgtggaagagcaattgtgagcaatactttgatatctatggtattaatcctatgcattgggtcaaggtggccacactcaatttcagtggtaatgcagcattttggcttcagtcgatccgttctcaaattatgggtattacttggcaaactctgtgtgacttgatctgtgctagattcactagagatatacaggaagcactaattagaaaatggttccatgcgcaacagaacagcacagtcactgaatatgttgaacaatttgacagtatcatgcaccagctaatggcatatgacagtgctctcacccctgtgtattttgttactaagttcattgaagggctcagggatgatgtcaggggtgcagttatgctacagagaccccaggaccttgactcagcttgttcaattgccttgctccaagaagaaatcctggaaagtaataagtctactacacacagaaggtctgataatcacattgcgttcaggccagtaccaaaactcaacaattatgtgccagtgcctccaggacagagatctgtagctgttagtgcacatgatgacaaaaagggagtggaatctgctaagtccagagaggacaaatttgcttctcttaagtcttacagaagggctaagggtctttgttttgtctgtggtgaaagatgggggagagaccataaatgtgctacttctgtccagctccatgttgtccaagaattattggaagcaatgcgctctgagtgtaattctgatgacatcctgacagctaaagaccctattgaatcagtagaggcaattgatggaggattgatggctatatctcagcaagctttattaaggggatgggttcaaggaacagagattcttatgttgattgactcaggcagtacacactccttcatagatgagagcattggcagcaagcttgtgggcctcattcctttaagtagatctgtaactgtgaaaatagcagatggtggtactatgaagtgcacacagcaaattctggggtgtcgttggtggactcaaggtcattatttcaagagcgacttcaagctgttgaatttgggctcttatgatgctattcttggcatggactggctagaacaatttagtcctatgcaggtggattgggttaacaaatggctagaggttgtgattgatgggcagcctgtcagactgtatgtcaatcctagacccaagggattacccccaaagagaatatgtgatcatcacattcctttacttcctgggtccaagcctgttaaccttcgcccttatagattcaatccagccctcaaggatgaaattgaggcacaaatttcagagatgttgcaaagtggtgttatccaaccgagtcagagtgcctttgcatctccagcccttctagtcaggaagaaggatggcacttggaggctagtaattgattacagacaactgaatgccatcactgtcaagtgttcctaccccatgcctgtgattgatgaattgctagatgaattacctggggctaaatggttttcaaaacttgaccttagggctggagctccagcaacctttcagggtgccatgaatgagacatttaaatcagtcctgaggaggtttgctctggtattttttgatgacattcttatttatagccctgatttgccctcacaccttgaccacctcaagcaagtgttaaccctgctgcagcaacatcattggcaagtaaagttatccaagtgttcttttgcacaacagcaacttacctacttaggtcatgtcataagtgcagagggggtatctactgatccaagcaagattcaagagattgttaattgggaaacaccaacaaccaaaaagaaactcaggggattcttgggtttggctggctattacagaaagtttgtgaaaggatttggattaatcagtaaaccaatcactcagttactacgaaaaggggtgccatataaatggactttggagactgaaactgccttccaacaattgaaacaagctctggtttctgccccagtgctggcattacctgattttagtttgccttttactgtcgaaattgatgcttcagattcagggattggggctgtcctgtctcagaacaaacacccaatagcctacattagcaaggcacttggtccccgaaatcgagggctatgtcacgcccggaatttctatccaaaattccaaacgcttacatacggccgagatcgatcggtccacgaccggctcacgggagagggcgacgatgacgtcggcgatgacgtcaccaccggcggcggcggctcggcggctcggacggcgcacgctcgccggcgaacggcggcgcttcggcacgaacggaggacaccaacgggtagcggacggcacggcgaactcaccggcgaccaaagcgatggcggaagaggaacggacggtgacggcgacgaggaggaagcggcggcaaacttcgggttgacggcggcgacggtgctccggcggtcttcggcggcggcgaaggagtggacgaggacggcggcgacttggcgaccacgacggcggtcttcccgagcgacggcgacggctggaacggcggcggcgcacggctggagcgacggcggcgacggcggcgctagggcacacggcgctagggcgtttccgacgacgagaggcgaaggcaaagggtgtgacaggctatcaacttatgagaaggaatgtatggctatcttgttagcagttgatcactggaggtcatacttgcaacttggggaatttataattctaactgatcaccatagcttgatgcacttatctgatcagcgtttacataccccatggcagcacaaggctttcaccaagttattgggcttaaactataaaatttgctatcgtaaagggaccagcaatgctgctgcagatgctctatcaagaaagtttcaaagtgattctgagttgtccatcatctctagttgtgttcccagttggttgcaagaggttgctaaggggtatgaacatgatccctattcttctgatctgctttcagccttgtctgttcagcttgactgcaaacctggatttcagttgcagtctggaattattaagtacaaggggcgcatttggattgtcacttacagtaagatcaagaaactgtttgcttggcagggtatgaaatctcaagtaaaggattttgtacagcaatgtcaaacttgtctgcaagcaaaacctgacagatctaagtacccagggcttctacaaccattacctgttcctgatggatcttgggaagtcatcatcatggactttattgaagatcgtgacaaaatttttactagccagctatggacttatcttttctctgcttctggaacaaaacttaatctgagcacttcttaccatccccagtctgatcgacagacggaacgagtaaaccagtgccttgagatttatctgcggtgttttgctcatgccaatccttctaaatgggtcacatggttgcacttggctgaatattggtacaatacttcttaccattcctctttaaagacttccccatttgaagtcctatatgggcactctcctaggcattttggaatcaatgtggacacttgtgaaattcctgatttgcaagaatggctaaaggagaggaaactgatgcaagcattggtgcaacagcatttacatagagcaaatcagcaaatgaagcatatggctgacaagaagagaagtttcagatcttttgcagttggagattgggtgttacggaaaattggcacagtagcatataaacttcagcttcctgcaactgccagtgtgcatcctgtctttcatgtatctcagttaagggcggctaagggttataaagagctttcatcacttcagttgcctaaagctaactctgctctgcaagttccttctcagattcttgatagcagggtggtcaagagggctaccgatgctgttcttcaagtgctgatccgctggtctgattctgcagccgaggatgccacttgggaaaacatggaggacttacgcactcgatttcctactgctttggcttggggacaagccaaatttcaaggggaggggattgtcaaggagcaaccactgtccgagggcgctaagtcagttgctaaagacgctggagatgatgctgattccggaaggagggaagatgaacttgaagcagctgaaggagaagtggtgcgccgtgcaacaaggcccgtcaagataaaccagaagtactatgggcctaactag

SEQ ID NO: 46235 - DNA, 312 bp, Oryza sativa
  Clone ID: PAT_MRT4530_49120C.1
atggacgtcatctctccagccaagcccggcagcgacatcaccgacgacgacctgggcaggccaggcagctgcagtggcagtgccagcggcatcgtcgacgacgacccagccaagcctggaaattgcagtggcagtagcgacgttgccgatgacgatccggccatgtccggcaatggccgtggcggtggcgtaggcagtggcagtgccgccggcgtggagggctcgtccgtgctcgacaccgcggcggcggcgttcaccggctctgtgtcctccttccttctgatcttgtacacgcgtttaatgtttgactaa

SEQ ID NO: 46236 - DNA, 422 bp, Oryza sativa
  Clone ID: PAT_MRT4530_49121C.1
gacaaacaaactgcgcattacaaaatgcaaataagcacttttgcattcaccaagttgtagttgaagcaattacagggttacactttatcctcctgattctagaaagcatggacctcgcatcgaaaatatacagccgggcccaggatttggatcagaatccaccaaaaagaaacgaagtttgccgctgcaacagccacctccatccagttatctagactgcataaaacatatttcaccttctaaaggtggacttaaaatggcacggaaacaactatctacctgacactaaggtgattacgattagctccaagttgaattaacatcactatcatccgcagcttccatgttacggagtcactgacacctgaacaataactttagatttcaaaaaagcccacgcgtccgaaagggaccaacccaga

SEQ ID NO: 46237 - DNA, 1869 bp, Oryza sativa
  Clone ID: PAT_MRT4530_49122C.1
atggcaggagttggcactcagccgacgagcctcaggaagtatcttggagccctcaaggacaccacaactgaattggatattgcaattgtgaaggctacaaaccatgttgagcgtccatcaaaggagaagtacataagagaaattttttattccatttctgcttcaaggccacgagcagatgtagcttactgcatccatgcccttgcaagacgtctttccaagacacgcaattgggcggttgcattgaagacattaattgtcatacatcgcgcccttcgagaggtcgatcccacttttcgtgaagagcttatcaattatggcagatctaggtcccatatgctaaacttggcctactttaaggatgattctagtgcaggagcttgggatttttctgcttggatacgcacttatgctttatatttagaagagagacttgaatgtttccgagtgctgaagtatgatgtggagacagatcctccgaaaactcgggatcttgaaactggtgatttgcttgatcatctgccagcattacagcaacttctttttcggctccttgcttgccagccacaaggggcatcatcttacaatgtcataatccagcacgcactttcaatggttgctctggaaagtgttaagatctacactgctattagtgatggtacaattaatctggttgacaagttctttgagatgcaaagaagtgatgctgttagggcacttgatatatacaaaagagcaactaaccaggctgaaagactatcagagttttatgaagtgtgtaaaacgatacacattgggcgtggtgagaagttcttaaaaatcgaacagcctccagcttcattcttagtaaccatggaggaatatgtgacagaagctcccactgtagctcaaaaagataaggtactggcaatcgaatacaagaaagaggcagaggaggaagaaaagccggcatcgcctcctcccgctccagagccagaaccagaacaagaaccagagccagagcctgaaccagtaaaagaggaagcacctaaagaggagccaacagatttgctgggtctgaacgaaccgaaccctgccgcagccgagatagaggagaagaatgctttagcccttgccattgttccgatagatgatgtacctaaagttgcacctgctcaaaatggagtcactggctgggagctggcccttgtcaccacacccagctcaaacgaaactgctattacttcaagcaagaagctggctggtggactggacttgctcacgctcgacagcctgtacgacgacgcgaaccggagagcgagccagccgacgagctacaacccatgggatgtcaaccccggcgtcgccggcgccggcgccgccccgatgatgcagcagccgatgatgcacgacccgttctacgcctccagcggctacgcggcgccgcacaacgtgcagatgaccgccatggcgcagcagcagcaggccttcatgctccagcagcagatgatgatggccgccgccgccgccgccgccgcggcgcccccgcctcaggtgttccaccaccaccagcagcagcagcagcatctccaggccaacccggcgaacccgttcggcaacccgttcgccgccgccgcagccgcccaccacccttacggcgccgccgccgccgccggcaacggctacacggggctcatatgatgatcattatccagcctcggcgatgttggtcggtgtcgcactactttccaatgtcgattctttttttggctggaaaaattttgtagcttttcttcttcattggttgatgggtttgtagcacacacagggtagaaagaaagaaagaaagaatttcggtgggtggttcgtcccgaattcggacaccgttac

SEQ ID NO: 46238 - DNA, 1116 bp, Oryza sativa
  Clone ID: PAT_MRT4530_49123C.1
atgccaaatgcagagagcagtttgttcaagatgccaactgcagatgcaaatattgctgccctgcacaaggaatgggacgatgcattgtgcccaatttgcatggatcatccccacaatgctgttcttctgctgtgcagttcccatgacaaaggatgcagatcctatatatgcgatacaagctatagacattcgaattgcctagacaggttcaagaaaatgaaagtagaccacaatgacggttcgtcacagcaaagttcatcgttgcctagggacataagtagccaaaatgtaccccagagatctcattttgatcccactggagaaatccaaacaggcatatctgaatcccatgaaattttcaatcatcgagatgctatccaaagctctgctggcctatctggacagcagggagaaaatagctataatcaagatctagatttgactttggaagctcagcaaagagagagcagtagcactgtggagtcaagtgaactgacacgcttgaaccaattggcatgcccattatgtaggggcactgtcaaaggctggaagatcatcaaagaggccagagaatatttggatgagaagtcgagatcttgctcgcgggaaacatgtgcattttctggcaactacagggagctccgtagacatgcccggagagtccatcccacaacaaggcctgctgatgtggatccatcaagacgccgtgcatggcaccgcctggagcaccagcgtgaatatggtgacatactaagtgcaatcaggtcggctatgcccggagcagttgtgtttggtgattatgttgttgaagggggtgacatgttttcacctgaccaggaaggaggcatgccaaatgaaccaagtggatctttgttgacaacattctttctgttccatatgatcagtagtagtccgatgagatcaggagatgagataagaggctcatcgaggggcctgagaaggcagaggcgccgttatttatggggagagaacttactaggtctccaatatgaagacgaggacgaggacgatgaggaggaaaacctagatgaagatgttcaaagaccaaggagtcgccggagatttgtaagatcaaggtcggaggagcgatcctaa

SEQ ID NO: 46239 - DNA, 529 bp, Oryza sativa
  unsure (1)..(529): unsure at all n locations
  Clone ID: PAT_MRT4530_49124C.1
aattcggcacgagtttcaaatcaagcaaagctaaggaaaatcttgaagccgtcctgtctgagatatctcagaagactctgataagggggcagaactacaactctgggaacacagttgcttatgctttgttggacgggaacaaacagtccgccttcctgtccacgtttgacaaatcagcattcaagtcgtctgataaacttctccttgcctacaagccccgacggggtagatgatgctgtgtatgacaatgaggtgactatggaagaggctgaaaggttcgtggtttctngttttgaatggagatgttcattggctcagccggacgaaaaccgttcttaggtagaccgtagacggctatctctgccattgcaaccttgttttcttgggaacgattcaagtaaagagtatatatatagttcttatagtgtagtaccccttaaggaggtaacttgggaacgttttctgcttgtacatatctgaatctgattggaatgaagagagctaaaatattctccaaaaaaaaaaaaaa

SEQ ID NO: 46240 - DNA, 162 bp, Oryza sativa
  Clone ID: PAT_MRT4530_49125C.1
atgacgaccggcgtcttgccgacaagcggtggcccgacgatgcatggtggaactagtggacggcacggcgacatcggagtcacggggatggaggaagacgctgacaaggccagggcgttggtggcaacaagaagcggaagtgttgagcacttcatgtggtga

SEQ ID NO: 46241 - DNA, 1158 bp, Oryza sativa
  Clone ID: PAT_MRT4530_49126C.1
atggaacatgatatcattatttggggttatatgctgcagatgagaggtgggccgctgatggtgacatctcagtacggggcagtcataaggaactcgatagtcaggggtggcttcttgaagcaccaggagggcattggaaagagggagacgtgggagggagaggggctggccctcgggcttcatgctccaccatctgcttcgttgctggtggttaggggagggcgctaccaccgctcgccgcctcccctcttgtgccgcggcctcccctcccgccggatccgatggaggggagggcaccgcctacaaccatcggcgaggccaccagaaaccacgcggaagccgcaaggatggcggcggcggggcctccttctcccccgaagtcgcggggtcggagcccacgaccccggccagctcttgggacggcgtcgtgacagcctagccgccggcgtcgaaggtgacgagttcggtggctgggtggaccgggtggtgacggcgaggcggcgacgccggtctagcgccccttgccagacccggtctcctgagccggtggcggacgtggagtggacggtacgacggtggaggccggtgagacagcaggacacgactgtggaggtgacggaggagacagcggtggggatggaagaagttcaggtgttggctgggatccggtcgcgccggaggtggatcccccctcccccctcccctgagggcggatctggtgcggggagagctcgcggcaacggcttcggtggcaacgacgcagagctcgtggtgacggtggcgacaatggctggacgacaacgacagcgggtggctggccaacggcagcaacggctgatggctgctgtggcaacgaggtgcacccgcggcaggagcggctgtcacggcagcgacagcggctggacggtggcgataatgtggctggccgatggcagcagtggctaccgtggctgcggtgggaggaggcatggcggacttggactgctagctgggggagtggcagacggccacacctggctggcgcgacagcgattggacggtggcgacaatgtggctgggggggcgctggtgcagtggtcccacatgtcgccagaggatgagcggtggtggagcattggtgcgtcagccgtggacttgtatgtggtgagcggcgggtga

SEQ ID NO: 46242 - DNA, 388 bp, Oryza sativa
  Clone ID: PAT_MRT4530_49127C.1
atgaatgctaactttactttatatccgaattatattgtttatattgctagcttatctgggagatgcaatggaacatgtatagtgtttgcttatgcaattactctatgtgatgacgatgatattagattagtatctggtagtttaggcgtagtgtctagattacaggatatcattatttggggttatatgctgcagatgagaggtgggccgctgatggtgacatctcagtacgggtactcctccgcgcgtgtatatagtcctaagttaatttcatggggagggtactcctccgtatttagtcccggttgtatggtcatgaagggcagtcataaggaactcgatagtcaggggtggcttcttgaagcaccaggagggcattggaaagagg

SEQ ID NO: 46243 - DNA, 399 bp, Oryza sativa
  Clone ID: PAT_MRT4530_49128C.1
atgggcgtggccactgtcgacgtcgcgtcgttgcaccctctcgccaagctctcgcctcagacgttcacaccgtcacctccacagtcgtgtcctgctgtctcaccggcctccaccgtcgtaccgtccactccacgtccgccaccggctcaggagaccggggtgccagatctagcggggagggcgccagaccggcgtcgccgcctcgccgtcaccacccggtccacccagccaccgaactcgtcaccttcgacgccggcggctaggctgtcacgacgccgtcccaagagctggccggggtcgtgggctccgaccccgcgacttcgggggagaaggaggccccgccgccgccatccttgcggcttccgcgtggtttctggtggcctgctcgggcggcggtga

SEQ ID NO: 46244 - DNA, 561 bp, Oryza sativa
  Clone ID: PAT_MRT4530_49129C.1
atgcggtgcctttggcggaaggaggagacagcggtggggatggaagaagttcaggtgttggctgggatccggtcgcgccggaggtggatcccccctcccccctcccctgagggcggatctggtgcggggagagctcgcggcaacggcttcggtggcaacgacgcagagctcgtggtgacggtggcgacaatggctggacgacaacgacagcgggtggctggccaacggcagcaacggctgatggctgctgtggcaacgaggtgcacccgcggcaggagcggctgtcacggcagcgacagcggctggacggtggcgataatgtggctggccgatggcagcagtggctaccgtggctgcggtgggaggaggcatggcggacttggactgctagctgggggagtggcagacggccacacctggctggcgcgacagcgattggacggtggcgacaatgtggctgggggggcgctggtgcagtggtcccacatgtcgccagaggatgagcggtggtggagcattggtgcgtcagccgtggacttgtatgtggtgagcggcgggtga

SEQ ID NO: 46245 - DNA, 1350 bp, Oryza sativa
  Clone ID: PAT_MRT4530_4912C.1
atggcggcggagctccatttcttggtggtgccgctgatagcgcagggccacatcatccccatggtggaggtggcgcgcctcctcgccgcccgcggcgcgcgcgccaccgtcgtcaccacgcccgtcaacgccgcgcgcaacggggccgccgtggaggccgcccgccgcgacggcctcgccgtcgacctcgccgaggtcgccttccccggcccggagttcggcgtgccggaggggctggagaacatggaccagctggcggacgccgaccccggcatgtacctgtccctgcagagggccatctgggccatggcggcgcggctcgagcggctcgtccgggcgctgcctcgccgcccggactgcctcgtcgccgactactgcaacccgtggacggcgcccgtctgcgaccgcctcggcatcgctcgcgtcgtcatgcactgcccgtcggcgtacttcctcctcgccacccacaacctgagcaagcacggcgtgtacggccgcctcgcgctcgccgccggtgacggcgagctggagccgttcgaggtgccggacttcccggtgcgtgccgtcgtctacacggccacgttccgccgcttcttccagtggcctggcctggaggaggaggagcgcgacgcggtcgaggccgagcgcaccgccgatggcttcgtcatcaacacgttccgcgacatcgagggcgccttcgtcgacggctacgcggcggcgctcggccggagggcgtgggccatcgggccgaccttcggcagcatctcgcacctggcggcgaagcaggtcatcgagctcgcccgcggcgtcgaggcgtcggggcggccgttcgtctggaccatcaaggaggccaaggccgccgccgccgccgtgagggagtggctcgacggcgagggatacgaggagcgcgtcaaggacaggggcgtcctggtgcgcgggtgggcgccgcaggtgagcatcctctcgcacccggccaccggcgggttcctgacccactgcgggtggaacgccgcgctggaggccatcgcccgcggcgtgccggcgctgacatggccgaccatcctcgaccagttcagcagcgagcggctgctcgtcgacgtgctcggcgtcggcgtccggtcgggcgtcacggcgccgcccatgtacctccccgccgaggccgagggcgtgcaggtcaccggcgccggcgtggagaaggcggtggccgagctgatggacggcggcgcggacggcgtggcgaggagggcgcgcgccagggagctcgccgcgacggcgagggcggcggtggaggaaggcgggtcgtcgcacgccgacctgacggacatgatccgccacgtgggggctcaataa

SEQ ID NO: 46246 - DNA, 473 bp, Oryza sativa
  Clone ID: PAT_MRT4530_49130C.1
agcccctcttcttcttcctctctctcccttctcccatcctcgaggtggcgagcggtgtcctggtgagggatggcagctcgcggcagccgggcgaggagggaggcggcgcgcggtggcccggcgaggagggaggcgacgcttggcggcccagggaggagggaggcagcgcgcggcggcttgacaaggagaggcggcgctcggcggcctggctaggagaggcggcgcgaggcggccaggcgaggagggaggcggcgctcggtggcccggctaggagaggcgacgcacggcggtcgggcgaggagggaggcgtcgctcgacggccgggcgacgaagaggagctccgacccggatatgaccatcgaggacatcggcagaggtggccgggcgaggagggaggcgacgcgtacggctaccgagcgaggaggggcggtgccgtccggctgggcatcgcgggcggagcggccgacggagtg

SEQ ID NO: 46247 - DNA, 1914 bp, Oryza sativa
  Clone ID: PAT_MRT4530_49131C.1
atgggtatgaggaggggcagtggtggcgctggcgctgaccaggagggcggcgttccgatgggtgggagtaggggcagtggcgatgccggcactaacaaggagcacggcgttccgatgggtgggaggaggggcagtggtggtgccggcgctgaccaggagggcggcattccgatgggtgggaggagtggcggtagtggtgccggcttcggcttggattgggtgtgggactggcgtaatcccaacaggtctgtgccgccaccaccaacagaagatatcccagctgtcccaggaagctcaggagtactacctctctctaatctccagaggcattctgagaaattatctgatacacatggatcagataaggaagatgaagtggtggattcttcagacgatgattgtgatccatattttaactatttggttgatagctttatgactgcaactaaagctcaaccaaaacagttgtatggcaatattgatcttgttgcagctgcacaacgtcagtctaatgagtatgcaagtagtgctttggattactataacaaggatgaaaacaataagattcaatacagcttaatcaaagccttaaaaagcagtacaattagagagaagggtgagaaatatggacatgtcaacttcatagcatctttagattcaaaggaagagctatttttcgccgaagtttgttgggatcccaagaactatgatatggtgccgacctgcattgtatctcttgaggagaaaaggagaattgggggacgctcctttattaatgacgagtatgtggtgtgtctggatctccaaaatccgcctatagatggcaagcactgctatggatgtagcgaagagattaagcacccagaagatggatctacgtttaaggccgggcatgtagccgccaccggtgcgggcgagatccaaggaggagggtttcctgccatggtgaaggataccgcgtactacgacaccctgggggtcagcgtggacgcctcccccgccgagatcaagaaggcctattacctcaaggcgaagcaggtgcatccggacaagaatcctgggaaccccgatgcggcgcagaaatttcaggaactcggagaggcataccaagttttaagcgatccttcaaaaagggaggcttatgataagcatggaaaggaggggcttcctcaggataacatggtggatcctgctgctgtctttgggatgctttttggaagtgactattttgaagattatgttggacagcttgcactggcatccatagcatcagtggaagtcgaggaaaacttaaacagtcaagaagcaagagggaaggttcaagagaaaattaaagagttacaaaaagaaagagaacagaagcttattcagagcctaaaagatcgacttcaaccatttgtggatgagagaaaggatgaatttgttaactgggcaaatggggaagctcagcggttatcccatgcagcttttggcgaggctatgctcaccactattggctatatttatgtgcgacaagcagcgagagaacttggaaagagtaagttgtatatgggtgtaccattcatagctgagtgggtcagagacaagggccactgcattaaatcacaggttaatgccgcctcaggcgctatcgctctgatgcagctacaagaagggatgaaaaagatggaggaaagtgacaataaggaggaccagattatgaagagtttcgaggagaaaaaagatgccatgcttagttacctatggaaaattaatgtggttgatattgagtcaacacttacacatgtttgccaagcagttttgaaagacgccagtgtcccaaaagatgttctgaagttacgagcaagagcattgaaaaagcttgggacgatattccagcatcttatctcgagtgagtttgatagcagtgcatag

SEQ ID NO: 46248 - DNA, 420 bp, Oryza sativa
  Clone ID: PAT_MRT4530_49132C.1
tttttatcttttttttttttttttttttttttttttttggttttttttttttttggggggctttttttttttttttttttttttatatttttttttttaggagaccaaaccgagtttatagaccgaactgaaacttgaatatacaatttgccacaacccccaactcaagcccctatgacggggatccatatgtccaaaaattttgccccccgaaaaaacgacccaatctccctacaaggaaagccagctagccgctaactcaagtcatggagagctgccaaaaaagcggccaacctaacatggcaacccccagacaagaacttgataccaatgggccccctggcacccatgagcctcaccaaggaccgccagaaccagccgaagccggaagcccaaaaaaaccccgaatccagccccagc

SEQ ID NO: 46249 - DNA, 2534 bp, Oryza sativa
  unsure (1)..(2534): unsure at all n locations
  Clone ID: PAT_MRT4530_49133C.1
atgggtatgaggaggggcagtggtggcgctggcgctgaccaggagggcggcgttccgatgggtgggagtaggggcagtggcgatgccggcactaacaaggagcacggcgttccgatgggtgggaggaggggcagtggtggtgccggcgctgaccaggagggcggcattccgatgggtgggaggagtggcggtagtggtgccggcttcggcttggattgggtgtgggactggcgtaatcccaacaggtctgtgccgccaccaccaacagaagatatcccagctgtcccaggaagctcaggagtactacctctctctaatctccagaggcattctgagaaattatctgatacacatggatcagataaggaagatgaagtggtggattcttcagacgatgattgtgatccatattttaactatttggttgatagctttatgactgcaactaaagctcaaccaaaacagttgtatggcaatattgatcttgttgcagctgcacaacgtcagtctaatgagtatgcaagtagtgctttggattactataacaaggatgaaaacaataagattcaatacagcttaatcaaagccttaaaaagcagtacaattagagagaagggtgagaaatatggacatgtcaacttcatagcatctttagattcaaaggaagagctatttttcgccgaagtttgttgggatcccaagaactatgatatggtgccgacctgcattgtatctcttgaggagaaaaggagaattgggggacgctcctttattaatgacgagtatgtggtgtgtctggatctccaaaatccgcctatagatggcaagcactgctatggatgtagcgaagagattaagcacccagaagatggatctacgtttaaggccgggcatgggcttcccgggcgctagaggaaaaggatcgattttttttcttccccaatttcttcctggtgctcacctcctcctcccccgggatcttccagaagcttccagaactgaccttggtgcgggcgagatccaaggaggagggtttcctgccatggtgaaggataccgcgtactacgacaccctgggggtcagcgtggacgcctcccccgccgagatcaagaaggcctattacctcaaggcgaagcaggtgcatccggacaagaatcctgggaaccccgatgcggcgcagaaatttcaggaactcggagaggcataccaagttttaagcgatccttcaaaaagggaggcttatgataagcatggaaaggaggggcttcctcaggataacatggtggatcctgctgctgtctttgggatgctttttggaagtgactattttgaagattatgttggacagcttgcactggcatccatagcatcagtggaagtcgaggaaaacttaaacagtcaagaagcaagagggaaggttcaagagaaaattaaagagttacaaaaagaaagagaacagaagcttattcagagcctaaaagatcgacttcaaccatttgtggatgagagaaaggatgaattccaaaggaagagcgattatcccatcgcagcttttggcgaggccaggatgctcaccactattggctatatttatgtgcgacaagcagcgagagaacttggggaaagagtaagttgtatatgggtgtgccattcgtagctgattgggtcagagacaagggccactgcattaaatcacaggttaatgccgcttcaggcgctatcgctctgatgcagctacaagaagggatgaaaaagatggaggaaagtgacaataaggaggaccagattatgaagagtttcgaggagaaaaaagatgccatgcttagttacctatggaaaattaatgtggttgatattgagtcaacacttacacatgtttgccaagcagttttgaaagacgccagtgtcccaaaagatgttctgaagttacgagcaagagcattgaaaaagcttgggacgatattccagggtgcgaagtctctgtaccatcgtgaaaacagcctacaggtggaaaccagcccacggcagggagcagcaacatcgaactgaagactgcaaaagtacaaaaaggaaaaaaaaaagtacacctgacagacgcaatttctggttttttggaggtgtcgtctctcgtgtccgtttattcatttttgtaagattttagacgacgcgtatcgttctggataaaatttgctgtttgatttggtctccgttttctttgtaaaaatggtgatgctgtcgtgagctctgaacacgaagattttgttggtgctctgcaacctgcatattactagcttgggctatctcgttgtaagatttgcaaaaaaaaaaaaacatcttatctcgagtgagtttgatagcagtgcatagaaaaaaaaaaaaaaaaaaaaaaaaaaaaaaaaaaaaanaaaaaaaaaaaaaaaaaaaaaaaaaannanataaaaaaaaaaaaaaaaaaaaaaaaaaaaaanataggggggggcctttttaggggtccaaatttatttaccggtggtttggaagtaataatttttttt

SEQ ID NO: 46250 - DNA, 358 bp, Oryza sativa
  Clone ID: PAT_MRT4530_49134C.1
gacagtaagctgcttggcgttcagggtgccagtacaaaaaagagaattctccacgcatgatgtgaacaagcaatccaactcatccgttgacttatctttgtacttactggcatttattattacagaacgcatgtatatcattcatttttatgctaacagcatattctggcattatataatacaacaactatgtagtgtcttagctttgacatatgtctagattgatatataccttacaagaagttgtgacatgatacttcttcatttcatgcttatggtgctttttgatgagaatgatctctatcctaatttctttcacctcctgatataagtttgtagtaaaccttgtcacgttttt

SEQ ID NO: 46251 - DNA, 312 bp, Oryza sativa
  Clone ID: PAT_MRT4530_49135C.1
tggatcctttatgtgcgggcggcctttttttttttttttttttttttttttttttttttttttgaaaaaaggcacaggcaacaccattattggctccgattaaccgggacaatatgattcaactgggggcaaaatttaagggggacaccagtaaaaacaatgttgggatgcttttagaccgttcacgcacgcggcttcccaccaagggttgggaactgagcctgatcttcaatggatggtgcacatgtagaatatgggccacgttggtaaccaccaccatttccacgaccgccacgatctgcacgccccttt

SEQ ID NO: 46252 - DNA, 1026 bp, Oryza sativa
  Clone ID: PAT_MRT4530_49136C.1
atgcactacgagtggattcgggagatgagcgaggggcatacagcgatgacactgactagctcgactaggggggacggccatcggcagcttcagcgggccaagagcagagcagaggagaaggcatgccgttgcgccacctccttctccggcattggtagcgccgccctccacgatgacgatgcagccccgtgctcgcattctccaattgatctggcgatcgagctctcggagggcctccacatctccgcgcagccccgccgctttgcctccgctttgaactccaccaagctcccttgctcgatctgcctccgacttgagggccttgtcatgcaccgcaacagtgagcggaagagcatgaagaaagatatgtgggcgactttggggaggaggtccttgggctacgggctggtggcggcggcggagatccacgcgaaagggcgatcgatctgcctcagtccccatcaggattggaaatttcggaccgaaatttcggtcatttcgaccccctccgatacgatattatttcgaccaaaatttttaaattttttcatgaattttggtaatatttgttcaaattcaactaaaatttgtccaaaatttcggaagtttcggaccgaaattctgaaatttcgatatttcggtggtggccgatcaaatcggttaaaccttttcggtttaacctggtccccatcacggcggagcgaaacctcgcggagcggcttgtcggtggtgaggcgccagaggcagacggcaacgcgctggggcacagggatggaggcgtgcaccgtgcagtgtggtgtactccttggtgacgacggtggccaggtggtcgcaaagcttgtcaaacactgcgcacggcatgcggaaggctcgccggaagtccgtcgggctcctgcagcatcgccagccaagcgcccgagcaacctctattcgtacatgctctttgccacgtcctctgtcttgctgcatcccgttgtcgccctgaactcaactgctatattatgcacgatgccacctactcacacc

SEQ ID NO: 46253 - DNA, 204 bp, Oryza sativa
  Clone ID: PAT_MRT4530_49137C.1
atgaagttaagcatgaaacgacccctgtacaaccgtacttctcgtatggacttctctttcccgggagtgccagaactcctctcactgctagaaacatggacgcctagagtgcatgaggatttaagttcatggagcgggtacgaggctcatgtgttgggcagtcgcggagtgcgggtaaagtgtacatccactgcagtgtgagta

SEQ ID NO: 46254 - DNA, 2289 bp, Oryza sativa
  Clone ID: PAT_MRT4530_49138C.1
atgggcatcatcgtgggctacaacacaaaaggaggtttagaggaatcgaaagatggcgacaacgggatgcagcaagacagaggacgtggcaaagagcatgtacgaatagaggttgctcgggcgcttggctggcgatgctgcaggagcccgacggacttccggcgagccttccgcatgccgtgcgcagtgtttgacaagctttgcgaccacctggccaccgtcgtcaccaaggagccctcaagtcggaggcagatcgagcaagggagcttggtggagttcaaagcggaggcaaagcggcggggctgcgcggagatgtggaggccctccgagagctcgatcgccagatcaattggagaatgcgagcacggggctgcatcgtcatcgtggagggcggcgctaccaatgccggagaaggaggtggcgcaacggctcgtgaggagggcggcggcagggcgacgacgacgacggcaccccgacgtggccagaaggccatgccaagggccgctttccttccttctaccatgccttctcctctgctctgctcttggcccgctgaagctgccgatggccgtcccccctagtcgagctagtgtatgcatgagcaagaagaggagagaaggaggcggcggaggaaacggcggctgcgacccgccggccgtgaccgatgcgctgtccatggacggcggcctccgcgaggtgtccctctctgtcgtcttttccgtctggtgcctcctcttcctccttcgctcccagttcctccacagccagaccgacccttcagatttctacgacgacgtggaggacggaatgcgcgaaaactactgcaaggtaatgccgctggaggcctacattttcccgaccgagtataacgcctccgcggccgcgcccacgtgccagccatcgttgcacccgccggatcagccgcagcaggaaactgaccaccggagcctggagccgttcaacaacacaaccggcggcaaatcgtcagcggaggcggcggcgctcgatgagctcgacgagttccggagccggatcctgcagggcaaggccgagaacggccgcgtccccgacggcgcgacgccggcggcccaccggctggagccgagcggcgcggagtacaactacgcggcggcgtccaagggtgccaaggtgctcgcccacaacagggaggccaagggcgccgccaacatcctcggcggcgacaaggaccggtacctgcgcaacccgtgctccgccgacgacaagttcgtcgacgtcgagctgtcggaggagacgctggtgcgcaccatcggcctcgccaacctggagcactactcctccaacttcagggacttcgagctgtacggcagcccgagctacccggcgccggcggaggagtgggagctgctcggccgcttcaccgccgacaacgccaagcacgcgcagcgcttcgtgctgccggacccccggtggacgcgctacctccgcctccgcctcgccacccactacggctccggcttctactgcatcctcagctacctcgaggtgtacggcatcgacgccgtcgagcagatgctgcaggagatcatctccggctccggcgccgacaccgacgcctccgccgccgccaaggccgaagagggcggcgacggcggcaccctccgcaacgacaccgcgcaggtcaacgcaaggctggacggcgtgggaggaggaggaggaagcgccgccggccggaacgacagcgccggcgacggcgcgggcgccaagaacaacggctcgaggatgacggtggccggcgacgggaagccggccgcggcggggcggttccacggcgacgccgtgctcaagatcatgatgcagaagatgcggtccctggagctgggcctctcaacgctggaggactacaccaaggcgctcaaccaccggtacggcgccaagctgcccgacctccacaccggcctctcccagacgaccatggcgctcgacaggatgaaggccgacgtccgcgacctcgttgagtggaagggcaacgtggccaaggatctcggcgagctcaaggagtggaggtcgaatgtcgaggagatgaggagcatccaggagacgatgcagaacaaggagctggccgtgctgtccatcagcctcttcttcgcgtgcctggcgctgttcaagctggcgtgcgacagggtgctgttcctcttcaccaggaagggggcggcggcggcggagaggatgtgcggggcgagcaagggctggatcctcgtactggcaagcagcagcttcactactttcctagtgctgctatacaactga

SEQ ID NO: 46255 - DNA, 514 bp, Oryza sativa
  Clone ID: PAT_MRT4530_49139C.1
ggaaccaaaaaggggcttttgggtgggcaaccagcttggaaattggggggaaaaagcaagactagccttgcaaaaaaggttaggggcccagatttgaaagccacagaggaccccccctaaaaggttcccccccccataaaaaaaccctggggaaggagggccaaaaaattttaaaataatttacaaagagaggcccccggcggcaaaaattttttccggggcctcctaaagggagttctccccccctttaaaaggggcgggccccatgggatttaaaaacatttcagggcaattcccaaaatagcaacggggggccacatggggggaatccacaagggggacctaaaacaggaaacaggggccggaattttaaacggttctgggcttttaaaaaaaaaatggggctgcaaaaccagggtttccggggggggggccgggcaaattttttcctcggggccgggaatccatcaccttggggggccccaacggtccttccatgggggggggggccgcc

SEQ ID NO: 46256 - DNA, 816 bp, Oryza sativa
  unsure (1)..(816): unsure at all n locations
  Clone ID: PAT_MRT4530_4913C.1
ccgtgctcatcgatttctcttcctgacggcgacaatggcgtcgaagaacagcaagctctcggtgtcgtcggtggcggtggcgctggtggcgctgatggtggtggtggtcggcgccgtcgtcgcggcggctgcgcgccatggtggaggtgctcgtcgaggaggaggaggcgccgctggcgtgcaagaagggggccatggccgccatcgccgaggggctccccgggcgcgacgagtgcgacctcgacacgcgcgccgacgacggcggatcgcgccgttgccacttggtgattaattgatatctgatgctgtttaatgataaataataatcgccattgttatattctagattatttatttatcaaacgaataaaatgattatggtcgcgtgctatgcttgttcttgcaacggtgtgtaattatcatgtgatgggcaataaagagcaggtgatgagtagtatttcataaaaaaaaaataaaaaaaaaaaaaaaaaaaaaaaaaaaaaaaaggaaaaaaaaaaaaaaaaaaaaaaaaaaaaaaagaagaaaaaaaaaaaaaaaaaaaaaaaaaaaaaaaaaaaaaaaaaaaaaaaaaaaaaaaaaaaaaaaaaaaaaaaaaaaaaaaaaaaaaagggggggggggttttaaaaaaaaaaaangttaagnnggggggaaatggaaaaaaataatttttttttttggggaaaataaaaaaaaaataatgggggggtttttaaaaaagttttgaagggggaaaaaatggggggtttaaaaaaataaaatggtttgaaaaaaaatttttttttgggaggggggtg

SEQ ID NO: 46257 - DNA, 237 bp, Oryza sativa
  Clone ID: PAT_MRT4530_49140C.1
atggtggtggtggcggtggaggaggaggaggaggaggagacgggggctttgggttgttttggagggcgaacgcctcggggctcacgtgcttttataaaggcgaacgggggaaaggtggctgggcgaggccgcgaggggaggggaagtgggtgggctggattcttctgggctccctttcccgcaaatgctacatgcacgggtaaagctgtaccccacattgtgttgatcccggtctag

SEQ ID NO: 46258 - DNA, 266 bp, Oryza sativa
  Clone ID: PAT_MRT4530_49141C.1
ccacggaagcccccactggggtggtgacctgacggatgctgcctgctataccacaggagacctaaaatgtactgaggtgtttccagtgttccaaataggaaaatgagtgagctgataatgatggttgtggagagtgtgacgtgacagtgttggatgtgctgagagatttgggacctgggggagaaatttatcatcgatcattcttaccatcccataatacagaatgtgatgggacattattattgtaattgttgttatgttaaaaa

SEQ ID NO: 46259 - DNA, 287 bp, Oryza sativa
  Clone ID: PAT_MRT4530_49142C.1
gggttattaattggtggtgctgtagaaaaaatcaaagcgcaccaaccaacattcgggcatttaagaacgaaacagcggtttggggggtgcccgtacaccaccggggtaaagactgacagaaacccgacagggatcgttgagagcagcatgacaagctctagctgcaagggatcgaactttagttaccaactaacgcacaaccgatgtacagaaacaagtcggcgagcccaatgcctcatgaacagaaccaaggaaccacacgaatccatccgtccactactggaagc

SEQ ID NO: 46260 - DNA, 204 bp, Oryza sativa
  Clone ID: PAT_MRT4530_49143C.1
atggtctccagccatcggatatcgcttctccttccatcgccaccgcagctcaaaccggtgaggctgaggcggagcgcaaaggacgtgaacaagctcagggcctcgccgctggatgccgggcagcgccttcgccagcaaggaggaggtgttgacttgggccaaaagcaacaaccagcggctgctccacgtcatctaccacattga

SEQ ID NO: 46261 - DNA, 603 bp, Oryza sativa
  Clone ID: PAT_MRT4530_49144C.1
gcacgagggagagaactagtctcgagttttttttttttttttttttttttttttttttttttttttgcgcttttgctactgtgcagtcgcctgcaaatttgtaattcatcagttaatcccctagtcgttgattctgcattaagatctatgcacactactgggctggtggagaagactttctagatatggaccttacttacagatatattgaatatgctctaagttttaacccaaattttcaggaaaaaattcagttacatttttatcccaagataaatatatttaattatagcatataataaaactcaatttgattttgtagcatcttcactaaacatagttaatcttgaagtagtctaatttaaataaagttaaaacggagatgatggcggcggcgcagacgcgaagctcctcggcgatggtggtggctaagcaaagcttcaagactgattcaaaacgatcatctgggatacattattgaggaacccaagctgcaggtggcatcaacagtggatatggaggcaactccgtacttgctcttggttacagtacccatcctggtgcacacacgcgcactagctttctctccggcgttgagtgatt

SEQ ID NO: 46262 - DNA, 1586 bp, Oryza sativa
  Clone ID: PAT_MRT4530_49145C.1
gggaggaatttccagctgatgaaccataacttgccgctggttgtttttttttttttttccacatgcctaatctagtgtcctttttttttcagcacactaattctgtgcttctctccttttgttatcaacaacaattaagtaacacataaatgatactgttcctcacaacatcatgaactagtatacaacaaaaggacttacatatgtacccaaagcttggccaagcaactcacttcagttgaacttattgatgctgatgctgatgctgatgatataagaacagtactagcagtaacatgagtaggcaagatggctcttcttggacacgtatgtggagacgaactctgaagccagagctgaactgctggacactggagcaggaactatgatgtttgtcaggcctgcagcgatcctcttaccggcgacatgtccgtagaacaggccggggatggcagggacgaacacgtcgctctccgagcagattttgaggtccagtgctcttgcaaggtatgaatccccggatttcaggaactcgcctttgttagcggccggcattatatcatccttcttcaggaagtgcacaacttcctgagggtaataacagcctcttcttcttgcacctccattcgtcttacagatcttcttttctagcaattcggtctgtaaatcaatagctataaccatcccatcggatttctcgcttatttctttaagcttgtccaacatatgcttggctactgctgaaaattcaggtttcaactgaaggccactgaacattgcaaggcaggcagtcgaatccaagtccttgttacccgactccttctgtttcaaacttactgaagagaaaatagtcgcaagtcgtaagtagttatttctttggaagatcggctcaatggttcccgtgatgaactcttcagtcacccggtttggtactctaactactgctggcttcttagaagacactgcattaggaagtgaatgtactactttgacaactccatccaagctcgtcatgaatttatccacatcatacatgtcttcgaatttccgcctctttcctaactcatttcctctaatttctggaagcacaagtgttgcacctaaatatcttgcgataaccacagcatcagtaatctgtgagatgtggtattcagggcccatagtcaatgagaatgtaacaaaacccttagactcctgaacatttgatcttggtttagaccagcagggtctaatctcctcagcagtctcctttgggagatccactccagccttgttgaccttagtcatttcagtagtatctgcaattttaatttcgtttgattctatgcctgttgcctccaagcccaactcctcctggccggcgccgacgggggtgaagtggtcgtgcttgatcatgttgccgagcatgacgaacatggacagggtcaggaacccggccaccacctggcgcgggtcgaccgccattgcagaggatcgagcaagcagtgcaccaccgacagaggaggagagcagccgaggagagtgaggaggagagagaacgcggggacagagacccagaggacaagcacgaggtcagtcccggccgg

SEQ ID NO: 46263 - DNA, 147 bp, Oryza sativa
  Clone ID: PAT_MRT4530_49146C.1
tagtggatcccgggctgcaggtcagagatagagtgagtgatcagttgagtgttgtgcataaacatggctgcctctgtcaggcttctctggtcgtgaaaccatctgcatctcacattactagaacgttcgaagcttcgagggaaaggg

SEQ ID NO: 46264 - DNA, 397 bp, Oryza sativa
  Clone ID: PAT_MRT4530_49147C.1
attcgagaaatccgatgggatggttatagctggggatttacagaccgaattgctggaaaagaagatctgtaagacgaatggaggtgcaagaagaagaggctgttattaccctcaggaagttgtgcactttctgaagaaggttggcttctctgctgatacaaccatctacttgacggagacatggtggcacaaaagcctggatactctgaaggaggcatttccaaacacttataccaaggatgatataatgccggccgctaacaaaggcgagttcctgaaatccggggattcataccttgcaagagcactggacctcaaaatctgctctgagagcgacgtgttcgtccctgccatccccggcctgttctacggacatgtcgccggtaagaggatcgct

SEQ ID NO: 46265 - DNA, 387 bp, Oryza sativa
  Clone ID: PAT_MRT4530_49148C.1
ccagctgatgaaccataacttggtagtacatgaagcacacactctttccacatgcctaatctagtgtcctttttttttcagcacactaattctgtgcttctctccttttgttatcaacaacaattaagtaacacataaatgatactgttcctcacaacatcatgaactagtatacaacaaaaggacttacatatgtacccaaagcttggccaagcaactcacttcagttgaacttattgatgctgatgctgatgctgatgatataagaacagtactagcagtaacatgagtaggcaagatggctcttcttggacacgtattgtggagaccgaacttctgaaagccagagctgaactgctggacactggagcaggaactatgatgttt

SEQ ID NO: 46266 - DNA, 223 bp, Oryza sativa
  Clone ID: PAT_MRT4530_49149C.1
acaaaacggggggagtttagatcaagaaaagaatggcaggctcggtttattttcaaggggccaaaaaaaaaaagggttttaccccttggatgcaagttttcaactattcaagctggggggccctggggtatcacccaatataaggctactgtataaaaaccgggtaaaaaaatcgatttgaggaaaaaaatgggcacttggggggtgcccaaaccccagcaag

SEQ ID NO: 46267 - DNA, 318 bp, Oryza sativa
  Clone ID: PAT_MRT4530_4914C.1
ttgagatacctactagagcggaccgaccttttgtttttaattttttttttaaaatacttataaatataaaataaaaaaaaaaggtaaaattatttttaactttttagttttttttggccgtgcttgctccacgttccatcttcttttccgcctcctggggcccccttagtggccttcgggtgcctcctttttgccgggccatggccctggggttaccaaggttagaccggttgaagctctttcctttccttccttttggccttttcgcgctttgcccctttcggctggtcccttaatgccttggggccccccgccttt

SEQ ID NO: 46268 - DNA, 406 bp, Oryza sativa
  Clone ID: PAT_MRT4530_49150C.1
gccacgcgtccgggtctcacccaaagactcacccggcctttgtataacgtccgcccttccgtctgcattacttcctccattatttctccattccttttctctcttctcctctcctttaccttctgtctacaagactggatacagggcaaaaaacagggggaaaggcaggaaggaaggacagctagcagaccacctaccaagcaagtgttgatcttcgagggcatgggctgcggaattgctcccaggaattccctcgggctacgcaaagcttcacaccgagcaacagttctctgatttgtttcgccctatgatttgctgaacaaaagcttgtacagaactgcttctttcctgtttccggttggtattccggtggttattttgttggaactttcttgggccctttctt

SEQ ID NO: 46269 - DNA, 708 bp, Oryza sativa
  Clone ID: PAT_MRT4530_49151C.1
atggatagaggagaaccaggaccatttacccccaagtaccccacccaatggcgcagcgatcttggagatcggcatcatcttctccaactccggccgccgagctccatcttcgatttctccctctccgaaatcgagccatcgttgttcatccaaggtgaagcgccactgccgagacatttcgcgagccatcgtcgacgaccaagcttggccgacctcatccgtgcgccaggatgccgccgtgcgtcatcaccgtcggcggtgaacccctgcgatgcgacgctgccccgccgtggccgagccatcccggctcgggccagccgccgtcgcgaggaagaatggggaaaagaaaagaagagagagaggaagaacatgcccacgagcaaatacacgatcttcgggtgtctcatagcaaaggaggttcgacttaggaagcataactctcaaaatatccatcaaatcattgaagcttgtgtccgatcatccatgtctggccttcaatctgagaagttcaagcacagagcgcaacaccaaatcatcagcctcttcgttacgaccaccgacttccccgtgaaaagtctatatctcgagagagaaaacaccgacatatatggcaacggtcgggctgggggtttatatagccccccgaccatcgcaagcggtcaccttacgtgggctgcacgggtggcgccggtcttcggcttgttctag

SEQ ID NO: 46270 - DNA, 360 bp, Oryza sativa
  Clone ID: PAT_MRT4530_49152C.1
atggcagcagcgttgatgacaacattaacacgggaggatgaaacaacaaccggtggcaaagttggatccccaattggtttgctagtgccgcgacgaaggaactgggctaggaaggccctgcccatgcacacagcccacaggggcctgcgagcctgcgactgcgagataagagagtgcacaggtgcgcagccccctcaaatggtggccttggcggctgctgggcgtgccaaaatggaggcacacgaggagcccgtggatccccgtgacctagtggcggcacagtgtgcacggtatgtgcacgtagcgatccccaaacttgatgttgcaaaaaacttcctccacaagaggatccgccactag

SEQ ID NO: 46271 - DNA, 825 bp, Oryza sativa
  unsure (1)..(825): unsure at all n locations
  Clone ID: PAT_MRT4530_49153C.1
tatggccatctacacaccnaaaatnngttggaaatngtgtggaagcccctgtttccggctcaatagcgacttctggagcgtgtcctgttggatgcctattcctatgaccatttcaaaccgtggccacggccgtgtataaggcctttgaaggcccacccacgtttgtggtcntaattgtgcgtagcctcgcgatgacaangcccacagatacatattacacntaggtgcntacaccacgtttggtgtnctnggacagggctgtatccttncgtctcacatcggcccacgctggccccacatgtgtgtgtgtntgtccactgttgtgctgtgtgattgggatggccgtggaaaacctgattgtctntgtgaagactggtgaagattnactgacttggagtgtgatgggggacaggngagtgagagaggtgtggccacactgtggaccccctgcgagggcgcgggtgtgtctctcttctccgcacgccacggannaaaatctgaatgatggggaggtgtgtgctgtgtgtggtgagtgttgcacctatgtgtgaaaaagcaccactgtgatgcacctgtggtgatggggaggggtgatacacacctgttgaccttgatggcacaggcccgtggtgtgtgtgnctgtgtgctgtgtgaagccaaattggatgagtgttttgatgcttggtgtgttgctatgagcgtgctgaatattggcccatggctcaccattgtgcgaactggccattctgagaatggtgagctgggatggatgtggaacctgtgtaaggcatttggcgaactngccaaaaaaaaaaaaaaaaaaaa

SEQ ID NO: 46272 - DNA, 360 bp, Oryza sativa
  Clone ID: PAT_MRT4530_49154C.1
atggtgatgccgcgggcagcgcacgaggccgcagccgcacctgtgcagccgctgcgggccggcggaagcggccgcggtggcagccgggcggcggctgcgcggtggcctggtggaagtcgggaggccgagaagaaaactgtggaaagtacgaatgtgcccctgggatctgttcttcctcttggatgtcttcctgctcagctccataccgagcagcaaagggatgggttcagggggtcggtgctgcagccaaactttgacagcagcggcagcccacatcatagtgctttcgcaggtggctacagccggcaccgaggattattagattggctggaacacgagcaccattgtgtcagtccatga

SEQ ID NO: 46273 - DNA, 213 bp, Oryza sativa
  Clone ID: PAT_MRT4530_49155C.1
atgcaggatgaggatgccaccgaggcaacttctgtaggggatcatgggctcatggcggtggcagatctgatatatccagaggaattgtttcgaaatatcacaattaatctgttcaaaacaatattaccatatgtacaactcatatttacccatagcaaatcacaggagaaagacaacgaagacaatgataccaccaggtatgacatgcactaa

SEQ ID NO: 46274 - DNA, 494 bp, Oryza sativa
  Clone ID: PAT_MRT4530_49156C.1
gcagtgcatttttaggttggatgtagcaatgttcaatgctatgttgcgtgaatcagatgatgaaattccaacagacccgctgtctgatcccataactgatcctaaagttcttccaatcccatctgggaaattcagcttcggtgctggggtccaactgaaaaatgctattggcagctggtctagatgtcttactgacttgtttggcatggatatggacgactatcaagaacttgacaatgaaggtggtgaaaatggctttggtgaatctgtaaagccattctatcacctgaatgcactgagtgatctcctaatgcttcccaaggatgtgctcatggataccagtagcaggaaagagctttgccctacctttagctcatcaatcatcaagaacatcctggatgtctttttaccagatgaattttgtccagatcccattcaaggttctttacttcaagcactagagttggaggaccacctggaggttaacaggggca

SEQ ID NO: 46275 - DNA, 338 bp, Oryza sativa
  unsure (1)..(338): unsure at all n locations
  Clone ID: PAT_MRT4530_49157C.1
ancaaatcagggggtggggatacggggggggagttccagcacaaatttacatgttacacccacaccctacacccatgcataataatacatcgggtgtgcggcgtacatacatacccctctcgagcacacgcaccatcgatcggacaaagtggggtacatacatacggacacacatatacggatacgcgcggacatacatacataattaaaaactcggagttaatcaaatacgtaggtgatgggatgtctaatggaacttgatgctggggaggatggtgttgtggacgggatcagcgagggggtcaaacaggttctggacgggggcaaccccggggaag

SEQ ID NO: 46276 - DNA, 379 bp, Oryza sativa
  Clone ID: PAT_MRT4530_49158C.1
gcaatggcagcgaggcttgtcttctccctcctcctcaccgtggcgtgctcccacgcggcgctcgccgccgccgtctcctcctgcgccgtggaggacacctgcgcgaaggcgacggcgagcggcagccgcaaggaccttgccccgttctgcgtgtcgaccctgcatgccgcgccggggagcgccggcgccgacgcgcgcggcctcgccgtgattgccaccaacctgacgctggccaactacacggccgcgtacgccaccatcaaggcgctgcagcggcgcggcggctggtcggagcgcgagcggtccgtgctcgccacgtgccggcagctgtacatcgaggcgctcaacgtcgtgcacagcgccatccacgcgctgaaca

SEQ ID NO: 46277 - DNA, 1059 bp, Oryza sativa
  Clone ID: PAT_MRT4530_49159C.1
atgggcgaggcggtgaaggggccagtggtggtgacgggcgcgtcgggcttcgtcggctcatggctcgtcatgaagctcctccaggccggctacaccgtccgcgccacagagaggctgacgctgtggaaggccgacctgggcgaggaaggcagcttcgacgcggcgatcaggggttgcacgggcgtgttccacgtcgcgacgcccatggacttcgagtccgaggacccggagaacgaggtggtcaagcccaccgtggaagggatgctgagcatcatgcgggcctgcagggacgccggcaccgtcaagcgcatcgtcttcacctcctccgccgggaccgtcaacatcgaggagcggcagcgcccctcctacgaccacgacgactggagcgacatcgacttctgccgccgcgtcaagatgaccggatggatgtacttcgtgtccaagtcattggcggagaaggccgccatggaatacgcgagggagcacgggctggacctcatcagcgtcatccccacgctcgtcgtcgggcccttcatcagcaacgggatgccgccgagccacgtcaccgcgctggcgctgctcacggggaacgaggcccactactcgatcctgaagcaggtgcagttcgtccacctcgacgacctctgcgacgccgagatcttcctcttcgagagccccgaggcgcgcggccgctacgtctgctcctcccacgacgccaccatccacggcctcgcgacgatgctcgcggacatgttcccggagtacgacgtgccgcggagctttcccgggatcgacgccgaccacctccagccggtgcacttctcgtcgtggaagctcctcgcccacgggttcaggttcaggtacacgctggaggacatgttcgaggccgccgtccggacgtgcagggagaaggggcttctcccgccgctgccgccaccgccgacgacggccgtggccggaggagacggctcggcgggtgtggccggcgagaaggaaccgatactggggagggggaccgggacggcggttggtgctgaaacagaagcgttggtcaaatga

SEQ ID NO: 46278 - DNA, 878 bp, Oryza sativa
  Clone ID: PAT_MRT4530_4915C.1
cccacgcgtccgcgcgcgcacccggcactgctcatcgatttctcttcctgacggcgacaatggcgtcgaagaacagcaagctctcggtgtcgtcggtggcggtggcgctggtggcgctgatggtggtggtggtcggcgccgtcgtcgcggcggctgcgggcggcgaggagtactacggcggcgtcgcgcgcgcggcggatgggtgcgagccggggcagggcgtggtgcccaaggacccgctgccggggtgccgggcgtacctgctgcggcggtgcggcggcggcgacccgccgggggtgcgggcgcggtgctgccaccagctgagggaggtggcggcgcgctgccgctgcgacgcgctgcgcgccatggtggaggtgctcgtcgaggaggaggaggcgccgctggcgtgcaagaagggggccatggccgccatcgccgaggggctccccgggcgcgacgagtgcgacctcgacacgcgcgccgacgacggcggatcgcgccgttgccacttggtgattaattgatatctgatgctgtttaatgataaataataatcgccattgttatattctagattatttatttatcaaacgaataaaatgattatggtcgcgtgctatgcttgttcttgcagaaaaaaaaaaaaaaaaaaaaaaaaaaaaaaaaaaaaaaaaaaaaaaaaaaatctaacaaagaggaacaacaaaaaaaaaaaaactgataataaaactatacaggcatgcttggaccataccaactatttttttccacaaaaagcaccccctcaaaaaaaaaaaaaaaaaaagggggggcccctttaaagggaccaaatttttccccccgctgggtcgagaaaaatttttttttttaggggcccc

SEQ ID NO: 46279 - DNA, 240 bp, Oryza sativa
  Clone ID: PAT_MRT4530_49160C.1
atgcttgggaggaagaaaggatcgtcgtccaggttgagtgatcccatcaacacgactgtcactactgataacggccaggaaatggctgcttcgcatttcatctcgcagcaggcttcacagctcgatgaggctgcgaggaagagactgcaaagaatgaacgagaggctgaagttgctggagatgcagatggaaacactggaggctggcgtcgcgaaggcgagcaatgactcctacgagtag

SEQ ID NO: 46280 - DNA, 1496 bp, Oryza sativa
  Clone ID: PAT_MRT4530_49161C.1
tagctatcatatattctgcgaatccaacacaagcaccgcggcgtagtactactacttgcgcgcgcgtgttagattcgcgtgcgaatccaacacaagcagatcgatcacgcacggtacgccatgggcgaggcggtgaaggggccagtggtggtgacgggcgcgtcgggcttcgtcggctcatggctcgtcatgaagctcctccaggccggctacaccgtccgcgccacagtgcgcgacccctctaacgttgggaagacgaagccgttgctggagctggcggggtcgaaggagaggctgacgctgtggaaggccgacctgggcgaggaaggcagcttcgacgcggcgatcaggggttgcacgggcgtgttccacgtcgcgacgcccatggacttcgagtccgaggacccggagaacgaggtggtcaagcccaccgtggaagggatgctgagcatcatgcgggcctgcagggacgccggcaccgtcaagcgcatcgtcttcacctcctccgccgggaccgtcaacatcgaggagcggcagcgcccctcctacgaccacgacgactggagcgacatcgacttctgccgccgcgtcaagatgaccggatggatgtacttcgtgtccaagtcattggcggagaaggccgccatggaatacgcgagggagcacgggctggacctcatcagcgtcatccccacgctcgtcgtcgggcccttcatcagcaacgggatgccgccgagccacgtcaccgcgctggcgctgctcacggggaacgaggcccactactcgatcctgaagcaggtgcagttcgtccacctcgacgacctctgcgacgccgagatcttcctcttcgagagccccgaggcgcgcggccgctacgtctgctcctcccacgacgccaccatccacggcctcgcgacgatgctcgcggacatgttcccggagtacgacgtgccgcggagctttcccgggatcgacgccgaccacctccagccggtgcacttctcgtcgtggaagctcctcgcccacgggttcaggttcaggtacacgctggaggacatgttcgaggccgccgtccggacgtgcagggagaaggggcttctcccgccgctgccgccaccgccgacgacggccgtggccggaggagacggctcggcgggtgtggccggcgagaaggaaccgatactggggagggggaccgggacggcggttggtgctgaaacagaagcgttggtcaaatgagtgttgactagtgagtccagagaacggtattgaaattgatcgtgtttcgctgcgccttgcctcgttggcttcgtctatttcacaatgcgagatttggaataaatcagagcggttaatcctgtaagttcatatgtaacgtacccatttgattttttattggttacatatggttactccctccggtttcattttaattgacactttgaacaataatacgttttacaagatatacctttgactttaaaaaaaaaaaaaaa

SEQ ID NO: 46281 - DNA, 1080 bp, Oryza sativa
  Clone ID: PAT_MRT4530_49162C.1
aggctctctctctctctctctcggtgttgcgtgctgtccgtctcagccatggccacgacgccgtctcctcctccctccgcgacgacgatgcgcgccgtccagtacgacggctacggcggcggagccgaagggctcaagcatgtggaggtgccgatcccgtcgccgaagaaaggcgaggtgctgatcaagatggaggcggcgagcatcaaccccatcgactggaagattcagaaggggatgctccggccattcctgccatggaagttcccatcaattccagcgtgcgatctcgccggaaaagtcgcggcggtcggcggcggcgtgcgcaggttcgagctcggcgacaaggtcatcgccatcaatttcccgttgagttcagtttttgagtgtgatttatccgagcagagtggcggcggcttcgccgagtacgcggtggcgcaggcgtcgctcacggtggagcggccgccggaggtgtccgcggcggagggcgcgtgcctgccgctcgcggcggtgaccgcgctgcaggcgctgagggccgcgggggccggcctggacgacgcgccgccgcccaagaacgtcctggtcaccgcggcgtccggcggcgtcggccacttcgcggtgcagctcgccaggctgggcggccaccgcgtcacggccacctgcggcgcgcgcaacctcgccctcgtcgccggcgagctcggcgccgacgaggcgctcgactacgccaccccggacggcgccgcgctccggagcccgtcgggcaggaggtacgacgccgtggtgcactgcgcgccgcacctcccctggcaggtgttcgaccgcgtcctcgccgaaggcgacaccggcggcgtcgtcgtcgacatcacgccttcccccgcggccttggccaccgcgctgctgcacagggtgaccttctccaagaagaggctgacgccgttcatgttctcgccgagcaaggcggacatggagctcctggtggccatggcgaggcaggggaagctcaagcccgccgtcgactcgtgccacccgctgagcgacgccaccggcaaggtcgtcgtcaaaatcggagaagaagaatga

SEQ ID NO: 46282 - DNA, 1108 bp, Oryza sativa
  Clone ID: PAT_MRT4530_49163C.1
ttttggtttttttttttttacttttttggatatggaaatatcggattgcttaaaatcgtacggtattaggtacatgatatgtaatcaacaagaactatgacttagaaacacaaacttttggaggaagtaaattacaaaaaattttacactccattccccaaacagacagatgcatcacattccaaagattggacaaaatctcgaggggaggaatttacgtgagattgttgtgtctttcttagtctccacaggaattatctacttctcagacttctgtattcttttatccttgataggcagtggaacaggtttttgagcctcatggggatgttctgctcccttgtacaccttgaggtgggtaaacagtcttcttcccagtctgcccttaggaagcatgccacgcactgcatgttcaataattctctccggaatccttttctgaagctgatcaaaagtttcttctttcattccaccaggccgtccagagtgcctcctgtagagcttctgtgaccgctttttgccagaaacagcaaccttctctgcattaaccacaacaacaaaagcccccatgtccacacttggagtgtatgtggcctcattctttcctctgatgtgtactgcaatggtggatgcaagcctacctagaatcttgtctgttgcatcaacaacataccatgtcttctcagtagttacatgatctgcagccttagggtaccatgttgtgttccatatgtcggggccgcagagctcgtcgccttcgaacatgaatcgctgctcgcgggggacgagcgcggagagcggctgcctcttctgcttctcgctctgctcgcaccgcaccgacaggccccccgcggcggcgcggcgggtcgcgggcctcgccgcgcgccgctggcgggggagcggcctgtccctggcgaaggcggaggagaggaacgcggaggctgcgatggccgtagccattgcgacggcggcgcggtgaggaggacgcggctgcggcgaagtcttgtccgtctggcttggcctggttcagtggaacgccactgccacgtccgcccacgcgtccgaggtggagagagcctcgtgcaaaaggtgtgataactagtgcggt

SEQ ID NO: 46283 - DNA, 2874 bp, Oryza sativa
  Clone ID: PAT_MRT4530_49164C.1
atggagcacccagttagtaataccatggagccggatctccgggccaaggaccaccgcgcgtgctccgcctccgccaccgacacgtcgtccaggatcatcgcgcagtgggcggcgcgccgccgccagctggcgtgcgacgaccaggtgatcgaccgccgcgaccgcgactccgagctgctcgctctcgcgcgcctccacgccgtctccatgctcgacgcctccttcctccgcgcacacgacgatgccggcggcggcggcggcaggcgtgcgcgttcgccggagcgcgcgctggtgcggaggatcgcgcgggagtggacggcgtcgtcgcggacgtccccgcgcgggggcggcgccggcggcgaggagctgcttggcgagacggagcggcagcgggtgcgcgccgtgcgggagcgcgtgcgcatggcaagccaggggcaggggcacggtggcgcgcacacgcccaggctgatgcgtgggcgtgggcggcatgggcaggacgtggtgacgcgcatggccatggaacgccagcgcgagctgcagggcctctccgaccaccgcgccgtctccgccttcgctcaccgcgcccgcattcagtcttttctacgaggtagatccttccatagtggaagccctatgcatgatgagagaccactctctatggcagccagagaattaggacagcttagacagagtcatccagtctctagattcagggaagaagttcgctcaagaacagaagttaccacaaatggcccagcaacaaaccacactggacccatggatactattgtagatctgcacttacatgaaaatgatcatcgccaagagaatgctactcacaatgaaatccagacacatcaatcaatggaaaatgaatctgtagatatccaaagaagtataacaaccagtaatgatgatgttgtccaaagtgactttggtcaagaacagcttcacagatatgaagattatccagattcagggtcctcagaagaggccagtgaacaatctgattcttccagtccatctgacaatagcaatcaacaagaagaagaaacttacgagcagcaaactaatctgctatggtcaagagagacatctagtagtgaagatggagatcatgaatggaatgttatgaattctcaagaagctgaagcacaatggaggtcaggtccaagtttttcttccaaccgaaatattaacaggttcagtccaccggacgatgatgtatatggagtggagctcagagaactcctaagcaggcgtagcgtctctaatcttcttcgtagtggcttccgagaaagtttggaccagctgatacaatcgtacgttcgaagacaagaagagcatgatgatcctcttgattgggattatcaaaggcagggaacagctactgggttacacagcgacgatcaaggtgaagacaggatcgatgaagcaacaaatcagactgtttctgacaccagggatcaccagccgtcgattcttccacagcaacggcattggcagatggaactgcctcatcatcatcataactggagtcaacaagccatgcgtcattctgaacttgactgggatgccatccatgttctgcgagatgacctgaccggactacagcgagggatgaccagcatgcagcagatgctagaagcttgcatggagatgcagatggagttgcagcgctccatcaaacaagaagtctctgctgctctgaaccgctcactagccgttcctgcaggcgaagaagggatgttagaggatggatcagagtggaagctagcgaggaaaggaacatgctgcatctgctgtgacaggcaaattgactcgcttctttacagatgtgggcatatgtgcacctgctcaaagtgcgcgagcgagctgctccacggggtgggcaaatgcccactgtgccgtgcgcctatcgtcgagggtttacttacctgggcatctccgagccggtttcgactccttgatgctcctggtctcttggcagctgtggaagaaatggaactccagggttctctcttctgtctatgtggtcttggagtctattctttcggatgtaacagcgtgcaacgctactcggcaactaaaactgacaagaacaagagcagcgatctgatcattcagcctcaaattaacgacgttacagaggagagcaaccagaggcctaccgatagcagtgagatcaaccctactgttggtgtttttggggaacattatttgttctggactcaacacatttgtcagcttagcagccaccgtgatggcaccatatacaacaaccagctttattggaaaaataattatgatatcgatgtcactaaccgtgaagagacacgggatcatgtcgactcaatgcttaattatgttttcaatcgcagcagagatgatcccatcgccgtgaaccagggttctcttatcgaaatgactggccctaagagaggcattgcactgatccccgaatgtctgtttgagtttgacatgagaatcaaaactggggagaaagaagaagatgatctacagctgatcgacggaatgatagagttggacgaaatgagaatgcccgagacgccgtacacaactcgcatcaatggcgattctggctccgtcgacctgtgtttagcgaatgtttctaacggagtagaggcaacggtggaagttgtcatatcggaactgatggtgaatggttttgatctatcgatcagctgtgttgtttcaagttcaaggtacgaatacgatgaaagtaaagagtttcagatattcggtggcagtattggtgaggcgtgtggcctaagaaggtttgtgttggctgtctacttggacactgatgcagctgaagttgaagttttggttgcctgcagtctgtacccctaa

SEQ ID NO: 46284 - DNA, 502 bp, Oryza sativa
  Clone ID: PAT_MRT4530_49165C.1
aaccacagaatcagtataatatacgagtagttgttatacatggaagaactgggtaacaacatcaattgtctgatggcagtagtaaacaaaataactgctaactgccacatagtactatattctctagtataattaggcgcaccactaaattatttatatatatatagagtagtattatatatagtagtatatcacaatacttcatatgctgccactttttcttccataagggctaatggcatcttcttcttctcgtgttgtttaatggagctatccactaaaaggtgagagaagcttaaaaacgaaaagaaaggggagctaaacatcctaaaaactacgctgacactccactccttttttcccctatattccgataacactttctttgcttcatgtattctatgatttctggagagggtttcagccacttccattgtggactactttacatcccgatcgccccgtgctcggacagcctgggcatggggaagaagcaggtcct

SEQ ID NO: 46285 - DNA, 320 bp, Oryza sativa
  Clone ID: PAT_MRT4530_49166C.1
ccaccacctcgactcggcgggaggagaaggatacgcgattacaggggaaggtgcccgatcctgccattcctaaggctctggcagaagtggactgagccagggcaaggtggtggaggagtagttcgggcaattgggaaaggtactgctggtcaggagtctgaatttgctgttcgaaaatcccgcagaatgacccctgcccatggaggccttgtacacaatgacaactacaacaggcgtgagtacggggtccaagtcctgatcgaaggtatacctgggatgacccgcctcaatgctcgtcaacatcatgcaagacgcttcat

SEQ ID NO: 46286 - DNA, 393 bp, Oryza sativa
  Clone ID: PAT_MRT4530_49167C.1
atggcgcggcctcacctccatgttgctattgacactttccacagggatgtaggtgtcatcgttattggcttcttcgtgcggagagggagtgcgccgtgccgctgccacctcttcttccgccccagctcctccactcccccctccatccagacatcgtctcctcatggcgtcctcctccactatcctcacatagagccatcattgctgccaccaatggtccttcaccaagccgccaaggcctcctcctccccgttgcctcaccgttttggtcaaggcctggtggcgcgtggtgagggggtggactgtgcgcactgggttgcatccgtcaccaatggtagtctccacctacccgttgccctgccgcgcctaccaatgcttggtggctcgaggtga

SEQ ID NO: 46287 - DNA, 654 bp, Oryza sativa
  Clone ID: PAT_MRT4530_49168C.1
atggtgaccacccggagcatggcagtgagggaaaagatgatgaagaggaagaggttgtcaccgctgcaaggccatgcacgcggcggtcaaggagcgcgacgtcgggaaacgtgtgcgctggagaggctagataacatgaagtgggtggagaacgagcgctacctcgtcgccgcggacaacccggacacttgcttcatcatcggtgtcacgctcgtcttcgcacagcaggacatggcccagggccttttcctccttgacaaggctgccaccgcgggccacaagacagcggcctacgtgctcggcctcctcctctacaagtccgatgaggctcgcgccactgggaaaaagtacatcagccaagttgagggcgacggtgatgaggcggcgacgaccgatgccgggaacaagaggaccaaccaggagtgccgacggtgccgaaagatcgctgaggatgccgtccaggaggtgatgtggaaggtcgttaggaggcgtggccaattgctagtcctacctgaggacaaccaccagtgcacaaccatcggttgtggtctggagttgggatgggaaggctacgaaggcttttgcagtgacagttgtaggattaagcatgaatactccaagttcttcacagaggtgatgaactacttgccatag

SEQ ID NO: 46288 - DNA, 929 bp, Oryza sativa
  Clone ID: PAT_MRT4530_49169C.1
tagtgcaccaacacgccatatactagtttcagaattgagacacactgatcattgtgagagagaagtagaccaaacaaggcaagctcgcatggcttcgggcattagcaggactccggccacgggtgtcaccgccggcggcggcgacgacgaggaggcggcatggttgcacgcgcttgagctgatctcgggcttcaccgtctccatgacactgaaggcggcgatccagctcggactcatcgacgcacttaccgccgccgccgacggccgcgcgctgaccgccggcgagctggttgcgcagctcccggcggtggacgatgccgaggcggcgacctcggtggaccggatgctgcggctcctggcgtcgttcaacgtcgtcaggtgctcgacggaggcggggcctggcggtgatcctctccggcgctactcgccggcgcctgtgtgcaggtggttcaccgccggcgacaaccaccaagggtctctggcacccaggctcatgctcgacgtcgacgaagacaatctgagcacctggcatcagatggcggcggcggtcgtcagcggtgggccatcggcgttcgagagggcgcacgggatgccattgtttgagtacatggggacgaaccaccggttcaatatgctgttcaaccaggccatgtcgcagcagtccatgatggtgatgaacaagctgctagaccgcttccatgggtttgatggcatcagtgtcctcgtcgacgtcggcgggggcaccggcgtcaccctgaagatgatcatctcccggtataagcacattactggtgtcaacttcgacttaccccacgtcatatctcaggctccatctcttccgggatgggtgcagggtagatgggaggagttccctgtgcagtacgccccagtggcggtggcaaagcggtgaaaaaaaaaaaaaaaaaaaa
